(19) United States
(12) Patent Application Publication
(10) Pub. No.: US 2008/0168583 A1
(43) Pub. Date: Jul. 10, 2008

(54) Nucleic acid molecules and other molecules associated with plants

(76) Inventors: Karen L. Fincher, Wildwood, MO (US); Thomas J. La Rosa, Fenton, MO (US); David W. McCarter, Chesterfield, MO (US); Julie R. Pear, Davis, CA (US)

Correspondence Address: ARNOLD & PORTER, LLP, 555 TWELFTH STREET, N.W., ATTN: IP DOCKETING, WASHINGTON, DC, 20004, US

(21) Appl. No.: 12/073,060

(22) Filed: Feb. 28, 2008

Related U.S. Application Data
(63) Continuation of application No. 11/331,019, filed on Jan. 13, 2006.
Application No. 11/331,019 is a continuation of application No. 09/637,086, filed on Aug. 11, 2000, now abandoned.
(60) Provisional application No. 60/149,881, filed on Aug. 19, 1999.

(51) Int. Cl. A01H 1/00; C07H 21/04; C07K 2/00; C12N 5/10; A01H 5/00

(52) U.S. Cl. 800/278; 536/23.1; 530/300; 800/298; 800/314; 800/312; 435/419

(57) ABSTRACT

Expressed Sequence Tags (ESTs) isolated from cotton are disclosed. The ESTs provide a unique molecular tool for the targeting and isolation of novel genes for plant protection and improvement. The disclosed ESTs have utility in the development of new strategies for understanding critical plant developmental and metabolic pathways. The disclosed ESTs have particular utility in isolating genes and promoters, identifying and mapping the genes involved in developmental and metabolic pathways, and determining gene function. Sequence homology analyses using the ESTs provided in the present invention, will result in more efficient gene screening for desirable agronomic traits. An expanding database of these select pieces of the plant genomics puzzle will quickly expand the knowledge necessary for subsequent functional validation, a key limitation in current plant biotechnology efforts.

### CROSS-REFERENCE TO RELATED APPLICATIONS

[0001] This application is a continuation under 35 U.S.C. § 120 of U.S. application Ser. No. 11/331,019 filed Jan. 13, 2006 (pending), which is hereby incorporated by reference in its entirety, including the sequence listing. U.S. Application No. 11,331,019 is a continuation of U.S. application Ser. No. 09/637,086 filed Aug. 11, 2000 (abandoned), Which claims priority to U.S. Provisional Appln. No. 60/149,881, filed Aug. 19, 1999 (expired). All of the foregoing applications are hereby incorporated by reference in their entirety, including their sequence listings.

### INCORPORATION OF SEQUENCE LISTING

[0002] This application contains a sequence listing, which is contained on three identical CD-ROMs: two copies of a sequence listing (Copy 1 and Copy 2) and a sequence listing Computer Readable Form (CRF), all of which are herein incorporated by reference. All three CD-ROMs each contain one file called “SequenceListing.txt” which is 33,408,800 bytes in size (measured in Windows XP) and which was created on Feb. 28, 2008.

### FIELD OF THE INVENTION

[0003] The present invention is in the field of plant biochemistry. More specifically the invention relates to nucleic acid molecules that encode proteins and fragments of proteins produced in plant cells, in particular, cotton plants. The invention also relates to proteins and fragments of proteins so encoded and antibodies capable of binding the proteins. The invention also relates to methods of using the nucleic acid molecules, proteins and fragments of proteins.

### BACKGROUND OF THE INVENTION

### I. Expressed Sequence Tag Nucleic Acid Molecules

[0004] Expressed sequence tags, or ESTs, are short sequences of randomly selected clones from a cDNA (or complementary DNA) library which are representative of the cDNA inserts of these randomly selected clones (McCombie et al., Nature Genetics, 1:124-130 (1992); Kurata et al., Nature Genetics, 8: 365-372 (1994); Okubo et al., Nature Genetics, 2: 173-179 (1992), all of which are incorporated herein by reference in their entirety).

[0005] Using conventional methodologies, cDNA libraries can be constructed from the mRNA (messenger RNA) of a given tissue or organism using poly dT primers and reverse transcriptase (Efstratiadis et al., Cell 7:279-288 (1976); Higuchi et al., Proc. Natl. Acad. Sci. (U.S.A.) 73:3146-3150 (1976); Maniatis et al., Cell 8:163 (1976); Land et al., Nucleic Acids Res. 9:2251-2266 (1981); Okayama et al., Mol. Cell. Biol. 2:161-170 (1982); Gubler et al., Gene 25:263 (1983), all of which are herein incorporated by reference in their entirety).

[0006] Several methods may be employed to obtain full-length cDNA constructs. For example, terminal transferase can be used to add homopolymeric tails of dC residues to the free 3′ hydroxyl groups (Land et al., Nucleic Acids Res. 9:2251-2266 (1981)). This tail can then be hybridized by a poly dG oligo which can act as a primer for the synthesis of full length second strand cDNA. Okayama and Berg, report a method for obtaining full length cDNA constructs. This method has been simplified by using synthetic primer-adapters that have both homopolymeric tails for priming the synthesis of the first and second strands and restriction sites for cloning into plasmids (Coleclough et al., Gene 34:305-314 (1985), herein incorporated by reference in its entirety) and bacteriophage vectors (Krawinkel et al., Nucleic Acids Res. 14:1913 (1986); Han et al., Nucleic Acids Res. 15:6304 (1987), both of which are herein incorporated by reference in their entirety).

[0007] These strategies have been coupled with additional strategies for isolating rare mRNA populations. For example, a typical mammalian cell contains between 10,000 and 30,000 different mRNA sequences. Davidson, Gene Activity in Early Development, 2nd ed., Academic Press, New York (1976). The number of clones required to achieve a given probability that a low-abundance mRNA will be present in a cDNA library is N=(ln(1−P))/(ln(1−1/n)) where N is the number of clones required, P is the probability desired, and 1/n is the fractional proportion of the total mRNA that is represented by a single rare mRNA. (Sambrook et al., Molecular Cloning: A Laboratory Manual, 2nd ed., Cold Spring Harbor Laboratory Press (1989), the entirety of which is herein incorporated by reference.).

[0008] A method to enrich preparations of mRNA for sequences of interest is to fractionate by size. One such method is to fractionate by electrophoresis through an agarose gel (Pennica et al., Nature 301:214-221 (1983), the entirety of which is herein incorporated by reference). Another such method employs sucrose gradient centrifugation in the presence of an agent, such as methylmercuric hydroxide, that denatures secondary structure in RNA (Schweinfest et al., Proc. Natl. Acad. Sci. (U.S.A.) 79:4997-5000 (1982), the entirety of which is herein incorporated by reference).

[0009] A frequently adopted method is to construct equalized or normalized cDNA libraries (Ko, Nucleic Acids Res. 18:5705-5711 (1990); Patanjali, S. R. et al., Proc. Natl. Acad. Sci. (U.S.A.) 88:1943-1947 (1991), both of which are herein incorporated by reference in their entirety). Typically, the cDNA population is normalized by subtractive hybridization (Schmid et al., J. Neurochem. 48:307-312 (1987); Fargnoli et al., Anal. Biochem. 187:364-373 (1990); Travis et al., Proc. Natl. Acad. Sci. (U.S.A.) 85:1696-1700 (1988); Kato, Eur. J. Neurosci. 2:704 (1990); and Schweinfest et al., Genet. Anal. Tech. Appl. 7:64 (1990), all of which are herein incorporated by reference in their entirety). Subtraction represents another method for reducing the population of certain sequences in the cDNA library. Swaroop et al., Nucleic Acids Res. 19:1954 (1991), the entirety of which is herein incorporated by reference).

[0010] ESTs can be sequenced by a number of methods. Two basic methods may be used for DNA sequencing, the chain termination method of Sanger et al., Proc. Natl. Acad. Sci. (U.S.A.) 74: 5463-5467 (1977), herein incorporated by reference in its entirety, and the chemical degradation method of Maxam and Gilbert, Proc. Nat. Acad. Sci. (U.S.A) 74: 560-564 (1977), herein incorporated by reference in its entirety. Automation and advances in technology such as the replacement of radioisotopes with fluorescence-based sequencing have reduced the effort required to sequence DNA (Craxton, Methods, 2: 20-26 (1991); Ju et al., Proc. Natl. Acad. Sci. (U.S.A) 92: 4347-4351 (1995); Tabor and Richardson, Proc. Natl. Acad. Sci. (U.S.A.) 92: 6339-6343 (1995), all of which are herein incorporated by reference in their entirety). Automated sequencers are available from, for example, Pharmacia Biotech, Inc., Piscataway, N.J. (Pharmacia ALF), LI-COR, Inc., Lincoln, Nebr. (LI-COR 4,000) and Millipore, Bedford, Mass. (Millipore BaseStation).

[0011] In addition, advances in capillary gel electrophoresis have also reduced the effort required to sequence DNA and such advances provide a rapid high resolution approach for sequencing DNA samples (Swerdlow and Gesteland, Nucleic Acids Res. 18:1415-1419 (1990); Smith, Nature 349:812-813 (1991); Luckey et al., Methods Enzymol. 218:154-172 (1993); Lu et al., J. Chromatog. A. 680:497-501 (1994); Carson et al., Anal. Chem. 65:3219-3226 (1993); Huang et al., Anal. Chem. 64:2149-2154 (1992); Kheterpal et al., Electrophoresis 17:1852-1859 (1996); Quesada and Zhang, Electrophoresis 17:1841-1851 (1996); Baba, Yakugaku Zasshi 117:265-281 (1997), all of which are herein incorporated by reference in their entirety).

[0012] ESTs longer than 150 bases have been found to be useful for similarity searches and mapping. (Adams et al., Science 252:1651-1656 (1991), herein incorporated by reference.) EST sequences normally range from 150-450 bases. This is the length of sequence information that is routinely and reliably generated using single run sequence data. Typically, only single run sequence data is obtained from the cDNA library, Adams et al., Science 252:1651-1656 (1991). Automated single run sequencing typically results in an approximately 2-3% error or base ambiguity rate. (Boguski et al., Nature Genetics, 4:332-333 (1993), the entirety of which is herein incorporated by reference).

[0013] EST databases have been constructed or partially constructed from, for example, C. elegans (McCombrie et al., Nature Genetics 1:124-131 (1992), human liver cell line HepG2 (Okubo et al., Nature Genetics 2:173-179 (1992)), human brain RNA (Adams et al., Science 252:1651-1656 (1991); Adams et al., Nature 355:632-635 (1992)), Arabidopsis, (Newman et al., Plant Physiol. 106:1241-1255 (1994)); and rice (Kurata et al., Nature Genetics 8:365-372 (1994).

### II. Sequence Comparisons

[0014] A characteristic feature of a protein or DNA sequence is that it can be compared with other known protein or DNA sequences. Sequence comparisons can be undertaken by determining the similarity of the test or query sequence with sequences in publicly available or propriety databases (“similarity analysis”) or by searching for certain motifs (“intrinsic sequence analysis”) (e.g. cis elements) (Coulson, Trends in Biotechnology, 12: 76-80 (1994); Birren et al., Genome Analysis, 1: 543-559 (1997), both of which are herein incorporated by reference in their entirety).

[0015] Similarity analysis includes database search and alignment. Examples of public databases include the DNA Database of Japan (DDBJ)(on the Worldwide web at ddbj.nig.ac.jp/); Genebank (on the Worldwide web at ncbi.nlm.nih.gov/web/Genbank/Index.htlm); and the European Molecular Biology Laboratory Nucleic Acid Sequence Database (EMBL) (on the Worldwide web at ebi.ac.uk/ebi_docs/embl_db.html). A number of different search algorithms have been developed, one example of which are the suite of programs referred to as BLAST programs. There are five implementations of BLAST, three designed for nucleotide sequences queries (BLASTN, BLASTX, and TBLASTX) and two designed for protein sequence queries (BLASTP and TBLASTN) (Coulson, Trends in Biotechnology, 12: 76-80 (1994); Birren et al., Genome Analysis, 1: 543-559 (1997)).

[0016] BLASTN takes a nucleotide sequence (the query sequence) and its reverse complement and searches them against a nucleotide sequence database. BLASTN was designed for speed, not maximum sensitivity, and may not find distantly related coding sequences. BLASTX takes a nucleotide sequence, translates it in three forward reading frames and three reverse complement reading frames, and then compares the six translations against a protein sequence database. BLASTX is useful for sensitive analysis of preliminary (single-pass) sequence data and is tolerant of sequencing errors (Gish and States, Nature Genetics, 3: 266-272 (1993), the entirety of which is herein incorporated by reference). BLASTN and BLASTX may be used in concert for analyzing EST data (Coulson, Trends in Biotechnology, 12: 76-80 (1994); Birren et al., Genome Analysis, 1: 543-559 (1997)).

[0017] Given a coding nucleotide sequence and the protein it encodes, it is often preferable to use the protein as the query sequence to search a database because of the greatly increased sensitivity to detect more subtle relationships. This is due to the larger alphabet of proteins (20 amino acids) compared with the alphabet of nucleic acid sequences (4 bases), where it is far easier to obtain a match by chance. In addition, with nucleotide alignments, only a match (positive score) or a mismatch (negative score) is obtained, but with proteins, the presence of conservative amino acid substitutions can be taken into account. Here, a mismatch may yield a positive score if the non-identical residue has physical/chemical properties similar to the one it replaced. Various scoring matrices are used to supply the substitution scores of all possible amino acid pairs. A general purpose scoring system is the BLOSUM62 matrix (Henikoff and Henikoff, Proteins, 17: 49-61 (1993), the entirety of which is herein incorporated by reference), which is currently the default choice for BLAST programs. BLOSUM62 is tailored for alignments of moderately diverged sequences and thus may not yield the best results under all conditions. Altschul, J. Mol. Biol. 36: 290-300 (1993), the entirety of which is herein incorporated by reference, uses a combination of three matrices to cover all contingencies. This may improve sensitivity, but at the expense of slower searches. In practice, a single BLOSUM62 matrix is often used but others (PAM40 and PAM250) may be attempted when additional analysis is necessary. Low PAM matrices are directed at detecting very strong but localized sequence similarities, whereas high PAM matrices are directed at detecting long but weak alignments between very distantly related sequences.

[0018] Homologues in other organisms are available that can be used for comparative sequence analysis. Multiple alignments are performed to study similarities and differences in a group of related sequences. CLUSTAL W is a multiple sequence alignment package available that performs progressive multiple sequence alignments based on the method of Feng and Doolittle, J. Mol. Evol. 25: 351-360 (1987), the entirety of which is herein incorporated by reference. Each pair of sequences is aligned and the distance between each pair is calculated; from this distance matrix, a guide tree is calculated, and all of the sequences are progressively aligned based on this tree. A feature of the program is its sensitivity to the effect of gaps on the alignment; gap penalties are varied to encourage the insertion of gaps in probable loop regions instead of in the middle of structured regions. Users can specify gap penalties, choose between a number of scoring matrices, or supply their own scoring matrix for both the pairwise alignments and the multiple alignments. CLUSTAL W for UNIX and VMS systems is available at: ftp.ebi.ac.uk. Another program is MACAW (Schuler et al., Proteins, Struct. Func. Genet, 9:180-190 (1991), the entirety of which is herein incorporated by reference, for which both Macintosh and Microsoft Windows versions are available. MACAW uses a graphical interface, provides a choice of several alignment algorithms, and is available by anonymous ftp at: ncbi.nlm.nih.gov (directory/pub/macaw).

[0019] Sequence motifs are derived from multiple alignments and can be used to examine individual sequences or an entire database for subtle patterns. With motifs, it is sometimes possible to detect distant relationships that may not be demonstrable based on comparisons of primary sequences alone. Currently, the largest collection of sequence motifs in the world is PROSITE (Bairoch and Bucher, Nucleic Acid Research, 22: 3583-3589 (1994), the entirety of which is herein incorporated by reference.) PROSITE may be accessed via either the ExPASy server on the World Wide Web or anonymous ftp site. Many commercial sequence analysis packages also provide search programs that use PROSITE data.

[0020] A resource for searching protein motifs is the BLOCKS E-mail server developed by S. Henikoff, Trends Biochem Sci., 18:267-268 (1993), the entirety of which is herein incorporated by reference; Henikoff and Henikoff, Nucleic Acid Research, 19:6565-6572 (1991), the entirety of which is herein incorporated by reference; Henikoff and Henikoff, Proteins, 17: 49-61 (1993). BLOCKS searches a protein or nucleotide sequence against a database of protein motifs or “blocks.” Blocks are defined as short, ungapped multiple alignments that represent highly conserved protein patterns. The blocks themselves are derived from entries in PROSITE as well as other sources. Either a protein or nucleotide query can be submitted to the BLOCKS server; if a nucleotide sequence is submitted, the sequence is translated in all six reading frames and motifs are sought in these conceptual translations. Once the search is completed, the server will return a ranked list of significant matches, along with an alignment of the query sequence to the matched BLOCKS entries.

[0021] Conserved protein domains can be represented by two-dimensional matrices, which measure either the frequency or probability of the occurrences of each amino acid residue and deletions or insertions in each position of the domain. This type of model, when used to search against protein databases, is sensitive and usually yields more accurate results than simple motif searches. Two popular implementations of this approach are profile searches (such as GCG program ProfileSearch) and Hidden Markov Models (HMMs)(Krough et al., J. Mol. Biol. 235:1501-1531 (1994); Eddy, Current Opinion in Structural Biology 6:361-365 (1996), both of which are herein incorporated by reference in their entirety). In both cases, a large number of common protein domains have been converted into profiles, as present in the PROSITE library, or HHM models, as in the Pfam protein domain library (Sonnhammer et al., Proteins 28:405-420 (1997), the entirety of which is herein incorporated by reference). Pfam contains more than 500 HMM models for enzymes, transcription factors, signal transduction molecules, and structural proteins. Protein databases can be queried with these profiles or HMM models, which will identify proteins containing the domain of interest. For example, HMMSW or HMMFS, two programs in a public domain package called HMMER (Sonnhammer et al., Proteins 28:405-420 (1997)) can be used.

[0022] PROSITE and BLOCKS represent collected families of protein motifs. Thus, searching these databases entails submitting a single sequence to determine whether or not that sequence is similar to the members of an established family. Programs working in the opposite direction compare a collection of sequences with individual entries in the protein databases. An example of such a program is the Motif Search Tool, or MoST (Tatusov et al. Proc. Natl. Acad. Sci. 91: 12091-12095 (1994), the entirety of which is herein incorporated by reference.) On the basis of an aligned set of input sequences, a weight matrix is calculated by using one of four methods (selected by the user); a weight matrix is simply a representation, position by position in an alignment, of how likely a particular amino acid will appear. The calculated weight matrix is then used to search the databases. To increase sensitivity, newly found sequences are added to the original data set, the weight matrix is recalculated, and the search is performed again. This procedure continues until no new sequences are found.

### SUMMARY OF THE INVENTION

[0023] The present invention provides a substantially purified nucleic acid molecule that encodes a cotton protein or fragment thereof comprising a nucleic acid sequence selected from the group consisting of SEQ ID NO: 1 through SEQ ID NO: 52949.

[0024] The present invention also provides one or more substantially purified nucleic acid molecules comprising a nucleic acid sequence selected from the group consisting of SEQ ID NO: 1 through SEQ ID NO:52949 or complements thereof.

[0025] The present invention also provides a substantially purified cotton protein or fragment thereof, wherein said cotton protein is encoded by a nucleic acid molecule that comprises a nucleic acid sequence selected from the group consisting of SEQ ID NO: 1 through SEQ ID NO: 52949.

[0026] The present invention further provides a substantially purified protein, peptide, or fragment thereof encoded by a nucleic acid sequence which specifically hybridizes to a nucleic acid molecule comprising a nucleic acid sequence selected from the group consisting of a complement of SEQ ID NO: 1 through SEQ ID NO:52949.

[0027] The present invention further provides a substantially purified antibody capable of specifically binding to a protein or fragment thereof encoded by a nucleic acid sequence which specifically hybridizes to a nucleic acid molecule having a nucleic acid sequence selected from the group consisting of a complement of SEQ ID NO: 1 through SEQ ID NO:52949.

[0028] The present invention also provides a transformed plant transformed to contain a nucleic acid molecule which comprises: (A) an exogeneous promoter region which functions in plant cells to cause the production of an mRNA molecule; which is linked to (B) a structural nucleic acid molecule, wherein said structural nucleic acid molecule comprises a nucleic acid molecule that encodes a protein, peptide, or fragment thereof which hybridizes to a nucleic acid sequence selected from the group consisting of a complement of SEQ ID NO: 1 through SEQ ID NO:52949 expressed in an effective amount to produce a desirable agronomic effect; which is linked to (C) a 3′ non-translated sequence that functions in plant cells to cause the termination of transcription and the addition of polyadenylated ribonucleotides to the 3′ end of the mRNA sequence.

[0029] The present invention also provides a transformed plant cell containing a nucleic acid molecule whose non-transcribed strand encodes a protein or fragment thereof, wherein the transcribed strand of said nucleic acid is complementary to a nucleic acid molecule that encodes a protein or fragment thereof. The present invention also provides bacterial, viral, microbial, and plant cells comprising a nucleic acid molecule of the present invention

[0030] The present invention also provides a method of producing a plant containing one or more proteins encoded by sequences comprising SEQ ID NO:1 or complement thereof through SEQ ID NO:52949 or complements thereof, expressed in a sufficient amount and/or fashion to produce a desirable agronomic effect.

[0031] In accomplishing the foregoing, there is provided, in accordance with one aspect of the present invention, methods of producing genetically transformed plants, comprising the steps of:
[0032] (a) inserting into the genome of a plant cell a recombinant, double-stranded DNA molecule comprising
   [0033] (i) a promoter which functions in plant cells to cause the production of an RNA sequence,
   [0034] (ii) a structural DNA sequence that causes the production of an RNA sequence which encodes a desired protein.
   [0035] (iii) a 3′ non-translated DNA sequence which functions in plant cells to cause the addition of polyadenylated nucleotides to the 3′ end of RNA sequence; where the promoter is homologous or heterologous with respect to the coding sequence and adapted to cause sufficient expression of a protein in desired plant tissues to enhance the agronomic utility of a plant transformed with said gene.
[0036] (b) obtaining a transformed plant cell with said nucleic acid molecule that encodes one or more proteins, wherein said nucleic acid molecule is transcribed and results in expression of said protein(s); and
[0037] (c) regenerating from the transformed plant cell a genetically transformed plant

[0038] The present invention also encompasses differentiated plants, seeds, and progeny comprising said transformed plant cells and which exhibit novel properties of agronomic significance.

[0039] The present invention also provides a method of producing a plant containing reduced levels of a protein comprising: (A) transforming a plant cell with a nucleic acid molecule that encodes a protein, wherein said nucleic acid molecule is transcribed and results in co-suppression of endogenous protein synthesis activity, and (B) regenerating plants and producing subsequent progeny from the transformed plant.

[0040] The present invention also provides a method of determining an association between a polymorphism and a plant trait comprising: (A) hybridizing a nucleic acid molecule specific for a polymorphism to genetic material of a plant, wherein said nucleic acid molecule comprising a nucleic acid sequence selected from the group consisting of SEQ ID NO: 1 through SEQ ID NO:52949 or complements thereof; and (B) calculating the degree of association between the polymorphism and the plant trait.

[0041] The present invention also provides a method of isolating a genetic region, or nucleic acid that encodes a protein or fragment thereof comprising: (A) incubating under conditions permitting nucleic acid hybridization: a marker nucleic acid molecule, preferably an EST, with a complementary nucleic acid molecule obtained from a plant cell or plant tissue; (B) permitting hybridization between said marker nucleic acid molecule, preferably an EST, and said complementary nucleic acid molecule obtained from said plant cell or plant tissue; and (C) isolating said complementary nucleic acid molecule.

[0042] The present invention also provides a method for determining a level or pattern in a plant cell of a protein in a plant comprising: (A) incubating, under conditions permitting nucleic acid hybridization, a marker nucleic acid molecule, the marker nucleic acid molecule selected from the group of marker nucleic acid molecules which specifically hybridize to a nucleic acid molecule having the nucleic acid sequence selected from the group consisting of SEQ ID NO: 1 through SEQ ID NO: 52949 or complements thereof or fragments of either, with a complementary nucleic acid molecule obtained from the plant cell or plant tissue, wherein nucleic acid hybridization between the marker nucleic acid molecule and the complementary nucleic acid molecule obtained from the plant cell or plant tissue permits the detection of an mRNA for the enzyme; (B) permitting hybridization between the marker nucleic acid molecule and the complementary nucleic acid molecule obtained from the plant cell or plant tissue; and (C) detecting the level or pattern of the complementary nucleic acid, wherein the detection of the complementary nucleic acid is predictive of the level or pattern of the protein.

[0043] The present invention also provides a method for determining the level or pattern of a protein in a plant cell or plant tissue comprising: (A) incubating under conditions permitting nucleic acid hybridization: a marker nucleic acid molecule, the marker nucleic acid molecule comprising a nucleotide sequence selected from the group consisting of SEQ ID NO: 1 through SEQ ID NO:52949 or complements thereof, with a complementary nucleic acid molecule obtained from a plant cell or plant tissue, wherein nucleic acid hybridization between the marker nucleic acid molecule, and the complementary nucleic acid molecule obtained from the plant cell or plant tissue permits the detection of said protein; (B) permitting hybridization between the marker nucleic acid molecule and the complementary nucleic acid molecule obtained from the plant cell or plant tissue; and (C) detecting the level or pattern of the complementary nucleic acid, wherein the detection of said complementary nucleic acid is predictive of the level or pattern of the protein synthesis.

[0044] The present invention also provides a method for determining a level or pattern of a protein in a plant cell or plant tissue which comprises assaying the concentration of a molecule, whose concentration is dependent upon the expression of a gene, the gene having a nucleic acid sequence which specifically hybridizes to a protein marker nucleic acid molecule, the molecule being present in a plant cell or plant tissue, in comparison to the concentration of that molecule present in a plant cell or plant tissue with a known level or pattern of said protein, wherein an assayed concentration of the molecule is compared to the assayed concentration of the molecule in a plant cell or plant tissue with a known level or pattern of said protein.

[0045] The present invention also provides a method of determining a mutation in a plant whose presence is predictive of a mutation affecting a level or pattern of a protein comprising the steps: (A) incubating, under conditions permitting nucleic acid hybridization, a marker nucleic acid, the marker nucleic acid selected from the group of marker nucleic acid molecules which specifically hybridize to a nucleic acid molecule consisting of the nucleic acid sequence selected from the group consisting of SEQ ID NO: 1 through SEQ ID NO: 52949 or complements thereof or fragments of either and a complementary nucleic acid molecule obtained from the plant, wherein nucleic acid hybridization between the marker nucleic acid molecule and the complementary nucleic acid molecule obtained from the plant permits the detection of a polymorphism whose presence is predictive of a mutation affecting the level or pattern of the protein in the plant; (B) permitting hybridization between the marker nucleic acid molecule and the complementary nucleic acid molecule obtained from the plant; and (C) detecting the presence of the polymorphism, wherein the detection of the polymorphism is predictive of the mutation.

[0046] The present invention also provides a method for determining a mutation in a plant whose presence is predictive of a mutation affecting the level or pattern of protein synthesis comprising the steps: (A) incubating under conditions permitting nucleic acid hybridization: a marker nucleic acid molecule, the marker nucleic acid molecule comprising a nucleic acid molecule that is linked to gene, the gene having a nucleic acid sequence which specifically hybridizes to a sequence selected from the group consisting of SEQ ID NO: 1 through SEQ ID NO:52949 and complements thereof, and a complementary nucleic acid molecule obtained from a plant tissue or plant cell of the plant, wherein nucleic acid hybridization between the marker nucleic acid molecule and the complementary nucleic acid molecule obtained from the plant permits the detection of a polymorphism whose presence is predictive of a mutation affecting said level or pattern of a protein synthesis in the plant; (B) permitting hybridization between said marker nucleic acid molecule and said complementary nucleic acid molecule obtained from said plant; and; (C) detecting the presence of the polymorphism, wherein the detection of the polymorphism is predictive of the mutation.

[0047] The present invention also provides a method for reducing expression of a protein in a plant cell, the method comprising: growing a transformed plant cell containing a nucleic acid molecule whose non-transcribed strand encodes a protein or fragment thereof, wherein the transcribed strand of said nucleic acid is complementary to a nucleic acid molecule that encodes the protein in said plant cell, and whereby the strand that is complementary to the nucleic acid molecule that encodes the protein reduces or depresses expression of the protein.

[0048] The present invention provides cotton nucleic acid molecules for use as molecular tags to isolate genetic regions (i.e. promoters and flanking sequences), isolate genes, map genes, and determine gene function. The present invention further provides cotton nucleic acid molecules for use in determining if genes are members of a particular gene family.

[0049] The present invention also provides a method of obtaining full length genes using cotton ESTs or complements thereof or fragments of either.

[0050] The present invention also provides a method of isolating promoters and flanking sequences using cotton ESTs or complements thereof or fragments of either.

[0051] The present invention also provides cotton ESTs or complements thereof or fragments of either for use in marker-assisted breeding programs.

[0052] The present invention also provides a method of identifying tissues comprising hybridizing nucleic acids from the tissue with cotton ESTs or complements thereof or fragments of either.

[0053] The present invention also provides a method for production of antibodies targeted against the proteins, peptides, or fragments produced by the disclosed or complements thereof or fragments of either.

[0054] The present invention also provides a method for the transformation and regeneration of plants comprising sequences hybridizable to the disclosed ESTs or complements thereof or fragments of either.

[0055] The present invention also provides a method of modifying plant protein expression by inserting in a chimeric gene sense or antisense constructs of the cotton ESTs.

### DETAILED DESCRIPTION OF THE INVENTION

### Agents

[0056] (a) Nucleic Acid Molecules

[0057] Agents of the present invention include nucleic acid molecules and more specifically EST nucleic acid molecules or nucleic acid fragment molecules thereof. Fragment EST nucleic acid molecules may encode significant portion(s) of, or indeed most of, the EST nucleic acid molecule. Alternatively, the fragments may comprise smaller oligonucleotides (having from about 15 to about 250 nucleotide residues, and more preferably, about 15 to about 30 nucleotide residues).

[0058] A subset of the nucleic acid molecules of the present invention includes nucleic acid molecules that are marker molecules. Another subset of the nucleic acid molecules of the present invention include nucleic acid molecules that encode a protein or fragment thereof. Another subset of the nucleic acid molecules of the present invention are EST molecules.

[0059] The term “substantially purified”, as used herein, refers to a molecule separated from substantially all other molecules normally associated with it in its native state. More preferably a substantially purified molecule is the predominant species present in a preparation. A substantially purified molecule may be greater than 60% free, preferably 75% free, more preferably 90% free, and most preferably 95% free from the other molecules (exclusive of solvent) present in the natural mixture. The term “substantially purified” is not intended to encompass molecules present in their native state.

[0060] The agents of the present invention will preferably be “biologically active” with respect to either a structural attribute, such as the capacity of a nucleic acid to hybridize to another nucleic acid molecule, or the ability of a protein to be bound by antibody (or to compete with another molecule for such binding). Alternatively, such an attribute may be catalytic, and thus involve the capacity of the agent to mediate a chemical reaction or response.

[0061] The agents of the present invention may also be recombinant. As used herein, the term recombinant means any agent (e.g. DNA, peptide etc.), that is, or results, however indirect, from human manipulation of a nucleic acid molecule.

[0062] It is understood that the agents of the present invention may be labeled with reagents that facilitate detection of the agent (e.g. fluorescent labels (Prober et al., Science 238:336-340 (1987); Albarella et al., EP 144914, chemical labels (Sheldon et al., U.S. Pat. No. 4,582,789; Albarella et al., U.S. Pat. No. 4,563,417, modified bases (Miyoshi et al., EP 119448, all of which are hereby incorporated by reference in their entirety).

[0063] It is further understood, that the present invention provides bacterial, viral, microbial, and plant cells comprising the agents of the present invention.

[0064] Nucleic acid molecules or fragment thereof of the present invention are capable of specifically hybridizing to other nucleic acid molecules under certain circumstances. As used herein, two nucleic acid molecules are said to be capable of specifically hybridizing to one another if the two molecules are capable of forming an anti-parallel, double-stranded nucleic acid structure. A nucleic acid molecule is said to be the “complement” of another nucleic acid molecule if they exhibit complete complementarity. As used herein, molecules are said to exhibit “complete complementarity” when every nucleotide of one of the molecules is complementary to a nucleotide of the other. Two molecules are said to be “minimally complementary” if they can hybridize to one another with sufficient stability to permit them to remain annealed to one another under at least conventional “low-stringency” conditions. Similarly, the molecules are said to be “complementary” if they can hybridize to one another with sufficient stability to permit them to remain annealed to one another under conventional “high-stringency” conditions. Conventional stringency conditions are described by Sambrook et al., In: Molecular Cloning, A Laboratory Manual, 2nd Edition, Cold Spring Harbor Press, Cold Spring Harbor, N.Y. (1989), and by Haymes et al. In: Nucleic Acid Hybridization, A Practical Approach, IRL Press, Washington, D.C. (1985), the entirety of which is herein incorporated by reference. Departures from complete complementarity are therefore permissible, as long as such departures do not completely preclude the capacity of the molecules to form a double-stranded structure. Thus, in order for an nucleic acid molecule or fragment of the present invention to serve as a primer or probe it need only be sufficiently complementary in sequence to be able to form a stable double-stranded structure under the particular solvent and salt concentrations employed.

[0065] Appropriate stringency conditions which promote DNA hybridization are, for example, 6.0× sodium chloride/sodium citrate (SSC) at about 45° C., followed by a wash of 2.0×SSC at 50° C., are known to those skilled in the art or can be found in Current Protocols in Molecular Biology, John Wiley & Sons, N.Y. (1989), 6.3.1-6.3.6. For example, the salt concentration in the wash step can be selected from a low stringency of about 2.0×SSC at 50° C. to a high stringency of about 0.2×SSC at 50° C. In addition, the temperature in the wash step can be increased from low stringency conditions at room temperature, about 22° C., to high stringency conditions at about 65° C. Both temperature and salt may be varied, or either the temperature or the salt concentration may be held constant while the other variable is changed.

[0066] In a preferred embodiment, a nucleic acid of the present invention will specifically hybridize to one or more of the nucleic acid molecules set forth in SEQ ID NO: 1 through SEQ ID NO: 52949 or complements thereof under moderately stringent conditions, for example, at about 2.0×SSC and about 65° C.

[0067] In a particularly preferred embodiment, a nucleic acid of the present invention will include those nucleic acid molecules that specifically hybridize to one or more of the nucleic acid molecules set forth in SEQ ID NO: 1 through SEQ ID NO: 52949 or complements thereof under high stringency conditions.

[0068] In one aspect of the present invention, the nucleic acid molecules of the present invention have one or more of the nucleic acid sequences set forth in SEQ ID NO: 1 through SEQ ID NO:52949 or complements thereof. In another aspect of the present invention, one or more of the nucleic acid molecules of the present invention share between 100% and 90% sequence identity with one or more of the nucleic acid sequences set forth in SEQ ID NO: 1 through SEQ ID NO:52949 or complements thereof. In a further aspect of the present invention, one or more of the nucleic acid molecules of the present invention share between 100% and 95% sequence identity with one or more of the nucleic acid sequences set forth in SEQ ID NO: 1 through SEQ ID NO:52949 or complements thereof. In a more preferred aspect of the present invention, one or more of the nucleic acid molecules of the present invention share between 100% and 98% sequence identity with one or more of the nucleic acid sequences set forth in SEQ ID NO: 1 through SEQ ID NO:52949 or complements thereof. In an even more preferred aspect of the present invention, one or more of the nucleic acid molecules of the present invention share between 100% and 99% sequence identity with one or more of the sequences set forth in SEQ ID NO: 1 through SEQ ID NO:52949 or complements thereof. In a further, even more preferred aspect of the present invention, one or more of the nucleic acid molecules of the present invention exhibit 100% sequence identity with one or more nucleic acid molecules present within the cDNA libraries designated LIB3083, LIB3120, LIB3135, LIB3145, LIB3146, LIB3147, LIB3148, LIB3149, LIB3165, LIB3189, LIB3196 and LIB3197 (Monsanto Company, St. Louis, Mo., United States of America).

[0069] In a preferred embodiment of the present invention, a cotton protein or fragment thereof of the present invention is a homologue of another plant protein. In another preferred embodiment of the present invention, a cotton protein or fragment thereof of the present invention is a homologue of a fungal protein. In another preferred embodiment of the present invention, a cotton protein or fragment thereof of the present invention is a homologue of a mammalian protein. In another preferred embodiment of the present invention, a cotton protein or fragment thereof of the present invention is a homologue of a bacterial protein. In another preferred embodiment of the present invention, a cotton protein or fragment thereof of the present invention is a homologue of an algal protein. In another preferred embodiment of the present invention, a cotton protein or fragment thereof of the present invention is a homologue of a soybean protein. In another preferred embodiment of the present invention, a cotton protein or fragment thereof of the present invention is a homologue of a maize protein. In another preferred embodiment of the present invention, a cotton protein or fragment thereof of the present invention is a homologue of a wheat protein.

[0070] In a preferred embodiment of the present invention, the nucleic molecule of the present invention encodes a cotton protein or fragment thereof where a cotton protein or fragment thereof exhibits a BLAST probability score of greater than 1E-12, preferably a BLAST probability score of between about 1E-30 and about 1E-12, even more preferably a BLAST probability score of greater than 1E-30 with its homologue.

[0071] In another preferred embodiment of the present invention, the nucleic acid molecule encoding a cotton protein or fragment thereof exhibits a % identity with its homologue of between about 25% and about 40%, more preferably of between about 40 and about 70%, even more preferably of between about 70% and about 90% and even more preferably between about 90% and 99%. In another preferred embodiment, of the present invention, a cotton protein or fragment thereof exhibits a % identity with its homologue of 100%.

[0072] In a preferred embodiment of the present invention, the nucleic molecule of the present invention encodes a cotton protein or fragment thereof where the cotton protein exhibits a BLAST score of greater than 120, preferably a BLAST score of between about 1450 and about 120, even more preferably a BLAST score of greater than 1450 with its homologue.

[0073] Nucleic acid molecules of the present invention also include non-cotton homologues. Preferred non-cotton homologues are selected from the group consisting of alfalfa, Arabidopsis, barley, Brassica, broccoli, cabbage, citrus, garlic, oat, oilseed rape, onion, canola, flax, an ornamental plant, maize, pea, peanut, pepper, potato, rice, rye, sorghum, soybean, strawberry, sugarcane, sugarbeet, tomato, wheat, poplar, pine, fir, eucalyptus, apple, lettuce, lentils, grape, banana, tea, turf grasses, sunflower, oil palm and Phaseolus.

[0074] The degeneracy of the genetic code, which allows different nucleic acid sequences to code for the same protein or peptide, is known in the literature. (U.S. Pat. No. 4,757,006, the entirety of which is herein incorporated by reference).

[0075] In an aspect of the present invention, one or more of the nucleic acid molecules of the present invention differ in nucleic acid sequence from those encoding a cotton protein or fragment thereof in SEQ ID NO: 1 through SEQ ID NO: 52949 due to the degeneracy in the genetic code in that they encode the same protein but differ in nucleic acid sequence.

[0076] In another further aspect of the present invention, nucleic acid molecules of the present invention can comprise sequences, which differ from those encoding a protein or fragment thereof in SEQ ID NO: 1 through SEQ ID NO: 52949 due to fact that the different nucleic acid sequence encodes a protein having one or more conservative amino acid changes. It is understood that codons capable of coding for such conservative amino acid substitutions are known in the art.

[0077] It is well known in the art that one or more amino acids in a native sequence can be substituted with another amino acid(s), the charge and polarity of which are similar to that of the native amino acid, i.e., a conservative amino acid substitution, resulting in a silent change. Conserved substitutes for an amino acid within the native polypeptide sequence can be selected from other members of the class to which the naturally occurring amino acid belongs. Amino acids can be divided into the following four groups: (1) acidic amino acids, (2) basic amino acids, (3) neutral polar amino acids, and (4) neutral nonpolar amino acids. Representative amino acids within these various groups include, but are not limited to, (1) acidic (negatively charged) amino acids such as aspartic acid and glutamic acid; (2) basic (positively charged) amino acids such as arginine, histidine, and lysine; (3) neutral polar amino acids such as glycine, serine, threonine, cysteine, cystine, tyrosine, asparagine, and glutamine; and (4) neutral nonpolar (hydrophobic) amino acids such as alanine, leucine, isoleucine, valine, proline, phenylalanine, tryptophan, and methionine.

[0078] Conservative amino acid changes within the native polypeptides sequence can be made by substituting one amino acid within one of these groups with another amino acid within the same group. Biologically functional equivalents of the proteins or fragments thereof of the present invention can have 10 or fewer conservative amino acid changes, more preferably seven or fewer conservative amino acid changes, and most preferably five or fewer conservative amino acid changes. The encoding nucleotide sequence will thus have corresponding base substitutions, permitting it to encode biologically functional equivalent forms of the proteins or fragments of the present invention.

[0079] It is understood that certain amino acids may be substituted for other amino acids in a protein structure without appreciable loss of interactive binding capacity with structures such as, for example, antigent-binding regions of antibodies or binding sites on substrate molecules. Because it is the interactive capacity and nature of a protein that defines that protein's biological functional activity, certain amino acid sequence substitutions can be made in a protein sequence and, of course, its underlying DNA coding sequence and, nevertheless, obtain a protein with like properties. It is thus contemplated by the inventors that various changes may be made in the peptide sequences of the proteins or fragments of the present invention, or corresponding DNA sequences that encode said peptides, without appreciable loss of their biological utility or activity. It is understood that codons capable of coding for such amino acid changes are known in the art.

[0080] In making such changes, the hydropathic index of amino acids may be considered.

[0081] The importance of the hydropathic amino acid index in conferring interactive biological function on a protein is generally understood in the art (Kyte and Doolittle, J. Mol. Biol. 157, 105-132 (1982), herein incorporated by reference in its entirety). It is accepted that the relative hydropathic character of the amino acid contributes to the secondary structure of the resultant protein, which in turn defines the interaction of the protein with other molecules, for example, enzymes, substrates, receptors, DNA, antibodies, antigens, and the like.

[0082] Each amino acid has been assigned a hydropathic index on the basis of its hydrophobicity and charge characteristics (Kyte and Doolittle, 1982); these are isoleucine (+4.5), valine (+4.2), leucine (+3.8), phenylalanine (+2.8), cysteine/cystine (+2.5), methionine (+1.9), alanine (+1.8), glycine (−0.4), threonine (−0.7), serine (−0.8), tryptophan (−0.9), tyrosine (−1.3), proline (−1.6), histidine (−3.2), glutamate (−3.5), glutamine (−3.5), aspartate (−3.5), asparagine (−3.5), lysine (−3.9), and arginine (−4.5).

[0083] In making such changes, the substitution of amino acids whose hydropathic indices are within ±2 is preferred, those which are within ±1 are particularly preferred, and those within ±0.5 are even more particularly preferred.

[0084] It is also understood in the art that the substitution of like amino acids can be made effectively on the basis of hydrophilicity. U.S. Pat. No. 4,554,101, incorporated herein by reference in its entirety, states that the greatest local average hydrophilicity of a protein, as govern by the hydrophilicity of its adjacent amino acids, correlates with a biological property of the protein.

[0085] As detailed in U.S. Pat. No. 4,554,101, the following hydrophilicity values have been assigned to amino acid residues: arginine (+3.0), lysine (+3.0), aspartate (+3.0±1), glutamate (+3.0±1), serine (+0.3), asparagine (+0.2), glutamine (+0.2), glycine (0), threonine (−0.4), proline (−0.5±1), alanine (−0.5), histidine (−0.5), cysteine (−1.0), methionine (−1.3), valine (−1.5), leucine (−1.8), isoleucine (−1.8), tyrosine (−2.3), phenylalanine (−2.5), and tryptophan (−3.4).

[0086] In making such changes, the substitution of amino acids whose hydrophilicity values are within ±2 is preferred, those which are within ±1 are particularly preferred, and those within ±0.5 are even more particularly preferred.

[0087] In a further aspect of the present invention, one or more of the nucleic acid molecules of the present invention differ in nucleic acid sequence from those encoding a cotton protein or fragment thereof set forth in SEQ ID NO: 1 through SEQ ID NO: 52949 or fragment thereof due to the fact that one or more codons encoding an amino acid has been substituted for a codon that encodes a nonessential substitution of the amino acid originally encoded.

[0088] One aspect of the present invention concerns markers that include nucleic acid molecules SEQ ID NO: 1 through SEQ ID NO: 52949 or complements thereof or fragments of either that can act as markers or other nucleic acid molecules of the present invention that can act as markers. Genetic markers of the present invention include “dominant” or “codominant” markers “Codominant markers” reveal the presence of two or more alleles (two per diploid individual) at a locus. “Dominant markers” reveal the presence of only a single allele per locus. The presence of the dominant marker phenotype (e.g., a band of DNA) is an indication that one allele is present in either the homozygous or heterozygous condition. The absence of the dominant marker phenotype (e.g. absence of a DNA band) is merely evidence that “some other” undefined allele is present. In the case of populations where individuals are predominantly homozygous and loci are predominately dimorphic, dominant and codominant markers can be equally valuable. As populations become more heterozygous and multi-allelic, codominant markers often become more informative of the genotype than dominant markers. Marker molecules can be, for example, capable of detecting polymorphisms such as single nucleotide polymorphisms (SNPs).

[0089] SNPs are single base changes in genomic DNA sequence. They occur at greater frequency and are spaced with a greater uniformity throughout a genome than other reported forms of polymorphism. The greater frequency and uniformity of SNPs means that there is greater probability that such a polymorphism will be found near or in a genetic locus of interest than would be the case for other polymorphisms. SNPs are located in protein-coding regions and noncoding regions of a genome. Some of these SNPs may result in defective or variant protein expression (e.g., as a results of mutations or defective splicing). Analysis (genotyping) of characterized SNPs can require only a plus/minus assay rather than a lengthy measurement, permitting easier automation.

[0090] SNPs can be characterized using any of a variety of methods. Such methods include the direct or indirect sequencing of the site, the use of restriction enzymes (Botstein et al., Am. J. Hum. Genet. 32:314-331 (1980), the entirety of which is herein incorporated reference; Konieczny and Ausubel, Plant J. 4:403-410 (1993), the entirety of which is herein incorporated by reference), enzymatic and chemical mismatch assays (Myers et al., Nature 313:495-498 (1985), the entirety of which is herein incorporated by reference), allele-specific PCR (Newton et al., Nucl. Acids Res. 17:2503-2516 (1989), the entirety of which is herein incorporated by reference; Wu et al., Proc. Natl. Acad. Sci. (U.S.A.) 86:2757-2760 (1989), the entirety of which is herein incorporated by reference), ligase chain reaction (Barany, Proc. Natl. Acad. Sci. (U.S.A) 88:189-193 (1991), the entirety of which is herein incorporated by reference), single-strand conformation polymorphism analysis (Labrune et al., Am. J. Hum. Genet. 48: 1115-1120 (1991), the entirety of which is herein incorporated by reference), primer-directed nucleotide incorporation assays (Kuppuswami et al., Proc. Natl. Acad. Sci. USA 88:1143-1147 (1991), the entirety of which is herein incorporated by reference), dideoxy fingerprinting (Sarkar et al., Genomics 13:441-443 (1992), the entirety of which is herein incorporated by reference), solid-phase ELISA-based oligonucleotide ligation assays (Nikiforov et al., Nucl. Acids Res. 22:4167-4175 (1994), the entirety of which is herein incorporated by reference), oligonucleotide fluorescence-quenching assays (Livak et al., PCR Methods Appl. 4:357-362 (1995), the entirety of which is herein incorporated by reference), 5′-nuclease allele-specific hybridization TaqMan assay (Livak et al., Nature Genet. 9:341-342 (1995), the entirety of which is herein incorporated by reference), template-directed dye-terminator incorporation (TDI) assay (Chen and Kwok, Nucl. Acids Res. 25:347-353 (1997), the entirety of which is herein incorporated by reference), allele-specific molecular beacon assay (Tyagi et al., Nature Biotech. 16: 49-53 (1998), the entirety of which is herein incorporated by reference), PinPoint assay (Haff and Smirnov, Genome Res. 7: 378-388 (1997), the entirety of which is herein incorporated by reference) and dCAPS analysis (Neff et al., Plant J. 14:387-392 (1998), the entirety of which is herein incorporated by reference).

[0091] Additional markers, such as AFLP markers, RFLP markers and RAPD markers, can be utilized (Walton, Seed World 22-29 (July, 1993), the entirety of which is herein incorporated by reference; Burow and Blake, Molecular Dissection of Complex Traits, 13-29, Paterson (ed.), CRC Press, New York (1988), the entirety of which is herein incorporated by reference). DNA markers can be developed from nucleic acid molecules using restriction endonucleases, the PCR and/or DNA sequence information. RFLP markers result from single base changes or insertions/deletions. These codominant markers are highly abundant in plant genomes, have a medium level of polymorphism and are developed by a combination of restriction endonuclease digestion and Southern blotting hybridization. CAPS are similarly developed from restriction nuclease digestion but only of specific PCR products. These markers are also codominant, have a medium level of polymorphism and are highly abundant in the genome. The CAPS result from single base changes and insertions/deletions.

[0092] Another marker type, RAPDs, are developed from DNA amplification with random primers and result from single base changes and insertions/deletions in plant genomes. They are dominant markers with a medium level of polymorphisms and are highly abundant. AFLP markers require using the PCR on a subset of restriction fragments from extended adapter primers. These markers are both dominant and codominant are highly abundant in genomes and exhibit a medium level of polymorphism.

[0093] SSRs require DNA sequence information. These codominant markers result from repeat length changes, are highly polymorphic and do not exhibit as high a degree of abundance in the genome as CAPS, AFLPs and RAPDs, SNPs also require DNA sequence information. These codominant markers result from single base substitutions. They are highly abundant and exhibit a medium of polymorphism (Rafalski et al., In: Nonmammalian Genomic Analysis, Birren and Lai (ed.), Academic Press, San Diego, Calif., pp. 75-134 (1996), the entirety of which is herein incorporated by reference). It is understood that a nucleic acid molecule of the present invention may be used as a marker.

[0094] A PCR probe is a nucleic acid molecule capable of initiating a polymerase activity while in a double-stranded structure with another nucleic acid. Various methods for determining the structure of PCR probes and PCR techniques exist in the art. Computer generated searches using programs such as Primer3 (on the Worldwide web at genome.wi.mit.edu/cgi-bin/primer/primer3.cgi), STSPipeline (on the Worldwide web at genome.wi.mit.edu/cgi-bin/www-STS_Pipeline), or GeneUp (Pesole et al., BioTechniques 25:112-123 (1998) the entirety of which is herein incorporated by reference), for example, can be used to identify potential PCR primers.

[0095] It is understood that a fragment of one or more of the nucleic acid molecules of the present invention may be a probe and specifically a PCR probe.

[0096] (b) Protein and Peptide Molecules

[0097] A class of agents comprises one or more of the protein or peptide molecules encoded by SEQ ID NO: 1 through SEQ ID NO:52949 or one or more of the protein or fragment thereof or peptide molecules encoded by other nucleic acid agents of the present invention. As used herein, the term “protein molecule” or “peptide molecule” includes any molecule that comprises five or more amino acids. It is well know in the art that proteins may undergo modification, including post-translational modifications, such as, but not limited to, disulfide bond formation, glycosylation, phosphorylation, or oligomerization. Thus, as used herein, the term “protein molecule” or “peptide molecule” includes any protein molecule that is modified by any biological or non-biological process. The terms “amino acid” and “amino acids” refer to all naturally occurring L-amino acids. This definition is meant to include norleucine, ornithine, homocysteine, and homoserine.

[0098] One or more of the protein or fragment of peptide molecules may be produced via chemical synthesis, or more preferably, by expression in a suitable bacterial or eukaryotic host. Suitable methods for expression are described by Sambrook et al., (In: Molecular Cloning, A Laboratory Manual, 2nd Edition, Cold Spring Harbor Press, Cold Spring Harbor, N.Y. (1989)), or similar texts.

[0099] A “protein fragment” is a peptide or polypeptide molecule whose amino acid sequence comprises a subset of the amino acid sequence of that protein. A protein or fragment thereof that comprises one or more additional peptide regions not derived from that protein is a “fusion” protein. Such molecules may be derivatized to contain carbohydrate or other moieties (such as keyhole limpet hemocyanin, etc.). Fusion protein or peptide molecule of the present invention are preferably produced via recombinant means.

[0100] Another class of agents comprise protein or peptide molecules encoded by SEQ ID NO: 1 through SEQ ID NO:52949 or complements thereof or, fragments or fusions thereof in which non-essential, or not relevant, amino acid residues have been added, replaced, or deleted. An example of such a homologue is the homologue protein of all non-cotton plant species, including but not limited to alfalfa, Arabidopsis, barley, Brassica, broccoli, cabbage, citrus, garlic, oat, oilseed rape, onion, canola, flax, maize, an ornamental plant, pea, peanut, pepper, potato, rice, rye, sorghum, soybean, strawberry, sugarcane, sugarbeet, tomato, wheat, poplar, pine, fir, eucalyptus, apple, lettuce, peas, lentils, grape, banana, tea, turf grasses, etc. Particularly preferred non-cotton plants to utilize for the isolation of homologues would include alfalfa, Arabidopsis, barley, oat, oilseed rape, rice, canola, maize, ornamentals, soybean, sugarcane, sugarbeet, tomato, potato, wheat, and turf grasses. Such a homologue can be obtained by any of a variety of methods. Most preferably, as indicated above, one or more of the disclosed sequences (SEQ ID NO: 1 through SEQ ID NO:52949 or complements thereof) will be used to define a pair of primers that may be used to isolate the homologue-encoding nucleic acid molecules from any desired species. Such molecules can be expressed to yield homologues by recombinant means.

[0101] (c) Antibodies

[0102] One aspect of the present invention concerns antibodies, single-chain antigen binding molecules, or other proteins that specifically bind to one or more of the protein or peptide molecules of the present invention and their homologues, fusions or fragments. Such antibodies may be used to quantitatively or qualitatively detect the protein or peptide molecules of the present invention. As used herein, an antibody or peptide is said to “specifically bind” to a protein or peptide molecule of the present invention if such binding is not competitively inhibited by the presence of non-related molecules.

[0103] Nucleic acid molecules that encode all or part of the protein of the present invention can be expressed, via recombinant means, to yield protein or peptides that can in turn be used to elicit antibodies that are capable of binding the expressed protein or peptide. Such antibodies may be used in immunoassays for that protein. Such protein-encoding molecules, or their fragments may be a “fusion” molecule (i.e., a part of a larger nucleic acid molecule) such that, upon expression, a fusion protein is produced. It is understood that any of the nucleic acid molecules of the present invention may be expressed, via recombinant means, to yield proteins or peptides encoded by these nucleic acid molecules.

[0104] The antibodies that specifically bind proteins and protein fragments of the present invention may be polyclonal or monoclonal, and may comprise intact immunoglobulins, or antigen binding portions of immunoglobulins (such as (F(ab′), F(ab′)₂) fragments, or single-chain immunoglobulins producible, for example, via recombinant means). It is understood that practitioners are familiar with the standard resource materials which describe specific conditions and procedures for the construction, manipulation and isolation of antibodies (see, for example, Harlow and Lane, In Antibodies: A Laboratory Manual, Cold Spring Harbor Press, Cold Spring Harbor, N.Y. (1988), the entirety of which is herein incorporated by reference).

[0105] Murine monoclonal antibodies are particularly preferred. BALB/c mice are preferred for this purpose, however, equivalent strains may also be used. The animals are preferably immunized with approximately 25 μg of purified protein (or fragment thereof) that has been emulsified a suitable adjuvant (such as TiterMax adjuvant (Vaxcel, Norcross, Ga.)). Immunization is preferably conducted at two intramuscular sites, one intraperitoneal site, and one subcutaneous site at the base of the tail. An additional i.v. injection of approximately 25 μg of antigen is preferably given in normal saline three weeks later. After approximately 11 days following the second injection, the mice may be bled and the blood screened for the presence of anti-protein or peptide antibodies. Preferably, a direct binding Enzyme-Linked Immunoassay (ELISA) is employed for this purpose.

[0106] More preferably, the mouse having the highest antibody titer is given a third i.v. injection of approximately 25 μg of the same protein or fragment. The splenic leukocytes from this animal may be recovered 3 days later, and are then permitted to fuse, most preferably, using polyethylene glycol, with cells of a suitable myeloma cell line (such as, for example, the P3X63Ag8.653 myeloma cell line). Hybridoma cells are selected by culturing the cells under “HAT” (hypoxanthine-aminopterin-thymine) selection for about one week. The resulting clones may then be screened for their capacity to produce monoclonal antibodies. (“mAbs), preferably by direct ELISA.

[0107] In one embodiment, anti-protein or peptide monoclonal antibodies are isolated using a fusion of a protein, protein fragment, or peptide of the present invention, or conjugate of a protein, protein fragment, or peptide of the present invention, as immunogens. Thus, for example, a group of mice can be immunized using a fusion protein emulsified in Freund's complete adjuvant (e.g. approximately 50 μg of antigen per immunization). At three week intervals, an identical amount of antigen is emulsified in Freund's incomplete adjuvant and used to immunize the animals. Ten days following the third immunization, serum samples are taken and evaluated for the presence of antibody. If antibody titers are too low, a fourth booster can be employed. Polysera capable of binding the protein or peptide can also be obtained using this method.

[0108] In a preferred procedure for obtaining monoclonal antibodies, the spleens of the above-described immunized mice are removed, disrupted, and immune splenocytes are isolated over a ficoll gradient. The isolated splenocytes are fused, using polyethylene glycol with BALB/c-derived HGPRT (hypoxanthine guanine phosphoribosyl transferase) deficient P3×63xAg8.653 plasmacytoma cells. The fused cells are plated into 96-well microtiter plates and screened for hybridoma fusion cells by their capacity to grow in culture medium supplemented with hypothanthine, aminopterin and thymidine for approximately 2-3 weeks.

[0109] Hybridoma cells that arise from such incubation are preferably screened for their capacity to produce an immunoglobulin that binds to a protein of interest. An indirect ELISA may be used for this purpose. In brief, the supernatants of hybridormas are incubated in microtiter wells that contain immobilized protein. After washing, the titer of bound immunoglobulin can be determined using, for example, a goat anti-mouse antibody conjugated to horseradish peroxidase. After additional washing, the amount of immobilized enzyme is determined (for example through the use of a chromogenic substrate). Such screening is performed as quickly as possible after the identification of the hybridoma in order to ensure that a desired clone is not overgrown by non-secreting neighbors. Desirably, the fusion plates are screened several times since the rates of hybridoma growth vary. In a preferred sub-embodiment, a different antigenic form of immunogen may be used to screen the hybridoma. Thus, for example, the splenocytes may be immunized with one immunogen, but the resulting hybridomas can be screened using a different immunogen. It is understood that any of the protein or peptide molecules of the present invention may be used to raise antibodies.

[0110] As discussed below, such antibody molecules or their fragments may be used for diagnostic purposes. Where the antibodies are intended for diagnostic purposes, it may be desirable to derivatize them, for example with a ligand group (such as biotin) or a detectable marker group (such as a fluorescent group, a radioisotope or an enzyme).

[0111] The ability to produce antibodies that bind the protein or peptide molecules of the present invention permits the identification of mimetic compounds of those molecules. A “mimetic compound” is a compound that is not that compound, or a fragment of that compound, but which nonetheless exhibits an ability to specifically bind to antibodies directed against that compound.

[0112] It is understood that any of the agents of the present invention can be substantially purified and/or be biologically active and/or recombinant.

[0113] Uses of the Agents of the Invention

[0114] The nucleic acid molecules and fragments thereof of the present invention from the cDNA library LIB3083 are isolated from young fibers from bolls harvested from cotton plants 17 to 21 days post anthesis. The ESTs of the present invention can enable the acquisition of genes expressed in epidermal cells of seed coats and those expressed during the process of cell elongation and of cell wall thickening. The ESTs of the present invention will find great use in the isolation of a variety of agronomically significant genes, including but not limited to, genes that regulate receptors, signal transducers, transcription factors, translation factors, cellulose, enzymes, and structural proteins, and genes that regulate cell cycle, signal transduction, cell-cell communication, carotenoids, fibers, proteins, amino acids, sterols, isoflavones, carbohydrates, and starch metabolism. Such genes are associated with fiber quality and yield. Libraries from this tissue can enable the acquisition of a variety of agronomically significant genes involved in the synthesis and catabolism of commercially important traits. The ESTs of the present invention also can enable the acquisition of promoters and cis-regulatory elements which will be useful to express agronomically significant genes in these tissues and/or other tissues. The ESTs of the present invention also can enable the acquisition of molecular markers, which can be used in, including but not limited to, breeding schemes, genetic and molecular mapping, and cloning of agronomically significant genes.

[0115] The nucleic acid molecules and fragments thereof of the present invention from the cDNA library LIB3120 are isolated from sink leaves harvested from cotton plants 15 days after planting. Leaves are the photosynthate factories of crop plants, therefore, the ESTs of the present invention will find great use in the isolation of a variety of agronomically significant genes, including but not limited to genes that are necessary for the interception and transformation of light energy via photosynthesis linked with plant growth, yield and fiber quality. Genes isolated using the disclosed ESTs would also be critical in pathways including but not limited to a pathway such as nitrogen metabolism linked to fruiting and mobilization and distribution of nitrogen. The ESTs of the present invention also can enable the acquisition of promoters and cis-regulatory elements which will be useful to express agronomically significant genes in these tissues and/or other tissues. The ESTs of the present invention also can enable the acquisition of molecular markers, which can be used in, including but not limited to, breeding schemes, genetic and molecular mapping, and cloning of agronomically significant genes.

[0116] The nucleic acid molecules and fragments thereof of the present invention from the cDNA library LIB3135 are isolated from embryogenic callus derived from cotton seedling hypocotyls. The ESTs of the present invention can enable the acquisition of, including but not limited to, genes involved in embryogenesis and plant regeneration. Therefore, the ESTs of the present invention will find great use in the isolation of a variety of agronomically significant genes, including but not limited to, genes that regulate the synthesis and activity of proteins, amino acids, sterols, oils, minerals, vitamins, tocopherols, antinutrient components, carbohydrates, and starch metabolism. Such genes are associated with plant growth, fiber quality and yield, and could also serve as links in metabolic and catabolic pathways. The ESTs of the present invention will also find great use in the identification of genes important in embryogenesis, including but not limited to, genes encoding transcription factors and components of signal transduction including receptors and ion transporters and channels. The ESTs of the present invention also can enable the acquisition of promoters and cis-regulatory elements which will be useful to express agronomically significant genes in these tissues and/or other tissues. The ESTs of the present invention also can enable the acquisition of molecular markers, which can be used in, including but not limited to, breeding schemes, genetic and molecular mapping, and cloning of agronomically significant genes.

[0117] The nucleic acid molecules and fragments thereof of the present invention from the cDNA library LIB3145 are isolated from developing floral buds, which are harvested from 1.5 to 2.5 month old cotton plants. The ESTs of the present invention can enable the acquisition of, including but not limited to, genes involved in floral and square development, reproduction, female production and development (ovary/ovule development, stigma development and style development), pollen production and development, seed production, fiber production and development, and boll development, therefore, the ESTs of the present invention will find great use in the isolation of a variety of agronomically significant genes, including but not limited to, non-regulatory genes and genes that regulate microsporogenesis, meiosis, cell cycle, signal transduction, cell-cell communication, carotenoids, floral biogenesis, embryogenesis, fibers, proteins, amino acids, sterols, oils, minerals, isoflavones, saponins, vitamins, tocopherols, antinutrient components, carbohydrates, starch metabolism, and seed composition and function. Such genes are associated with plant growth, yield and fiber quality, and could also serve as links in important developmental, metabolic, and catabolic pathways. Libraries from this tissue can enable the acquisition of a variety of agronomically significant genes involved in the synthesis and catabolism of commercially important traits. The ESTs of the present invention also can enable the acquisition of promoters and cis-regulatory elements which will be useful to express agronomically significant genes in these tissues and/or other tissues. The ESTs of the present invention also can enable the acquisition of molecular markers, which can be used in, including but not limited to, breeding schemes, genetic and molecular mapping, and cloning of agronomically significant genes.

[0118] The nucleic acid molecules and fragments thereof of the present invention from the cDNA library LIB3146 are isolated from developing cotton floral buds up to about 0.5 cm in length, which are harvested from 1 to 2 month old cotton plants. The ESTs of the present invention can enable the acquisition of, including but not limited to genes involved in differentiation of floral parts and seeds, floral and square development, reproduction, female production and development (ovary/ovule development, stigma development and style development), pollen production and development, seed production, fiber production and development, and boll development, therefore, the ESTs of the present invention will find great use in the isolation of a variety of agronomically significant genes, including but not limited to, non-regulatory genes and genes that regulate microsporogenesis, meiosis, cell cycle, signal transduction, cell-cell communication, carotenoids, floral biogenesis, embryogenesis, fibers, proteins, amino acids, sterols, oils, minerals, isoflavones, saponins, vitamins, tocopherols, antinutrient components, carbohydrates, starch metabolism and seed composition and function. Such genes are associated with plant growth, yield and fiber quality, and could also serve as links in important developmental, metabolic, and catabolic pathways. Libraries from this tissue can enable the acquisition of a variety of agronomically significant genes involved in the synthesis and catabolism of commercially important traits. The ESTs of the present invention also can enable the acquisition of promoters and cis-regulatory elements which will be useful to express agronomically significant genes in these tissues and/or other tissues. The ESTs of the present invention also can enable the acquisition of molecular markers, which can be used in, including but not limited to, breeding schemes, genetic and molecular mapping, and cloning of agronomically significant genes.

[0119] The nucleic acid molecules and fragments thereof of the present invention from the cDNA libraries LIB3147 and LIB3149 are isolated from axis harvested from cotton seedlings 24 and 48 hours after imbibition. The ESTs of the present invention can enable the acquisition of, including but not limited to, genes involved in seed germination, seedling development, and regulation of growth and development. Therefore, the ESTs of the present invention will find great use in the isolation of a variety of agronomically significant genes, including but not limited to, genes that regulate the synthesis and activity of proteins, amino acids, sterols, oils, minerals, isoflavones, saponins, trypsin inhibitors, vitamins, tocopherols, antinutrient components, carbohydrates, and starch metabolism. Such genes are associated with plant growth, fiber quality and yield, and could also serve as links in metabolic and catabolic pathways. The ESTs of the present invention will also find great use in the identification of genes important in initiating and maintaining seed germination, including but not limited to, genes encoding transcription factors and components of signal transduction including receptors and ion transporters and channels. The ESTs of the present invention will also further find great use in the identification of genes that may be used to mitigate stresses encountered during seed germination, including but not limited to, genes that encode heat shock factors, cold-induced proteins, and proteins required for anaerobic respiration and desiccation tolerance, and genes that regulate the synthesis and activity of those proteins. The ESTs of the present invention also can enable the acquisition of promoters and cis-regulatory elements which will be useful to express agronomically significant genes in these tissues and/or other tissues. The ESTs of the present invention also can enable the acquisition of molecular markers, which can be used in, including but not limited to, breeding schemes, genetic and molecular mapping, and cloning of agronomically significant genes.

[0120] The nucleic acid molecules and fragments thereof of the present invention from the cDNA library LIB3148 are isolated from cotyledons harvested from cotton seedlings 24 and 48 hours after imbibition. The ESTs of the present invention will find great use in the isolation of a variety of agronomically significant genes, including but not limited to genes that regulate protein, amino acids, sterols, oils, minerals, isoflavones, saponins, trypsin inhibitors, vitamins, tocopherols, antinutrient components, carbohydrates, starch metabolism and seed regulatory elements. Such crucial genes are associated with plant growth, fiber quality and yield, and could also serve as links in important metabolic and catabolic pathways. The ESTs of the present invention also can enable the acquisition of promoters and cis-regulatory elements which will be useful to express agronomically significant genes in these tissues and/or other tissues. The ESTs of the present invention also can enable the acquisition of molecular markers, which can be used in, including but not limited to, breeding schemes, genetic and molecular mapping, and cloning of agronomically significant genes.

[0121] The nucleic acid molecules and fragments thereof of the present invention from the cDNA library LIB3165 are isolated from source leaves harvested from 2-month old cotton plants. Leaves are the photosynthate factories of crop plants, therefore, the ESTs of the present invention will find great use in the isolation of a variety of agronomically significant genes, including but not limited to genes that are necessary to for the interception and transformation of light energy via photosynthesis linked with plant growth, yield and fiber quality. Genes isolated using the disclosed ESTs would also be critical in pathways including but not limited to a pathway such as nitrogen metabolism linked to fruiting and mobilization and distribution of nitrogen. The ESTs of the present invention also can enable the acquisition of promoters and cis-regulatory elements which will be useful to express agronomically significant genes in these tissues and/or other tissues. The ESTs of the present invention also can enable the acquisition of molecular markers, which can be used in, including but not limited to, breeding schemes, genetic and molecular mapping, and cloning of agronomically significant genes.

[0122] The nucleic acid molecules and fragments thereof of the present invention from the cDNA library LIB3189 are isolated from developing bolls, which are harvested from cotton plants 1 to 10 days post anthesis (DPA). The ESTs of the present invention can enable the acquisition of, including but not limited to, genes involved in boll development, reproduction, seed production and development, fiber production and development, therefore, the ESTs of the present invention will find great use in the isolation of a variety of agronomically significant genes, including but not limited to, non-regulatory genes and genes that regulate cell cycle, signal transduction, cell-cell communication, carotenoids, embryogenesis, fibers, proteins, amino acids, sterols, oils, minerals, isoflavones, saponins, vitamins, tocopherols, antinutrient components, carbohydrates, starch metabolism, and seed composition and function. Such genes are associated with plant growth, yield and fiber quality, and could also serve as links in important developmental, metabolic, and catabolic pathways. Libraries from this tissue can enable the acquisition of a variety of agronomically significant genes involved in the synthesis and catabolism of commercially important traits. The ESTs of the present invention also can enable the acquisition of promoters and cis-regulatory elements which will be useful to express agronomically significant genes in these tissues and/or other tissues. The ESTs of the present invention also can enable the acquisition of molecular markers, which can be used in, including but not limited to, breeding schemes, genetic and molecular mapping, and cloning of agronomically significant genes.

[0123] The nucleic acid molecules and fragments thereof of the present invention from the cDNA library LIB3196 are isolated from developing seeds harvested from cotton plants 23 to 28 days post anthesis (DPA). Seed libraries can enable acquisition of, including but not limited to, genes that store food and seed regulatory elements, therefore, the ESTs of the present invention will find great use in the isolation of a variety of agronomically significant genes, including but not limited to genes that regulate protein, amino acids, sterols, oils, minerals, isoflavones, saponins, trypsin inhibitors, vitamins, tocopherols, antinutrient components, carbohydrates, starch metabolism and seed regulatory elements. Such crucial genes are associated with plant growth, yield and fiber quality, and could also serve as links in important metabolic and catabolic pathways. The ESTs of the present invention also can enable the acquisition of promoters and cis-regulatory elements which will be useful to express agronomically significant genes in these tissues and/or other tissues. The ESTs of the present invention also can enable the acquisition of molecular markers, which can be used in, including but not limited to, breeding schemes, genetic and molecular mapping, and cloning of agronomically significant genes.

[0124] The nucleic acid molecules and fragments thereof of the present invention from the cDNA library LIB3197 are isolated from young fibers from 5 to 6 days post anthesis bolls, which are harvested from cotton plants. The ESTs of the present invention can enable the acquisition of genes expressed in epidermal cells of seed coats and those expressed during the process of cell elongation. The ESTs of the present invention will find great use in the isolation of a variety of agronomically significant genes, including but not limited to, genes that regulate receptors, signal transducers, transcription factors, translation factors, cellulose, enzymes, and structural proteins, and genes that regulate cell cycle, signal transduction, cell-cell communication, carotenoids, fibers, proteins, amino acids, sterols, isoflavones, carbohydrates, and starch metabolism. Such genes are associated with fiber quality and yield. Libraries from this tissue can enable the acquisition of a variety of agronomically significant genes involved in the synthesis and catabolism of commercially important traits. The ESTs of the present invention also can enable the acquisition of promoters and cis-regulatory elements which will be useful to express agronomically significant genes in these tissues and/or other tissues. The ESTs of the present invention also can enable the acquisition of molecular markers, which can be used in, including but not limited to, breeding schemes, genetic and molecular mapping, and cloning of agronomically significant genes.

[0125] Nucleic acid molecules and fragments thereof of the present invention may be employed to obtain other nucleic acid molecules. Such molecules include the nucleic acid molecules of other plants or other organisms (e.g., alfalfa, rice, potato, soybean, oat, rye, barley, maize, wheat, Arabidopsis, Brassica, etc.) including the nucleic acid molecules that encode, in whole or in part, protein homologues of other plant species or other organisms, and sequences of genetic elements such as promoters and transcriptional regulatory elements. Such molecules can be readily obtained by using the above-described nucleic acid molecules or fragments thereof to screen cDNA or genomic libraries obtained from such plant species. Methods for forming such libraries are well known in the art. Such homologue molecules may differ in their nucleotide sequences from those found in one or more of SEQ ID NO: 1 through SEQ ID NO:52949 or complements thereof because complete complementarity is not needed for stable hybridization. The nucleic acid molecules of the present invention therefore also include molecules that, although capable of specifically hybridizing with the nucleic acid molecules may lack “complete complementarity.”

[0126] Any of a variety of methods may be used to obtain one or more of the above-described nucleic acid molecules (Zamechik et al., Proc. Natl. Acad. Sci. (U.S.A.) 83:4143-4146 (1986); Goodchild et al., Proc. Natl. Acad. Sci. (U.S.A.) 85:5507-5511 (1988); Wickstrom et al., Proc. Natl. Acad. Sci. (U.S.A.) 85:1028-1032 (1988); Holt et al., Molec. Cell. Biol. 8:963-973 (1988); Gerwirtz et al., Science 242:1303-1306 (1988); Anfossi et al., Proc. Natl. Acad. Sci. (U.S.A.) 86:3379-3383 (1989); Becker et al., EMBO J. 8:3685-3691 (1989); all of which are herein incorporated by reference in their entirety). Automated nucleic acid synthesizers may be employed for this purpose. In lieu of such synthesis, the disclosed nucleic acid molecules may be used to define a pair of primers that can be used with the polymerase chain reaction (Mullis et al., Cold Spring Harbor Symp. Quant. Biol. 51:263-273 (1986); Erlich et al., EP 50,424; EP 84,796, EP 258,017, EP 237,362; Mullis, EP 201,184; Mullis et al., U.S. Pat. No. 4,683,202; Erlich, U.S. Pat. No. 4,582,788; and Saiki, R. et al., U.S. Pat. No. 4,683,194, all of which are herein incorporated by reference in their entirety) to amplify and obtain any desired nucleic acid molecule or fragment.

[0127] Promoter sequence(s) and other genetic elements including but not limited to transcriptional regulatory elements associated with one or more of the disclosed nucleic acid sequences can also be obtained using the disclosed nucleic acid sequences provided herein.

[0128] In one embodiment, such sequences are obtained by incubating EST nucleic acid molecules or preferably fragments thereof with members of genomic libraries (e.g. maize and soybean) and recovering clones that hybridize to the EST nucleic acid molecule or fragment thereof. In a second embodiment, methods of “chromosome walking,” or inverse PCR may be used to obtain such sequences (Frohman et al., Proc. Natl. Acad. Sci. (U.S.A) 85:8998-9002 (1988); Ohara et al., Proc. Natl. Acad. Sci. (U.S.A.) 86: 5673-5677 (1989); Pang et al., Biotechniques, 22(6); 1046-1048 (1977); Huang et al., Methods Mol. Biol. 69: 89-96 (1977); Hartl et al., Methods Mol. Biol. 58: 293-301 (1996), all of which are hereby incorporated by reference in their entirety). In one embodiment, the disclosed nucleic acid molecules are used to identify cDNAs whose analogous genes contain promoters with desirable expression patterns. The nucleic acid molecules isolated from the library of the present invention are used to isolate promoters of tissue-enhanced, tissue-specific, developmentally- or environmentally-regulated expression profiles. Isolation and functional analysis of the 5′ flanking promoter sequences of these genes from genomic libraries, for example, using genomic screening methods and PCR techniques would result in the isolation of useful promoters and transcriptional regulatory elements. These methods are known to those of skill in the art and have been described (See for example Birren et al., Genome Analysis Analyzing DNA, 1, (1997), Cold Spring Harbor Laboratory Press, Cold Spring Harbor, N.Y., the entirety of which is herein incorporated by reference).

[0129] Promoters obtained utilizing the nucleic acid molecules of the present invention could also be modified to affect their control characteristics. Examples of such modifications would include but are not limited to enhancer sequences as reported by Kay et al., Science 236:1299 (1987), herein incorporated by reference in its entirety. Such genetic elements could be used to enhance gene expression of new and existing traits for crop improvements.

[0130] The nucleic acid molecules of the present invention may be used to isolate promoters of tissue enhanced tissue specific, cell-specific, cell-type, developmentally or environmentally regulated expression profiles. Isolation and functional analysis of the 5′ flanking promoter sequences of these genes from genomic libraries, for example, using genomic screening methods and PCR techniques would result in the isolation of useful promoters and transcriptional regulatory elements. These methods are known to those of skill in the art and have been described (See, for example, Birren et. al., Genome Analysis: Analyzing DNA, 1, Cold Spring Harbor Laboratory Press, Cold Spring Harbor, N.Y. (1997), herein incorporated by reference in its entirety). Promoters obtained utilizing the nucleic acid molecules of the present invention could also be modified to affect their control characteristics. Examples of such modifications would include but are not limited to enhancer sequences as reported by Kay, et al Science 236:1299 (1987), herein incorporated reference in its entirety. Such genetic elements could be used to enhance gene expression of new and existing traits for crop improvements.

[0131] In an aspect of the present invention, one or more of the nucleic molecules of the present invention are used to determine whether a plant (preferably cotton) has a mutation affecting the level (i.e., the concentration of mRNA in a sample, etc.) or pattern (i.e., the kinetics of expression, rate of decomposition, stability profile, etc.) of the expression encoded in part or whole by one or more of the nucleic acid molecules of the present invention (collectively, the “Expression Response” of a cell or tissue). As used herein, the Expression Response manifested by a cell or tissue is said to be “altered” if it differs from the Expression Response of cells or tissues of plants not exhibiting the phenotype. To determine whether a Expression Response is altered, the Expression Response manifested by the cell or tissue of the plant exhibiting the phenotype is compared with that of a similar cell or tissue sample of a plant not exhibiting the phenotype. As will be appreciated, it is not necessary to re-determine the Expression Response of the cell or tissue sample of plants not exhibiting the phenotype each time such a comparison is made; rather, the Expression Response of a particular plant may be compared with previously obtained values of normal plants. As used herein, the phenotype of the organism is any of one or more characteristics of an organism (e.g. disease resistance, pest tolerance, environmental tolerance, male sterility, yield, quality improvements, etc.). A change in genotype or phenotype may be transient or permanent. Also as used herein, a tissue sample is any sample that comprises more than one cell. In a preferred aspect, a tissue sample comprises cells that share a common characteristic (e.g. derived from leaf, root, or pollen etc).

[0132] In one sub-aspect, such an analysis is conducted by determining the presence and/or identity of polymorphism(s) by one or more of the nucleic acid molecules of the present invention and more specifically, one or more of the EST nucleic acid molecules or fragments thereof which are associated with phenotype, or a predisposition to phenotype.

[0133] Any of a variety of molecules can be used to identify such polymorphism(s). In one embodiment, one or more of the EST nucleic acid molecules (or a sub-fragment thereof) may be employed as a marker nucleic acid molecule to identify such polymorphism(s). Alternatively, such polymorphisms can be detected through the use of a marker nucleic acid molecule or a marker protein that is genetically linked to (i.e., a polynucleotide that co-segregates with) such polymorphism(s).

[0134] In an alternative embodiment, such polymorphisms can be detected through the use of a marker nucleic acid molecule that is physically linked to such polymorphism(s). For this purpose, marker nucleic acid molecules comprising a nucleotide sequence of a polynucleotide located within 1 mb of the polymorphism(s), and more preferably within 100 kb of the polymorphism(s), and most preferably within 10 kb of the polymorphism(s) can be employed.

[0135] The genomes of animals and plants naturally undergo spontaneous mutation in the course of their continuing evolution (Gusella, Ann. Rev. Biochem. 55:831-854 (1986)). A “polymorphism” is a variation or difference in the sequence of the gene or its flanking regions that arises in some of the members of a species. The variant sequence and the “original” sequence co-exist in the species' population. In some instances, such co-existence is in stable or quasi-stable equilibrium.

[0136] A polymorphism is thus said to be “allelic,” in that, due to the existence of the polymorphism, some members of a species may have the original sequence (i.e., the original “allele”) whereas other members may have the variant sequence (i.e., the variant “allele”). In the simplest case, only one variant sequence may exist, and the polymorphism is thus said to be di-allelic. In other cases, the species' population may contain multiple alleles, and the polymorphism is termed tri-allelic, etc. A single gene may have multiple different unrelated polymorphisms. For example, it may have a di-allelic polymorphism at one site, and a multi-allelic polymorphism at another site.

[0137] The variation that defines the polymorphism may range from a single nucleotide variation to the insertion or deletion of extended regions within a gene. In some cases, the DNA sequence variations are in regions of the genome that are characterized by short tandem repeats (STRs) that include tandem di- or tri-nucleotide repeated motifs of nucleotides. Polymorphisms characterized by such tandem repeats are referred to as “variable number tandem repeat” (“VNTR”) polymorphisms. VNTRs have been used in identity analysis (Weber, U.S. Pat. No. 5,075,217; Armour et al., FEBS Lett. 307:113-115 (1992); Jones et al., Eur. J. Haematol. 39:144-147 (1987); Horn et al., PCT Application WO91/14003; Jeffreys, European Patent Application 370,719; Jeffreys, U.S. Pat. No. 5,699,082; Jeffreys. et al., Amer. J. Hum. Genet. 39:11-24 (1986); Jeffreys. et al., Nature 316:76-79 (1985); Gray et al., Proc. R. Acad. Soc. Lond. 243:241-253 (1991); Moore et al., Genomics 10:654-660 (1991); Jeffreys et al., Anim. Genet. 18:1-15 (1987); Hillel et al., Anim. Genet. 20:145-155 (1989); Hillel et al., Genet. 124:783-789 (1990), all of which are herein incorporated by reference in their entirety).

[0138] The detection of polymorphic sites in a sample of DNA may be facilitated through the use of nucleic acid amplification methods. Such methods specifically increase the concentration of polynucleotides that span the polymorphic site, or include that site and sequences located either distal or proximal to it. Such amplified molecules can be readily detected by gel electrophoresis or other means.

[0139] The most preferred method of achieving such amplification employs the polymerase chain reaction (“PCR”) (Mullis et al., Cold Spring Harbor Symp. Quant. Biol. 51:263-273 (1986); Erlich et al., European Patent Appln. 50,424; European Patent Appln. 84,796, European Patent Application 258,017, European Patent Appln. 237,362; Mullis, European Patent Appln. 201,184; Mullis, et al., U.S. Pat. No. 4,683,202; Erlich., U.S. Pat. No. 4,582,788; and Saiki et al., U.S. Pat. No. 4,683,194, all of which are herein incorporated by reference), using primer pairs that are capable of hybridizing to the proximal sequences that define a polymorphism in its double-stranded form.

[0140] In lieu of PCR, alternative methods, such as the “Ligase Chain Reaction” (“LCR”) may be used (Barany, Proc. Natl. Acad. Sci. (U.S.A.) 88:189-193 (1991), the entirety of which is herein incorporated by reference). LCR uses two pairs of oligonucleotide probes to exponentially amplify a specific target. The sequences of each pair of oligonucleotides is selected to permit the pair to hybridize to abutting sequences of the same strand of the target. Such hybridization forms a substrate for a template-dependent ligase. As with PCR, the resulting products thus serve as a template in subsequent cycles and an exponential amplification of the desired sequence is obtained.

[0141] LCR can be performed with oligonucleotides having the proximal and distal sequences of the same strand of a polymorphic site. In one embodiment, either oligonucleotide will be designed to include the actual polymorphic site of the polymorphism. In such an embodiment, the reaction conditions are selected such that the oligonucleotides can be ligated together only if the target molecule either contains or lacks the specific nucleotide that is complementary to the polymorphic site present on the oligonucleotide. Alternatively, the oligonucleotides may be selected such that they do not include the polymorphic site (see, Segev, PCT Application WO 90/01069, the entirety of which is herein incorporated by reference).

[0142] The “Oligonucleotide Ligation Assay” (“OLA”) may alternatively be employed (Landegren et al., Science 241:1077-1080 (1988), herein incorporated by reference in its entirety). The OLA protocol uses two oligonucleotides which are designed to be capable of hybridizing to abutting sequences of a single strand of a target. OLA, like LCR, is particularly suited for the detection of point mutations. Unlike LCR, however, OLA results in “linear” rather than exponential amplification of the target sequence.

[0143] Nickerson et al. have described a nucleic acid detection assay that combines attributes of PCR and OLA (Nickerson et al., Proc. Natl. Acad. Sci. (U.S.A.) 87:8923-8927 (1990), the entirety of which is herein incorporated by reference). In this method, PCR is used to achieve the exponential amplification of target DNA, which is then detected using OLA. In addition to requiring multiple, and separate, processing steps, one problem associated with such combinations is that they inherit all of the problems associated with PCR and OLA.

[0144] Schemes based on ligation of two (or more) oligonucleotides in the presence of nucleic acid having the sequence of the resulting “di-oligonucleotide”, thereby amplifying the di-oligonucleotide, are also known (Wu et al., Genomics 4:560 (1989), the entirety of which is herein incorporated by reference), and may be readily adapted to the purposes of the present invention.

[0145] Other known nucleic acid amplification procedures, such as allele-specific oligomers, branched DNA technology, transcription-based amplification systems, or isothermal amplification methods may also be used to amplify and analyze such polymorphisms (Malek et al., U.S. Pat. No. 5,130,238; Davey et al., European Patent Application 329,822; Schuster et al., U.S. Pat. No. 5,169,766; Miller et al., PCT Application WO 89/06700; Kwoh et al., Proc. Natl. Acad. Sci. (U.S.A.) 86:1173-1177 (1989); Gingeras et al., PCT Application WO 88/10315; Walker et al., Proc. Natl. Acad. Sci. (U.S.A.) 89:392-396 (1992), all of which are herein incorporated by reference in their entirety).

[0146] The identification of a polymorphism can be determined in a variety of ways. By correlating the presence or absence of it in a plant with the presence or absence of a phenotype, it is possible to predict the phenotype of that plant. If a polymorphism creates or destroys a restriction endonuclease cleavage site, or if it results in the loss or insertion of DNA (e.g., a VNTR polymorphism), it will alter the size or profile of the DNA fragments that are generated by digestion with that restriction endonuclease. As such, individuals that possess a variant sequence can be distinguished from those having the original sequence by restriction fragment analysis. Polymorphisms that can be identified in this manner are termed “restriction fragment length polymorphisms” (“RFLPs”). RFLPs have been widely used in human and plant genetic analyses (Glassberg, UK Patent Application 2135774; Skolnick et al., Cytogen. Cell Genet. 32:58-67 (1982); Botstein et al., Ann. J. Hum. Genet. 32:314-331 (1980); Fischer et al. (PCT Application WO90/13668); Uhlen, PCT Application WO90/11369).

[0147] Polymorphisms can also be identified by Single Strand Conformation Polymorphism (SSCP) analysis. The SSCP technique is a method capable of identifying most sequence variations in a single strand of DNA, typically between 150 and 250 nucleotides in length (Elles, Methods in Molecular Medicine: Molecular Diagnosis of Genetic Diseases, Humana Press (1996); Orita et al., Genomics 5: 874-879 (1989), both of which are herein incorporated by reference in their entirety). Under denaturing conditions a single strand of DNA will adopt a conformation that is uniquely dependent on its sequence conformation. This conformation usually will be different, even if only a single base is changed. Most conformations have been reported to alter the physical configuration or size sufficiently to be detectable by electrophoresis. A number of protocols have been described for SSCP including, but not limited to Lee et al., Anal. Biochem. 205: 289-293 (1992), herein incorporated by reference in its entirety; Suzuki et al., Anal. Biochem. 192: 82-84 (1991), herein incorporated by reference in its entirety; Lo et al., Nucleic Acids Research 20: 1005-1009 (1992), herein incorporated by reference in its entirety, Sarkar et al., Genomics 13: 441-443 (1992), herein incorporated by reference in its entirety). It is understood that one or more of the nucleic acids of the present invention, may be utilized as markers or probes to detect polymorphisms by SSCP analysis.

[0148] Polymorphisms may also be found using a DNA fingerprinting technique called amplified fragment length polymorphism (AFLP), which is based on the selective PCR amplification of restriction fragments from a total digest of genomic DNA to profile that DNA. Vos et al., Nucleic Acids Res. 23:4407-4414 (1995), the entirety of which is herein incorporated by reference. This method allows for the specific co-amplification of high numbers of restriction fragments, which can be visualized by PCR without knowledge of the nucleic acid sequence.

[0149] AFLP employs basically three steps. Initially, a sample of genomic DNA is cut with restriction enzymes and oligonucleotide adapters are ligated to the restriction fragments of the DNA. The restriction fragments are then amplified using PCR by using the adapter and restriction sequence as target sites for primer annealing. The selective amplification is achieved by the use of primers that extend into the restriction fragments, amplifying only those fragments in which the primer extensions match the nucleotide flanking the restriction sites. These amplified fragments are then visualized on a denaturing polyacrylamide gel.

[0150] AFLP analysis has been performed on Salix (Beismann et al., Mol. Ecol. 6:989-993 (1997), the entirety of which is herein incorporated by reference); Acinetobacter (Janssen et al., Int. J. Syst. Bacteriol 47:1179-1187 (1997), the entirety of which is herein incorporated by reference), Aeromonas popoffi (Huys et al., Int. J. Syst. Bacteriol. 47:1165-1171 (1997), the entirety of which is herein incorporated by reference), rice (McCouch et al., Plant Mol. Biol. 35:89-99 (1997), the entirety of which is herein incorporated by reference); Nandi et al., Mol. Gen. Genet. 255:1-8 (1997); Cho et al., Genome 39:373-378 (1996), herein incorporated by reference), barley (Hordeum vulgare)(Simons et al., Genomics 44:61-70 (1997), the entirety of which is herein incorporated by reference; Waugh et al., Mol. Gen. Genet. 255:311-321 (1997), the entirety of which is herein incorporated by reference; Qi et al., Mol. Gen. Genet. 254:330-336 (1997), the entirety of which is herein incorporated by reference; Becker et al., Mol. Gen. Genet. 249:65-73 (1995), the entirety of which is herein incorporated by reference), potato (Van der Voort et al., Mol. Gen. Genet. 255:438-447 (1997), the entirety of which is herein incorporated by reference; Meksem et al., Mol. Gen. Genet. 249:74-81 (1995), the entirety of which is herein incorporated by reference), Phytophthora infestans (Van der Lee et al., Fungal Genet. Biol. 21:278-291 (1997), the entirety of which is herein incorporated by reference), Bacillus anthracis (Keim et al., J. Bacteriol. 179:818-824 (1997)), Astragalus cremnophylax (Travis et al., Mol. Ecol. 5:735-745 (1996), the entirety of which is herein incorporated by reference), Arabidopsis (Cnops et al., Mol. Gen. Genet. 253:32-41 (1996), the entirety of which is herein incorporated by reference), Escherichia coli (Lin et al., Nucleic Acids Res. 24:3649-3650 (1996), the entirety of which is herein incorporated by reference), Aeromonas (Huys et al., Int. J. Syst. Bacteriol. 46:572-580 (1996), the entirety of which is herein incorporated by reference), nematode (Folkertsma et al., Mol. Plant. Microbe Interact. 9:47-54 (1996), the entirety of which is herein incorporated by reference), tomato (Thomas et al., Plant J. 8:785-794 (1995), the entirety of which is herein incorporated by reference), and human (Latorra et al., PCR Methods Appl. 3:351-358 (1994)). AFLP analysis has also been used for fingerprinting mRNA (Money et al., Nucleic Acids Res. 24:2616-2617 (1996), the entirety of which is herein incorporated by reference; Bachem et al., Plant J. 9:745-753 (1996), the entirety of which is herein incorporated by reference). It is understood that one or more of the nucleic acids of the present invention, may be utilized as markers or probes to detect polymorphisms by AFLP analysis for fingerprinting mRNA.

[0151] Polymorphisms may also be found using random amplified polymorphic DNA (RAPD) (Williams et al., Nucl. Acids Res. 18: 6531-6535 (1990), the entirety of which is herein incorporated by reference) and cleavable amplified polymorphic sequences (CAPS) (Lyamichev et al., Science 260: 778-783 (1993), the entirety of which is herein incorporated by reference). It is understood that one or more of the nucleic acids of the present invention, may be utilized as markers or probes to detect polymorphisms by RAPD or CAPS analysis.

[0152] Polymorphisms are useful, through linkage analysis, to define the genetic distances or physical distances between polymorphic traits. A physical map or ordered array of genomic DNA fragments in the desired region containing the gene may be used to characterize and isolate genes corresponding to desirable traits. For this purpose, yeast artificial chromosomes (YACs), bacterial artificial chromosomes (BACs), and cosmids are appropriate vectors for cloning large segments of DNA molecules. Although fewer clones are needed to make a contig for a specific genomic region by using YACs (Agyare et al., Genome Res. 7: 1-9 (1997), the entirety of which is herein incorporated by reference; James et al., Genomics 32: 425-430 (1996), the entirety of which is herein incorporated by reference), chimerism in the inserted DNA fragment can arise. Cosmids are convenient for handling smaller-size DNA molecules and may be used for transformation in developing transgenic plants. BACs also carry DNA fragments and are less prone to chimerism.

[0153] Through genetic mapping, a fine scale linkage map can be developed using DNA markers and, then, a genomic DNA library of large-sized fragments can be screened with molecular markers linked to the desired trait. Molecular markers are advantageous for agronomic traits that are otherwise difficult to tag, such as resistance to pathogens, insects and nematodes, tolerance to abiotic stress, quality parameters and quantitative traits such as high yield potential.

[0154] The essential requirements for marker-assisted selection in a plant breeding program are: (1) the marker(s) should co-segregate or be closely linked with the desired trait; (2) an efficient means of screening large populations for the molecular marker(s) should be available; and (3) the screening technique should have high reproducibility across laboratories and preferably be economical to use and be user-friendly.

[0155] The genetic linkage of marker molecules can be established by a gene mapping model such as, without limitation, the flanking marker model reported by Lander and Botstein, Genetics 121:185-199 (1989) and the interval mapping, based on maximum likelihood methods described by Lander and Botstein, Genetics 121:185-199 (1989) and implemented in the software package MAPMAKER/QTL (Lincoln and Lander, Mapping Genes Controlling Quantitative Traits Using MAPMAKER/QTL, Whitehead Institute for Biomedical Research, Massachusetts, (1990). Additional software includes Qgene, Version 2.23 (1996), Department of Plant Breeding and Biometry, 266 Emerson Hall, Cornell University, Ithaca, N.Y., the manual of which is herein incorporated by reference in its entirety). Use of Qgene software is a particularly preferred approach.

[0156] A maximum likelihood estimate (MLE) for the presence of a marker is calculated, together with an MLE assuming no QTL effect, to avoid false positives. A log₁₀ of an odds ratio (LOD) is then calculated as: LOD=log₁₀ (MLE for the presence of a QTL/MLE given no linked QTL).

[0157] The LOD score essentially indicates how much more likely the data are to have arisen assuming the presence of a QTL than in its absence. The LOD threshold value for avoiding a false positive with a given confidence, say 95%, depends on the number of markers and the length of the genome. Graphs indicating LOD thresholds are set forth in Lander and Botstein, Genetics 121:185-199 (1989) the entirety of which is herein incorporated by reference and further described by Arús and Moreno-González, Plant Breeding, Hayward et al., (eds.) Chapman & Hall, London, pp. 314-331 (1993), the entirety of which is herein incorporated by reference.

[0158] Additional models can be used. Many modifications and alternative approaches to interval mapping have been reported, including the use of non-parametric methods (Kruglyak and Lander, Genetics 139:1421-1428 (1995), the entirety of which is herein incorporated by reference). Multiple regression methods or models can be also be used, in which the trait is regressed on a large number of markers (Jansen, Biometrics in Plant Breeding, van Oijen and Jansen (eds.), Proceedings of the Ninth Meeting of the Eucarpia Section Biometrics in Plant Breeding, The Netherlands, pp. 116-124 (1994); Weber and Wricke, Advances in Plant Breeding, Blackwell, Berlin, 16 (1994), both of which are herein incorporated by reference in their entirety). Procedures combining interval mapping with regression analysis, whereby the phenotype is regressed onto a single putative QTL at a given marker interval and at the same time onto a number of markers that serve as ‘cofactors,’ have been reported by Jansen and Stam, Genetics 136:1447-1455 (1994), herein incorporated by reference in its entirety and Zeng, Genetics 136:1457-1468 (1994) herein incorporated by reference in its entirety. Generally, the use of cofactors reduces the bias and sampling error of the estimated QTL positions (Utz and Melchinger, Biometrics in Plant Breeding, van Oijen and Jansen (eds.) Proceedings of the Ninth Meeting of the Eucarpia Section Biometrics in Plant Breeding, The Netherlands, pp. 195-204 (1994), herein incorporated by reference in its entirety), thereby improving the precision and efficiency of QTL mapping (Zeng, Genetics 136:1457-1468 (1994)). These models can be extended to multi-environment experiments to analyze genotype-environment interactions (Jansen et al., Theo. Appl. Genet. 91:33-37 (1995), the entirety of which is herein incorporated by reference).

[0159] Selection of an appropriate mapping population is important to map construction. The choice of an appropriate mapping population depends on the type of marker systems employed (Tanksley et al., Molecular mapping plant chromosomes. Chromosome structure and function: Impact of new concepts, Gustafson and Appels (eds.), Plenum Press, New York, pp 157-173 (1988), herein incorporated by reference in its entirety). Consideration must be given to the source of parents (adapted vs. exotic) used in the mapping population. Chromosome pairing and recombination rates can be severely disturbed (suppressed) in wide crosses (adapted×exotic) and generally yield greatly reduced linkage distances. Wide crosses will usually provide segregating populations with a relatively large array of polymorphisms when compared to progeny in a narrow cross (adapted×adapted).

[0160] An F₂ population is the first generation of selfing after the hybrid seed is produced. Usually a single F₁ plant is selfed to generate a population segregating for all the genes in Mendelian (1:2:1) fashion. Maximum genetic information is obtained from a completely classified F₂ population using a codominant marker system (Mather, Measurement of Linkage in Heredity, Methuen and Co., (1938), the entirety of which is herein incorporated by reference). In the case of dominant markers, progeny tests (e.g. F₃, BCF₂) are required to identify the heterozygotes, thus making it equivalent to a completely classified F₂ population. However, this procedure is often prohibitive because of the cost and time involved in progeny testing. Progeny testing of F₂ individuals is often used in map construction where phenotypes do not consistently reflect genotype (e.g. disease resistance) or where trait expression is controlled by a QTL. Segregation data from progeny test populations (e.g. F₃ or BCF₂) can be used in map construction. Marker-assisted selection can then be applied to cross progeny based on marker-trait map associations (F₂, F₃), where linkage groups have not been completely disassociated by recombination events (i.e., maximum disequilibrium).

[0161] Recombinant inbred lines (RIL) (genetically related lines; usually >F₅, developed from continuously selfing F₂ lines towards homozygosity) can be used as a mapping population. Information obtained from dominant markers can be maximized by using RIL because all loci are homozygous or nearly so. Under conditions of tight linkage (i.e., about <10% recombination), dominant and co-dominant markers evaluated in RIL populations provide more information per individual than either marker type in backcross populations (Reiter et al., Proc. Natl. Acad. Sci. (U.S.A.) 89:1477-1481 (1992), the entirety of which is herein incorporated by reference). However, as the distance between markers becomes larger (i.e., loci become more independent), the information in RIL populations decreases dramatically when compared to codominant markers.

[0162] Backcross populations (e.g., generated from a cross between a successful variety (recurrent parent) and another variety (donor parent) carrying a trait not present in the former) can be utilized as a mapping population. A series of backcrosses to the recurrent parent can be made to recover most of its desirable traits. Thus a population is created consisting of individuals nearly like the recurrent parent but each individual carries varying amounts or mosaic of genomic regions from the donor parent. Backcross populations can be useful for mapping dominant markers if all loci in the recurrent parent are homozygous and the donor and recurrent parent have contrasting polymorphic marker alleles (Reiter et al., Proc. Natl. Acad. Sci. (U.S.A.) 89:1477-1481 (1992)). Information obtained from backcross populations using either codominant or dominant markers is less than that obtained from F₂ populations because one, rather than two, recombinant gametes are sampled per plant. Backcross populations, however, are more informative (at low marker saturation) when compared to RILs as the distance between linked loci increases in RIL populations (i.e. about 15% recombination). Increased recombination can be beneficial for resolution of tight linkages, but may be undesirable in the construction of maps with low marker saturation.

[0163] Near-isogenic lines (NIL) created by many backcrosses to produce an array of individuals that are nearly identical in genetic composition except for the trait or genomic region under interrogation can be used as a mapping population. In mapping with NILs, only a portion of the polymorphic loci are expected to map to a selected region.

[0164] Bulk segregant analysis (BSA) is a method developed for the rapid identification of linkage between markers and traits of interest (Michelmore et al., Proc. Natl. Acad. Sci. (U.S.A.) 88:9828-9832 (1991), the entirety of which is herein incorporated by reference). In BSA, two bulked DNA samples are drawn from a segregating population originating from a single cross. These bulks contain individuals that are identical for a particular trait (resistant or susceptible to particular disease) or genomic region but arbitrary at unlinked regions (i.e. heterozygous). Regions unlinked to the target region will not differ between the bulked samples of many individuals in BSA.

[0165] It is understood that one or more of the nucleic acid molecules of the present invention may be used as molecular markers. It is also understood that one or more of the protein molecules of the present invention may be used as molecular markers.

[0166] In accordance with this aspect of the present invention, a sample nucleic acid is obtained from plant cells or tissues. Any source of nucleic acid may be used. Preferably, the nucleic acid is genomic DNA. The nucleic acid is subjected to restriction endonuclease digestion. For example, one or more EST nucleic acid molecule or fragment thereof can be used as a probe in accordance with the above-described polymorphic methods. The polymorphism obtained in this approach can then be cloned to identify the mutation at the coding region which alters the protein's structure or regulatory region of the gene which affects its expression level.

[0167] In one aspect of the present invention, an evaluation can be conducted to determine whether a particular mRNA molecule is present. One or more of the nucleic acid molecules of the present invention, preferably one or more of the EST nucleic acid molecules of the present invention are utilized to detect the presence or quantity of the mRNA species. Such molecules are then incubated with cell or tissue extracts of a plant under conditions sufficient to permit nucleic acid hybridization. The detection of double-stranded probe-mRNA hybrid molecules is indicative of the presence of the mRNA; the amount of such hybrid formed is proportional to the amount of mRNA. Thus, such probes may be used to ascertain the level and extent of the mRNA production in a plant's cells or tissues. Such nucleic acid hybridization may be conducted under quantitative conditions (thereby providing a numerical value of the amount of the mRNA present). Alternatively, the assay may be conducted as a qualitative assay that indicates either that the mRNA is present, or that its level exceeds a user set, predefined value.

[0168] A principle of in situ hybridization is that a labeled, single-stranded nucleic acid probe will hybridize to a complementary strand of cellular DNA or RNA and, under the appropriate conditions, these molecules will form a stable hybrid. When nucleic acid hybridization is combined with histological techniques, specific DNA or RNA sequences can be identified within a single cell. An advantage of in situ hybridization over more conventional techniques for the detection of nucleic acids is that it allows an investigator to determine the precise spatial population (Angerer et al., Dev. Biol. 101: 477-484 (1984); Angerer et al., Dev. Biol. 112: 157-166 (1985); Dixon et al., EMBO J. 10: 1317-1324 (1991), all of which are herein incorporated by reference in their entirety). In situ hybridization may be used to measure the steady-state level of RNA accumulation. It is a sensitive technique and RNA sequences present in as few as 5-10 copies per cell can be detected (Hardin et al., J. Mol. Biol. 202: 417-431. (1989), herein incorporated by reference in its entirety). A number of protocols have been devised for in situ hybridization, each with tissue preparation, hybridization, and washing conditions (Meyerowitz, Plant Mol. Biol. Rep. 5: 242-250 (1987); Cox and Goldberg, In: Plant Molecular Biology: A Practical Approach (ed. C. H. Shaw), pp. 1-35. IRL Press, Oxford (1988); Raikhel et al., In situ RNA hybridization in plant tissues. In Plant Molecular Biology Manual, vol. B9: 1-32. Kluwer Academic Publisher, Dordrecht, Belgium (1989), all of which are herein incorporated by reference in their entirety).

[0169] In situ hybridization also allows for the localization of proteins within a tissue or cell (Wilkinson, In Situ Hybridization, Oxford University Press, Oxford (1992); Langdale, In Situ Hybridization 165-179 In: The Maize Handbook, eds. Freeling and Walbot, Springer-Verlag, New York (1994), both of which are herein incorporated by reference in their entirety). It is understood that one or more of the molecules of the present invention, preferably one or more of the EST nucleic acid molecules of the present invention or one or more of the antibodies of the present invention may be utilized to detect the level or pattern of a protein or fragment thereof by in situ hybridization.

[0170] Fluorescent in situ hybridization also enables the localization of a particular DNA sequence along a chromosome which is useful, among other uses, for gene mapping, following chromosomes in hybrid lines or detecting chromosomes with translocations, transversions or deletions. In situ hybridization has been used to identify chromosomes in several plant species (Griffor et al., Plant Mol. Biol. 17: 101-109 (1991); Gustafson et al., Proc. Nat'l. Acad. Sci. (U.S.A.). 87:1899-1902 (1990); Mukai and Gill, Genome 34: 448-452. (1991); Schwarzacher and Heslop-Harrison, Genome 34: 317-323 (1991); Wang et al., Jpn. J. Genet. 66: 313-316 (1991); Parra and Windle, Nature Genetics, 5: 17-21 (1993), all of which are herein incorporated by reference in their entirety). It is understood that the nucleic acid molecules of the present invention may be used as probes or markers to localize sequences along a chromosome.

[0171] It is also understood that one or more of the molecules of the present invention, preferably one or more of the EST nucleic acid molecules of the present invention or one or more of the antibodies of the present invention may be utilized to detect the expression level or pattern of a protein or mRNA thereof by in situ hybridization.

[0172] Another method to localize the expression of a molecule is tissue printing. Tissue printing provides a way to screen, at the same time on the same membrane many tissue sections from different plants or different developmental stages. Tissue-printing procedures utilize films designed to immobilize proteins and nucleic acids. In essence, a freshly cut section of an organ is pressed gently onto nitrocellulose paper, nylon membrane or polyvinylidene difluoride membrane. Such membranes are commercially available (e.g. Millipore, Bedford, Mass.). The contents of the cut cell transfer onto the membrane, and the molecules are immobilized to the membrane. The immobilized molecules form a latent print that can be visualized with appropriate probes. When a plant tissue print is made on nitrocellulose paper, the cell walls leave a physical print that makes the anatomy visible without further treatment (Varner and Taylor, Plant Physiol. 91: 31-33 (1989), the entirety of which is herein incorporated by reference).

[0173] Tissue printing on substrate films is described by Daoust, Exp. Cell Res. 12: 203-211 (1957), herein incorporated by reference in its entirety, who detected amylase, protease, ribonuclease, and deoxyribonuclease in animal tissues using starch, gelatin, and agar films. These techniques can be applied to plant tissues (Yomo and Taylor, Planta 112:35-43 (1973); Harris and Chrispeels, Plant Physiol. 56: 292-299 (1975), both of which are herein incorporated by reference in their entirety). Advances in membrane technology have increased the range of applications of Daoust's tissue-printing techniques allowing (Cassab and Varner, J. Cell. Biol. 105: 2581-2588 (1987), the entirety of which is herein incorporated by reference; the histochemical localization of various plant enzymes and deoxyribonuclease on nitrocellulose paper and nylon (Spruce et al., Phytochemistry, 26: 2901-2903 (1987); Barres et al. Neuron 5: 527-544 (1990); Reid and Pont-Lezica, Tissue Printing: Tools for the Study of Anatomy, Histochemistry, and Gene Expression, Academic Press, New York, N.Y. (1992); Reid et al. Plant Physiol. 93: 160-165 (1990); Ye et al. Plant J. 1: 175-183 (1991), all of which are herein incorporated by reference in their entirety).

[0174] It is understood that one or more of the molecules of the present invention, preferably one or more of the EST nucleic acid molecules of the present invention or one or more of the antibodies of the present invention may be utilized to detect the presence or quantity of a protein by tissue printing.

[0175] Further, it is also understood that any of the nucleic acid molecules of the present invention may be used as marker nucleic acids and or probes in connection with methods that require probes or marker nucleic acids. As used herein, a probe is an agent that is utilized to determine an attribute or feature (e.g. presence or absence, location, correlation, etc.) or a molecule, cell, tissue or plant. As used herein, a marker nucleic acid is a nucleic acid molecule that is utilized to determine an attribute or feature (e.g., presence or absence, location, correlation, etc.) or a molecule, cell, tissue or plant.

[0176] A microarray-based method for high-throughput monitoring of plant gene expression may be utilized to measure gene-specific hybridization targets. This ‘chip’-based approach involves using microarrays of nucleic acid molecules as gene-specific hybridization targets to quantitatively measure expression of the corresponding plant genes (Schena et al., Science 270: 467-470 (1995); Shalon, Ph.D. Thesis. Stanford University (1996), both of which are herein incorporated by reference in their entirety). Every nucleotide in a large sequence can be queried at the same time. Hybridization can be used to efficiently analyze large amounts of nucleotide sequence.

[0177] Several microarray methods have been described. One method compares the sequences to be analyzed by hybridization to a set of oligonucleotides representing all possible subsequences (Bains and Smith, J. Theor. Biol. 135: 303 (1989), the entirety of which is herein incorporated by reference). A second method hybridizes the sample to an array of oligonucleotide probes. An array consisting of oligonucleotides complementary to subsequences of a target sequence can be used to determine the identity of a target sequence, measure its amount, and detect differences between the target and a reference sequence. Nucleic acid molecules microarrays may also be screened with protein molecules or fragments thereof to determine nucleic acid molecules that specifically bind protein molecules or fragments thereof.

[0178] The microarray approach may be used with polypeptide targets (U.S. Pat. No. 5,445,934; U.S. Pat. No. 5,143,854; U.S. Pat. No. 5,079,600; U.S. Pat. No. 4,923,901, all of which are herein incorporated by reference in their entirety). Essentially, polypeptides are synthesized on a substrate (microarray) and these polypeptides can be screened with either protein molecules or fragments thereof or nucleic acid molecules in order to screen for either protein molecules or fragments thereof or nucleic acid molecules that specifically bind the target polypeptides. Implementation of these techniques rely on recently developed combinatorial technologies to generate any ordered array of a large number of oligonucleotide probes (Fodor et al., Science 251:767-773 (1991), the entirety of which is herein incorporated by reference).

[0179] It is understood that one or more of the molecules of the present invention, preferably one or more of the nucleic acid molecules or protein molecules or fragments thereof of the present invention may be utilized in a microarray based method.

[0180] In a preferred embodiment of the present invention microarrays may be prepared that comprise nucleic acid molecules where preferably at least 10%, preferably at least 25%, more preferably at least 50% and even more preferably at least 75%, 80%, 85%, 90% or 95% of the nucleic acid molecules located on that array are selected from the group of nucleic acid molecules that specifically hybridize to one or more nucleic acid molecule having a nucleic acid sequence selected from the group of SEQ ID NO: 1 through SEQ ID NO: 52949 or complement thereof or fragments of either.

[0181] A particular preferred microarray embodiment of the present invention is a microarray comprising nucleic acid molecules encoding genes or fragments thereof that are homologues of known genes or nucleic acid molecules that comprise genes or fragment thereof that elicit only limited or no matches to known genes. A further preferred microarray embodiment of the present invention is a microarray comprising nucleic acid molecules having genes or fragments thereof that are homologues of known genes and nucleic acid molecules that comprise genes or fragment thereof that elicit only limited or no matches to known genes. Site-directed mutagenesis may be utilized to modify nucleic acid sequences, particularly as it is a technique that allows one or more of the amino acids encoded by a nucleic acid molecule to be altered (e.g. a threonine to be replaced by a methionine). Three basic methods for site-directed mutagenesis are often employed. These are cassette mutagenesis (Wells et al., Gene 34:315-23 (1985), the entirety of which is herein incorporated by reference), primer extension (Gilliam et al., Gene 12:129-137 (1980), the entirety of which is herein incorporated by reference); Zoller and Smith, Methods Enzymol. 100:468-500 (1983), the entirety of which is herein incorporated by reference; and Dalbadie-McFarland et al., Proc. Natl. Acad. Sci. (U.S.A.) 79:6409-6413 (1982), the entirety of which is herein incorporated by reference) and methods based upon PCR (Scharf et al., Science 233:1076-1078 (1986), the entirety of which is herein incorporated by reference; Higuchi et al., Nucleic Acids Res. 16:7351-7367 (1988), the entirety of which is herein incorporated by reference). Site-directed mutagenesis approaches are also described in European Patent 0 385 962, the entirety of which is herein incorporated by reference, European Patent 0 359 472, the entirety of which is herein incorporated by reference, and PCT Patent Application WO 93/07278, the entirety of which is herein incorporated by reference.

[0182] Site-directed mutagenesis strategies have been applied to plants for both in vitro as well as in vivo site-directed mutagenesis (Lanz et al., J. Biol. Chem. 266:9971-6 (1991); Kovgan and Zhdanov, Biotekhnologiya 5:148-154; No. 207160n, Chemical Abstracts 110:225 (1989); Ge et al., Proc. Natl. Acad. Sci. (U.S.A.) 86:4037-4041 (1989); Zhu et al., J. Biol. Chem. 271:18494-18498 (1996); Chu et al., Biochemistry 33:6150-6157 (1994); Small et al., EMBO J. 11: 1291-1296 (1992); Cho et al., Mol. Biotechnol. 8:13-16 (1997); Kita et al., J. Biol. Chem. 271:26529-26535 (1996); Jin et al., Mol. Microbiol. 7:555-562 (1993); Hatfield and Vierstra, J. Biol. Chem. 267:14799-14803 (1992); Zhao et al., Biochemistry 31:5093-5099 (1992), all of which are herein incorporated by reference in their entirety).

[0183] Any of the nucleic acid molecules of the present invention may either be modified by site-directed mutagenesis or used as, for example, nucleic acid molecules that are used to target other nucleic acid molecules for modification. It is understood that mutants with more than one altered nucleotide can be constructed using techniques that practitioners skilled in the art are familiar with such as isolating restriction fragments and ligating such fragments into an expression vector (see, for example, Sambrook et al., Molecular Cloning: A Laboratory Manual, Cold Spring Harbor Press (1989)).

[0184] Sequence-specific DNA-binding proteins play a role in the regulation of transcription. The isolation of recombinant cDNAs encoding these proteins facilitates the biochemical analysis of their structural and functional properties. Genes encoding such DNA-binding proteins have been isolated using classical genetics (Vollbrecht et al., Nature 350: 241-243 (1991), herein incorporated by reference in its entirety) and molecular biochemical approaches, including the screening of recombinant cDNA libraries with antibodies (Landschulz et al., Genes Dev. 2: 786-800 (1988), herein incorporated by reference in its entirety) or DNA probes (Bodner et al., Cell 55: 505-518 (1988), herein incorporated by reference in its entirety). In addition, an in situ screening procedure has been used and has facilitated the isolation of sequence-specific DNA-binding proteins from various plant species (Gilmartin et al., Plant Cell 4: 839-849 (1992); Schindler et al., EMBO J. 11: 1261-1273 (1992) both of which are herein incorporated by reference in their entirety). An in situ screening protocol does not require the purification of the protein of interest (Vinson et al., Genes Dev. 2: 801-806 (1988); Singh et al., Cell 52: 415-423 (1988), both of which are herein incorporated by reference in their entirety).

[0185] Steps may be employed to characterize DNA-protein interactions. The first is to identify promoter fragments that interact with DNA-binding proteins, to titrate binding activity, to determine the specificity of binding, and to determine whether a given DNA-binding activity can interact with related DNA sequences (Sambrook et al., Molecular Cloning: A Laboratory Manual, 2^{nd} edition. Cold Spring Harbor Laboratory Press, Cold Spring Harbor, N.Y. (1989). Electrophoretic mobility-shift assay is a widely used assay. The assay provides a simple, rapid, and sensitive method for detecting DNA-binding proteins based on the observation that the mobility of a DNA fragment through a nondenaturing, low-ionic strength polyacrylamide gel is retarded upon association with a DNA-binding protein (Fried and Crother, Nucleic Acids Res. 9: 6505-6525 (1981), herein incorporated by reference in its entirety). When one or more specific binding activities have been identified, the exact sequence of the DNA bound by the protein may be determined. Several procedures for characterizing protein/DNA-binding sites are used, including methylation and ethylation interference assays (Maxam and Gilbert, Methods Enzymol. 65: 499-560 (1980); Wissman and Hillen, Methods Enzymol. 208: 365-379 (1991), both of which are herein incorporated by reference in their entirety) and footprinting techniques employing DNase I (Galas and Schmitz, Nucleic Acids Res. 5: 3157-3170 (1978), herein incorporated by reference in its entirety), 1,10-phenanthroline-copper ion methods (Sigman et al., Methods Enzymol. 208: 365-379 (1991), herein incorporated by reference in its entirety) or hydroxyl radical methods (Dixon et al., Methods Enzymol. 208: 380-413 (1991), herein incorporated by reference in its entirety). It is understood that one or more of the nucleic acid molecules of the present invention, preferably one or more of the EST nucleic acid molecules of the present invention may be utilized to identify a protein or fragment thereof that specifically binds to a nucleic acid molecule of the present invention. It is also understood that one or more of the protein molecules or fragments thereof of the present invention may be utilized to identify a nucleic acid molecule that specifically binds to it.

[0186] The two-hybrid system is based on the fact that many cellular functions are carried out by proteins that interact (physically) with one another. Two-hybrid systems have been used to probe the function of new proteins (Chien et al., Proc. Natl. Acad. Sci. (U.S.A.) 88: 9578-9582 (1991); Durfee et. al., Genes Dev. 7: 555-569 (1993); Choi et al., Cell 78: 499-512 (1994); Kranz et al., Genes Dev. 8: 313-327 (1994), all of which are herein incorporated by reference in their entirety).

[0187] Interaction mating techniques have facilitated a number of two-hybrid studies of protein-protein interaction. Interaction mating has been used to examine interactions between small sets of tens of proteins (Finley and Brent, Proc. Natl. Acad. Sci. (U.S.A.) 91: 12098-12984 (1994), herein incorporated by reference in its entirety), larger sets of hundreds of proteins, (Bendixen et al., Nucl. Acids Res. 22: 1778-1779 (1994), herein incorporated by reference in its entirety) and to comprehensively map proteins encoded by a small genome (Bartel et al., Nature Genetics 12: 72-77 (1996), herein incorporated by reference in its entirety). This technique utilizes proteins fused to the DNA-binding domain and proteins fused to the activation domain. They are expressed in two different haploid yeast strains of opposite mating type, and the strains are mated to determine if the two proteins interact. Mating occurs when haploid yeast strains come into contact and result in the fusion of the two haploids into a diploid yeast strain. An interaction can be determined by the activation of a two-hybrid reporter gene in the diploid strain. The primary advantage of this technique is that it reduces the number of yeast transformations needed to test individual interactions. It is understood that the protein-protein interactions of protein or fragments thereof of the present invention may be investigated using the two-hybrid system and that any of the nucleic acid molecules of the present invention that encode such proteins or fragments thereof may be used to transform yeast in the two-hybrid system.

[0188] Synechocystis 6803 is a photosynthetic Cyanobacterium capable of oxygenic photosynthesis as well as heterotrophic growth in the absence of light. The entire genome has been sequenced, and it is reported to have a circular genome size of 3.57 Mbp containing 3168 potential open reading frames. Open reading frames (ORFs) were identified based upon their homology to other reported ORFs and by using ORF identification computer programs. Sixteen hundred potential ORFs were assigned based on their homology to previously identified ORFs. Of these 1600 ORFs, 145 were identical to reported ORFs (Kaneko et al., DNA Research 3:109-36 (1996), herein incorporated by reference in its entirety).

[0189] Several prokaryote promoters have been used in Synechocystis to express heterologous genes including the tac, lac, and lambda phage promoters (Bryant (ed.), The Molecular Biology of Cyanobacteria, Kluwer Academic Publishers, (1994); Ferino and Chauvat, Gene 84:257-266 (1989), both of which are herein incorporated by reference in their entirety). Several bacterial origins of replication such as RSF1010 and ACYC are reported to replicate in Synechocystis (Mermet-Bouvier and Chauvat, Current Microbiology 28:145-148 (1994); Kuhlemeier et al., Mol. Gen. Genet. 184:249-254 (1981), both of which are herein incorporated by reference in their entirety).

[0190] Synechocystis has been used to study gene regulation by gene replacement through homologous recombination or by gene disruption using antibiotic resistance markers (Pakrasi et al., EMBO 7:325-332 (1988), herein incorporated by reference in its entirety). In such gene regulation studies, double reciprocal homologous regions of the host genome flanking the gene of interest recombine to stably integrate the gene of interest into the genome. The gene of interest can be expressed once that gene has been stably integrated into the genome. Biochemical analysis can be performed to study the effect of the replaced or deleted gene.

[0191] It is understood that the agents of the present invention may be employed in a Synechocystis system.

[0192] Exogenous genetic material may be transferred into a plant cell and the plant cell regenerated into a whole, fertile or sterile plant. Exogenous genetic material is any genetic material, whether naturally occurring or otherwise, from any source that is capable of being inserted into any organism. Such genetic material may be transferred into either monocotyledons and dicotyledons including but not limited to the crops, maize and soybean (See specifically, Chistou, Particle Bombardment for Genetic Engineering of Plants, pp 63-69 (maize), pp 50-60 (soybean), Biotechnology Intelligence Unit. Academic Press, San Diego, Calif. (1996), the entirety of which is herein incorporated by reference and generally Chistou, Particle Bombardment for Genetic Engineering of Plants, Biotechnology Intelligence Unit. Academic Press, San Diego, Calif. (1996), the entirety of which is herein incorporated by reference).

[0193] Transfer of a nucleic acid that encodes for a protein can result in overexpression of that protein in a transformed cell or transgenic plant. One or more of the proteins or fragments thereof encoded by nucleic acid molecules of the present invention may be overexpressed in a transformed cell or transformed plant. Such overexpression may be the result of transient or stable transfer of the exogenous material.

[0194] Exogenous genetic material may be transferred into a plant cell by the use of a DNA vector or construct designed for such a purpose. Design of such a vector is generally within the skill of the art (See, Plant Molecular Biology: A Laboratory Manual eds. Clark, Springer, New York (1997), the entirety of which is herein incorporated by reference).

[0195] A construct or vector may include a plant promoter to express the protein or protein fragment of choice. A number of promoters which are active in plant cells have been described in the literature. These include the nopaline synthase (NOS) promoter (Ebert et al., Proc. Natl. Acad. Sci. (U.S.A.) 84:5745-5749 (1987), the entirety of which is herein incorporated by reference), the octopine synthase (OCS) promoter (which are carried on tumor-inducing plasmids of Agrobacterium tumefaciens), the caulimovirus promoters such as the cauliflower mosaic virus (CaMV) 19S promoter (Lawton et al., Plant Mol. Biol. 9:315-324 (1987), the entirety of which is herein incorporated by reference) and the CAMV 35S promoter (Odell et al., Nature 313:810-812 (1985), the entirety of which is herein incorporated by reference), the figwort mosaic virus 35S-promoter, the light-inducible promoter from the small subunit of ribulose-1,5-bis-phosphate carboxylase (ssRUBISCO), the Adh promoter (Walker et al., Proc. Natl. Acad. Sci. (U.S.A.) 84:6624-6628 (1987), the entirety of which is herein incorporated by reference), the sucrose synthase promoter (Yang et al., Proc. Natl. Acad. Sci. (U.S.A.) 87:4144-4148 (1990), the entirety of which is herein incorporated by reference), the R gene complex promoter (Chandler et al., The Plant Cell 1:1175-1183 (1989), the entirety of which is herein incorporated by reference), and the chlorophyll a/b binding protein gene promoter, etc. These promoters have been used to create DNA constructs which have been expressed in plants; see, e.g., PCT publication WO 84/02913, herein incorporated by reference in its entirety.

[0196] Promoters which are known or are found to cause transcription of DNA in plant cells can be used in the present invention. Such promoters may be obtained from a variety of sources such as plants and plant viruses. It is preferred that the particular promoter selected should be capable of causing sufficient expression to result in the production of an effective amount of a protein to cause the desired phenotype. In addition to promoters which are known to cause transcription of DNA in plant cells, other promoters may be identified for use in the current invention by screening a plant cDNA library for genes which are selectively or preferably expressed in the target tissues or cells.

[0197] For the purpose of expression in source tissues of the plant, such as the leaf, seed, root or stem, it is preferred that the promoters utilized in the present invention have relatively high expression in these specific tissues. For this purpose, one may choose from a number of promoters for genes with tissue- or cell-specific or -enhanced expression. Examples of such promoters reported in the literature include the chloroplast glutamine synthetase GS2 promoter from pea (Edwards et al., Proc. Natl. Acad. Sci. (U.S.A.) 87:3459-3463 (1990), herein incorporated by reference in its entirety), the chloroplast fructose-1,6-biphosphatase (FBPase) promoter from wheat (Lloyd et al., Mol. Gen. Genet. 225:209-216 (1991), herein incorporated by reference in its entirety), the nuclear photosynthetic ST-LS1 promoter from potato (Stockhaus et al., EMBO J. 8:2445-2451 (1989), herein incorporated by reference in its entirety), the phenylalanine ammonia-lyase (PAL) promoter and the chalcone synthase (CHS) promoter from Arabidopsis thaliana. Also reported to be active in photosynthetically active tissues are the ribulose-1,5-bisphosphate carboxylase (RbcS) promoter from eastern larch (Larix laricina), the promoter for the cab gene, cab6, from pine (Yamamoto et al., Plant Cell Physiol. 35:773-778 (1994), herein incorporated by reference in its entirety), the promoter for the Cab-1 gene from wheat (Fejes et al., Plant Mol. Biol. 15:921-932 (1990), herein incorporated by reference in its entirety), the promoter for the CAB-1 gene from spinach (Lubberstedt et al., Plant Physiol. 104:997-1006 (1994), herein incorporated by reference in its entirety), the promoter for the cab1R gene from rice (Luan et al., Plant Cell. 4:971-981 (1992), the entirety of which is herein incorporated by reference), the pyruvate, orthophosphate dikinase (PPDK) promoter from maize (Matsuoka et al., Proc. Natl. Acad. Sci. (U.S.A.) 90: 9586-9590 (1993), herein incorporated by reference in its entirety), the promoter for the tobacco Lhcb1*2 gene (Cerdan et al., Plant Mol. Biol. 33: 245-255. (1997), herein incorporated by reference in its entirety), the Arabidopsis thaliana SUC2 sucrose-H+ symporter promoter (Truernit et al., Planta. 196: 564-570 (1995), herein incorporated by reference in its entirety), and the promoter for the thylacoid membrane proteins from spinach (psaD, psaF, psaE, PC, FNR, atpC, atpD, cab, rbcS). Other promoters for the chlorophyl a/b-binding proteins may also be utilized in the present invention, such as the promoters for LhcB gene and PsbP gene from white mustard (Sinapis alba; Kretsch et al., Plant Mol. Biol. 28: 219-229 (1995), the entirety of which is herein incorporated by reference).

[0198] For the purpose of expression in sink tissues of the plant, such as the tuber of the potato plant, the fruit of tomato, or the seed of maize, wheat, rice, and barley, it is preferred that the promoters utilized in the present invention have relatively high expression in these specific tissues. A number of promoters for genes with tuber-specific or -enhanced expression are known, including the class I patatin promoter (Bevan et al., EMBO J. 8: 1899-1906 (1986); Jefferson et al., Plant Mol. Biol. 14: 995-1006 (1990), both of which are herein incorporated by reference in its entirety), the promoter for the potato tuber ADPGPP genes, both the large and small subunits, the sucrose synthase promoter (Salanoubat and Belliard, Gene. 60: 47-56 (1987), Salanoubat and Belliard, Gene. 84: 181-185 (1989), both of which are incorporated by reference in their entirety), the promoter for the major tuber proteins including the 22 kd protein complexes and proteinase inhibitors (Hannapel, Plant Physiol. 101: 703-704 (1993), herein incorporated by reference in its entirety), the promoter for the granule bound starch synthase gene (GBSS) (Visser et al., Plant Mol. Biol. 17: 691-699 (1991), herein incorporated by reference in its entirety), and other class I and II patatins promoters (Koster-Topfer et al., Mol Gen Genet. 219: 390-396 (1989); Mignery et al., Gene. 62: 27-44 (1988), both of which are herein incorporated by reference in their entirety).

[0199] Other promoters can also be used to express a fructose 1,6 bisphosphate aldolase gene in specific tissues, such as seeds or fruits. The promoter for β-conglycinin (Chen et al., Dev. Genet. 10: 112-122 (1989), herein incorporated by reference in its entirety) or other seed-specific promoters such as the napin and phaseolin promoters, can be used. The zeins are a group of storage proteins found in maize endosperm. Genomic clones for zein genes have been isolated (Pedersen et al., Cell 29: 1015-1026 (1982), herein incorporated by reference in its entirety), and the promoters from these clones, including the 15 kD, 16 kD, 19 kD, 22 kD, 27 kD, and gamma genes, could also be used. Other promoters known to function, for example, in maize, include the promoters for the following genes: waxy, Brittle, Shrunken 2, Branching enzymes I and II, starch synthases, debranching enzymes, oleosins, glutelins, and sucrose synthases. A particularly preferred promoter for maize endosperm expression is the promoter for the glutelin gene from rice, more particularly the Osgt-1 promoter (Zheng et al., Mol. Cell. Biol. 13: 5829-5842 (1993), herein incorporated by reference in its entirety). Examples of promoters suitable for expression in wheat include those promoters for the ADPglucose pyrophosphorylase (ADPGPP) subunits, the granule bound and other starch synthases, the branching and debranching enzymes, the embryogenesis-abundant proteins, the gliadins, and the glutenins. Examples of such promoters in rice include those promoters for the ADPGPP subunits, the granule bound and other starch synthases, the branching enzymes, the debranching enzymes, sucrose synthases, and the glutelins. A particularly preferred promoter is the promoter for rice glutelin, Osgt-1. Examples of such promoters for barley include those for the ADPGPP subunits, the granule bound and other starch synthases, the branching enzymes, the debranching enzymes, sucrose synthases, the hordeins, the embryo globulins, and the aleurone specific proteins.

[0200] Root specific promoters may also be used. An example of such a promoter is the promoter for the acid chitinase gene (Samac et al., Plant Mol. Biol. 25: 587-596 (1994), the entirety of which is herein incorporated by reference). Expression in root tissue could also be accomplished by utilizing the root specific subdomains of the CaMV35S promoter that have been identified (Lam et al., Proc. Natl. Acad. Sci. (U.S.A.) 86:7890-7894 (1989), herein incorporated by reference in its entirety). Other root cell specific promoters include those reported by Conkling et al. (Conkling et al., Plant Physiol. 93:1203-1211 (1990), the entirety of which is herein incorporated by reference).

[0201] Additional promoters that may be utilized are described, for example, in U.S. Pat. Nos. 5,378,619, 5,391,725, 5,428,147, 5,447,858, 5,608,144, 5,608,144, 5,614,399, 5,633,441, 5,633,435, and 4,633,436, all of which are herein incorporated in their entirety. In addition, a tissue specific enhancer may be used (Fromm et al., The Plant Cell 1:977-984 (1989), the entirety of which is herein incorporated by reference).

[0202] Constructs or vectors may also include, with the coding region of interest, a nucleic acid sequence that acts, in whole or in part, to terminate transcription of that region. For example, such sequences have been isolated including the Tr7 3′ sequence and the nos 3′ sequence (Ingelbrecht et al., The Plant Cell 1:671-680 (1989), the entirety of which is herein incorporated by reference; Bevan et al., Nucleic Acids Res. 11:369-385 (1983), the entirety of which is herein incorporated by reference), or the like.

[0203] A vector or construct may also include regulatory elements. Examples of such include the Adh intron 1 (Callis et al., Genes and Develop. 1:1183-1200 (1987), the entirety of which is herein incorporated by reference), the sucrose synthase intron (Vasil et al., Plant Physiol. 91:1575-1579 (1989), the entirety of which is herein incorporated by reference) and the TMV omega element (Gallie et al., The Plant Cell 1:301-311 (1989), the entirety of which is herein incorporated by reference). These and other regulatory elements may be included when appropriate.

[0204] A vector or construct may also include a selectable marker. Selectable markers may also be used to select for plants or plant cells that contain the exogenous genetic material. Examples of such include, but are not limited to, a neo gene (Potrykus et al., Mol. Gen. Genet. 199:183-188 (1985), the entirety of which is herein incorporated by reference) which codes for kanamycin resistance and can be selected for using kanamycin, G418, etc.; a bar gene which codes for bialaphos resistance; a mutant EPSP synthase gene (Hinchee et al., Bio/Technology 6:915-922 (1988), the entirety of which is herein incorporated by reference) which encodes glyphosate resistance; a nitrilase gene which confers resistance to bromoxynil (Stalker et al., J. Biol. Chem. 263:6310-6314 (1988), the entirety of which is herein incorporated by reference); a mutant acetolactate synthase gene (ALS) which confers imidazolinone or sulphonylurea resistance (European Patent Application 154,204 (Sep. 11, 1985), the entirety of which is herein incorporated by reference); and a methotrexate resistant DHFR gene (Thillet et al., J. Biol. Chem. 263:12500-12508 (1988), the entirety of which is herein incorporated by reference).

[0205] A vector or construct may also include a transit peptide. Incorporation of a suitable chloroplast transit peptide may also be employed (European Patent Application Publication Number 0218571, the entirety of which is herein incorporated by reference). Translational enhancers may also be incorporated as part of the vector DNA. DNA constructs could contain one or more 5′ non-translated leader sequences which may serve to enhance expression of the gene products from the resulting mRNA transcripts. Such sequences may be derived from the promoter selected to express the gene or can be specifically modified to increase translation of the mRNA. Such regions may also be obtained from viral RNAs, from suitable eukaryotic genes, or from a synthetic gene sequence. For a review of optimizing expression of transgenes, see Koziel et al., Plant Mol. Biol. 32:393-405 (1996), the entirety of which is herein incorporated by reference.

[0206] A vector or construct may also include a screenable marker. Screenable markers may be used to monitor expression. Exemplary screenable markers include a β-glucuronidase or uidA gene (GUS) which encodes an enzyme for which various chromogenic substrates are known (Jefferson, Plant Mol. Biol, Rep. 5: 387-405 (1987), the entirety of which is herein incorporated by reference; Jefferson et al., EMBO J. 6: 3901-3907 (1987), the entirety of which is herein incorporated by reference); an R-locus gene, which encodes a product that regulates the production of anthocyanin pigments (red color) in plant tissues ((Dellaporta et al., Stadler Symposium 11:263-282 (1988), the entirety of which is herein incorporated by reference); a β-lactamase gene (Sutcliffe et al., Proc. Natl. Acad. Sci. (U.S.A.) 75: 3737-3741 (1978), the entirety of which is herein incorporated by reference), a gene which encodes an enzyme for which various chromogenic substrates are known (e.g., PADAC, a chromogenic cephalosporin); a luciferase gene (Ow et al., Science 234: 856-859 (1986), the entirety of which is herein incorporated by reference) a xylE gene (Zukowsky et al., Proc. Natl. Acad. Sci. (U.S.A.) 80:1101-1105 (1983), the entirety of which is herein incorporated by reference) which encodes a catechol dioxygenase that can convert chromogenic catechols; an α-amylase gene (Ikatu et al., Bio/Technol. 8:241-242 (1990), the entirety of which is herein incorporated by reference); a tyrosinase gene (Katz et al., J. Gen. Microbiol. 129:2703-2714 (1983), the entirety of which is herein incorporated by reference) which encodes an enzyme capable of oxidizing tyrosine to DOPA and dopaquinone which in turn condenses to melanin; an α-galactosidase, which will turn a chromogenic α-galactose substrate.

[0207] Included within the terms “selectable or screenable marker genes” are also genes which encode a scriptable marker whose secretion can be detected as a means of identifying or selecting for transformed cells. Examples include markers which encode a secretable antigen that can be identified by antibody interaction, or even secretable enzymes which can be detected catalytically. Secretable proteins fall into a number of classes, including small, diffusible proteins detectable, e.g., by ELISA, small active enzymes detectable in extracellular solution (e.g., α-amylase, β-lactarnase, phosphinothricin transferase), or proteins which are inserted or trapped in the cell wall (such as proteins which include a leader sequence such as that found in the expression unit of extension or tobacco PR-S). Other possible selectable and/or screenable marker genes will be apparent to those of skill in the art.

[0208] Methods and compositions for transforming a bacteria and other microorganisms are known in the art (see for example Sambrook et al., Molecular Cloning: A Laboratory Manual, Second Edition, Cold Spring Harbor Laboratory Press, Cold Spring Harbor, N.Y., (1989), the entirety of which is herein incorporated by reference).

[0209] There are many methods for introducing transforming nucleic acid molecules into plant cells. Suitable methods are believed to include virtually any method by which nucleic acid molecules may be introduced into a cell, such as by Agrobacterium infection or direct delivery of nucleic acid molecules such as, for example, by PEG-mediated transformation, by electroporation or by acceleration of DNA coated particles, etc. (Pottykus, Ann. Rev. Plant Physiol. Plant Mol. Biol. 42:205-225 (1991), the entirety of which is herein incorporated by reference; Vasil, Plant Mol. Biol. 25: 925-937 (1994), the entirety of which is herein incorporated by reference. For example, electroporation has been used to transform maize protoplasts (Fromm et al., Nature 312:791-793 (1986), the entirety of which is herein incorporated by reference).

[0210] Other vector systems suitable for introducing transforming DNA into a host plant cell includes but is not limited to binary artificial chromosome (BIBAC) vectors (Hamilton et al., Gene 200:107-116, (1997), the entirety of which is herein incorporated by reference, and transfection with RNA viral vectors (Della-Cioppa et al., Ann. N.Y. Acad. Sci. (1996), 792 (Engineering Plants for Commercial Products and Applications), 57-61, the entirety of which is herein incorporated by reference.

[0211] Technology for introduction of DNA into cells is well known to those of skill in the art. Four general methods for delivering a gene into cells have been described: (1) chemical methods (Graham and van der Eb, Virology, 54:536-539 (1973), the entirety of which is herein incorporated by reference); (2) physical methods such as microinjection (Capecchi, Cell 22:479-488 (1980), electroporation (Wong and Neumann, Biochem. Biophys. Res. Commun., 107:584-587 (1982); Fromm et al., Proc. Natl. Acad. Sci. USA, 82:5824-5828 (1985); U.S. Pat. No. 5,384,253; and the gene gun (Johnston and Tang, Methods Cell Biol. 43:353-365 (1994), all of which the entirety is herein incorporated by reference; (3) viral vectors (Clapp, Clin. Perinatol., 20:155-168 (1993); Lu et al., J. Exp. Med., 178:2089-2096 (1993); Eglitis and Anderson, Biotechniques, 6:608-614 (1988), all of which the entirety is herein incorporated by reference); and (4) receptor-mediated mechanisms (Curiel et al., Hum. Gen. Ther., 3:147-154 (1992); Wagner et al., Proc. Natl. Acad. Sci. USA, 89:6099-6103 (1992), all of which the entirety is herein incorporated by reference).

[0212] Acceleration methods that may be used include, for example, microprojectile bombardment and the like. One example of a method for delivering transforming nucleic acid molecules to plant cells is microprojectile bombardment. This method has been reviewed by Yang and Christou, eds., Particle Bombardment Technology for Gene Transfer, Oxford Press, Oxford, England (1994), the entirety of which is herein incorporated by reference). Non-biological particles (microprojectiles) that may be coated with nucleic acids and delivered into cells by a propelling force. Exemplary particles include those comprised of tungsten, gold, platinum, and the like.

[0213] A particular advantage of microprojectile bombardment, in addition to it being an effective means of reproducibly, and stably transforming monocotyledons, is that neither the isolation of protoplasts (Cristou et al., Plant Physiol. 87:671-674 (1988), the entirety of which is herein incorporated by reference) nor the susceptibility of Agrobacterium infection is required. An illustrative embodiment of a method for delivering DNA into maize cells by acceleration is a biolistics g-particle delivery system, which can be used to propel particles coated with DNA through a screen, such as a stainless steel or Nytex screen, onto a filter surface covered with corn cells cultured in suspension. Gordon-Kamm et al., describes the basic procedure for coating tungsten particles with DNA (Gordon-Kamm et al., Plant Cell 2: 603-618 (1990), the entirety of which is herein incorporated by reference). The screen disperses the tungsten nucleic acid particles so that they are not delivered to the recipient cells in large aggregates. A particle delivery system suitable for use with the present invention is the helium acceleration PDS-1000/He gun which is available from Bio-Rad Laboratories (Bio-Rad, Hercules, Calif.)(Sanford et al., Technique 3:3-16 (1991), the entirety of which is herein incorporated by reference).

[0214] For the bombardment, cells in suspension may be concentrated on filters. Filters containing the cells to be bombarded are positioned at an appropriate distance below the microprojectile stopping plate. If desired, one or more screens are also positioned between the gun and the cells to be bombarded.

[0215] Alternatively, immature embryos or other target cells may be arranged on solid culture medium. The cells to be bombarded are positioned at an appropriate distance below the macroprojectile stopping plate. If desired, one or more screens are also positioned between the acceleration device and the cells to be bombarded. Through the use of techniques set forth herein one may obtain up to 1000 or more foci of cells transiently expressing a marker gene. The number of cells in a focus which express the exogenous gene product 48 hours post-bombardment often range from one to ten and average one to three.

[0216] In bombardment transformation, one may optimize the prebombardment culturing conditions and the bombardment parameters to yield the maximum numbers of stable transformants. Both the physical and biological parameters for bombardment are important in this technology. Physical factors are those that involve manipulating the DNA/microprojectile precipitate or those that affect the flight and velocity of either the macro- or microprojectiles. Biological factors include all steps involved in manipulation of cells before and immediately after bombardment, the osmotic adjustment of target cells to help alleviate the trauma associated with bombardment, and also the nature of the transforming DNA, such as linearized DNA or intact supercoiled plasmids. It is believed that pre-bombardment manipulations are especially important for successful transformation of immature embryos. In another alternative embodiment, plastids can be stably transformed. Methods disclosed for plastid transformation in higher plants include the particle gun delivery of DNA containing a selectable marker and targeting of the DNA to the plastid genome through homologous recombination (Svab et al., Proc. Natl. Acad. Sci. (U.S.A.) 87:8526-8530 (1990); Svab and Maliga, Proc. Natl. Acad. Sci. (U.S.A.) 90:913-917 (1993); Staub and Maliga, EMBO J. 12:601-606 (1993); U.S. Pat. Nos. 5,451,513 and 5,545,818, all of which are herein incorporated by reference in their entirety).

[0217] Accordingly, it is contemplated that one may wish to adjust various aspects of the bombardment parameters in small scale studies to fully optimize the conditions. One may particularly wish to adjust physical parameters such as gap distance, flight distance, tissue distance, and helium pressure. One may also minimize the trauma reduction factors by modifying conditions which influence the physiological state of the recipient cells and which may therefore influence transformation and integration efficiencies. For example, the osmotic state, tissue hydration and the subculture stage or cell cycle of the recipient cells may be adjusted for optimum transformation. The execution of other routine adjustments will be known to those of skill in the art in light of the present disclosure.

[0218] Agrobacterium-mediated transfer is a widely applicable system for introducing genes into plant cells because the DNA can be introduced into whole plant tissues, thereby bypassing the need for regeneration of an intact plant from a protoplast. The use of Agrobacterium-mediated plant integrating vectors to introduce DNA into plant cells is well known in the art. See, for example the methods described (Fraley et al., Biotechnology 3:629-635 (1985); Rogers et al., Meth. In Enzymol, 153:253-277 (1987), both of which are herein incorporated by reference in their entirety. Further, the integration of the Ti-DNA is a relatively precise process resulting in few rearrangements. The region of DNA to be transferred is defined by the border sequences, and intervening DNA is usually inserted into the plant genome as described (Spielmann et al., Mol. Gen. Genet., 205:34 (1986), the entirety of which is herein incorporated by reference).

[0219] Modern Agrobacterium transformation vectors are capable of replication in E. coli as well as Agrobacterium, allowing for convenient manipulations as described (Klee et al., In: Plant DNA Infectious Agents, T. Hohn and J. Schell, eds., Springer-Verlag, New York, pp. 179-203 (1985), the entirety of which is herein incorporated by reference. Moreover, recent technological advances in vectors for Agrobacterium-mediated gene transfer have improved the arrangement of genes and restriction sites in the vectors to facilitate construction of vectors capable of expressing various polypeptide coding genes. The vectors described have convenient multi-linker regions flanked by a promoter and a polyadenylation site for direct expression of inserted polypeptide coding genes and are suitable for present purposes (Rogers et al., Meth. In Enzymol., 153:253-277 (1987), the entirety of which is herein incorporated by reference). In addition, Agrobacterium containing both armed and disarmed Ti genes can be used for the transformations. In those plant strains where Agrobacterium-mediated transformation is efficient, it is the method of choice because of the facile and defined nature of the gene transfer.

[0220] A transgenic plant formed using Agrobacterium transformation methods typically contains a single gene on one chromosome. Such transgenic plants can be referred to as being heterozygous for the added gene. More preferred is a transgenic plant that is homozygous for the added structural gene; i.e., a transgenic plant that contains two added genes, one gene at the same locus on each chromosome of a chromosome pair. A homozygous transgenic plant can be obtained by sexually mating (selfing) an independent segregant transgenic plant that contains a single added gene, germinating some of the seed produced and analyzing the resulting plants produced for the gene of interest.

[0221] It is also to be understood that two different transgenic plants can also be mated to produce offspring that contain two independently segregating added, exogenous genes. Selfing of appropriate progeny can produce plants that are homozygous for both added, exogenous genes that encode a polypeptide of interest. Back-crossing to a parental plant and out-crossing with a non-transgenic plant are also contemplated, as is vegetative propagation.

[0222] Transformation of plant protoplasts can be achieved using methods based on calcium phosphate precipitation, polyethylene glycol treatment, electroporation, and combinations of these treatments. See for example (Potrykus et al., Mol. Gen. Genet., 205:193-200 (1986); Lorz et al., Mol. Gen. Genet., 199:178, (1985); Fromm et al., Nature, 319:791, (1986); Uchimiya et al., Mol. Gen. Genet.:204:204, (1986); Callis et al., Genes and Development, 1183, (1987); Marcotte-et al., Nature, 335:454, (1988), all of which are herein incorporated by reference in their entirety).

[0223] Application of these systems to different plant strains depends upon the ability to regenerate that particular plant strain from protoplasts. Illustrative methods for the regeneration of cereals from protoplasts are described (Fujimura et al., Plant Tissue Culture Letters, 2:74, (1985); Toriyama et al., TheorAppl. Genet. 205:34. (1986); Yamada et al., Plant Cell Rep., 4:85, (1986); Abdullah et al., Biotechnology, 4:1087, (1986), all of which are herein incorporated by reference in their entirety).

[0224] To transform plant strains that cannot be successfully regenerated from protoplasts, other ways to introduce DNA into intact cells or tissues can be utilized. For example, regeneration of cereals from immature embryos or explants can be effected as described (Vasil, Biotechnology, 6:397, (1988), the entirety of which is herein incorporated by reference). In addition, “particle gun” or high-velocity microprojectile technology can be utilized (Vasil et al., Bio/Technology 10:667, (1992), the entirety of which is herein incorporated by reference).

[0225] Using the latter technology, DNA is carried through the cell wall and into the cytoplasm on the surface of small metal particles as described (Klein et al., Nature, 328:70, (1987); Klein et al., Proc. Natl. Acad. Sci. USA, 85:8502-8505, (1988); McCabe et al., Biotechnology, 6:923, (1988), all of which are herein incorporated by reference in their entirety). The metal particles penetrate through several layers of cells and thus allow the transformation of cells within tissue explants.

[0226] Other methods of cell transformation can also be used and include but are not limited to introduction of DNA into plants by direct DNA transfer into pollen (Hess et al., Intern Rev. Cytol., 107:367, (1987); Luo et al., Plant Mol. Biol. Reporter, 6:165, (1988), all of which are herein incorporated by reference in their entirety), by direct injection of DNA into reproductive organs of a plant (Pena et al., Nature, 325:274, (1987), the entirety of which is herein incorporated by reference), or by direct injection of DNA into the cells of immature embryos followed by the rehydration of desiccated embryos (Neuhaus et al., Theor. Appl. Genet., 75:30, (1987), the entirety of which is herein incorporated by reference).

[0227] The regeneration, development, and cultivation of plants from single plant protoplast transformants or from various transformed explants is well known in the art (Weissbach and Weissbach, In: Methods for Plant Molecular Biology, (Eds.), Academic Press, Inc. San Diego, Calif., (1988), the entirety of which is herein incorporated by reference). This regeneration and growth process typically includes the steps of selection of transformed cells, culturing those individualized cells through the usual stages of embryonic development through the rooted plantlet stage. Transgenic embryos and seeds are similarly regenerated. The resulting transgenic rooted shoots are thereafter planted in an appropriate plant growth medium such as soil.

[0228] The development or regeneration of plants containing the foreign, exogenous gene that encodes a protein of interest is well known in the art. Preferably, the regenerated plants are self-pollinated to provide homozygous transgenic plants, as discussed before. Otherwise, pollen obtained from the regenerated plants is crossed to seed-grown plants of agronomically important lines. Conversely, pollen from plants of these important lines is used to pollinate regenerated plants. A transgenic plant of the present invention containing a desired polypeptide is cultivated using methods well known to one skilled in the art.

[0229] There are a variety of methods for the regeneration of plants from plant tissue. The particular method of regeneration will depend on the starting plant tissue and the particular plant species to be regenerated.

[0230] Methods for transforming dicots, primarily by use of Agrobacterium tumefaciens, and obtaining transgenic plants have been published for cotton (U.S. Pat. No. 5,004,863, U.S. Pat. No. 5,159,135, U.S. Pat. No. 5,518,908, all of which the entirety is herein incorporated by reference); soybean (U.S. Pat. No. 5,569,834, U.S. Pat. No. 5,416,011, McCabe et al., Biotechnology 6:923, (1988), Christou et al., Plant Physiol., 87:671-674 (1988), all of which are herein incorporated by reference in their entirety); Brassica (U.S. Pat. No. 5,463,174, the entirety of which is herein incorporated by reference); peanut (Cheng et al., Plant Cell Rep. 15: 653-657 (1996), McKently et al., Plant Cell Rep. 14:699-703 (1995), all of which are herein incorporated by reference in their entirety); papaya (Yang et al., (1996), the entirety of which is herein incorporated by reference); pea (Grant et al., Plant Cell Rep. 15:254-258, (1995), the entirety of which is herein incorporated by reference).

[0231] Transformation of monocotyledons using electroporation, particle bombardment, and Agrobacterium have also been reported. Transformation and plant regeneration have been achieved in asparagus (Bytebier et al., Proc. Natl. Acad. Sci. USA 84:5345, (1987), the entirety of which is herein incorporated by reference); barley (Wan and Lemaux, Plant Physiol 104:37, (1994), the entirety of which is herein incorporated by reference); maize (Rhodes et al., Science 240: 204, (1988), Gordon-Kainm et al., Plant Cell, 2:603, (1990), Fromm et al., Bio/Technology 8:833, (1990), Koziel et al., Bio/Technology 11:194, (1993), Armstrong et al., Crop Science 35:550-557, (1995), all of which the entirety is herein incorporated by reference); oat (Somers et al., Bio/Technology, 10:1589, (1992), the entirety of which is herein incorporated by reference); orchardgrass (Horn et al., Plant Cell Rep. 7:469, (1988), the entirety of which is herein incorporated by reference); rice (Toriyama et al., Theor Appl. Genet. 205:34, (1986); Park et al., Plant Mol. Biol., 32: 1135-1148, (1996); Abedinia et al., Aust. J. Plant Physiol. 24:133-141, (1997); Zhang and Wu, Theor. Appl. Genet. 76:835, (1988); Zhang et al. Plant Cell Rep. 7:379, (1988); Battraw and Hall, Plant Sci. 86:191-202, (1992); Christou et al., Bio/Technology 9:957, (1991), all of which are herein incorporated by reference in its entirety); sugarcane (Bower and Birch, Plant J. 2:409, (1992), the entirety of which is herein incorporated by reference); tall fescue (Wang et al., Bio/Technology 10:691, (1992), the entirety of which is herein incorporated by reference), and wheat (Vasil et al., Bio/Technology 10:667, (1992); U.S. Pat. No. 5,631,152, both of which are herein incorporated by reference in their entirety).

[0232] Assays for gene expression based on the transient expression of cloned nucleic acid constructs have been developed by introducing the nucleic acid molecules into plant cells by polyethylene glycol treatment, electroporation, or particle bombardment (Marcotte et al., Nature, 335: 454-457 (1988); Marcotte et al., Plant Cell, 1: 523-532 (1989); McCarty et al., Cell 66: 895-905 (1991); Hattori et al., Genes Dev. 6: 609-618 (1992); Goff et al., EMBO J. 9: 2517-2522 (1990), all of which are herein incorporated by reference in their entirety). Transient expression systems may be used to functionally dissect gene constructs (See generally, Mailga et al., Methods in Plant Molecular Biology, Cold Spring Harbor Press (1995)).

[0233] Any of the nucleic acid molecules of the present invention may be introduced into a plant cell in a permanent or transient manner in combination with other genetic elements such as vectors, promoters enhancers etc. Further any of the nucleic acid molecules of the present invention may be introduced into a plant cell in a manner that allows for over expression of the protein or fragment thereof encoded by the nucleic acid molecule.

[0234] Cosuppression is the reduction in expression levels, usually at the level of RNA, of a particular endogenous gene or gene family by the expression of a homologous sense construct that is capable of transcribing mRNA of the same strandedness as the transcript of the endogenous gene (Napoli et al., Plant Cell 2: 279-289 (1990); van der Krol et al., Plant Cell 2: 291-299 (1990), both of which are herein incorporated by reference in their entirety). Cosuppression may result from stable transformation with a single copy nucleic acid molecule that is homologous to a nucleic acid sequence found with the cell (Prolls and Meyer, Plant J. 2:465-475 (1992), the entirety of which is herein incorporated by reference) or with multiple copies of a nucleic acid molecule that is homologous to a nucleic acid sequence found with the cell (Mittlesten et al., Mol. Gen. Genet. 244: 325-330 (1994), the entirety of which is herein incorporated by reference). Genes, even though different, linked to homologous promoters may result in the cosuppression of the linked genes (Vaucheret, CR. Acad. Sci. III 316: 1471-1483 (1993), the entirety of which is herein incorporated by reference).

[0235] This technique has, for example been applied to generate white flowers from red petunia and tomatoes that do not ripen on the vine. Up to 50% of petunia transformants that contained a sense copy of the chalcone synthase (CHS) gene produced white flowers or floral sectors; this was as a result of the post-transcriptional loss of mRNA encoding CHS (Flavell, Proc. Natl. Acad. Sci. (U.S.A.) 91:3490-3496 (1994)), the entirety of which is herein incorporated by reference). Cosuppression may require the coordinate transcription of the transgene and the endogenous gene, and can be reset by a developmental control mechanism (Jorgensen, Trends Biotechnol, 8:340344 (1990); Meins and Kunz, In: Gene Inactivation and Homologous Recombination in Plants (Paszkowski, J., ed.), pp. 335-348. Kluwer Academic, Netherlands (1994), both of which are herein incorporated by reference in their entirety).

[0236] It is understood that one or more of the nucleic acids of the present invention including those comprising SEQ ID NO: 1 through SEQ ID NO:52949 or complement thereof or fragments of either or other nucleic acid molecules of the present invention may be introduced into a plant cell and transcribed using an appropriate promoter with such transcription resulting in the co-suppression of an endogenous protein.

[0237] Antisense approaches are a way of preventing or reducing gene function by targeting the genetic material (Mol et al., FEBS Lett. 268: 427-430 (1990), the entirety of which is herein incorporated by reference). The objective of the antisense approach is to use a sequence complementary to the target gene to block its expression and create a mutant cell line or organism in which the level of a single chosen protein is selectively reduced or abolished. Antisense techniques have several advantages over other ‘reverse genetic’ approaches. The site of inactivation and its developmental effect can be manipulated by the choice of promoter for antisense genes or by the timing of external application or microinjection. Antisense can manipulate its specificity by selecting either unique regions of the target gene or regions where it shares homology to other related genes (Hiatt et al., In Genetic Engineering, Setlow (ed.), Vol. 11, New York: Plenum 49-63 (1989), the entirety of which is herein incorporated by reference).

[0238] The principle of regulation by antisense RNA is that RNA that is complementary to the target mRNA is introduced into cells, resulting in specific RNA:RNA duplexes being formed by base pairing between the antisense substrate and the target mRNA (Green et al., Annu. Rev. Biochem. 55: 569-597 (1986), the entirety of which is herein incorporated by reference). Under one embodiment, the process involves the introduction and expression of an antisense gene sequence. Such a sequence is one in which part or all of the normal gene sequences are placed under a promoter in inverted orientation so that the ‘wrong’ or complementary strand is transcribed into a noncoding antisense RNA that hybridizes with the target mRNA and interferes with its expression (Takayama and Inouye, Crit. Rev. Biochem. Mol. Biol. 25: 155-184 (1990), the entirety of which is herein incorporated by reference). An antisense vector is constructed by standard procedures and introduced into cells by transformation, transfection, electroporation, microinjection, or by infection, etc. The type of transformation and choice of vector will determine whether expression is transient or stable. The promoter used for the antisense gene may influence the level, timing, tissue, specificity, or inducibility of the antisense inhibition.

[0239] It is understood that protein synthesis activity in a plant cell may be reduced or depressed by growing a transformed plant cell containing a nucleic acid molecule whose non-transcribed strand encodes a protein or fragment thereof.

[0240] Antibodies have been expressed in plants (Hiatt et al., Nature 342:76-78 (1989); Conrad and Fielder, Plant Mol. Biol. 26: 1023-1030 (1994), both of which are herein incorporated by reference in their entirety). Cytoplasmic expression of a scFv (single-chain Fv antibodies) has been reported to delay infection by artichoke mottled crinkle virus. Transgenic plants that express antibodies directed against endogenous proteins may exhibit a physiological effect (Philips et al., EMBO J. 16: 4489-4496 (1997); Marion-Poll, Trends in Plant Science 2: 447-448 (1997), all of which are herein incorporated by reference in their entirety). For example, expressed anti-abscisic antibodies reportedly result in a general perturbation of seed development (Philips et al., EMBO J. 16: 4489-4496 (1997)).

[0241] Antibodies that are catalytic may also be expressed in plants (abzymes). The principle behind abzymes is that since antibodies may be raised against many molecules, this recognition ability can be directed toward generating antibodies that bind transition states to force a chemical reaction forward (Persidas, Nature Biotechnology 15:1313-1315 (1997); Baca et al., Ann. Rev. Biophys. Biomol. Struct. 26:461-493 (1997), both of which are herein incorporated by reference in their entirety). The catalytic abilities of abzymes may be enhanced by site directed mutagenesis. Examples of abzymes are, for example, set forth in U.S. Pat. No. 5,658,753; U.S. Pat. No. 5,632,990; U.S. Pat. No. 5,631,137; U.S. Pat. No. 5,602,015; U.S. Pat. No. 5,559,538; U.S. Pat. No. 5,576,174; U.S. Pat. No. 5,500,358; U.S. Pat. No. 5,318,897; U.S. Pat. No. 5,298,409; U.S. Pat. No. 5,258,289 and U.S. Pat. No. 5,194,585, all of which are herein incorporated in their entirety.

[0242] It is understood that any of the antibodies of the present invention may be expressed in plants and that such expression can result in a physiological effect. It is also understood that any of the expressed antibodies may be catalytic.

[0243] In addition to the above discussed procedures, practitioners are familiar with the standard resource materials which describe specific conditions and procedures for the construction, manipulation and isolation of macromolecules (e.g., DNA molecules, plasmids, etc.), generation of recombinant organisms and the screening and isolating of clones, (see for example, Sambrook et al., Molecular Cloning: A Laboratory Manual, Cold Spring Harbor Press (1989); Mailga et al., Methods in Plant Molecular Biology, Cold Spring Harbor Press (1995); Birren et al., Genome Analysis: Analyzing DNA, 1, Cold Spring Harbor, N.Y., all of which are herein incorporated by reference in their entirety).

[0244] The nucleotide sequence provided in SEQ ID NO: 1, through SEQ ID NO:52949 or fragment thereof, or complement thereof, or a nucleotide sequence at least 90% identical, preferably 95%, identical even more preferably 99% or 100% identical to the sequence provided in SEQ ID NO: 1 through SEQ ID NO:52949 or fragment thereof, or complement thereof, can be “provided” in a variety of mediums to facilitate use fragment thereof. Such a medium can also provide a subset thereof in a form that allows a skilled artisan to examine the sequences.

[0245] In one application of this embodiment, a nucleotide sequence of the present invention can be recorded on computer readable media. As used herein, “computer readable media” refers to any medium that can be read and accessed directly by a computer. Such media include, but are not limited to: magnetic storage media, such as floppy discs, hard disc, storage medium, and magnetic tape: optical storage media such as CD-ROM; electrical storage media such as RAM and ROM; and hybrids of these categories such as magnetic/optical storage media. A skilled artisan can readily appreciate how any of the presently known computer readable mediums can be used to create a manufacture comprising computer readable medium having recorded thereon a nucleotide sequence of the present invention.

[0246] As used herein, “recorded” refers to a process for storing information on computer readable medium. A skilled artisan can readily adopt any of the presently known methods for recording information on computer readable medium to generate media comprising the nucleotide sequence information of the present invention. A variety of data storage structures are available to a skilled artisan for creating a computer readable medium having recorded thereon a nucleotide sequence of the present invention. The choice of the data storage structure will generally be based on the means chosen to access the stored information. In addition, a variety of data processor programs and formats can be used to store the nucleotide sequence information of the present invention on computer readable medium. The sequence information can be represented in a word processing text file, formatted in commercially-available software such as WordPerfect and Microsoft Word, or represented in the form of an ASCII file, stored in a database application, such as DB2, Sybase, Oracle, or the like. A skilled artisan can readily adapt any number of data processor structuring formats (e.g. text file or database) in order to obtain computer readable medium having recorded thereon the nucleotide sequence information of the present invention.

[0247] By providing one or more of nucleotide sequences of the present invention, a skilled artisan can routinely access the sequence information for a variety of purposes. Computer software is publicly available which allows a skilled artisan to access sequence information provided in a computer readable medium. The examples which follow demonstrate how software which implements the BLAST (Altschul et al., J. Mol. Biol. 215:403-410 (1990)) and BLAZE (Brutlag et al., Comp. Chem. 17:203-207 (1993), the entirety of which is herein incorporated by reference) search algorithms on a Sybase system can be used to identify open reading frames (ORFs) within the genome that contain homology to ORFs or proteins from other organisms. Such ORFs are protein-encoding fragments within the sequences of the present invention and are useful in producing commercially important proteins such as enzymes used in amino acid biosynthesis, metabolism, transcription, translation, RNA processing, nucleic acid and a protein degradation, protein modification, and DNA replication, restriction, modification, recombination, and repair.

[0248] The present invention further provides systems, particularly computer-based systems, which contain the sequence information described herein. Such systems are designed to identify commercially important fragments of the nucleic acid molecule of the present invention. As used herein, “a computer-based system” refers to the hardware means, software means, and data storage means used to analyze the nucleotide sequence information of the present invention. The minimum hardware means of the computer-based systems of the present invention comprises a central processing unit (CPU), input means, output means, and data storage means. A skilled artisan can readily appreciate that any one of the currently available computer-based system are suitable for use in the present invention.

[0249] As indicated above, the computer-based systems of the present invention comprise a data storage means having stored therein a nucleotide sequence of the present invention and the necessary hardware means and software means for supporting and implementing a search means. As used herein, “data storage means” refers to memory that can store nucleotide sequence information of the present invention, or a memory access means which can access manufactures having recorded thereon the nucleotide sequence information of the present invention. As used herein, “search means” refers to one or more programs which are implemented on the computer-based system to compare a target sequence or target structural motif with the sequence information stored within the data storage means. Search means are used to identify fragments or regions of the sequence of the present invention that match a particular target sequence or target motif. A variety of known algorithms are disclosed publicly and a variety of commercially available software for conducting search means are available and can be used in the computer-based systems of the present invention. Examples of such software include, but are not limited to, MacPattern (EMBL), BLASTIN and BLASTIX (NCBIA). One of the available algorithms or implementing software packages for conducting homology searches can be adapted for use in the present computer-based systems.

[0250] The most preferred sequence length of a target sequence is from about 10 to 100 amino acids or from about 30 to 300 nucleotide residues. However, it is well recognized that during searches for commercially important fragments of the nucleic acid molecules of the present invention, such as sequence fragments involved in gene expression and protein processing, may be of shorter length.

[0251] As used herein, “a target structural motif,” or “target motif,” refers to any rationally selected sequence or combination of sequences in which the sequences or sequence(s) are chosen based on a three-dimensional configuration which is formed upon the folding of the target motif. There are a variety of target motifs known in the art. Protein target motifs include, but are not limited to, enzymatic active sites and signal sequences. Nucleic acid target motifs include, but are not limited to, promoter sequences, cis elements, hairpin structures and inducible expression elements (protein binding sequences).

[0252] Thus, the present invention further provides an input means for receiving a target sequence, a data storage means for storing the target sequences of the present invention sequence identified using a search means as described above, and an output means for outputting the identified homologous sequences. A variety of structural formats for the input and output means can be used to input and output information in the computer-based systems of the present invention. A preferred format for an output means ranks fragments of the sequence of the present invention by varying degrees of homology to the target sequence or target motif. Such presentation provides a skilled artisan with a ranking of sequences which contain various amounts of the target sequence or target motif and identifies the degree of homology contained in the identified fragment.

[0253] A variety of comparing means can be used to compare a target sequence or target motif with the data storage means to identify sequence fragments sequence of the present invention. For example, implementing software which implement the BLAST and BLAZE algorithms (Altschul et al., J. Mol. Biol. 215:403-410 (1990)) can be used to identify open frames within the nucleic acid molecules of the present invention. A skilled artisan can readily recognize that any one of the publicly available homology search programs can be used as the search means for the computer-based systems of the present invention. Having now generally described the invention, the same will be more readily understood through reference to the following examples which are provided by way of illustration, and are not intended to be limiting of the present invention, unless specified.

### EXAMPLE 1

[0254] The LIB3083 cDNA library is generated from fiber tissue harvested from field-grown cotton plants at 17 to 21 days post anthesis. The Gossypium hirsutum variety Acala SJ-2 is used for collection. Bolls are harvested from plants 17 to 21 days post anthesis. Fiber is collected, immediately frozen in liquid nitrogen and then stored at −80° C. until total RNA preparation.

[0255] The total RNA is isolated according to the Boric Acid method described by Pear et al., PNAS 93:12637-12642 (1996), herein incorporated by reference in its entirety. Poly A+ RNA (mRNA) is purified utilizing an oligo(dT)-cellulose kit from Becton Dickenson (Becton Dickenson, Franklin Lakes, N.J.) and following the manufacturer's protocol. Construction of plant cDNA libraries is well-known in the art and a number of cloning strategies exist. A number of cDNA library construction kits are commercially available. This library is made as a phage library using the Stratagene UniZap kit, following the conditions suggested by the manufacturer, and then bulked rescued to convert to a plasmid library.

[0256] The LIB3120 cDNA library is generated from sink leaves harvested from cotton plants 15 days after planting. The Gossypium hirsutum variety Nucotton33B is used for collection. Seeds are planted in trays containing Metromix 350 potting soil premixed with fertilizers. Plants are grown in a greenhouse in 16 hr day/8 hr night cycles with an average relative humidity of ca. 50%. Daytime and night time temperature are 90° F. and 74° F. respectively. Daytime light levels are measured at 600-1000 μEinsteins/m². Plants are watered daily in the morning and as needed in the afternoon. Plants receive 1 or 2 applications of Pix to control excessive growth. A 4^{th} leaf (youngest unfurled leaf) is harvested from a plant 15 days after planting. The harvested leaf tissue is immediately frozen in liquid nitrogen and then stored at −80° C. until total RNA preparation. The RNA is prepared from the stored tissue and the cDNA library is constructed as described in Example 2.

[0257] The LIB3135 cDNA library is generated from cotton embryogenic callus. Callus is derived from hypocotyls from cotton (variety Coker 312) seedlings and generated on standard agar medium using 0.1 mg/l 2,4-D plus 0.5 mg/l kinetin. At about 6-7 weeks, callus is removed from hormone. Tissue is cultured on no hormone media for two times, about 12 weeks total. Embryogenic tissue is removed and cultured for about 4 weeks on media supplemented with KNO₃ and casein hydrolysate. Small globular embryos are removed from the plates and immediately frozen in liquid nitrogen. The harvested tissue is stored at −80° C. until total RNA preparation. The RNA is prepared from the stored tissue and the cDNA library is constructed as described in Example 2.

[0258] The LIB3145 cDNA library is generated from floral buds from 1.5 to 2.5 month old cotton plants. The Gossypium hirsutum variety Nucotton33B is used for collection. Seeds are planted in trays containing Metromix 350 potting soil premixed with fertilizers. Plants are grown in a greenhouse in 16 hr day/8 hr night cycles with an average relative humidity of ca. 50%. Daytime and night time temperature are 90° F. and 74° F. respectively. Daytime light levels are measured at 600-1000 μEinsteins/m². Plants are watered daily in the morning and as needed in the afternoon. Plants receive 1 or 2 applications of Pix to control excessive growth. Medium floral buds (about 0.7 to 1.2 cm in length) and large floral buds (>1.2 cm in length) are harvested from 1.5 to 2.5 month old plants. Floral buds are taken from plants and bracts are removed. The harvested floral bud tissue is immediately frozen in liquid nitrogen and then stored at −80° C. Equal weights of the medium and large floral buds are mixed and used as starting materials for total RNA preparation. The RNA is prepared from the stored tissue and the cDNA library is constructed as described in Example 2.

[0259] The LIB3146 cDNA library is generated from young floral buds from 1 to 2 month old cotton plants. The Gossypium hirsutum variety Nucotton33B is used for collection. Seeds are planted in trays containing Metromix 350 potting soil premixed with fertilizers. Plants are grown in a greenhouse in 16 hr day/8 hr night cycles with an average relative humidity of ca. 50%. Daytime and night time temperature are 90° F. and 74° F. respectively. Daytime light levels are measured at 600-1000 μEinsteins/m². Plants are watered daily in the morning and as needed in the afternoon. Plants receive 1 or 2 applications of Pix to control excessive growth. Developing floral buds up to about 0.5 cm in length are harvested from 1 to 2 month old plants. Floral buds are taken from plants and bracts are removed. The harvested floral bud tissue is immediately frozen in liquid nitrogen and then stored at −80° C. until total RNA preparation. The RNA is prepared from the stored tissue and the cDNA library is constructed as described in Example 2.

[0260] The LIB3147 cDNA library is generated from cotton seedling axis. Coker 312 seeds are placed between layers of cotton soaked in water. Seeds are allowed to imbibe at 30° C. in the dark. Seedlings are harvested at 24 and 48 hours after imbibition. Axis are separated from cotyledons, immediately frozen in liquid nitrogen and stored at −80° C. until total RNA preparation. The RNA is prepared from the stored tissue and the cDNA library is constructed as described in Example 2. For this library's construction, the seventh fraction of the cDNA size fractionation step is used for ligation into the pSPORT vector.

[0261] The LIB3148 cDNA library is generated from cotton seedling cotyledon. Coker 312 seeds are placed between layers of cotton soaked in water. Seeds are allowed to imbibe at 30° C. in the dark. Seedlings are harvested at 24 and 48 hours after imbibition. Cotyledons are separated from axis, immediately frozen in liquid nitrogen and then stored at −80° C. until total RNA preparation. The RNA is prepared from the stored tissue and the cDNA library is constructed as described in Example 2.

[0262] The LIB3149 cDNA library is generated from cotton seedling axis. Coker 312 seeds are placed between layers of cotton soaked in water. Seeds are allowed to imbibe at 30° C. in the dark. Seedlings are harvested at 24 and 48 hours after imbibition. Axis are separated from cotyledons, immediately frozen in liquid nitrogen and stored at −80° C. until total RNA preparation. The RNA is prepared from the stored tissue and the cDNA library is constructed as described in Example 2. For this library's construction, the sixth fraction of the cDNA size fractionation step is used for ligation into the pSPORT vector.

[0263] The LIB3165 cDNA library is generated from source leaves from 2 month old cotton plants. The Gossypium hirsutum variety Nucotton33B is used for collection. Seeds are planted in trays containing Metromix 350 potting soil premixed with fertilizers. Plants are grown in a greenhouse in 16 hr day/8 hr night cycles with an average relative humidity of ca. 50%. Daytime and night time temperature are 90° F. and 74° F. respectively. Daytime light levels are measured at 600-1000 μEinsteins/m². Plants are watered daily in the morning and as needed in the afternoon. Plants receive 1 or 2 applications of Pix to control excessive growth. A leaf is taken from the 8^{th} node of a 2 month old plant when that node is actively flowering. The harvested 8^{th} node leaf tissue is immediately frozen in liquid nitrogen and then stored at −80° C. until total RNA preparation. The RNA is prepared from the stored tissue and the cDNA library is constructed as described in Example 2.

[0264] The LIB3189 cDNA library is generated from young developing bolls from cotton plants 1 to 10 days post anthesis. The Gossypium hirsutum variety Nucotton33B is used for collection. Seeds are planted in trays containing Metromix 350 potting soil premixed with fertilizers. Plants are grown in a greenhouse in 16 hr day/8 hr night cycles with an average relative humidity of ca. 50%. Daytime and night time temperature are 90° F. and 74° F. respectively. Daytime light levels are measured at 600-1000 μEinsteins/m². Plants are watered daily in the morning and as needed in the afternoon. Plants receive 1 or 2 applications of Pix to control excessive growth. Bolls are removed from plant 1 to 10 days post anthesis (DPA) and opened, fiber, seed and seed coat are harvested together. The harvested boll tissue is immediately frozen in liquid nitrogen and then stored at −80° C. until total RNA preparation. The RNA is prepared from the stored tissue and the cDNA library is constructed as described in Example 2.

[0265] The LIB3196 cDNA library is generated from developing seeds from cotton plants 23 to 28 days post anthesis. The Gossypium hirsutum variety Nucotton33B is used for collection. Seeds are planted in trays containing Metromix 350 potting soil premixed with fertilizers. Plants are grown in a greenhouse in 16 hr day/8 hr night cycles with an average relative humidity of ca. 50%. Daytime and night time temperature are 90° F. and 74° F. respectively. Daytime light levels are measured at 600-1000 μEinsteins/m². Plants are watered daily in the morning and as needed in the afternoon. Plants receive 1 or 2 applications of Pix to control excessive growth. Bolls are removed from plant 23 to 28 days post anthesis (DPA) and opened, and tissues are divided. Seeds without endosperm or seed coats, although there may be some slight endosperm tissue present, are collected and immediately frozen in liquid nitrogen. The harvested seeds without endosperm or seed coats are stored at −80° C. until total RNA preparation. The RNA is prepared from the stored tissue and the cDNA library is constructed as described in Example 2. The RNA is prepared from the stored tissue and the cDNA library is constructed as described in Example 2.

[0266] The LIB3197 cDNA library is generated from young fiber tissue from cotton plants 5 to 6 days post anthesis. The Gossypium hirsutum variety Coker 130 is used for collection. Plants are grown in a field in California. Bolls are harvested from plants 5 to 6 days post anthesis. Fiber is collected, immediately frozen in liquid nitrogen and then stored at −80° C. until total RNA preparation. The RNA is prepared from the stored tissue and the cDNA library is constructed as described in Example 2.

### EXAMPLE 2

[0267] The total RNA is isolated using Trizol reagent from Life Technologies (Gibco BRL, Life Technologies, Gaithersburg, Md. U.S.A.), essentially as recommended by the manufacturer. Poly A+ RNA (mRNA) is purified using magnetic oligo dT beads essentially as recommended by the manufacturer (Dynabeads, Dynal Corporation, Lake Success, N.Y. U.S.A.).

[0268] Construction of plant cDNA libraries is well-known in the art and a number of cloning strategies exist. A number of cDNA library construction kits are commercially available. The Superscript™ Plasmid System for cDNA synthesis and Plasmid Cloning (Gibco BRL, Life Technologies, Gaithersburg, Md. U.S.A.) is used, following the conditions suggested by the manufacturer.

### EXAMPLE 3

[0269] The cDNA libraries are plated on LB agar containing the appropriate antibiotics for selection and incubated at 37° for a sufficient time to allow the growth of individual colonies. Single colonies are individually placed in each well of a 96-well microtiter plates containing LB liquid including the selective antibiotics. The plates are incubated overnight at approximately 37° C. with gentle shaking to promote growth of the cultures. The plasmid DNA is isolated from each clone using Qiaprep plasmid isolation kits, using the conditions recommended by the manufacturer (Qiagen Inc., Santa Clara, Calif. U.S.A.).

[0270] The template plasmid DNA clones are used for subsequent sequencing. For sequencing the cDNA libraries LIB3083, LIB3120, LIB3135, LIB3145, LIB3146, LIB3147, LIB3148, LIB3149, LIB3165, LIB3189, LIB3196 and LIB3197, a commercially available sequencing kit, such as the ABI PRISM dRhodamine Terminator Cycle Sequencing Ready Reaction Kit with AmpliTaq® DNA Polymerase, FS, is used under the conditions recommended by the manufacturer (PE Applied Biosystems, Foster City, Calif.). The ESTs of the present invention are generated by sequencing initiated from the 5′ end of each cDNA clone.

[0271] A number of sequencing techniques are known in the art, including fluorescence-based sequencing methodologies. These methods have the detection, automation and instrumentation capability necessary for the analysis of large volumes of sequence data. Currently, the 377 DNA Sequencer (Perkin-Elmer Corp., Applied Biosystems Div., Foster City, Calif.) allows the most rapid electrophoresis and data collection. With these types of automated systems, fluorescent dye-labeled sequence reaction products are detected and data entered directly into the computer, producing a chromatogram that is subsequently viewed, stored, and analyzed using the corresponding software programs. These methods are known to those of skill in the art and have been described and reviewed (Birren et al., Genome Analysis: Analyzing DNA, 1, Cold Spring Harbor, N.Y., the entirety of which is herein incorporated by reference).

The application's sequence listing, which the Patent Office published only in electronic form, follows.

SEQUENCE LISTING (52949 sequences)

SEQ ID NO: 1 - DNA, 226 bp, Gossypium hirsutum
  Clone ID: LIB3083-001-Q1-L1-A10
caatagccaagacattgactgatctgctggggctaaactgaagacgggagcaggtctctgatacttcataaacccaactcctagctaccagtctcagtgcgctctcatggcagcgctcacatctggagatcagcatacctcatcaactactaacgcctaactactagaccatacattgagaccctgctgaggtagtcacctaaaatagaggcccggattctctata

SEQ ID NO: 2 - DNA, 217 bp, Gossypium hirsutum
  Clone ID: LIB3083-001-Q1-L1-A11
tcatgattatgaacccgaagcgttgtaacctctgcctcaattacaaatctacttgggggataatacattagcgcaaataactccatctccgaagataaaggtgtacaacattacctccatcctcgaagaacgtggccaattcaccggcgtcatcatgctatggaaagccacacaggctgctgatcaactaatcaaccacctaaactcaccgcaccct

SEQ ID NO: 3 - DNA, 199 bp, Gossypium hirsutum
  Clone ID: LIB3083-001-Q1-L1-A9
ccaagcgctgtttcaccctgacttgctcttcttgtcctctggcaaggacacatcagctcactatattcctgcgcccccgcttaacgtggtcaacatcactcgcatcctctacaaaagtggccaaacaccactttcatcatgctcttgtatgccacacaactggctgatcaactaaacatctcagcttatcacaccgcta

SEQ ID NO: 4 - DNA, 229 bp, Gossypium hirsutum
  Clone ID: LIB3083-001-Q1-L1-B10
cggcgccgatgggcatgatttaatggaggctgttggccctgatttctactgtgtccggcagatctttgatggtgagggtgctccaggagctcacgattgaattgtaacacggtgttaaatctagaatcgcagatgtgacgggggaaattttacggaaaagaagggctgggaaaataccacgtgtcacaacttctgtgctatagaacatctggaggcaccactctcagtg

SEQ ID NO: 5 - DNA, 375 bp, Gossypium hirsutum
  Clone ID: LIB3083-001-Q1-L1-B11
cttgctaactgtctctttcgcatgggtggctcagcggtcctgttgtcgtaccgccgctcatagaggcggggagccaagtaccgacttgtgcacgttgttcgaacccacaaaggggccgatgacaaggcctaccgatgcgtgtttgaagaagaagactaatacggcaaagttgggatatcattatctaaagatctcatgggtatagctggagaggctttataatccaacattaccacaatagggcctttggtgctttcagggtggggacaactcctattttttctcactctgttcgggcgttaagtcttcaacccccagtggaagccttatattccagacttcaagctggcgtttgagcacttttgcatccatgct

SEQ ID NO: 6 - DNA, 162 bp, Gossypium hirsutum
  Clone ID: LIB3083-001-Q1-L1-B9
tagaaatggatattgcaacataagcaccggaaactcctttgacaagtgaaaggaatgttatagctgaccttgatgatataattcgctagaccctatgtggaatggtcattgtttcacttgatgggtgtgccatacacatggtacagtaccaggacactactt

SEQ ID NO: 7 - DNA, 310 bp, Gossypium hirsutum
  Clone ID: LIB3083-001-Q1-L1-C11
ctcacttctgcaattgcgagaagaaacgagacgggggaaatccaatggatttggaaacggcgaagaaatacttggagaaaggagttggggctgacggcgatgacaagaacgcctcaaccatcaatggcatgccttctagattcttcgaaaacttcatcatgcaaggtctccatgttgaccaaatcgtaaagggtcgagtcctttgctccatgaaagtccctcctcgtttgctgaacgctggtaatttcttgcacggtggagctactgcatcactggtggattttgttggatcagcggttatttacaccta

SEQ ID NO: 8 - DNA, 286 bp, Gossypium hirsutum
  Clone ID: LIB3083-001-Q1-L1-C12
gacgattcttgttttcttcattgtaagggcttatggggactacatcatatctagtggtggtcgtttcttacccagagctgttttaatggaccttgaaccatgaaccatggatagcttgcttactggtccgtacggacaactttttagacctgattactacatttttggtcaaaatggatctaggaataactcgggctaagggtcattacactgaatgagctccatcgattgattcggttcttgatgttgttcttaaagaaactaagaattgtgattgcttacaaag

SEQ ID NO: 9 - DNA, 164 bp, Gossypium hirsutum
  Clone ID: LIB3083-001-Q1-L1-C9
ccgctctagaactagagcttccgcatccctggagctgtacgaatccagcacgagctcaattgctgccagtagacaagacgcaagggtgctctccaattgatgcgagatgctcattgccaattccaactaactacttgatcaattcattcgatactacacagctt

SEQ ID NO: 10 - DNA, 337 bp, Gossypium hirsutum
  Clone ID: LIB3083-001-Q1-L1-D10
aattcgagacgagttgcgactgagttctggaccacattcttctggaagcgcgactactcttcaactatgtacattccacgagataaggataccgatagaccctaatgatctgactttcgttgaatacgaagccgaggacgtgggcgcttacgctatgcagatgaatgttggccatcatactacatataaccgaaccttgcaagccacgatgctcatgcaagagatgtctatggaaatccctggcaattcatccatgttttctgcagagacacactacagagcaaggttttaccagggtgtagtgaacatcatagctaacctagaggagctgaagaag

SEQ ID NO: 11 - DNA, 362 bp, Gossypium hirsutum
  Clone ID: LIB3083-001-Q1-L1-D11
tagaactatgtggatctcctggtctacatgatttcgagccgatttgttacatctgtctgaactatacatttggggtcatatctatatacacaagaattttcgaaactcataatgttgtaatcaacgccctcaatggatgtagaacgattgcaaagcattatgaaaagaacaatcacaacacacaatttttacatgaaaattcttttgggaaaaaactatggactgatgaataaaaattcactaaagttgaaaaactaatgacacatgaggagtctaggctacatctatctaaaggttgaaataccctgttctaatcaaagtcatatgatagaagtactttatggactcaacttgtgcaatat

SEQ ID NO: 12 - DNA, 345 bp, Gossypium hirsutum
  Clone ID: LIB3083-001-Q1-L1-D12
tcctgttcctaatcaagatgagaacactgtgtacggggagccttctgcgcctcaaccaccacggttccatgtgcattccttttgcatgaccctcactgtctcagattcatgcacccatggtgggttttcggcgctcatgcggcatgcagattaatgtgttccaccattggacatgtcactgcaacctacaacccaggagttggttgcttaggatatgcatggcatagagtggcgattccagcatattttcaggggtgaaccactattgcacttgcttcaaagcggatggagtgttcatgttagctcctccaggctatgttctagggatgctttaatatattttag

SEQ ID NO: 13 - DNA, 233 bp, Gossypium hirsutum
  Clone ID: LIB3083-001-Q1-L1-D9
tggctgtagatctagaactagcggatccctggatctgttcgaatccagcacgcttatgcacttagttagaagaaacgtgacgggggaagtccaatggatttggaaactgtgaataaatacttggagaaaggattttgggctgacgggaattacatgaactccttacccatcaatggacttccttcattattcttcgaaaacttcatcatgcatggtctctatgtagaccaaat

SEQ ID NO: 14 - DNA, 327 bp, Gossypium hirsutum
  Clone ID: LIB3083-001-Q1-L1-E12
cgacattggtgacaatccctatctttgtcctaaagggcctccttttcctctccagctcctcggctacaccaaatagcgatgcacatcactacctgttcctatcatcatgtgtccactccagctatccaagcctttgttttcgcaccctttcatcctactccggcccatccaacaccctacgatagttagccctatccgccgttaaagtcatcctgtcccgtgcccgttaagagtctaactacttgtctactagtgtgacatagtacaacatgagggaactagtcgcactgattgactgcgtggagcaaatagattagtctatggatg

SEQ ID NO: 15 - DNA, 209 bp, Gossypium hirsutum
  Clone ID: LIB3083-001-Q1-L1-E9
ctcatttgctttgtatatctactcatattcggtggtgtctacttacgctagaatatttgtaatacatcatgatgtcctaaacgcctacaacggatgaagaatcactatgctggcatttattataagaaaatattgatcacacagacattttcatgataattctcctgggaaaaaactgtcttctgattgattaaaaatacactaaggtt

SEQ ID NO: 16 - DNA, 393 bp, Gossypium hirsutum
  Clone ID: LIB3083-001-Q1-L1-F10
gggccataatgcatgtcataatttatgatgtaaacttaaataacatgagagttacataatgcatgactttattaaatgcataacacatagtgcatgtcacaattaaaagatgttgattaataatgcaaaacattaattaaagatgcatataataaacaagacataattaaaagctgaaaaattaattaaactaaacaaacaaccacatgcaaaacattgtatggacatgggatgttattttgggtccaataagggttggacatctcatgttcagcccaaacttgctgaattaggcccatcatcgaccctttaaacttctttgatctagcacatgttataaacccgatgagaatttcaattggatcctctcttgaaataggcaacttagaggtt

SEQ ID NO: 17 - DNA, 338 bp, Gossypium hirsutum
  Clone ID: LIB3083-001-Q1-L1-F11
aaaatgtgagcattgaagacaccaaaggtcggcatgagggtcgtttgtgaagggattaaagctaccggcccgaaggcaaaatcagcaaccacagcttcaacttctaatgcaaaatgtaaggttgatttgagactcaagatctggtaatggactatctgatcgacgagaatattttgagaaagagaatcaatggtgaagaaaaaggtttgttgtttatgatattttattactcctgttatggttgttattttcttaaagatgtgtcgatatttttttatggaggcaatatgtttgcaaattgggtgatctgatcgtataaggtatagaaaaatgtcatg

SEQ ID NO: 18 - DNA, 395 bp, Gossypium hirsutum
  Clone ID: LIB3083-001-Q1-L1-F12
gaaaaacgctgcttgcaggtatgtcatcatccgataagccagaattagttgaaagggatgttaaggacaaggtggatgacaaagaagacaacagtggatttatagacaaggtcaagggtttcattcatgacattggtgagaagatcgaggaaacaatcggctttggcaagcctactgcagatgtagctgagattcacctcccttgtatcaatcttgagaaagcagaaattgtcgttgatgtcctcataaagaacccaaaccctgttccaatccccctcgtcgacattgactacctcattgaaagtgatggtagaaaactcctttcaagcttgattccagatgctggaaccatccatgctcatggtgaggagactgtcaaaataccagttactttg

SEQ ID NO: 19 - DNA, 200 bp, Gossypium hirsutum
  Clone ID: LIB3083-001-Q1-L1-F9
gttacataatgcatgtcataatgtatgatgtactcgggaatctcatgagagttacatattgcatgactcttttaattgcaaaacgcattacgcatgtgacggtaactagatgcagggcaatattgccaactgttacctaccgttgcgtgccgtataccagacctgactctaagctgtcttcctaattgggctttccactc

SEQ ID NO: 20 - DNA, 231 bp, Gossypium hirsutum
  Clone ID: LIB3083-001-Q1-L1-G10
gtttttgcttacttgctctcaagattaataaaggtgttgatagaaaagatgtttatgcaaacaaatgtatgtaaagaagatgaacattaaagcccaaaacttcaatcatatcttaagcttgtttctgagtctataattagtgaacacttctgtattacaacttatatatatatatattagttcaattctggtcaaaaaaaaaaaacatgctgaaaattatataaaaataaa

SEQ ID NO: 21 - DNA, 158 bp, Gossypium hirsutum
  Clone ID: LIB3083-001-Q1-L1-G11
cgcgtgtcagctgcgagacttcttgtgattatagaggggcaatcgtgtgaccatctgcttgcgtcatatgctacatcaacagattcattaccaacgaatcgtacgtagatgagaacgacatacactgctacccttgcactcttcgagtatattaccat

SEQ ID NO: 22 - DNA, 383 bp, Gossypium hirsutum
  Clone ID: LIB3083-001-Q1-L1-G12
caactaataaatcataaaatgacattcaaatcagtaaactttttctattgctcattcggattccaatcaagaacaaaactccatattgcaaaaaaaaaatataactgggaccaaacgaaaagcaataaaagaattctagtttttgcattctggatttgaaaacttcgaaacttcaaattgataatcacacactaatatcttacatcacgaggctttcgtggtgaaactatcccgcggctgtactttgatcgcgattatgctcttactcaccatttccaatatccttgccggtcttttttctatttccgaggccgaaaaatcaggactgcggtgacaaatagccttgtggagcggcatctcaattgtcataaaatgatctcgtc

SEQ ID NO: 23 - DNA, 367 bp, Gossypium hirsutum
  Clone ID: LIB3083-001-Q1-L1-H10
ctgaatacatcttggcagcttttgacgatgccattgctgatggagttgatcttataacagcttcattaggatcattcttcgtgtttgaattctacagtgactctgtagctataggtgctttccatgctgccgagaaaggtgtacttgatgtacaatctgcaggaaatagtggtctagcagggtttcaatcggtggcaagtgtagcaccatggatacttagcgttgccacatgcgcaatggaccggcattttgtcaacaaggtagttcttgggaatgggaagacactaactgggctgtcaataaacactattagtattaatagagcaatggttccattggttaatgggatgcatgcatcatccgattg

SEQ ID NO: 24 - DNA, 245 bp, Gossypium hirsutum
  Clone ID: LIB3083-001-Q1-L1-H11
caaaagcattctaggaccctattacaaagggcaggacctttgagctggacgggtgcactgcttgcacttttacaccagtcctagcggctgtgcatggcatgtgtacagcactgcttctatcagcgtagacatggagtccatgaaaatgaatgccctgagtgtgctccagagttcagaattatctgggaaatgatccgtgactaaaaggagacttctgctgatcaagttcaagaatgcctagaagt

SEQ ID NO: 25 - DNA, 388 bp, Gossypium hirsutum
  Clone ID: LIB3083-001-Q1-L1-H12
cggagatgaacttggacaacgattccaataatctggttcaagctccgacaaacggcgactctgagaagctttcgccctccactttatcttctcttttgggttctaaagatcgcgattatcttctctgctccactgcagcagctgctgaaactgatcacgtgaaaatttctgatctagagggcaaggtgatcggaatttacttctcagctaactggtacccaccatgtagaaatttcaaccgagtattgattggtgcgtatgagcagctgaagagcaatggatctaactttgagattggatttgcgtcatctgatgaagacttggatgccttcaacatctaccgtgaaaacatgccatggctttcgattcccttttctgatttggagac

SEQ ID NO: 26 - DNA, 275 bp, Gossypium hirsutum
  Clone ID: LIB3083-001-Q1-L1-H9
cacgaggcaaagaaatttatgacactacttcaaatgggagggtgtttcacctgcaggagtgcacgccttgcacagagaccctggtctttgctggggaacactgatgtgttttgccctactgcatcggcgtgtgaccgcgtgctagcgaaatcgactgccctctttgcgcgacacaatgcagatatgcagtggagctaaaaagaagcttgtaacaggtttcatctcatcatgaactctatttccaacaagtctttatccaaaaggataagattttt

SEQ ID NO: 27 - DNA, 312 bp, Gossypium hirsutum
  Clone ID: LIB3083-001-Q1-L2-A1
aacaggttctactagtttgacattgtttgctcaaaattactagatagagtgctgtatacagcttatgaactgattacatcaagacctaattctagaagtgataatttgctctaaaaacaggttctaagcatataaattccttgaaaattaggcaagctttgaatcttatcaagcaacaacagggctttattttttctgtctgtctgtatatgcttagcctcagtctatactggaagaaggtcttgcacacccacaaaaacaacccttctttcgtcttccactccgtcttccaccgttggagataaagtccct

SEQ ID NO: 28 - DNA, 361 bp, Gossypium hirsutum
  Clone ID: LIB3083-001-Q1-L2-A2
gttttaaatgggtacgaggctcctagcacctttagagaactagaactcaagttttgtcttgccttacccccaatagttgcttctagttttttgttccaacaagaaaataaaatatcctgatctaaacaaaggcttaaattcctacttaggaagttggtagactatgacaatgtttctgcctaaaatatcagagcgaggtcattacctataggcaagtgaagatttagtaaaatgatgtccttttgtcggtgatggataccacacgtaaaaatgccaatattgataaggactatgataaccttgaacaataagtaaacaaagcatagcataacagaatggttttggctttgaaggcttgctt

SEQ ID NO: 29 - DNA, 345 bp, Gossypium hirsutum
  Clone ID: LIB3083-001-Q1-L2-A4
gggataaaacattagctcaaatagctccggcgccgccgttaaaggtggacaacatcacttccatcctcgaaaaaggtggccaattcaccactttcatcaagctattgaaagccacacaggtggctgatcaactaaacaaccagctaagcacaccggaccctaacgacgggataacggtgtttgcaccgagtgacaacgcgttctccggactcaaacccgggacgttaaactcactttccgaccaagagaagcttcagttggttcagttccatatactcccgacgttaatgtcgacgtcgcagtttcaaaccgcgagtaaccctttgagaacccaagctggggatg

SEQ ID NO: 30 - DNA, 228 bp, Gossypium hirsutum
  Clone ID: LIB3083-001-Q1-L2-A5
actggggggaacccaaactagcattatgccttatactgaaaaaagagcttttttcaaaaaagctgaaatttctccggaaaaaaaacctatccccatggttatttttgatatgatttgacccctttttaaaggcctttaatatcagggttaaactttttacaaatatttttttttaaaaaacaaaagaagtccaaaacccttatttcaattttaaaattttttgggtgt

SEQ ID NO: 31 - DNA, 437 bp, Gossypium hirsutum
  Clone ID: LIB3083-001-Q1-L2-A6
cagatatggtatcaaatggtcgaaatgtaggttatggtaatcaacttcctttggatgcaatgtcgaggctaggtcgggatactgtacctctacctccagatgcttccaatactctatatgttgagggacttccttctgacagcacaaggagggaagtagcccacatctttcgcccttttgtgggatataaagaagtacgactagttagcaaagaattccgacatcgtggtggagatcctcttatcctctgttttgttgatttcaccactcctgcttgtgcagcaactgcaatgagtgccttgcaaggttacaaaattgatgaacatgatcctgattctaactacttgagacttcaggtttctcggtaccccaggcccaaggtcaggtccaggagctcgtggaaggaaggtgaatgtcattttctggatggaactaat

SEQ ID NO: 32 - DNA, 448 bp, Gossypium hirsutum
  Clone ID: LIB3083-001-Q1-L2-A7
tttttggacacccaagtgtggttgaaggcttaaacatcagctgaagaactgataatttttctgttccaagctttgcttttgtactgtatttcctcaaaatttctagcgatgactccaattgggtttctgggtttactgtttttgctgctcgctctatactgtgggatagacccttttaagcacagtgcaatctctgaatttcctgactttgagtcttacaaggtggatttgcctccatgggaactggttccgacagacagggacaaggataatttgcttcagaagtcagagattaagttcttgaaccaggttcagggccctgaaagcatggcatttgaccctcttggtcgtggtccttacactggtgttgctgatggtcgagttctcttctgggatggtcaaaactggaaggattttgcttatgctttcagcaataggtctgaaatat

SEQ ID NO: 33 - DNA, 386 bp, Gossypium hirsutum
  Clone ID: LIB3083-001-Q1-L2-A8
aattgggaagccgaagaagaagctactgcgattgcgattgccaactcattcttccgtcatgggcaactgtggcactagagaggaatctgacgttgttactcatgctcaagttcaacagctccacaaccacatcgtatccgacaagaagcttactcaaagtcagagccagactcagaatcgtaccctctcagatctgagcgacttcgaggattccaggaaaaatgcgcttctctatacccacatcattgccttcactttattcgagcttgagactattaccaagagcttccgttctgactatattctcggggaaggtggcttcggaaccgtctataaaggttacattgacgagaatgtgcgggtcggtctcaaatctctgcctgtcg

SEQ ID NO: 34 - DNA, 449 bp, Gossypium hirsutum
  Clone ID: LIB3083-001-Q1-L2-B1
gaaaagccctaatttgacagctctctcagtctctcattttgcctgataaccatgtcgaggagaaaggttagggatcccaaggaggagaatactacccttgggccggctgtacgagatggcgagcatgttttcggggtggctcacatttttgcttcatttaatgacacatttattcatgtgacagatttgtctggaagggaaacaatggttcgcattactggtggtatgaaggtgaaagctgatagggatgagtcttccccttatgctgccatgcttgcagcacaagatgtttctcaacgctgcaaggaattgggtattacagcccttcatataaagcttcgagctactggagggaacaaaaccaagacacctggtcctggtgcccagtcagcacttagagcccttgctcgttcttgcatgaaaaatggacgcatagaggatgttacccc

SEQ ID NO: 35 - DNA, 363 bp, Gossypium hirsutum
  Clone ID: LIB3083-001-Q1-L2-B2
cttataaaacaaactaaaggaataatattctttttccctctgtctctctctctctctctctctctctctctctctgtctgaaaatcttctgtttgttgctgaatttacttctttcagctttttggaataaacccaaactgtgggtttttcctggttaacaaaggcttgtttgtgggtgatttgaatttatatcagcacttactggtaacaggagaaaacatagttttggggaagttgaagcttattggttgattgagagattcccttgagtttcaggcttatcttggaacaatgatgatgtttgatgatatgggaatttgtggggatatggatttcttcagtgctcccttttggggaaaaaga

SEQ ID NO: 36 - DNA, 381 bp, Gossypium hirsutum
  Clone ID: LIB3083-001-Q1-L2-B3
aatcttgaaccgtagcatggtatataagtccggggtttaaagctttattggggttaacatgaccagctcccatggctaaaggatcagccggtcggagatttccgcctatatcctttatcggactacctgtgttatcgatttgatcggatgttgtcatcaaagccgatcgaattgccgcagggctccaattaggataaacagcttttaaaagggctgctatacccgaaacatggggacatgccatggatgttcccgacaataagttgaaattggtgaacacaaggtcttgatttacacgagctgctgcaatatttggaggccatgcagcgaggactgagtcaccaggtgccataatatcaagctttaaaaccaggggacaac

SEQ ID NO: 37 - DNA, 268 bp, Gossypium hirsutum
  Clone ID: LIB3083-001-Q1-L2-B4
catctgaaatccactgcctaatagtgaatcatttgggaagattaaattgaatttagtgcaacttccattatgagcttgataacaatttcattaagcagaaatagagtaacaaatggaacaagttaaacaaaactgtagcagtaaggagaagagcagcagcaagttgcagaccagatgaagcaatttgtatctgtaaaatttacacaaaaaaacctgcaatattatcccaatttgcatcaaaggttaaaatccagagtaaccctttata

SEQ ID NO: 38 - DNA, 371 bp, Gossypium hirsutum
  Clone ID: LIB3083-001-Q1-L2-B5
tcgagtttttttttttttttttttgaaaagaagatgcttcattccatttttatgattttaagagaacagtaacaacatcgatcaaaaaagagagaacccaaaccaaacagtaatagagaaacttaaaattactaactactaaacccaaaccaaacccataacaatataggcccaagcccactttgaaacctaaacttaagacctccagctgccttcagatgcaccgccgccttttgagtaacgagatccgccgtcaccatatcctccttcacggcgtccacctccgtacccaccaccaccatacccttcaccatttccgtatccaccttcacggcgtccgtcaccatatccttcttggcgaccaccatatc

SEQ ID NO: 39 - DNA, 393 bp, Gossypium hirsutum
  Clone ID: LIB3083-001-Q1-L2-B6
tagaaggagtccaatctctctatggatcaaaccctaattttacatttggttctttgttggaatctgacacttcagcaaatcaagccattggtttgagatttgaaccatctttttgggcggccatgttcttggcagcttctttcttctgcatctagcttccttttttgttttaaatttagaaggtgattggcttttgattatctgatctccataataggagctagcattccagacccttgaaatagggtaaaattttacagtcatacgaggaaactccctgatcaaatggagaagatttatgactctatatccctatatagaggcgtttgtgtccccatttaatataatgggacggccctttgagagcataacatgacttagtttttaaattat

SEQ ID NO: 40 - DNA, 458 bp, Gossypium hirsutum
  Clone ID: LIB3083-001-Q1-L2-B7
ggaaaatggaggcaccaaagacgattcagcacgaaattggaggagtccagaacgacgccctgcgattcggtctccacggcgttaagagcgacctcgtcggatctcaccctctccaatctgcttacgaatcagcaaagaaaacgcaggaagagatgaagagaaaagttctggccaatacttatgggacagcaatgccactcaaaatggatctcgataggcaaattctctggcggtttcagaggccattgctaccatcttcgatgctagggttggaagcggtgacaggaactttagatgattttggctttgaggattatctgaatgatcctcgagattcggagactgttcggccattggacttgcaccacagcatggaagttcgtctcggcctctccaaaggaccagtctgtcctagttttatgtgagattttcattgactacttcagtgttgtcccatg

SEQ ID NO: 41 - DNA, 341 bp, Gossypium hirsutum
  Clone ID: LIB3083-001-Q1-L2-B8
cttgctgggagctttactgtctcgagcatggaatccagcctgatggtcagatgccaagtgacaaaactgtcggaggaggtgatgatgcttttaacacctttttcagtgaaactggtgctgggaagcacgtccctcgtgccgtcttcgtggatcttgaacccactgttattgatgaagtgagaactggtgcttaccgccagctcttccacccagaacaactcatcagcggcaaggaagacgcagctaacaactttgcccgtggtcactacaccattggcaaggagattgtcgacctctgtttggaccgcatcaggaaacttgctgataactgcactggtctt

SEQ ID NO: 42 - DNA, 427 bp, Gossypium hirsutum
  Clone ID: LIB3083-001-Q1-L2-C1
tgacctgatgatgataaagtggcggattccaacgtataagagcaacactagatttaaggaataggtttgaggtccaggtgtctttctttttctttggttacaatttccaacaccgaaccacacgtcaaatatctggactgtcaagtctctcacatagtggcttgagttcaagtcttaataagtgaaagagcaagagaaaaaggaaagtcgagcaaaaaaataataataaaaagagagagtaaaggaacatgggaaaatccacttcctgtttcaaaatcatcacttgcggcggagattttgctgagaacaacgacgttattcatgttcctgagcctgagattaagaaatcaaatgacaaatagggatggagttttagaaagagatctgaacggcatcgggtgcttagcaacactgttatacaggaagc

SEQ ID NO: 43 - DNA, 173 bp, Gossypium hirsutum
  Clone ID: LIB3083-001-Q1-L2-C2
ctgtctccatggacattgttaatggggatggcaagtccaaggtggcgttttaatttttataccagatgggataaggagctttcggtgctgctaatttggtccttcttaacctggaaaaaacaacttatgggttgaacataattttcttggccaaactacctgatattttcaaa

SEQ ID NO: 44 - DNA, 428 bp, Gossypium hirsutum
  Clone ID: LIB3083-001-Q1-L2-C3
aacacacttgctagtattcctacttggagtggtgactctcagcactcccacatttggtacctatgagtcaccaaattatgggaaaccccctactcctgtattcaagcctcccaaggtgaaaccaccaccatatgaacctaagccaccagtgtatgaaccaccaaaaaaggagaagcctgaacctaagccaccggtttatgcacctccaaagaaagagaagcatggacccaaaccaccaatgtatgaacctccaaagaaggagaagcctgagccaaagccaccagtttatacaccttcaaagaaagaggagcctaaacctaaaccaccagtatatgaaccttcaaagaaggagaaacctgagccaaaaccaccgatttatacaccttctaaagaagagaaacctgaacccaaaccacccgtatatgaac

SEQ ID NO: 45 - DNA, 349 bp, Gossypium hirsutum
  Clone ID: LIB3083-001-Q1-L2-C4
catctgcaggcgttctttggacattgaacgacccacttatgcgaatcttaaccgccttgtctctcaggttatctcatctcttaccgcatctttgaggtttgatggagccctgaatgtggatgtgactgagttccagactaacctggtcccatatcccaggatccactttatgctttcttcttatgcccctgtcatttcagctgagaaggcttaccatgagcagctatcggtggctgagataaccaacagtgcttttgaaccctcttcaatgatggccaaatgtgacccacgccatgggaagtacatggcttgctgccttatgtaccgaggagatgttgtgcccaaagat

SEQ ID NO: 46 - DNA, 412 bp, Gossypium hirsutum
  Clone ID: LIB3083-001-Q1-L2-C5
cttgatcagatcagaaactgttcttagtttccctttttttttttttttgcaagagctgctttgaattcgtaagtggacgccggagattggaagagaaagatgcgcttgatctgttccaagtttcatttccaactcttcccagaagattggtgcttggacgggatgggcagctgcactgcagagtatatggtggatagcaaatactagagaatctattaaggtttcctggctgaattatggcttctgcaagcctaggaaatggtggagcaggtagttcaaggtctgtcaacggtttcaaaagttcttctagttctggtgattggctggggagagaaatgcttgaaatgagattgagagacaaagtggaccatgacgaagactgagacagtgaacctgatgtatttgatggagt

SEQ ID NO: 47 - DNA, 327 bp, Gossypium hirsutum
  Clone ID: LIB3083-001-Q1-L2-C6
agaacgtcaatggtaggagattcaagctcctggtccaccgctctcgtcaagatttcaccttacactttctccgccatcggtatcgcaatcgccatcggtgtctccgtcctcggcgctgcttggggaatatacataactgggagtagtttaatcggtgctgctattaaagctcctcgaatcacttccaagaatctaattagtgtaatcttttgtgaagctgttgctatatatggtgtaattgttgcaattattttacaaacaaagttagagagtgttccatcatcacagatatatgcgcctgagtctcttagagcaggatatgcaatc

SEQ ID NO: 48 - DNA, 407 bp, Gossypium hirsutum
  Clone ID: LIB3083-001-Q1-L2-C7
accgtgcactttattcatagaaaataccaaaaactagtacattatccgaggtattcaaccctgaaaacacacatccaaaatcaacaagaaaatacatcacagtagcaaacggataacggtacatccctcaatactcctcctcatccccttcgtctccttcaccagactcagcgccaacttcttcataatctttttccagggcagcgagatcttcacgtgcctcggaaaactctccttcctccatgccctcaccaacataccagtgcacaaatgcacgcttggcatacatgagatcaaatttatgatcaatgcgggaaaacacttccgcaacgctggttgagttggagatcatgcagacagctctctgaaccttggcaaggtcctctcctggaacaacagttgggtgc

SEQ ID NO: 49 - DNA, 412 bp, Gossypium hirsutum
  unsure (1)..(412): unsure at all n locations; Clone ID: LIB3083-001-Q1-L2-C8
gatttgcgggactttatcaaataggtttgtgtttttatgctgttatctccttacagtcctcggtgtttggtcaagaggctgtaaatttaacatgcctggcatgggagaagagatggctttaaaagaaattattattgtaagagctgggaagaatgccctagcatgcacagaggaagacaaagagctgaagatggtgatggcaccatccatatttgtggtttagttatatctgcttttcctacagttttgtaaagatgaggtagatgatgatcgtgatgtaataatatgtaagtggtggtattggtacgcaagtctggtgacacctcatccagtctcggtgtttgttgtgaacttcgattgatttgattttgcgatgaagaanatcatgcatgttttctcataaaaaaaataa

SEQ ID NO: 50 - DNA, 389 bp, Gossypium hirsutum
  Clone ID: LIB3083-001-Q1-L2-D1
gctgtgctaattcccatctgatattattcatatatgatataattacaaacataaggaaaaagaattaacaaatcgtattgtagttttaaatgtttatgtacgaacttcaactcctttacttctatttctacctttagttttaccatgaaacaaaggagaggaaaaaacaatgtgaaaaatctaaaaaaagcatactctcaaaagtcaacaaaggaaacaaacaaaagggtcaatgttgaacttgaacatcatctttttttcttgtgactcgaatgtaagcaaaaactgctgcgaaaaaaacggtgacaagtccaccaatgatgacaccaccagcagccatggagccatcatctgatgatgaatcatgctttcctagccggctgatccct

SEQ ID NO: 51 - DNA, 381 bp, Gossypium hirsutum
  Clone ID: LIB3083-001-Q1-L2-D3
atttaccatggagatgagatatgccaggagaaatccaagtggttgttggaggaagtaggcatgccaagggggcttttgccacttagagacatcgaagaatgtgggtacgtgaaggacacaggtttcgtgtggctcaaacaaaagaagagcatcacccacaggttcgaaaagatagggaagctggtttcctatgcaactgaagtcacggctgtcgttgagaaaggcaagatcaagaagctgactggggtgaagaccaaagagcttttggtttggatcacactgagtgatatccaagtggatgatcctcccactgggaagatcactttcaagacttcttcagggctgtttaggactttccctgtatcagctttttgagattga

SEQ ID NO: 52 - DNA, 410 bp, Gossypium hirsutum
  Clone ID: LIB3083-001-Q1-L2-D5
gttaacagctgcccaggttctaagtcatccatggattaaagaagatggtgaagcacctgatacaccacttgataatgcagtgctaagcaggctcaaacagttcaaagcaatgaaccaattcaagaaagttgctttgaaggtgattgcagggtgtttatcagaggaagaaataaggggattgaaagaaatgtttaaggcaatggacacagataacagtggaaccataacacttgaagaactcaggcaaggtctagctaaacaaggcactaaattatctgaatatgaagttaaacaactcatggaagctgctgatgcagatggtaatggaacaattgactatgatgaggtcataacaggcacattgcctatgaacagaatggatagagaagaaccatctttccatgcttttc

SEQ ID NO: 53 - DNA, 229 bp, Gossypium hirsutum
  Clone ID: LIB3083-001-Q1-L2-D6
gaaaagataaggccaacaacatcattggcgaagctctggtgatgattagtgcagggactaatgatttcgttttcaattgccatgatattccgaccagacgattggagttcgacattgttggataccaacattttctgcttcataaactataagatttcctcagggattattatgaactcggatgccgaaaaatgatgttagccgaactgcttcctattggttgctaacc

SEQ ID NO: 54 - DNA, 138 bp, Gossypium hirsutum
  Clone ID: LIB3083-001-Q1-L2-D7
ctcattctttttttttgtacatcattaaatcttggggtaaggataataatcccatgacaatcgagaattatccataccactttactatacccttacaaattttagaacacacccatgattcctaccgatgccatgcat

SEQ ID NO: 55 - DNA, 152 bp, Gossypium hirsutum
  Clone ID: LIB3083-001-Q1-L2-D8
tggagattgaacattacagcttcatcaaggtatggattttagctataatgtccctttgttattgttactacatatcatcaaagctccccaaaggcattttcaagctttttctttaaccccaatcttcatcttcttcctttacctacctctca

SEQ ID NO: 56 - DNA, 360 bp, Gossypium hirsutum
  Clone ID: LIB3083-001-Q1-L2-E1
gagacaccaccgttaagaagaaaaatatccatgggatactgaatactgtgagttggggaattttgtttccacttggagctatgattgctaggtacataagaagctttgagtcagcagatccagcttggttttatcttcatgttttctgtcaaatatcagcttatgccataggagttgctggctggggaactggtcttaagcttggaagtgaatcctctggtatcacatattcgggtcatagatacattgggattgcccttttcgtcctcgctactgtccagatctttgctttgttttaaggcctaaaaaggatcacaagctccgtttctactggaacatttaccaccacagttttggata

SEQ ID NO: 57 - DNA, 308 bp, Gossypium hirsutum
  Clone ID: LIB3083-001-Q1-L2-E2
tggagattgaacattacagcttcatcaaggtatggattttagctataagttccctttgttattgttactacatatcatcaaagctccccaaaggcattttcaagctttttctttaaccccaatcttcatcttcttcctttacctccctctcaccgtctccacctttcatcttgttggcatcagcgccttcttcctctcttggttagctaatttcaagctcctcctcttttgtttcgaccaaccaccgctttcaccaccaccgttcaacctttttcacttcatttccttagcgtctcttcccattaacc

SEQ ID NO: 58 - DNA, 344 bp, Gossypium hirsutum
  Clone ID: LIB3083-001-Q1-L2-E3
gggctaaaaaaataattttaaggggaggagggcttttgttaggtggcacctataggaggagtgcttttgtcatgcgacaccactgttggcagtttaatcgcctacaacggacgtgatcggacaatcacgagatatccaaatgggatatttgattagataaaataatcacacaataaatacgattaatgtactgggttagtaccacgtattgagggcccgagtcaatggtttgggctatcggctagatgaacatcttatgccatacttggaggcattcggattcggatcagtggcattgatctgcatgttcgatttgagatgcgacttgatattccctttggtcg

SEQ ID NO: 59 - DNA, 342 bp, Gossypium hirsutum
  Clone ID: LIB3083-001-Q1-L2-E4
gctgaatctgccaacccttccacactaatcaaggaagcaaggcatgtcatcagctgtggctatgaagagaagactgcatgggggaaagagattggatggatatatggttcagtcactgaggatatcttaaccggcttcaaaatgcactgccgaggatggagatcgatttactgcatgcccttaaggccagcattcaaaggatctgcacccatcaatctgtctgatcggttgcaccaggttcttcgatgggctcttggatctgttgaaattttcctaagcaggcattgccctctatggtatggctttggaagtggtcgtgctaaatggcttcaaagactagca

SEQ ID NO: 60 - DNA, 360 bp, Gossypium hirsutum
  Clone ID: LIB3083-001-Q1-L2-E5
cgtcatgatctatatgctaatcgaaatgttgtctggtttgggatcaacatgttgggattatatggacttcaaggccctgtatatgtatgcacagggtgtgttttcaacaggcaggcattgtatggctacgatccatcagtctctgagaaacgaccaatgatgacatgtgattgctggccttcttggtgttgctgatgatgcggaggttctaggaagaaatcatagaagaaaggtgaaatgaatggcttactacgaggtcttttatacggaaaatagaagaatatgatgggcataatctatgtgaaaaaagggtctgtaccagtctttgatctcgaagaaattgattaatggcttgaagga

SEQ ID NO: 61 - DNA, 279 bp, Gossypium hirsutum
  Clone ID: LIB3083-001-Q1-L2-E6
ctttatttttttttttttttggagtagagacatgcatatggcatttattcaaaacaccacctgaaaataaaggaatctcccaccgtcgaacatacatcaaatagaaaaaccaagaataccagaaaaaatacagactaacctcttcatcaaaaaataatgtcttcatccttctccctggccgcagatagcaaattgtgagctgcatttattgaaatccctttctgcaaggatatcttctcagcaaacttatcctcgacgaactcctttgcggcagctagc

SEQ ID NO: 62 - DNA, 385 bp, Gossypium hirsutum
  Clone ID: LIB3083-001-Q1-L2-E7
agatggtcagcctaagctgctcctttctctgatcccagattacccaatgttgaatttcatgcttacgacttccatatatcttgcaatttcttacagactctttgacttgacaaatatactgaaatcagcttttgtacctaccaaagacaacaagcgccttctccacaacttgattactggtgttgtagtctcgagcatattatactctctctctttcgtgttcctaagaatccctcagatgttggtgtgagaactataaatatagagatagtaggaggcagccaccatgaccttgttcatcactgtgttgttggaagtattttccttcacaatggaaacgtaaaattgctgaattcaattggagaatacgttctcttgatcagat

SEQ ID NO: 63 - DNA, 400 bp, Gossypium hirsutum
  Clone ID: LIB3083-001-Q1-L2-E8
gagtttcatgttgtcggttcttctgaaaaagcacattatagctgaagttaacattacagcttgaaactgcataatgagagtctgtacaactgtttgataattacaaagccaacaaatagtggatcgactgtccggaagatctctgcaggttcatgtgcaagatacttgacagattatcaatctagaaacatctaggtgagttttcccagattgattctaccacgatcaaccatctaatgtaatatattactctgttatcacctccatattttatacattctttgactctgtagctatcgcctcagattcgcatatggggcattcattcttaacagccatccacttcttcaagcaacctgactgattctcgaggtcacaatccagagtcccgattttctct

SEQ ID NO: 64 - DNA, 342 bp, Gossypium hirsutum
  Clone ID: LIB3083-001-Q1-L2-F1
gatagtataatatggagaaatggtatggggtttcagggctggtgttggttttgagtttgttctttggggttaaaggagaaccccaagtcccatgttacttcatttttggagattcattggtagataatgggaacaataatgaacttcgttcattggctagagctgattacttgccttatgggattgactttgctaatggaccgaccggccggttttcgaacggtcgaactacggtggatgtcatagcttgaacttattgggtttgacgattacattcctccatacttaaatgcaagtggtagacaaatactgggatgatttaactatgcttttgcttgctgc

SEQ ID NO: 65 - DNA, 280 bp, Gossypium hirsutum
  Clone ID: LIB3083-001-Q1-L2-F2
ataaaattatcaaatttggcattatatcaaatgaaaatatagtctacatacagaacacaattattggtatccttaacttgaaacaaattgttcaaggatccagattaactggttttaaatacacaaacaatttattgtgaagtttgaaactttaagcaccaccagtcagctgaaggtgcttgatgtttgtaatctgttttcctgggttcagacccttcgggcaagcacgagcacaattcaatatcgtatggcaacgatacaactttaactcgtcatttat

SEQ ID NO: 66 - DNA, 353 bp, Gossypium hirsutum
  Clone ID: LIB3083-001-Q1-L2-F3
gaaagatattcccctggatcatgtctctgattcttcattatgcagagggagcaagagtaagagagagaccagcacagctgatgatcaaatgcttgaactatgggagtctgctgagcatgaatgtggtgttgattcaaaaatcaatgacatgcaagaacgggtgtttgtaccgggggagatcattgcctgtcatcagtccagtgatctagaacctgaaaacgagagttctttgggagcattggtggagaaagatgtgagcattgataagttagagatatctaccagcattagagaaccaaagaaacgagctaaaaaccgaagggtcttagacagacttgcttctgatgctcata

SEQ ID NO: 67 - DNA, 337 bp, Gossypium hirsutum
  Clone ID: LIB3083-001-Q1-L2-F4
aaatataaatatcactccgttgatagcataaaaaggcattagacaaatcttacaacatgaaaaacagaacaatagcttgtaaggctattcatgttcttatggagcatcataagtaaaagacaagcatttctaacaacaaaaaaatgactagcaaacatgactaaatttattccataggcataatttgagaaacctcacacgaataataaagaacaggataccctcacagggtgaacccatcatcttcaaaataaatgatattgcgatagtagcatcaatattctttaccttcctcttcattatctacaccttcagcaccaacttcttcataatcctt

SEQ ID NO: 68 - DNA, 334 bp, Gossypium hirsutum
  Clone ID: LIB3083-001-Q1-L2-F5
caaaagggagtgagttgagagcacactgatgtggctgttcttcttgacaatgaggctatctatgacatttgcaggcgctctcttgacattgagcgacccacttacaccaatcttaaccgtcttgtctcccaggtgatctcctctttgactgcttcacttaggttcgatggtgccttgaacgtggatgtaacagaattccagaccaacttggtcccttacccaagaatacacttcatgctttcttcatacgctccagtcatctctgctgagatggcttaccatgagcagctatcagttgctgaaattaccaatagtgcctttgaagccctatcta

SEQ ID NO: 69 - DNA, 121 bp, Gossypium hirsutum
  Clone ID: LIB3083-001-Q1-L2-F6
cttattttattatgatcatatctttcaaagcttaacgctgggtataatatgaaaagattatatcatattttcaacagctattttatcatatctcaacttatttacaacagactaggcaaac

SEQ ID NO: 70 - DNA, 319 bp, Gossypium hirsutum
  Clone ID: LIB3083-001-Q1-L2-F7
cttaagtggattggaaacctgatttgaaagctgagaaataagcagtttatgcaacggtaatagcctatagaaagcaacagttgagggaaaaaaaacgccgattggagatgcaaaggcttgagaaggaaagacaagcagatttaataagctacaagggtctgatggtctctgaaatgatgacattagacaatcaaattgcatctgacaagctagtctttccaggaagtagaaaaggatgttatgtgaaacttgctacccgtcaaattatggtggtttctttttacttttttgtcattgctagcttaagttatttgccttg

SEQ ID NO: 71 - DNA, 186 bp, Gossypium hirsutum
  Clone ID: LIB3083-001-Q1-L2-F8
cagatgcatgccataggtacctcgttgatccttgccattaatgtcaatgactctggaactaagagcaagctcgataactagtatggatgccgcatctaactttccgatggatagatgagagctactgatgagatgattgccggcaaggtcgccgatgactgaggtatatcggtgatgtctaaaagg

SEQ ID NO: 72 - DNA, 309 bp, Gossypium hirsutum
  Clone ID: LIB3083-001-Q1-L2-G1
ccagatggcattggaaacagcatctcggccggctactccaagtgcccaagttgttggaaatgctttcactgaacagtattaccacattctttacaactctcctgaatgggctcatagattctatcatgattcaagtgtgattagccgaccggattccagtggtgtgatgacatcagtgacaaccatgcaaggtattaatgagaagattctttccttcgattacacatatcataaggctgagattaataccgatgatgctcagaaatcttatcacgaaggtagtactatattaggaactgggtgtctaac

SEQ ID NO: 73 - DNA, 283 bp, Gossypium hirsutum
  Clone ID: LIB3083-001-Q1-L2-G2
ttttcctctccatcattgcaactggagtgcttgaacttcgatggagcggtgttggcatgggagactggtggcgcaatgaacaattctgggtgatcggaggtgtcttcgcccatcttttcgccgtcttccaaggccttcttaaagtcctagctggagtatacaccaactttaccgtatcagctaaagcagccttggatacataatttggggaactttatctcttcaaatggacaactcttttaattcctcccacaactttgataatactgaacatggtctgagt

SEQ ID NO: 74 - DNA, 404 bp, Gossypium hirsutum
  Clone ID: LIB3083-001-Q1-L2-G3
cgacgtcgaaaagcagcgtgaccaaaatgtctccggcggtgatgcttttgctcgcgcttacgccgcagtcgaagccgacattgaatccgctcttgagaaagtggaacttgcttccaaggagaaaagtaaggcatctgctgttgcagtcaatgctgagattcgtcgaaccaaggctcgattgcttgaggaggtccctacgctgcagagattggctgttaagaaggttaaagggatttcaactgaagagatggctactcgtaatgatctggtccttgcattgccggacaggattcaagctatacctgatggaactgctgctactaaacaaacttggggctggatgtctttagcatcttcagcttcttgtactgcaattaagtttgattcagatgagcgatttgaca

SEQ ID NO: 75 - DNA, 358 bp, Gossypium hirsutum
  Clone ID: LIB3083-001-Q1-L2-G4
cacaccactcatggtgccttcgtttccctggtcaattaaactcagatctacgcaagcttgccgtcaatctcattccattccctcgcctgcatttctttatggttggctttgctccacttacttctcgagggtcacagcaatacagggctcttactgttcccgagctcactcaacaaatgtgggatgccaaaaacatgatgtgtgctgctgatcctcgccatgggcgatacttgactgcttcagccatgttccgtggcaagatgagcaccaaggaagtcgatgaacaaatgattaatgtgcagaataagaactcatcatactttgtggagtggatcctcaataaatgtgaagtctactg

SEQ ID NO: 76 - DNA, 296 bp, Gossypium hirsutum
  Clone ID: LIB3083-001-Q1-L2-G5
agagagataaccattctttttcttttgttgttgttggtgtcatggcttctctgcctttcatcttcttcttatctttctttataatctccacaacattgacgtcagccggcgccgccgccgtcaccatcaaactctccctctctcccttccctcacccttcttcctcccatccttaccaaattctcaacaacttagtcacttcttctgttgcaagagcccaccacctcaaacatcccaaagccaaggccgataatactacctcttctcttctcagggctcccctattttctcacagt

SEQ ID NO: 77 - DNA, 272 bp, Gossypium hirsutum
  Clone ID: LIB3083-001-Q1-L2-G6
aaggcatcctattctccgttttgagtttcttttgttttggaatcgtcttgtcttcttttaaaaaagatcttctcccttgttcttccctcttcctatgatcttgacctgcaaagtgatttccgaaagctcccactattactaaaaaactcccaataggccacgtagccgcttatattataataaagtaagtaggaaggagcgaaagctactcgaccagactggagaggcgaccaaaggaagctggttcaccttctcttctccggtacaacata

SEQ ID NO: 78 - DNA, 368 bp, Gossypium hirsutum
  Clone ID: LIB3083-001-Q1-L2-G7
aaaaaacacgttcacagaaatgattgaaggcatatgcatcactaataaaagagaatcaagcatggagctcaccttgagtgtcaatgccttctcaaagatgaaaaaattgagattgctcaaagtgcttatgcctctcaaattgtgatgatctcaaatatctctctaatgaactacgacttttagatcggaaaggatgccctttacgatcgttgccctcaagcttccaaccagacaaccttgtcgcactttttataccatatagtaacattaaacatctatggaagggaaatagacccttgtataagttgacaatgatgaaccttgaatggtcccaatacctgatcaagacaccaaacttcacaacagta

SEQ ID NO: 79 - DNA, 422 bp, Gossypium hirsutum
  Clone ID: LIB3083-001-Q1-L2-G8
aaggaaaaagttgaacatacgcactattatttagcgctcttaatccgcggttaaccttactttcaagtacaaattatacatatataattccacatgaaataggatagctaccaagaaaagcttagtaccttcaacttttgaatggttagttaggatttgttacttagtttcctcttgccttttccaaatctggaagatacagcaatccttcatcatcgctgctttcttcttcttgaccaacatacgtggcatcatcgtcatcagaggccaaatcagaatttggatcttcatcgtcttcatcgcaccatttgttccaatcaaccttgatgtaaggcgcgggtttctcttctgactttaacaatcttttccaccaacccttttcctctttcatgattgagcatattatattccttaacccaaca

SEQ ID NO: 80 - DNA, 287 bp, Gossypium hirsutum
  Clone ID: LIB3083-001-Q1-L2-H1
aaaatctcaagtttcttcgagcattgttcttttccctggttgcttttttgaagagaagcagccgcccaatatgtcgttgagaccgagcaccagaaccgaggtccgccgcaaccgctacaaggtggcggttgacgcggaggaaggccgccgcaggagggaagacaacatggtggagatccgcaaaagcaagcgcgaagagagcttacagaagaagcgtcgcgaaggccttcaggctcaacagttgtccgcttctcttcaatcctccaacgtcgaaaaaaaattagaga

SEQ ID NO: 81 - DNA, 184 bp, Gossypium hirsutum
  Clone ID: LIB3083-001-Q1-L2-H12
ctaacttttaccaaacaaataatccgggaagaatactatgagaaatacatgaacaaacaacttcgaagctattctttctccatggttgattgctcaagcctacccttcaagcagtaacctgaccaaagagccacttgcggatctctggaagttttttattgaatgcaacattcaatcgtgcatc

SEQ ID NO: 82 - DNA, 337 bp, Gossypium hirsutum
  unsure (1)..(337): unsure at all n locations; Clone ID: LIB3083-001-Q1-L2-H2
ctcgtgccgctagatcgattgctaactcgctcaagcttgacgacgacgacgacgacgatcggaccaatgcggcgctggatccgaaacccgaatccgatccgaatcctaaccaagcctctccttctcattcccattcatcatcggatcccaacactccacgtggcgtcaaagaagacctatccgagcttaccaaaaccctatctcgtcaattctggggtgttgcttccttcttcgctcctcctcctccggaatcatcggagcagcagcccgatcacgcggctgagaaggaggaaaactctctccggccaccgncgtcttctgatgatacggatgagtc

SEQ ID NO: 83 - DNA, 338 bp, Gossypium hirsutum
  Clone ID: LIB3083-001-Q1-L2-H3
cttatgcctcattcatggcattttaccccttgaatgaagccaatttcactaccaccaacatcttgcctcatctaaaggcctcgctttctgaaaccctaaacatcttatatccaatttccggtcggatcaaagataacatattcatcgatcatttccatgaaggtgtgccatttttatcagctcaagctggttgtcgattgtctgagtttcttaagcaccatgaggttaagttattgaacaaattgcttccatgccaacctttctccaaggaattcaacaatgaggctcccctccttgtgtgccaagtcactattttcgcttgtggcgggatagctcta

SEQ ID NO: 84 - DNA, 203 bp, Gossypium hirsutum
  Clone ID: LIB3083-001-Q1-L2-H4
gagagagagagagagagagagagagagagagagagagagagagagagagagagagagagagagagagagagagagagagtgtatattgaagatttctttctcgattttctctttagccaaaatagatgcagatcttcgtcaagactctaaccggcaagacgatcactctcgaggtcgagagctccgactcgatcgacaacgtg

SEQ ID NO: 85 - DNA, 266 bp, Gossypium hirsutum
  Clone ID: LIB3083-001-Q1-L2-H5
ctttgctcaatctgatggaacaaaacaaccgtttgcctcacatttgatgtcataagtttgatatgcatgatccaatcgctaatgtctgacttgattgtttagtcttacatgggctgttgtctcatatgggactgtaatactgtacatgtatgatagcctacatgacatgaccactatatggaatgctttgagacattagtcatatgttattacctgttgaagacactctcccttgaatgataacgaatttaccggacatgccggat

SEQ ID NO: 86 - DNA, 192 bp, Gossypium hirsutum
  Clone ID: LIB3083-001-Q1-L2-H6
ctgtactcaatctgatggaaccatacatcccttggcctcgccttttatgtcatatgtttcatatgtatgatccattcgctaatgtctgactcgattgattagtcttacatgtgctgtagtctaatcagggactgttatactgcacatgtatgagagccggcatgaactggccactactatggaatgtcttga

SEQ ID NO: 87 - DNA, 322 bp, Gossypium hirsutum
  Clone ID: LIB3083-001-Q1-L2-H7
cggatctgaattttaaaccaagcgagggagttaaggggtgacgatagaaggatcagaggaattgatataaacactagaatatattgaatcgaagttttttgatggttctgataactaatcgtgaagatttccatttataatgtacaagtttttcaaaacctacgcatttgataaatataagatctacttcggtgagaaaatttatctgaactcatctacgaataagcagatcacttgctgacttttttaaaccttataaccttgatatcaatctacttgagatgttcttcattaataggcaagaaaagttatttatttttgt

SEQ ID NO: 88 - DNA, 247 bp, Gossypium hirsutum
  Clone ID: LIB3083-001-Q1-L2-H8
ttccggaccagccgcaacccattctaagggttcccaaacttgctcagattcgcgcgcaattcccctaataagaccaacaccgcgaccgctcaaggccggaccgtccccatccagaacactggaatcttcatccacatctacacatgttcagtagcttacaatctgaagccagtgcccaacttggagaaaacatatctacggtggccatcgatacactatgagatgacggtttgcatgaaaaccaatc

SEQ ID NO: 89 - DNA, 373 bp, Gossypium hirsutum
  Clone ID: LIB3083-002-Q1-L1-A1
taacagcctcggcaatgtttcgaggcaaaatgagcaccaaggaagttgatgaacaaatgatcaatgtccaaaacaagaactcttcgtattttgtggagtggattccgaacaatgttaaatcaagtgtttgcgacatcccaccaaccgggttgacgatgtcatcgacgtttatggggaactcgacgtcgatacaagagatgtttcgacgtgtttcggaacagttcacagtgatgtttaggaggaaagcatttttgcattggtatacaggggaagggatggatgaaatggagtttactgaggctgaaagtaatatgaatgatttggtttctgaatatcaacaatatcaagatgctgtggttgatgaagatggtga

SEQ ID NO: 90 - DNA, 393 bp, Gossypium hirsutum
  Clone ID: LIB3083-002-Q1-L1-A10
gtgaaacaatggcgtcctcggatcttattggcaagctcgagactgatgtcgagatcgatatttctcccgaaaagttccaccatatgtggtgccacaggccgcaccatgtccaccacactagctctgaaaaagtacaaggatgcgatttacatgaaggtgaatttggaactcccggcgtcgttatctgctggagatatgtgcatgatggaaaggctaaaactgcaaagcaggtagttgaagttatggaccatgagaaaaagtcaataactttcaaaatgcttgaaggagatctgatggaggaatacaaaagcttcgtgattacaatccaaacttcccccaagagcgacggtaaaggcagtatagtgcactggactctggattatgaaaagctgc

SEQ ID NO: 91 - DNA, 398 bp, Gossypium hirsutum
  Clone ID: LIB3083-002-Q1-L1-A11
aagctgctagcctttgcctttcttttcttcttcttttgggataaaacattagctcaaatagctccggcgccgccgataaaggtggacaacatcacttccatcctcgaaaaaggtggccaattcaccactttcatcaagctattgaaagccacacaggtggctgatcaactaaacaaccagctaagcacaccggaccctaacgacgggttaacggtgtttgcgccgagtgacagcgcgttctccggactcaaacccgggacgttaaactcactttccgacaaagagaagcttcagttggttcagttccatatactcccgacgttaatgtcgacgtcccagtttcaaacggcgagtaaccctttgagaacccaagctggggatgttaaaggtgggaagtt

SEQ ID NO: 92 - DNA, 395 bp, Gossypium hirsutum
  Clone ID: LIB3083-002-Q1-L1-A12
tgtaattctcctctcagtcatggcttttctccatcaccaacaacgacaacggcagcagtatctcatccttctgaacccaactccaagccaccatctgcagtggtttccagggcggagctcacatctaaagatcaatcaaccacaacaactactaccgttgaacttgaagaacagacagaaaaactgggttctggtagtggtaaaaaattgaggcctgatttatctatattaagaagaaccaaaagagataagatgattaaaaagactttattgggatttagaatttctgggtttgttttttgtttggtttctttctctgttttagctgctgataaaaatcaaggttgggctctagattctttctaccgctacaaggaattcaggttttgtatggc

SEQ ID NO: 93 - DNA, 404 bp, Gossypium hirsutum
  Clone ID: LIB3083-002-Q1-L1-A2
gttttctggaatggacatgagccttctcctggaaatgattattttgaggatagatatgatctggttcgatttattaagctggtccaacaagctggcctttatgttcatctccggattggtccctatatttgtgctgaatggaactttgggggatttcctgtttggctcaaatatgtccccggcattgctttcaggactgataatgaaccttttaaggcagcaatgcaaaaatttacagagaagatagtgagtatgatgaaagctgaaaagctgtttgagactcaaggaagtccaataataatgtctcagattgagaatgaatttggtccggttgaatgggaaatcggtgatccaggtaaagcttacaccaaatgggcagcacaaatggcagtggggctcgacac

SEQ ID NO: 94 - DNA, 396 bp, Gossypium hirsutum
  Clone ID: LIB3083-002-Q1-L1-A3
gacgaaatgaaaataaaaggagatattctcttttctagatcctttttgaggtgtgtcttcatttcatctcaaatccatcatcgaaattacttgtagttatcagaatggggacaataggcaaaactactacggccactatttttctttgtcttcttctgtttcctattgtcttttccacgcctaatgacagatttgttagaattggactcaaaaagagaaagattgaccgaaacaatcggatggctgcacaccttgaatccaaggaggaaaaggcatctgaagcttttcttagaaagtatcgtcttcatgggaacttgggggaatcagaggacattgatattgtggcactaaagaactacatggatgctcagtactttggtgaagatggtattggca

SEQ ID NO: 95 - DNA, 303 bp, Gossypium hirsutum
  Clone ID: LIB3083-002-Q1-L1-A4
gtcaaaccggatagacacatcgatagtcatagtgcagtgtaagtgatgaactcgagcggtggctcaagtgttaaatgtgcggcctgtgataagactgcttatccaattgcaagggatactgtgaatggggcaatgtaccacacgagctgatttaagtgtacccatcgagggctgtcagattagcccatcaaactatataatcccatgaaggaaaactttactgcgaacatctccatcttcagctgtttaaggtgcaaggtaactacagccaactagggaccgaactacacgaacaagccatga

SEQ ID NO: 96 - DNA, 349 bp, Gossypium hirsutum
  Clone ID: LIB3083-002-Q1-L1-A5
catcagtcaagataagcaaggggctccacaagttgagctctggtcctgaaaaagaaacaaaatacgttattttgggagagaaagcaaaggctcaattgattcgtgactctaagaaggacattgagttaatcataactgagctacagaagaaccctttgaactacactcaggtctctgttcttgcagatgagatcttaaagaatgtcgagtatgatgctttgaggattgtcttcaacaagtttcactcagtagtttcattcgtgccaacagtgtcaactgtaatatcacctgaaattgttgaaagggaagctgaatctgggggaaagcttggtgatctagactcgtatga

SEQ ID NO: 97 - DNA, 363 bp, Gossypium hirsutum
  Clone ID: LIB3083-002-Q1-L1-A6
cgaagcagagaagactcaacagaaggaaaaggaaaggaagaagatgtttgctatttcacccattgcaaagcccctcgctggcaaaaagctctctaagaaaaccctcaagtttgtccgcaaagccgctgagcacaagtgtttgaagagaggagtaaaggaagtagttaaaagtattcggcgtggtcataaggggttatgtgttatagctggaaatatatctcccattgatgtcataactcatgttccaatcctgtgtgaagaggctgacattccctatgtttatgttccctcaaaagaggatcttgcaactgccgggtctaccaagagaccgacatgctgtgttctggtgctaaccaagcccac

SEQ ID NO: 98 - DNA, 369 bp, Gossypium hirsutum
  Clone ID: LIB3083-002-Q1-L1-A7
ctcgtgccgctttattgctttttagaatttttctgggtcgaaaatgagagagtgcatttcgatccacatcggtcaggccggtatccaggtcggaaacgcttgctgggagctttactgtctcgagcatggaatccagcctgatggtcagatgccaagtgacaaaactgtcggaggaggtgatgatgcttttaacacctttttcagtgaaactggtgctgggaagcacgtccctagtgccgtcttcgtggatcttgaacccactgttattgatgaagtgagaactggtgcttaccgtcagctcttccacccagaacaactcatcagcggcaaggaagacgcagctaacaactttgcccgtggtcactacac

SEQ ID NO: 99 - DNA, 307 bp, Gossypium hirsutum
  Clone ID: LIB3083-002-Q1-L1-A8
acttatcgattccttcgacatagagctggatcgcggtacctatatactcgtatagtgtgtcgtattacattgaactggctgtcgttggacaacgtcctgactgggatatcgctctcgtcacccagctcattcgccttgcagacatcaacatgtagccagctggcatcatagctaacaatcccggacacatcgcgacttccgaacaactgcgcattctcaatcgctaatcgcaaaatctgagcctctgtatatagtcaagacgctcttaacattaccgatacttcagctcatgctataaccaatatgc

SEQ ID NO: 100 - DNA, 401 bp, Gossypium hirsutum
  Clone ID: LIB3083-002-Q1-L1-A9
cctccgatcacccagaattgttcttttcgccgtcttccaaggcctcctcaaagtcctagctggagtagacaccaacttcaccgtaacagcaaaagcagcagaggatacagaattcggtgaactttatctcttcaaatggacaactctcttaatccctcccacaactctgataatactgaacatggtcggagttgtggccggagtttcagacgcaatcaacaacggctatggttcatggggtccattgttcggcaaactgttcttcgcattctgggtcattcttcatctttacccattcctcaaaggtttgatggggagacaaaacaggacgcccaccattgtagtgctttggtccatacttttggcatcgattttctcacttgtttgggtactgatcgatc

SEQ ID NO: 101 - DNA, 412 bp, Gossypium hirsutum
  Clone ID: LIB3083-002-Q1-L1-B1
ttttcgtctctatttttgccactggaatacttgagcttaggtggagtggtgtcagtatcgaagactggtggagaaatgaacaattctgggtcattggtgggacatcagctcacctctttgctgttttccaaggtcttctgaaagtgcttgctggaatagataccaacttcactgtcacttcaaaggcgtctgatgatgatggcgagtttgccgaactttatgttttcaaatggacatcacttctcattcctccaaccacagtacttattatcaacctggtgggcattgtggctggcgtatcatatgctataaacagtggttaccaatcctggggtcctctttttggcaagcttttctttgccatctgggtgattgctcatttgtatcctttcttgaaaggtttggtgggtcg

SEQ ID NO: 102 - DNA, 395 bp, Gossypium hirsutum
  Clone ID: LIB3083-002-Q1-L1-B10
tgtaggagatccttagacattgaaaggcccacttataccaacttgaaccgattgatatcccaaattatatcttctttgaccacttcattgaggtttgatggtgccataaatgtagatattacagagtttcagactaaccttgtgccatatcctcgtatccatttcatgctttcatcatatgcaccagtaatctcagctgcaaaggcttaccatgagcagctatcggttcccgagattacaagtgctgtttttgaaccctcaagcatgatggctaaatgtgatccgaggcatgggaagtacatggcatgttgtttaatgtaccgtggagacattgtacccaatgatgtcaatgctgctgttgctaccatcaaaactaagcggactgttcagtttgt

SEQ ID NO: 103 - DNA, 399 bp, Gossypium hirsutum
  Clone ID: LIB3083-002-Q1-L1-B11
gttgggaaagccgtttgtaagaaaaaattcagagcctttcatgaactcttttcaaaagacttcatcgatgaatgaaaacttatccaacggtcaccccactgatattgatcctaatacaatgggtggtgctggttcattaagtatgttggttcgcactattctaattgataaaaagcctgaagaagttcccctgctggttgaatctttgcttggtaaagttgtagaggagtttgagcatcgtctggcaagccaatatgaagtgatgaaaacaacttcaacagacatcactgcttccaatttcaacaagcctctatcggaaccaatttctggggataaaaagatggaggaaaaaaatatcaaaatgatgaagaaagatgattgctctcatagaagcatcac

SEQ ID NO: 104 - DNA, 367 bp, Gossypium hirsutum
  Clone ID: LIB3083-002-Q1-L1-B12
cggcaccgatgggcatgatttaatgggttttggtcccttgattcctactgaatccgaaagatctttgatggagagggttcgccaggagctcaagattgaattgaaacagggttttaaatctagaatcgaagatgtgagggaggaaattttacggaaaagaagggctgggaaattaccaggtgacacaactacggtgctaaagaactggtggcaacaacactcaaagtggccatacccaactgaagatgataaggccaaacttgtggaggaaacatgattgcagctaaagcaaatcaacaactggttcatcaaccagaggaagcgtaactggcatagcaactctcaatctgtcacctctttaaagtcg

SEQ ID NO: 105 - DNA, 389 bp, Gossypium hirsutum
  unsure (1)..(389): unsure at all n locations; Clone ID: LIB3083-002-Q1-L1-B2
aaaaagtgatgtaccggttattacaccgaacgatcttgctgaggccgatgggtttgtttttggtttcccgacaagattcggaatgatgtccgcacaattcaaagcttttctggatgcaaccggaggtctatggagaactcagcaacttgcaggaaaacctgctgggatcttctatagcaccggatcacagggcggtggacaagagactacagcgttgactgcaatcactcaactcgttcaccatgggatgatatttgttcccatcggatacaccttcggtgctggcatgtctgagatggagcaagtgaaaagtggaagtccatatggtgctggaacatatgccggggacggatcaagaatgccgtcngaacttgagttggcacaagctt

SEQ ID NO: 106 - DNA, 367 bp, Gossypium hirsutum
  Clone ID: LIB3083-002-Q1-L1-B3
ttttaatttgtgaattaaaattaagtaagcggaagagtagttgatattatttatcatcatcatcatcatcatcctccatattaaattatacaggatgggtcaccattcttgctgcaatcaacaaaaggttaagcgaggcctttggtcccctgaggaagatgaaaagctcattaggttcatcaccactcatgtatatggatgttggagtgaagtccctgagaaagctggtcttcagagatgtgggaaaagttgtaggctgagatggattaattatttaaggcctgatataagaagaggaaggtttacacctgaagaagagaagttgatcattagcctccatggggttgtaggcaacaagtgggctcat

SEQ ID NO: 107 - DNA, 406 bp, Gossypium hirsutum
  Clone ID: LIB3083-002-Q1-L1-B4
tcttgtttggtcagttgtcacatcagttgaaggacgtgttcctcttgctagtgagggtttaagtctggttgtgggctccatttctggtgaagatatacttgtatcttttggagggtataatgggcgttacaacaatgaggttaatgttctcaagccaagtcacaagtcgactttgcaatcaaagataatggaagcccctgttcctgatagtgtttctgctgtgcaaaatgcgacaaatcctaccagagatttggaatctgactttgaagttggtcaagaaggaaaaatacgagaaattgttatggataacactgactcagagcacatgaaatccaaaggtgaggagactagtgagctcattatagcaacactaaaagcagagaaggaagaactagaatcatcactc

SEQ ID NO: 108 - DNA, 411 bp, Gossypium hirsutum
  Clone ID: LIB3083-002-Q1-L1-B5
ggttattgaagctagctagctccacattttctatggcttcaaagcttcttttgattgctgtctttgttcttgatctcattgcttttggtttagctgtggcagctgagcaaagaagaagcactgccaagattgtccaagacagtgaagttaattataactattgtgtctatgactcagacatatcaacaggctatggtgttggtgcatttttgttccttatggttagccaagcccttgtaatggctgcaagcaaatgcttctgctgtggaaagggtttaaaccccagtggttcaagggcctgggcagtcatccttttcatagtctgctggttgtttttcctgattgctgagatatgcttgctggccggatcggtgagaaatgcctaccataccaaataccgaaccattttca

SEQ ID NO: 109 - DNA, 379 bp, Gossypium hirsutum
  Clone ID: LIB3083-002-Q1-L1-B6
gaatactgcgccgttcgcgttaagagtgggagaagggtgcggatattacggagctttattcgactcggttgagtcgaccgtgttgagggataacccggagcgagcgcagctagaggaagggctgttacgcaaaatcgccaactcagttgcttgtgaaggtagggaccgcgttgaaagatgcgaggttttcgggaagtggcgggcccggatgagcatggcggggttcgagttaaagccactgagccaaaccgttgccgaaacgatgcgcgccaaactcaactcatgcaaccgagtcaacccaggctttaccgttaaagaagaaaacagaggtgttagcttcggttggctgtgccgaacactcaccgtagcatctgcttgg

SEQ ID NO: 110 - DNA, 369 bp, Gossypium hirsutum
  Clone ID: LIB3083-002-Q1-L1-B7
tgaaaattcattttctttggactttctctgaaatgcgagtcctaggaaagatgcgtgagattcttcatattcaggcagggcagtgcggcaaccagatcggtgccaagttttgggaggtggtttgcgccgagcacggcatagattcaacgggacgctatcaaggggacaatgatttgcaactggagcgcgttaacgtttactacaatgaagcgagttgcgggaggttcgttccacgagccgtccttatggacttggagcctggcactatggatagtgttagatccgggccgtacgggcagattttcaggcctgacaactttgttttcggccagtccggtgcagggaataactgggccaaaggtcattaca

SEQ ID NO: 111 - DNA, 402 bp, Gossypium hirsutum
  Clone ID: LIB3083-002-Q1-L1-B8
aagaaatggatattgcaacagaggcacccaaagctcctttgacaagtgaaaggaaggttcgagcagaccttgaagataaaatacccaaaccctatttggcaagggcattgaacacttcaagtgtggaaaatccacatggaacagtaccaggacacgacaacaatgtaatgagtgttcttcagcaacatgcttcctttttttgatcaagacaaagatggaattgtttatccccgggaaacctacagaggtatgagaaatctaggtttcggtcggttcgaaagctttcttgctgcaatcctcatcaatggggcattgagttactggactctccctggatggctaccaaatttacatttccctttatacatagatagaatacataaatgcaagcatggaaatgac

SEQ ID NO: 112 - DNA, 401 bp, Gossypium hirsutum
  Clone ID: LIB3083-002-Q1-L1-B9
gtttttaactgttttttttaatccagaacaagtgtaacactgacaactcaagcaacctaaacttatgtctgaaaatactgctctaatcagataccaaaatctgcgtggtgtttttgcagtaaaaggacatgtctttcaaaggaaaaaaaaaaaggcctcctccaaacgcatgtaatcattaacatctacttcataagaactataaaattatgagctactcagaacgatgcattaaacttaaacccagatgaatcaatactcgattggcgaaataacttccaactgcatgccaagcttctgctaggccaccttctcggctttaaccctgagcttagtgaattgcttccttctgtcggatgccacttgaactcatgccttactgttacctttaagctacttga

SEQ ID NO: 113 - DNA, 413 bp, Gossypium hirsutum
  Clone ID: LIB3083-002-Q1-L1-C1
ccaaaaaccaaccatggcatccactgataaaactgctgtcccactgtcatcaccaaagtctgaagctaccccaccatccgcagtggcggctgcggctaagtcccctgtcaactattcttttgtcgatgttgttcttcgggtcttattatttgccgctactctaacttcagtggtggtcatggctaccagcaaggaaaccgagctggttccagtgccaggcttccctttagttaggatccaactccaagcaaagttcaatcattcacctgccctcgtatatttcatagcagcattatcagtaacaggcttctacagcattatcactacgttggcatcactttcaatcgtccttaaccctacctattccaaaacctttttgctcttttttgccttcctcgatgtaaaattggccg

SEQ ID NO: 114 - DNA, 239 bp, Gossypium hirsutum
  Clone ID: LIB3083-002-Q1-L1-C10
gttcagtcagccagctacaagtgagaagaaggatatcaggttccaaagactcatcacaaatatcgtaagtgatatccgaaagcgctgatgttaggattaaggaagtagactagaatctctgaaccaagctcaacgcggcatgttccggtactgccaatacaatcttgtccagaaattatgaattaggactgtaagtaagtgatcagtaacgagaagctatcctaaagaaaaaaaacacg

SEQ ID NO: 115 - DNA, 396 bp, Gossypium hirsutum
  Clone ID: LIB3083-002-Q1-L1-C11
tttgaattcagctgtttttagtgatgggtcgttttgttacattccaaaggatacgaaatgcccgatgccaatttcgacttatttccggattaatgcattggaaactgggcagtttgagaggactttgattgttgctgatgagggaagctttgtggagtatttagaaggatgtacggcgccttcttatgataggaatcagcttcatgctgctgttgttgagttgtattgtgctaagggtgcagagattaaatactccactgtacagaactggtatgccggtgatgaggaaggaaaaggaaggatttataattttgttactaagcgtggactttgtgctggagatcgttcgaagatatcctggacccaagtggagactgggtctgcaattacttggaa

SEQ ID NO: 116 - DNA, 283 bp, Gossypium hirsutum
  Clone ID: LIB3083-002-Q1-L1-C12
aagcaaccattttccttacaagtatgattctcttgtgattaatccatatggctagctcaatgccccttaagcttgcatgtctgttggagttgtgcatggtgatgggtgcacccctggctcatggggccataacccgtgctgatggcttagtcagtctcccacgctgccttcctatgttgtcagggaatgctgacggtgctgatgccacaggttgctgtgccatcgtcatgaatgccttgtgatcgctctgtggtgatacataggaaccgatctagcttgaaat

SEQ ID NO: 117 - DNA, 371 bp, Gossypium hirsutum
  Clone ID: LIB3083-002-Q1-L1-C2
gtgaaatgagtgagaatcatgtgatccaccccactcggctctctcacactctttgtctctaaatccaaaatccaactaaaaaagatcataaatttatccatccatcaaaactacccaagcttttttctttttcttttttttttctgtatttgctttattgttttgtgtttcaatggcttcaagcgcttcaagatttatcaaatgtgtaacagttggagatggagctgttggcaagacttgcatgcttatttgctatacaagtgacaagttcccgacagattacataccaacagtttttgataacttcagtgccaacgttgtagttgaaggcacaactgtgaacttaggtctttgggacacggctggacaag

SEQ ID NO: 118 - DNA, 402 bp, Gossypium hirsutum
  Clone ID: LIB3083-002-Q1-L1-C3
gtcttctacactcttctctggtaagttcatcgaaagatcaaatcaagatccctgccaaaatgaacgacgctgatgtatccaagcagatccagcagatggtgagattcatccgccaggaagcggaggaaaaggctaacgagatctctgtttccgctgaagaggagttcaacatcgagaagcttcaattggtggaagcggagaagaagaagattaggcaggagtacgagaagaaggagaagcaagttgaaatccgaaagaaaattgagtattcgatgcagcttaatgcatctaggatcaaggtccttcaggctcaagatgatgtggttaatgcaatgaaagaatcagcatccaaagaccttctcaatgtgagccatgatcaccatgtttacaaaaaggcttttg

SEQ ID NO: 119 - DNA, 403 bp, Gossypium hirsutum
  Clone ID: LIB3083-002-Q1-L1-C4
ggaaacttcagcacatgcatggctggaaactacaaactcatctgggataattcatattcagcctttttcaagaaggcccttcgatacaaagtggactgtatacctccggttttggaggagtcggagaagggcagtgaaagaaatgaagtggaagaatgatgatgataattggtaccctggcttggttttcgtctttgatcatgtcttgtatttttattctattctatatgaatcggatgcaacttttgcgtgttaactttacgttgtcgctgttgtgcccaaccttaccctttgtacattgtttatctgtttgactgacaacgagacgcactcaaacgaaaaagaaaatctgttgcgtaatgtattgtccatcattggatactcgatagtcgggcaattggcg

SEQ ID NO: 120 - DNA, 378 bp, Gossypium hirsutum
  Clone ID: LIB3083-002-Q1-L1-C5
gcagattcaggggaaagtcaacaatataaccattgacaaatgcactaagatgggagtggtatttaaggatgttgtggctgcttgtgaggtagtaaactgcaacggtgttgaggtgcaatgtcagggttctgctccaacaatttcagtggacaacacatatggctgtcagttgtacttaagcaaagactctttagggacatctataacaacagcatagtcaagtgagataaatgtgttagtgcctactggacctgatggtgactggggggagcattcattgccgcaacagtatatccatgtatttaaagatggtcaatttgaaactatccccatgtcgcactcaggaacatatgtgagatctatttgaattgaaaactc

SEQ ID NO: 121 - DNA, 403 bp, Gossypium hirsutum
  Clone ID: LIB3083-002-Q1-L1-C6
attaattgagctcagcatggatcaatgcacggtgggcttgaattcaagactgaaattgaattactttccagagttcatcacaaaaaccttgtcggtcttgttgggttttgttttgatcaaggagagcaaatgctggtttatgaatttatggccaatgtaacacttcgagagagcctgtctgggagatctggcatttatcttgactggaaaaggagactccggatagctcttggctcagctagaggtctagcttacctacatgagcttgcaaatccttccattatccacagagatattaagtccaccaacattttgttggatgaaaatttaaccgcaaaggttgcggactctggcttgtcgaaattggtatcagacagttcaaagggccatgtttcaacccaag

SEQ ID NO: 122 - DNA, 138 bp, Gossypium hirsutum
  Clone ID: LIB3083-002-Q1-L1-C7
gtctctgtattcttttttttttactttgttttatggacccaaagtaaattctacgatggttgtggaacttagagcacaatatttgagtggcacaatttatatatgtcagtacatgtgcagtttatggcacaatttttc

SEQ ID NO: 123 - DNA, 386 bp, Gossypium hirsutum
  Clone ID: LIB3083-002-Q1-L1-C8
cacccttgctgacattatcatgacatgtaacctgtgctagggtttctcccagatcatgactcatagttttacctaggagttccctcatgttgagaggtactttcggaccttggttaatcagccaaaaatcaagaagattcttggtgaagtgaagcaggcagtctctctaccacctgttccttcatagaagcctgctgcccagccaaaagaaactaatccaaacgctgaaccaacgaaagaagccaaaaaggaggttgagaaacaggcagcatatgcagaggcagctgatgaggaggaggcaccaaagcccataccaaagaatcctctagatttgctgtctgcaagtaagatggtactggatgactggaagaggctttactctaaca

SEQ ID NO: 124 - DNA, 399 bp, Gossypium hirsutum
  Clone ID: LIB3083-002-Q1-L1-C9
cttcccaactgtctcttccgcatgggtggcgcagcaatcctgttgtcgaaccgccgctcagagaggcggagagccaagtaccgacttgtccacgttgttcgaacccacaaaggggccgatgacaaggcctaccgatgcgtgtttgaagaagaagacaaagacggcaaagttgggatatcattatctaaagatctcatggctatagctggagaggctttaaaatccaacattaccacaatagggcctttggtgcttccagggtcggaacaactcctatttcttctcactctgatcgggcgtaaagtcttcaaccccaagtggaagccttatatcccagacttcaagctggcgtttgagcacttctgcatccatgctggagggcgagcagtgatagatgaa

SEQ ID NO: 125 - DNA, 222 bp, Gossypium hirsutum
  Clone ID: LIB3083-002-Q1-L1-D1
tcgagttttttttcttttttatatctatttgttagggattctccctatcgttcttggattttacttctaatggcctttttcttaagaataccttcccgaggtcgagtatatatttacacggcttgggcgatgactatggttcccaccatattatcgctttgcaaaatcgtcgtgaagttttttgatgttcggaaggagggatcccatacatgataatcacaa

SEQ ID NO: 126 - DNA, 387 bp, Gossypium hirsutum
  Clone ID: LIB3083-002-Q1-L1-D10
ggtacttctcgtgttcagcttgagagggttaatgtttactacaacgaagctagtggtggtcgttacgtacccagagctgttttaatggaccttgaaccaggaaccatggatagcttgcgtactggtccgcacggacaactttttagacctgataacttcatttttggtcaaaatggatcagggaataactgggctaagggtcattacactgaaggagctgaattgattgattcggttcttgatgttgttcgtaaagaagctgagaattgtgattgcttacaaggcttccagatttgtcattcttcgggaggtggaactggttcggggatggggacactgttgatatcaaagatcaaggaaagaataccctgatcggatgatgctgac

SEQ ID NO: 127 - DNA, 395 bp, Gossypium hirsutum
  Clone ID: LIB3083-002-Q1-L1-D12
tcctgagcctaatcaagatgagaacactgtgaacaaggagcctcctgcgcctcaaccaccacggttccatgtgcattccttttgcaagaccctcactgcctcagatacaagcacccatggtgggttttcggtgctcaggcggcatgcagatgaatgtcttccaccattggacatgtcacggcaacctccaacccaggagttggttgctaaggatttgcatggaaatgagtggcgattccggcatattttcaggggtcaaccacgaaggcacttgcttcaaagtggatggagtgttcatgttagctccaagaggcttgttgcaggggatgcttttatatttttaagaggcgagaatggagaattacgtgttggtgtacgacgtgcaatgaggcatc

SEQ ID NO: 128 - DNA, 403 bp, Gossypium hirsutum
  Clone ID: LIB3083-002-Q1-L1-D2
ggtgagccagctttcagtgtcctggtttctagtctggtgcttggagagagcttccctcctgcggtttacctctcccttgttcccatcattggtggttgcgctcttgctgccgtaactgagctcaactttaatatgaccggttttatgggagctatgatatcgaacttggcatttgtcttccgtaacatattctccaagaagggcatgaaaggaaactccgttagtgggatgaactactatgcttgtctatctatgttgtctcttgtaatactcacacctttcgcgattgctgtagaaggaccgcagatgtgggcagcaggatgggaaaaggccttatcccaaattggaccacagttcatctggtgggtggcggcccaaagtattttctatcatctctacaatc

SEQ ID NO: 129 - DNA, 341 bp, Gossypium hirsutum
  Clone ID: LIB3083-002-Q1-L1-D3
cgacaacgttaaggcgaaaatccaagacatggaagggatcctaccagaccaacaacgtctgatcttcgccggaaaacagctcgaagatggcctgaccttggccgattacaacatccataaggagtccacccttcatatcgtcctccgtctacgtggtggcatgcacatcttcgtcaaaaccctgaccggctagaccataactgtcgaagtcgaaagctctgacaccattgacaaccgtcatgcctagatccaagacatggaatgcattcaaacagaccagcaaaggctcatctttgccaggaaacaactcgaggactgtcgcaccttggccgattacaaca

SEQ ID NO: 130 - DNA, 378 bp, Gossypium hirsutum
  Clone ID: LIB3083-002-Q1-L1-D4
cgtaatggctagttgaagggtgagagtagctacaaggagagcccaaactccatctgccttaccttgcactacgcgaaccaccaccaccactcctacaccttcaacttcaccaccacctacaacttccgcaccgcctccttgaacaacccctacacctacaacttcagcaccatctgcttcaacagcaacgcctccaccttccaccacgcccaccgcgccagctcatccacctgcaacaactacgactcacactgtatcaccagctactagcccaactgtaccaccgtcacatactctaccacctcaaccacctcaaactcctccaaccacatgttcagcttaaccgtcagcagtgccaccaccatcaccaccaccagt

SEQ ID NO: 131 - DNA, 369 bp, Gossypium hirsutum
  Clone ID: LIB3083-002-Q1-L1-D5
agaaaaacctcaatatccaaaatccaaagccaatctcaaaaaacccaacaaataggaaaaaactaacaaatctcaatattctcaaccctttttccttgtggaagagtagaaaaaaaaaacaccatgcaagaagaccttcaagccaagtcattggaacctattgaagattgtccaagaagtgatatgatgtttgggtggatagaacccaaacaagataaaaacagcagcaagtgtcttgtttacattcttgctattatggtcatccaaggatccatcctcttggttttagccaacatttttttacgtgcccgaacgcctgatttcgagatcggctccgtcaaagttagaaacctcaagtatggtaattca

SEQ ID NO: 132 - DNA, 314 bp, Gossypium hirsutum
  Clone ID: LIB3083-002-Q1-L1-D6
gaaacttcctgattatgtattggccagtcctcagcggatacgtggccttgtccggctgaggctgatcactatcactttactcttgtctacctaatattaggcttgatcaatggcgatgcagcctactccaactcctcctgggacaccatttgctcccttgtcagctcgtacggacaactgagtggacgagcgtgttcaatccaacttagcaacctatgcaccaatggtattgtctctgaagtcatcgtcagcgcctctacctagctctggtactgtctatgactgcaaatccgacacggatggtgatggcatgc

SEQ ID NO: 133 - DNA, 375 bp, Gossypium hirsutum
  Clone ID: LIB3083-002-Q1-L1-D7
ctatctctttgacaaaggagagcacaaaaaaaaggtgttcttgttcttgttcaagttcttgatcaatggctaaggatgttgaggttggtggtgagttccaagccaaggactaccatgatcctccaccagctccattggtagatgcccaagagttaactcagtggtctttttatagggctataatagctgaattcattgccacccttttgtttttatacatcactgtgttaacagtgattggatacaagagccaagttgatccagataagggtggtcaagattgtgatggtgttggcattcttggtattgcttgggcctttggtggcatgattttcatccttgattactgcactgctggtatctcagggggacata

SEQ ID NO: 134 - DNA, 375 bp, Gossypium hirsutum
  Clone ID: LIB3083-002-Q1-L1-D8
aagcgacagagttctgtacgatattcttatccaagcgggaagagtattagacctgtacatccctcgagataaggaaaccgataagcccaaaggatttgcctttgttgaatacgaaaccgaggacgttgctgattatgctgtcaggctcttttctggccttgttactctttataaccgaaccttgaaatttgcgatctccgggcaagacaagtcttctcaaaaccctgccaatgcagccatgcctgctacaaattcatcctacaaatcaaggcattaccatggagtagttaaccacatggaaacctctcagcagccgaagaagtcttcaaccccttctaggattccggattatcctgcgcgttacagccaagcgcc

SEQ ID NO: 135 - DNA, 393 bp, Gossypium hirsutum
  Clone ID: LIB3083-002-Q1-L1-D9
tttacttctgcaattgcgagaagaaacgagacggtcaaaatccaatggatttggaaacggtgaagaaatacttggagaaaggagttggggctgacggcgatgacaagaacgcctcaaccatcaatggcatgccttctagattcttcgaaaacttcatcatgcaaggtctccatgttgaccaaatcgaaaagggtcgagtcctttgctccatgaaagtccctcctcgtttgctgaacgctggtaatttcttgcacggtggagctactgcatcactggtggatttggttggatcagcggttatttacacctacggagttagcaccagtggagtttctgtcgaaatcagtatcacttacttggatgctgcttatgttggcgaggaaatcgagatag

SEQ ID NO: 136 - DNA, 339 bp, Gossypium hirsutum
  Clone ID: LIB3083-002-Q1-L1-E1
gaaatcaagaggattgccattatgcctttctggtatgtattttcacactgatggcccataacaaaggaccacattttgtatctcgaatatatacaacaaactttccattaccttgatataaatacaaccagtaccaacctacaggcaagcttattcatgcctgtgcactgacatgaagaacaagaaataaacatccaagtttcttacttacaacgtcaagttcagcctctagcttgcttcagtagacatgatctcaagctctgcccaccaaagaggagaaagtgtggggattgcattatcaggagtgattgcagtaatctctctaaatcttgcactgac

SEQ ID NO: 137 - DNA, 388 bp, Gossypium hirsutum
  Clone ID: LIB3083-002-Q1-L1-E10
cgagttccggatccgatttggaaaaactcatctgctcttcaaattccccgacgaagtttcttccttgaaaaagtttaccaaacgaagtagcaacgattttcttgattttgtcaatgaaattaattcctcggccgtactcgagccttttacaatggaaggtcccttcgagttacgcctctctcccggtcaccaagcttccctcctctttccgctgaacacttcacatactgatctgaaacgagtccttgttggtcatggcatcactttacaagtaaatggagctcaagagatctctcttttccatacgtttaatctcggtttaccggcaaatgaaaatggtgtcaaggagaagagtagtggatattggcccttctcgcattcattctgt

SEQ ID NO: 138 - DNA, 396 bp, Gossypium hirsutum
  Clone ID: LIB3083-002-Q1-L1-E11
cgacaatggtgacaatccctttctttgtcctaaacatcctccttttcctctccagctccgcggctacaccaaagagcggtgcagatcacgacctggtccgttcatcatgtgtccacgccagctatccaagcctctgttttcgcaccctttcttcctactccggcccagccaacaccccacgtgagttagcccaagccgccgtaaaagtcagcctgtcccgtgcccgtaaagtgtcgaactacttgtcgacgagtgtgacggggtacaacaagagggaacgagtcgcactgagtgactgcgtggagcaaatagatgagtcgatggaggagttgagcaagacattaggggagttgaagcacttgagaggggagacgttcgagtttcagatgagtaatg

SEQ ID NO: 139 - DNA, 376 bp, Gossypium hirsutum
  Clone ID: LIB3083-002-Q1-L1-E2
aagaactagaaaaccagatcgaaaaatgtcgggaatcatgcacaagatcgaagaaacccttcacatgggagggcacatgaaggaagaagagaagcacaagggagaagctcatcacgaaggcggccatggctatggcgctgctgagcacaagggagaagttcatcacgaaggcggccatggctatggttatggcgccgctgagcacaagggagaagttcatcacgaaggcggccatggctatggcgccgctgcggccgccggtcacggtcacggtcacggcgagcagcaaaaggaaaggtttatggataagatcaaggacaagatccacggcgagggatgtcatgaacatggtcacgagggcgaaaagaaaaagaag

SEQ ID NO: 140 - DNA, 409 bp, Gossypium hirsutum
  Clone ID: LIB3083-002-Q1-L1-E3
gctagaactacctcagcttcactagttggaatgcagaagaatcctattagccgcccggtcaggcatcttggtccgccaccaggttttagccctgttcctctaaaggcgctgaatgaatctgtttctgctgtagaattgaggaaccctccgatggatgattatagttggttggatggacatcagttggcatcatcattagaaggctctatgcgtgagagttctctctattattcatctcatgctgatccccaacatgtaaataacagaagcaatggcttcactggaacggtaagctttcctttccctggaaagcaagctcctgcagtgcagattcatatggagaaggataaaggctggcaggactacaatactcttgagcatcatcatgaacagaaatcgcatcaacagc

SEQ ID NO: 141 - DNA, 378 bp, Gossypium hirsutum
  Clone ID: LIB3083-002-Q1-L1-E4
cgtggataagggtggcagtgctacgcaatcaatatgggaccgatacaatgactcctacctgaggagaattggaagtacagttttgtcttacgtaaatatggtctgcgctactttgcgccactcgattccaaagtccattgtttattgtcaagtccgtgaagctcaaagaagcctgcttgactttttctacacggaattgggtaaactggagcaaaaacgattatcagcgttactgaatgaggatccagcaatcatggaacgccgatccgctcttgcgaagagactggaattatataggagtgcacaagctgaaatcgatacggtcgcttggtccaagtaagagtgggtaaaattagatccatggggcatggtattggg

SEQ ID NO: 142 - DNA, 407 bp, Gossypium hirsutum
  Clone ID: LIB3083-002-Q1-L1-E5
gtcgaatgagaactatcttttttctttctctttggatctcttctctgctcccaaacccatccaacatttttaaggtttgttatgtcggaagtccctgattttctggtctaagattctaagtagttaagagttagttgtaattcatttttattgttattgttctgtcaaaatgtggagttttgcttcaaataccattgctagcattgggttaaagagttcaaaagaggcgaatcaagcttgctccgagtgttcagatgatgagctgtgttcaaatggtagtagagatgaaagattatagtgtcccatttgttgggaacctttcaacattgttgagaatgtgccttatgtcttatggtgtggtcacactctttgccaaaattgtttcctgggtctacaacctgctgttt

SEQ ID NO: 143 - DNA, 400 bp, Gossypium hirsutum
  Clone ID: LIB3083-002-Q1-L1-E6
caaaattcttttctttctatttggttaaccatggctcataacttttgtcatcctttcttccttttccaacttttactcattactgtctcactaataatcggtagtcacaccgtctcgtcagcggctcgacatttattccagacacaaacaacctcatcagagctgccacaattggcttcaaaatacgaaaagcacaaagagtctgaatacaaacaaccaaaatatcacgaaaagtacccaaaacatgagaagcctaaaatgcacaaggaggaaaaacaaaaaccctgcaaacatcatgaagagtaccacgagtcacgcgaatcgaaggagcacgaagagtacgataaagaaaaacccgatttccccaaatgggaaaagcctaaagagcacaagaaacacg

SEQ ID NO: 144 - DNA, 387 bp, Gossypium hirsutum
  Clone ID: LIB3083-002-Q1-L1-E7
acagttatacacgccggtaattctaccaaaagatatatattgtccataatcagcaatttaagcatgttaaagcttgaacatgtctaagaaatagggccaaccatgcatttttttaggcctttcctatcagagatcaattcaaccaaaattgctctagttttccaatggccgactagtctctgtgaagttcatctgcgggtggagcaaatctcacatttgctggccgtgctactactacagattcatctgcaaacatcgctttaataaaggatggagtttttaggggtcgacgtccggtcattcgtggatatacatcttcaagaaaatagtaggcatgaccagcaatcattcccaggagatccacccaagcactagcaccaacaagga

SEQ ID NO: 145 - DNA, 389 bp, Gossypium hirsutum
  Clone ID: LIB3083-002-Q1-L1-E8
cacacttgctcttccgtactcctcgttttataaaaaccctaaaccgcctgatatttatctcttagaacgaaaaaccccaaacgcctcactcttaagaaaaaaacagttatggcaagcaaagaacccgaacacgagcacagagaagatcaagaagctcctgccgccgaggatgaagacactggagctcaagtcgcccctattgtcaagttagaggaagtcgctgtcagtacaggcgaggaaaacgaagatccgatccttgatctgaagtcgaagctgtatcgatttgataaagaagggaatcaatggaaagagagaggtgctggtactgcgaagctgttgaagcacaaagagacaggaaaagttcgccttgttatgaggcaatctaagac

SEQ ID NO: 146 - DNA, 364 bp, Gossypium hirsutum
  Clone ID: LIB3083-002-Q1-L1-E9
caaaaccatagaatcttttaaatctaaacattttctttcatgtctatttacacaagaatatttgaaatacataatgttataataaacgccaacaatggcggtagaacgattgcaaagcattatgaaaagaaatataagaacacacatgttttacatgaaaattcttttgggaaaaaactatggacagatgaataaaaattcactaatgttgaaaaacgaatgacacatgaggagtctaggctacatctatctaaaggttgaaaaaccctgttctaatcaaagtcaaatgatagaagtactatatggactcaacttgtgcaatatggtctgtactgtccggatgcaaccccaatacagttttgtg

SEQ ID NO: 147 - DNA, 318 bp, Gossypium hirsutum
  Clone ID: LIB3083-002-Q1-L1-F1
ctcttgccgcggtattctattggacaattgtattgggttggactgaaacgtgcaaatgagattattggtgtcaccactgaagaactcgtgctgaatgcatgacagggttctatttcagcttaatgctatgctacctcggtgagtcagcgatggtgagtggaggatatacatgtatgaacctgagccacgtggtaacgaggtcatcagaaccatactatcctcgcttcatatcatgtgacatgggaactgggatgtgggtaggaagacgttgtgcacctagcatctatacatgcgtgcatattgctgatcttaatgagt

SEQ ID NO: 148 - DNA, 395 bp, Gossypium hirsutum
  Clone ID: LIB3083-002-Q1-L1-F11
gaaagataaggcagaaaaaagtgatcttttggagaaagaaactgtgggagagaagggtgaaaaagatgttcttttggagaataaggatcaagttgttgttgagaaggcaaatgaaaacaatcccgttgagaaagtaaagggtaatgttgatgaatcaagtagtggcaatatagtaactgagaaagttaatttggagaagaatgaggaggtatgcaaggatgattcaatggcgaaatctgttgagaaagtagcttctgaagctaaagacggagagaataaagagcctagcaatggcaaaggtaaagacagtgacatttcagtggcgtcaagccatccatcaatggttgaggaggaggaagaggaggatcttgggtgggatgaaattgaggatctca

SEQ ID NO: 149 - DNA, 412 bp, Gossypium hirsutum
  Clone ID: LIB3083-002-Q1-L1-F2
ttcatttcgttttggttattcccgatcatcgactcttaattcccaacaggatccaccttcacgccacacttgataacccaatatcgttctttcagcccacctacatcccttatatagttacctttgcaaacctcttcaaacctacccctacactagaagacctagtgatagggggttgcgcatggaccaagatcgagttgtcaagtcacgggaaactcctacgaaaactctaaacgcttggatctgaaacgaaacagaaaattctgtttagaatcaattagatctgaaacgaaaatacccaaatcaataaaagatcaaccaagaattaaaaacacttatgaatagctaatcttggaagccaagaacacggaatttaattcaagataggttttgaacaactgaatctgatacg

SEQ ID NO: 150 - DNA, 383 bp, Gossypium hirsutum
  Clone ID: LIB3083-002-Q1-L1-F3
caaaatccaaagccaatctcaaaaaacccatcaaagaagaaaaaaataacaaatctcaattttctcaaccctttttccttgtggaagagtaggaaaaaaaaataaaaacatgcaagaagaccctcaagccaagtccttggaacctattgaagattatccaagaagtgatatggtgtttgggtggataaagcccaaacaagataaaaagagcagcaagtgtcttgtttacattcttgttattatggtcatccaaggatccatcctcttggttttagccaacatttttttacgtgcccgaacacctgatttcgagatcggctccgtcaaagttagaaacctcaagtatggtaattcatcggttccatcttttaacttcacactcg

SEQ ID NO: 151 - DNA, 409 bp, Gossypium hirsutum
  Clone ID: LIB3083-002-Q1-L1-F5
gcaaagtgcaaggagcttatcggacactacatctgggcacccccacctgaaattttgccgaggccaacaaccatacgtgcattggcattgaaggacagtttcgacttgggagaatctcatacacataattcgagcgatgaggccagggttaagacagcaaagaaaattcctaatcagaaattggctgagctttcgggtaatgacatatctaagggtgacgttctgccaggttctgccgataagccacttagtatggcgaaaatgcgggagataagcggcagcaacatcttcgctgatggaaaggttgagtctcgagactactttggtggtgttcgcaagcccccaggtggtgaaagcagcattgctttggtttaacttatgtctaaccctgtcagtttgctgttggttt

SEQ ID NO: 152 - DNA, 132 bp, Gossypium hirsutum
  Clone ID: LIB3083-002-Q1-L1-F6
aaggcaaattgcaaagagcttacctgacaccacattgtgccactcttacctgaaattacgccttaaccaacatccatacatacatttacatcttatgacacatttaacttgccaaaatctcatacacataat

SEQ ID NO: 153 - DNA, 412 bp, Gossypium hirsutum
  Clone ID: LIB3083-002-Q1-L1-F7
gagaactagtctctaaatttttttttactctaagcagaaattttatttatttatcgctacacacattaaatccaaaaatgtaataccaagaaaacggtaactaaaaacatggaagaattctcaactggtaccgaccctcgtgtgccggcggtcaagccggactctaagccatcttccttcgagggagttccactcgaagctgcctccgctgctgtttcagaagatgccgaggtggataaggacttgctgtgtccgatttgtatgcagataattaaggacgccttcctcacgtcttgcggtcacagcttttgctacatgtgtataattacccatcttcgaaacaagagcgattgcccttgttgctctcaatttctcactaataatcagcttttccccaatattttgctcgata

SEQ ID NO: 154 - DNA, 342 bp, Gossypium hirsutum
  Clone ID: LIB3083-002-Q1-L1-F8
gagaactagtctctaaattcctttttactctaagcgtaaattttatttatttatcggttcacacattaaatccaaaaatgtaataccaagaaaacggtaactaaaaacatggaataattctcaactggtaccaaccctcatgtgccagctgacaagccagactctaagccatcttccttcgagggagttccactcgaatctgcctacgttgctgtttcagaatatgccgtggtggataaggacttgctgtgtccgataagtatgcatataattaatgacgccttaatcacattttgctgacacagctattgctacatttatttaattacccatcttcgaaac

SEQ ID NO: 155 - DNA, 397 bp, Gossypium hirsutum
  Clone ID: LIB3083-002-Q1-L1-F9
gttacataatgcatgtcataatttatgatgtaaacttaaataacatgagagttacataatgcatgactttattaaatgcagaacacatagtgcatgtcacaattaaaagatgttgattaataatgcaaaacattaattaaagatgcatataataaacaagacataattaaaagctgaaaaattaattaaactaaacaaacaaccacatgcaaaacattgtatggacatgggatgttattttgggtccaataagggttggacatctcatgttcagcccaaacttgctgaattaggcccatcatcgcccctttaaacttctttgatctagcacatgttataaacccgatgagaatttcaattggatcctctcttgaaataggcaacttagagtttagtc

SEQ ID NO: 156 - DNA, 399 bp, Gossypium hirsutum
  unsure (1)..(399): unsure at all n locations; Clone ID: LIB3083-002-Q1-L1-G1
ttctgccaaggctgccgcttgggagacaggatgaagaccattctttcttccgagacgatggacatccccgatgggattagcatcaaaataaaagccaaggttatcgaagttgagggtcccaggggtaagctcatccgcgacttcaagcacctcaacctcgacttccatctcattaaggacgaggagaccggcaagcgtaagctcaggcttgaggcttggttcggctccaggaagactagcgccgccatccgcaccgctctcagccacgtcgagaacctcatcaccggcgtcaccaagggataccgttacaaaatgaggttcgtctatgctcactttcccatcaacgcctncatcactaatgccaacaagtccatcgagatccgtaatttccttggcgag

SEQ ID NO: 157 - DNA, 222 bp, Gossypium hirsutum
  Clone ID: LIB3083-002-Q1-L1-G10
gattttgcttacttgctgtcatgatttaaaaaggtgttgatagaaaagatgtttatgcaaacaaatgtatgtaaagaagatgaacattaaagcccaaaacttcattcatatcttaagcttgtttctgagtctataattagtgaacacttctgtattacaagttatatatatatatatttgttcaattatggtggaaaaaaaaaaaagtatcatttatacttt

SEQ ID NO: 158 - DNA, 397 bp, Gossypium hirsutum
  Clone ID: LIB3083-002-Q1-L1-G11
gacatgtctgcagcaagacttcatgtggttatggagtggcaactgggggaccattggcttggggtctatgctacaacaaagaaatgagtcccagcaaattgtattgagatgattactacagatacacctacccttgcactcctggagtttcttaccatggccgtggtgccttgcctatctattggaactacaactatggagaaacaggagacgcattgaaggtggacttattgaaccaccctgaatacatagaaaacaatgcaaccttagctttccaggcagcaatctggagatggatgacaccggtgaagaaacaccaaccgtcggcccacgatgtgtttgtcggcaactggaaaccgaccaagaacgacacgttggccaagcgggtcctggggtt

SEQ ID NO: 159 - DNA, 169 bp, Gossypium hirsutum
  Clone ID: LIB3083-002-Q1-L1-G12
gtcgttgcttacttcctctcatgattaaaaaaggcggggctatgtatagatgttgttgcattcatgagtatgatcttgataacgaaatgattcgccatagatctgaaatatatctgtagcggggccgttcgtcaataatctatatacactcctgttttacactctctat

SEQ ID NO: 160 - DNA, 393 bp, Gossypium hirsutum
  Clone ID: LIB3083-002-Q1-L1-G2
atattccccctccccccttttatctacccttaaacgtttctctttgctcatacagaattgaatgaatttcttcttactataatgggtttgccttgattgttcatttaatggcgtctgtgatttgatgggtttaggttatatttctcggatctcaggtcttgctcactttcataaacatctggttgccctctttcttttgagggaaaatctgatcgcctcgtttggttgtttgggaaaagaaatcaaggaaaatggcttatcactctagttttgacggagaggaaggaattactaaagcttgcggctcacctttacttcctttgaaaagccatataaagggtcctgctcctgtatcagatcaaggtaaaactgatatagccgatgaagcgatca

SEQ ID NO: 161 - DNA, 295 bp, Gossypium hirsutum
  Clone ID: LIB3083-002-Q1-L1-G3
caggccttcctacgctcccgctagctataccgtataacggctattcttgctcacgcgacgatgcacgtaccatttcggactatcatcaaagttgctaccattgttatcgaatgctgtattgcaaaggtttggatcatgcgatacttcatgcgcttatacactttactagctgccattgacatcgagtggacctgcatacgatcagtcataatgagagatggttctacttgaattagaacatgaatgtctggaggtctacctcagaaaagctgaccgagcaaatatgtcaagatct

SEQ ID NO: 162 - DNA, 279 bp, Gossypium hirsutum
  Clone ID: LIB3083-002-Q1-L1-G4
gagtttttgttcttatcagctatgtacggcattgcggtacctggcgtttcaggccaagctactgctactcctagtaatccattggacatggactccggcagccatcgacttcacccgtttccacacctgcacctactacttaaccacctcctacacccaccactgcttatccgacaccagttatgtttacttctactacttcatgaccaccaccagcttccactaatcctccaacgactacgaacacctttagctctcgactagcagattctacttaca

SEQ ID NO: 163 - DNA, 403 bp, Gossypium hirsutum
  Clone ID: LIB3083-002-Q1-L1-G5
gagaattagggattttagggcataaactcagagcatatttggttggaggccttatgaatagattccagtttgatttggcaggctcaccactgaacattaatttagttggttgtaatgctattacagcccgaatctatttagggtgtattacaggaaaatgttgaatagccattcccttccctcaccactgaatagccattcatttcggtgcgaagtaaaatttttttctccctcttcaatttttgccctcacctctacctagagaatgaagaagcactagaatatcatcttctccctcggttcatggttagagtcatcaaaatggaatcaagagatatcagaatagggaaatctgggacttcgagcacaaagtggcggtggcaacgaacttgctggttatttt

SEQ ID NO: 164 - DNA, 351 bp, Gossypium hirsutum
  Clone ID: LIB3083-002-Q1-L1-G6
tttaagttctgcatatggactgtcatctctccacgaagattgtcatcctacgatcattcaccgtgatattcacgccggtaatatgctgttggatcccaagttcgaatcaccggttggcgatccgggacttgctaaaattgctttcgatgtcaacactctctttttcaccagtgtgatgtgtacgaatccggtatttagccccctgagtatgcttcaagtggaaagctcactgattaatcagatgttgccttctccagggccatgcttttggagttgattaccggtcacagaccggatctctcttcatttatggatgacattccggtggatcgagctacgccttagctcaca

SEQ ID NO: 165 - DNA, 280 bp, Gossypium hirsutum
  Clone ID: LIB3083-002-Q1-L1-G7
cttatagtccaagtcgttctagtccaaagtcatccagctggtttagcagtattcaagtcatcccagctgtagtacatcacagtgtatacattaaaggatggagatcgttccaagcgcctacgtggaatgagaagtctctgcattgttagaaacttcatcgtggatatttactctcaagagttagcagatgatatgtgaatgaagttgcagaacgatcagttcagaaagacgagaagggttctacgtagaacttagaacagtgaatgctctggaaggtcta

SEQ ID NO: 166 - DNA, 405 bp, Gossypium hirsutum
  Clone ID: LIB3083-002-Q1-L1-G8
tttactccctccatggcctcatttatagcttgcctgtcaaccagaaggagaggaacctgttgttcaactttcatatttaatccttcataaaattcttggatttcaaggtagagaggttggcattcatgagtatccataattgcagaatctagacactctaggcacagcctacgaccatcatcaagtgatatatattttacatctacaggctccattctttcgcaactacaacagcgaggagtgccatcacgctcatgagaggggcagtacttttgcatccagtagggatgtgccctgtactcaattagaccagctggatttgtcggtataaatttcctgcaaacatcacattttggatgatgctgctctttatagcaggatttatgaaaaggactattccctgaa

SEQ ID NO: 167 - DNA, 383 bp, Gossypium hirsutum
  Clone ID: LIB3083-002-Q1-L1-G9
aaaatgggagcattgaagacaccaaaggtcgggataagggttgtttgtgaagggattaaagctaccggcccgaaggcaaaatcagcaaccacagcttcaacttctaatgcaaaatgtaaggttgatttgagactcaagatctggaaatggactttctgatcgacgagaatattttgagaaagagaaacaatggagaagaaaaaggtttgttgtttattttattttattacttttgttatggttgttttttttttaaagttgtgtcgttatttttttagggaggtaatatgtttgcaaattgggtgatttgattgtatagggtatagaaaaatgtaatgtatacgttatttcttttctttttcaatatatattttggatttttc

SEQ ID NO: 168 - DNA, 396 bp, Gossypium hirsutum
  Clone ID: LIB3083-002-Q1-L1-H1
gccttttctcccttttcatccgttgaaggaatggctgcagatcctaaagtgcacattttcgaggaggttgccaaccacaacaaaaccaaagattgttggctgattatttctgggaaggtttatgatgtaactccgttcatggatgatcatcctggaggtgatgaagttttgctgtcagctactgggaaggatgccaccaatgattttgaagatgtgggtcacagtgattcatcaagagaaatgatggaaaaatactatattggtgagattgatccaaaaactgtcccggcaaagcgcacttacattccaccccagcaaacgccttacaatcccgataagacccctgagtttgtcatcaagatcctacaatttcttgttcccctattgatcctgggc

SEQ ID NO: 169 - DNA, 386 bp, Gossypium hirsutum
  Clone ID: LIB3083-002-Q1-L1-H11
caatgagaaaagaaattcaggaccttaggacaaatgccaggatatttcagctgagcaagtgcactgcttgcacttttacccttgacctacctgctgtgcatttcatgtgtatgcactcatttcatcagcgttgccttggtgataatgaaaaggaatgccctgagtgtgctccagagtacagatctgtaatggaaatgaaaagaagcttggaacagaattcaaaagatcaagatcaattcttccaacaagtcaagagctcaaaggatggattttccgtgattgctgaatattttggaaagggggtcattagtaaaacgagtaatggttccacaggaactgctagatcagacagcgtctcttccagcagtggcttctgattttcttga

SEQ ID NO: 170 - DNA, 175 bp, Gossypium hirsutum
  Clone ID: LIB3083-002-Q1-L1-H12
ccaacttcgtctctgattatcattctcggggcagtgcgatcctcctgctgggatcattgcctgcgatcaacatccaagtcagctgctgttaaacgctctaaagatcgcgcctgtcttctctgctccacatcaaaagctgctgatactgaccatgccgtactcactggtctatcag

SEQ ID NO: 171 - DNA, 387 bp, Gossypium hirsutum
  Clone ID: LIB3083-002-Q1-L1-H2
tcgagtttttttttttttttcatttaatgggaatcggtccactggatgaagaagattattacacgggatgaacagcaaatcaaaacaagatgaggaccaaacaattagggaagaacatcatattggaaacttaaaagttacgatgaatttactttaaaaaagaaatatccattttaataacactgtaaaagtttcgtgcttttagatcacaaccccaagcagcagggaacgagagatgagaaaaacaaccttaggccttagctgaagtatatggaaacctgaggaatgtcgacatcattgtccgagtcgtcctcacaagccacgaccacatcaagatgctgtctattcggaagcagttctacctttgccactttccgggctagatct

SEQ ID NO: 172 - DNA, 350 bp, Gossypium hirsutum
  Clone ID: LIB3083-002-Q1-L1-H3
ccggccgtttaaaacctggggattccccgggcctgaaggattccggaccaggttaaaccctgttgcgagcctattcaaggtcacagggtgcatggacatcgtaatgtatgtgatgcgggccaagatggtagtctgatgctttgtaaccctgtgctgcttgcgcctgacgatactcattggtatggatgctcgttacagaggtcgtggcaacttacagatgaatgttcatataagccgacctcattacgattcctgtgacaactgatccatccgaaaatctacgctaaggggatcatctgccttgatagactacaaagtaactggtgccctagttttgaatgtacatctat

SEQ ID NO: 173 - DNA, 396 bp, Gossypium hirsutum
  Clone ID: LIB3083-002-Q1-L1-H4
gttattttggttttctatctcattttcgttgttttggtgcatttcaaaacagaagttgtttcgaataaactgcagtcagaaaggataaggctttagcagccagcgttttcgaacaaaaaaaaaatgtacacatccaccttctatttcccttatttaaacaaagaatatagcggggcctaagtgctcttttacactcttgaataacatcattaaacataaacaaaacccccaaaataaatgaacaggtctgttgctggcattgccaacaccacctagattattttcgaaattactcggcagaaattaaggtatgtggatttgattaggctgcggattccttggcaatcttatctgccttcgcaatcacttcactgattccttcaaccatgtaaaact

SEQ ID NO: 174 - DNA, 407 bp, Gossypium hirsutum
  Clone ID: LIB3083-002-Q1-L1-H5
ctggaataggcagccgaccgcatgttgatggcacgggtatgtgaggcaaacggagattacgaggcggctcttgagcaccttgtcctagccagcatggcaatgatagccaatgagcaggagaatgaagtagcttcaattgatgtcagcattggcaatatttacatgtctctatgtcgctttgatgaggccatcttctcctaccagaaggcactaacagtgttcaaatcatcaaagggtgacaaccacccttcagttgccttcgtctttgtacgacttgcggatctataccacagaacatgaaagctccgagaatcaaagtcctattgtgaaaatgccctgaagatctttgcaaaacccgtgcctggaaccacagcagaagagatagctggtgggttaacctaaatttc

SEQ ID NO: 175 - DNA, 399 bp, Gossypium hirsutum
  Clone ID: LIB3083-002-Q1-L1-H6
tctatattctctctctctctccttctctgcctaaacccaaattattaaaacagtcgtcgtctgcaaccgacaccaatgtccaccgcagttccacccgttatccctgtctcctccgtgcaatccgtcgaatcccaaccgcccgctgccagccccgcctttctctctttcgtttcccgtctcaatgaatcccttcgcaacggcctctcccagcgccgtccttgggctgagctcgttgaccgttccgccttctccaagcccgagtcattctctgatgctctcgttcgcgtccgcaagaactactcgtatttccgagtcaattacctgtctgtgatcggtctcatccttgccttttaccttctttcccatccgttttcccttctgcttctcctcggactcctc

SEQ ID NO: 176 - DNA, 322 bp, Gossypium hirsutum
  Clone ID: LIB3083-002-Q1-L1-H7
ttaaacgcttatgagagactactcgaggtcacagggggatccacctgctagtgttagtgaggctggccaagatgatagtctcatgctttggaacgctgttctgcttgcgcctgactatactccttgggatggatgctcgttacagtggtcgttgcaactcacagattagtattcatataagccgtcatcatgccgattcctgtcacgactgttcgatcctaatatctactgcttaaggatcatttgtctggatagactacaaagtcactggtgctctatgtatgaagttgcagctatactcgcatgtacccagtaaatactt

SEQ ID NO: 177 - DNA, 179 bp, Gossypium hirsutum
  Clone ID: LIB3083-002-Q1-L1-H8
caagtgtcctatgtgtgtcttcttatcgttaaagggggaatctagtgctgctatcaatgccgctaatctagattatggtctgatgctgtgggaccctgtatttctcatctcctgaatataatccttgggatcgcagccgatcagacataagcattaagcttcacttattacaataacca

SEQ ID NO: 178 - DNA, 347 bp, Gossypium hirsutum
  Clone ID: LIB3083-002-Q1-L1-H9
cgagattcagctttgttaatttttaggctttgattattatatttttgtgcaattctgttgttgtgatctgattgatttacgtgtcaatcaacgagatttggtggtgaacttgagtgaaatttaaggtatcgtagggatttttcgtggatattatgattctcttttcgagagttaatcaaatgagagatctgagctaaaaaagagatgttgaaaaatgacgaatactgcggtagctatgaaagggaattgtgtgaactgaatacgaggagagtgcttctcttctggctatagtgagccaaatgatggtcggaataccttggatgggctcaatggtcattctactcgtc

SEQ ID NO: 179 - DNA, 390 bp, Gossypium hirsutum
  Clone ID: LIB3083-006-Q1-L1-A11
cgagccacgatcctcaccatctcagttgattttaaagaatggtattgtagaaaaaggtaattaaaagatgagtgaagttttcgaaggatatgaacggcagtattgcgagctatccgcgaatctttccaagaagtgtacggcttctggtgctctgaatggagagaagaagaaacaaaaactttctgaaataaaagccagactagaagatgcagaagctctgattcggaaaatggaccttgaggcaagaagcttgcagccaaatgttaaggctgtacttcttgctaagttacgggaatataagtcagatcttaacaatctcaaaagtgaagttaaaagaattgcatctggcaatttaaatccatctgctcgagaatagttgttggagtctgg

SEQ ID NO: 180 - DNA, 324 bp, Gossypium hirsutum
  Clone ID: LIB3083-006-Q1-L1-A12
atctgaaccaagatgaaaaacccaaaccagatttactcatggcccccgtgcccaactataaacagttatgattattttaaacgcaagattgttcttcgattcgttgaatttcgttaagtgaagatggaagactgggaggatgagattccacctctccctgcaaaggaacaacttaaaagcaaatgggatgatgaagatattgatgactctgatatcaaggaatcatgggaggatgaagatgaacctgctcctgctccgcaacctgttgcaaaagctccagacgaaaaggccccaaaaaaggctgcatcaaaagctactgaaaag

SEQ ID NO: 181 - DNA, 336 bp, Gossypium hirsutum
  Clone ID: LIB3083-006-Q1-L1-A2
gttttctgagtcaggatgttatgatttaaccacaacttccgatgtgatggaattattagacaacctcaaaagcctatcaaatgaagtccaaactaaagctgctctaaaattgcgccttcttgcaaacaacaacatgtagaatcgtataattattggtcgctgtggtgctattgcaccattactatctctactgtactcagaagtgaagctaacccatgagcatgctgttacagcccttttaaatctttcaatcagtgaagataataacgctattattgcaaaatcatgagcattataccactgattcatgttataaagtctgaaatgatggatccc

SEQ ID NO: 182 - DNA, 304 bp, Gossypium hirsutum
  Clone ID: LIB3083-006-Q1-L1-A4
aaaagttgaaatcttttttgagcaatggaaggatcagttttgactccatcgttggaaggaatgaagcatatcaaatctccagaaggggaaatgcttaccaagccttttttggatgtctgcaagttgattttgccagtcctcgataagttcggatctgctatgagccttgtgaagagtgatgttggtggtaacatatcgaggttggaaaagaaatatgaaactgatcccgctaaatacaatcacttgtacagtatggtgaaagaagaggttgattgtaaaacagcaacagattcatctagttgta

SEQ ID NO: 183 - DNA, 355 bp, Gossypium hirsutum
  unsure (1)..(355): unsure at all n locations; Clone ID: LIB3083-006-Q1-L1-A6
gaaaaactcatccaaattgttaagcttgttcaatggcgagtatgggtttttcgttgttcttcaagttccttctcttgctctctggctttggggtttcaatggcgttacaagaaaccccattcgtggctaaaaacttgggtcaaatcagttctaactcggtgcttgtggccttgttagattcgcattatacggagcttgctgaattagtggagaaagctttgttgttacaaagcttagaagaatctgtgggaaagcataatattaccatttttgctcctaaaaatgaagctcttgaacggaatctagaccctgaattcaagcggttttntgtggaaccctggtatcttaaatcctt

SEQ ID NO: 184 - DNA, 252 bp, Gossypium hirsutum
  Clone ID: LIB3083-006-Q1-L1-A8
cttatgctgaaagtgtgctaatagttactaggcatctacgtcagattatacatgacagacatccaaggtggccaatatgaccaatgtcttaactaccaacattaacagcaatggaagcatgtgtgctaatatcactgaaataacaacggatgcctggaataaccatttccaaggttctgatctcaatctggtcaatgctgaccaatccaaagcttgatgaccctgttgttccccagattgctcacatgtata

SEQ ID NO: 185 - DNA, 357 bp, Gossypium hirsutum
  Clone ID: LIB3083-006-Q1-L1-A9
aatggaagcaccatgagcttaaggtgaaggactcaaaaacgcgtctgtttggtgaaaagcctgtcactgttttcggcatcagaaaccctgaagaaatcccttggggtgagactggagctgattatgtcgttgagtctactggtgttttcactgacaaggacaaagctgctgcccatttgaagggtggtgcaaagaaggtaatcatctctgctcccagtaaggatgctcccatgtttgttgtgggtgtcaatgagaaggaatacaagcctgaccttcacattgtatccaatgctagctgcactaccaactgccttgctccattggctaaggtcatccatgacaaatttggcattggtg

SEQ ID NO: 186 - DNA, 318 bp, Gossypium hirsutum
  Clone ID: LIB3083-006-Q1-L1-B10
agtgcatcaactattagttcactaatttctaacaaatgtatcaatacatataataattatcgatgtctaatcatataatatttaactattgtatcaaattttatgacatttaaaacacactaatttcctgctctactcttcctcccagagaaagtgaaagcttttggatgaggattacgaggttacatgcaagagaagtctcgttggcatttctcctctaaggaaggagataaaccagaatataaaacgcaatttgcagcatgtacgttgaatgatggcttgtatatatacatatgtatataaccaaccatttatgac

SEQ ID NO: 187 - DNA, 439 bp, Gossypium hirsutum
  Clone ID: LIB3083-006-Q1-L1-B11
atatgaactaaatattagatttacgaaaagaaacagaaatctgtacataaggattcttcatggtgcagtatgtatgaaggtcagaatcaaaaggtacaataacttgaattttaaatcttgtgtaattctttagccgcaccaccagttcaagtccttccttcccaactcaaaaaggaataaacaaaggtttcaacacaagttcgtatttctcaaattttaaagcaacaatcacaaaagcatggcagcattatcactgtctcaaaaccagaatcatctgttgctgaaaggttgtcaacaaaatctggctgctcaactaaacatcgggtccatcgttgcattctctatcttcatgatcttggatgccgactcctctatggacggcttcagtcctcttcgtagtccatcactccaccaggttcaaagtagatatcctcgagcc

SEQ ID NO: 188 - DNA, 309 bp, Gossypium hirsutum
  Clone ID: LIB3083-006-Q1-L1-B12
tcgaattaaaagttaaaacccagaaggaaagggagaagacgatcaaatctctggagaaggatttggagattgcgaagatgcagatggttgctgacaaggaagaacttttgagtcttaaggctgaagttgagaagatgaggactgcaaatgaagaaaaactacaaaagatacatgaggagacagataggctcagggtaactgaagaagagcgttccgagtatcttcgcttgcaattggaattgaaggaagaaatagagaaatgcaggcttcgagaagaactactgttgaaagaagctgacgatttgaaac

SEQ ID NO: 189 - DNA, 279 bp, Gossypium hirsutum
  Clone ID: LIB3083-006-Q1-L1-B2
gaacccactgttattgatgaagtgagaactggtgcttacggccagctctgccacccagaacaactcatcagcggcaaggaagacgcagctaacaactttgcccgtggtcactacactattggcaaggagattgttgacctctgtttggaccgcatcaggaaacttgctgataactgcactggtcttcaagggttccttgttttcaacgctgttggtggaggtaccgggtccggtcttggttctctccttttggagcgtttgtctgtcgattatggcaag

SEQ ID NO: 190 - DNA, 299 bp, Gossypium hirsutum
  Clone ID: LIB3083-006-Q1-L1-B4
ccagcttcactcacttcatcaaacaagaccaagcttcccaggcaaatcatcaaccatttcctttcttcaaatcccaacaatgctttctcaatggggttcggatcctcagcttgctttgcttatgctcccacagagaatcgtttccccaatcatcaaaggttgttctgtggagtggatgaaatatactgcatattcttgggggatttgaataatttgagcagcctgctaaagcagtatgggctgtcaaagggcaccaatgaagccatgtttatcattcgaagcatatcggacccttcgcg

SEQ ID NO: 191 - DNA, 435 bp, Gossypium hirsutum
  Clone ID: LIB3083-006-Q1-L1-B5
caagttctcgctttctcagataccaaatgtctcaaaggaaatcaaggttgacaaggttggagttcagagattcaatgatcaaccagaaagcttattcctttctgttaatgataaatcgaatgataagaattctgagagaatgttagctcatctggggatgagcaaattgagtgatcctgataatgcaagtcaatgcagctcaatttaccatcacgagagaggttttagttctcattcaggagaagaagggagctctggaacggttcgaaaacagtcttcattgtcatatggaggactagtgacggcctctcccttagttggtctgccagaaatttcacatcttgggtggggtcactggtttactcttagggatctcgatctcgccacaagtcacttcgccgcagagaatgtgcttgagagggtgatatgggtggt

SEQ ID NO: 192 - DNA, 206 bp, Gossypium hirsutum
  Clone ID: LIB3083-006-Q1-L1-B6
tcgagttttttttcattacctttttttttgtgcgaaaaacgtatcttatttaagaaaaatgttagataattagcaatacctactcttttctggaattttacataagcacaaaggattaaagtcatttttctggaacaactctatagttgacaatgaacattcagagctaaacttcctaactacatgctgaagcaacaatcaatctt

SEQ ID NO: 193 - DNA, 350 bp, Gossypium hirsutum
  Clone ID: LIB3083-006-Q1-L1-B7
taacgaggtaaacaggacagcgaagttcaattggctcacgacacaagaagtactccattggctcattagaatcgctcagactaacagctacaatccaagctctgtctctttagttgatcggtccactggccgattactacctcactggcaaattactagcaagttacaagttcttctcagctgcatagtttctcatactactaccgtgctcgctagctactattggcaatataagtcattatctatgcatcggacgatactccgccacatctttccaagagctatgccacatgaaaacagtatgtgtatcgatattggcatggctactctctgatactgagctgacactg

SEQ ID NO: 194 - DNA, 213 bp, Gossypium hirsutum
  Clone ID: LIB3083-006-Q1-L1-B8
tcgaattaaaagttaaaacccagaatgaaagggagaagacgatcaaatctctggagaaggatttggagattgcgaagatgcatatggttgctgacaaggaagaacttttgagtcttaaggctgaagttgagaagatgaggactgcaaatgaagaaaaactacgtaagatacatgaggagacagataggctcagggtaactgaagaagagcgtt

SEQ ID NO: 195 - DNA, 345 bp, Gossypium hirsutum
  unsure (1)..(345): unsure at all n locations; Clone ID: LIB3083-006-Q1-L1-B9
gaaaacccatctctcctctcaaataataacatctccatcagtgaagagaactcctcccctaagaaacagccntgaaacaccgctgcggctggtggcggagataggctgaaacgtgatgaatggagtgaaggagctgtttcaagcttgcttgaggcttacgaaaacaaatgggtgcttagaaatagagccaaactaaagggtcatgattgggaagatgtggctcgctatgtttcagctcgagctaattgtaccaagtcgccaaagactcanactcagtgcangaacaagattgagtcaatgaagaaaaggtatcgatcggagtccgccacggcggatggatcttct

SEQ ID NO: 196 - DNA, 432 bp, Gossypium hirsutum
  Clone ID: LIB3083-006-Q1-L1-C1
cggcacgagaaaaaattccttttttttcaatcttctctccctaaaaagcgtccatttttttcctctttaaaatccctctatttctctctttcttcacaacaacaacaaaaaagtttcaattcaatctcaattattcatgtcggaggacaagggtcgtccattaccgaaattcggtgaatgggatgtcaacgatcctgcatcggctgaagggtttaccgtgatttttaacaaggcaagggatgagaagaaaacaggtggcaaacccgagtcaccagcaaaagctgatgctcacggtaaacccggagcggatcctagcaaaccccagagtaagaaatggctttgctgcgttcaagcacccaccgctgaatcttgatgaaagtccgcacgtatacgagctttcacaagtacattcaagcccctcaccatggattc

SEQ ID NO: 197 - DNA, 230 bp, Gossypium hirsutum
  unsure (1)..(230): unsure at all n locations; Clone ID: LIB3083-006-Q1-L1-C10
gctgcaggttgaagagccgctcgtctctgattaaatatccagggacttgctttcttcataaagtancggctcttcaattatcagagatgatgaacatgttgacatatatcaatctcgtcatgaaaaacacaatccttgatagcttcaaacaggattcatcggaagtggaccaacagcctttttctccataatcatctccatcatactcatctcacatgaaaaatatttaa

SEQ ID NO: 198 - DNA, 444 bp, Gossypium hirsutum
  unsure (1)..(444): unsure at all n locations; Clone ID: LIB3083-006-Q1-L1-C11
cagcagcgtctcatcttcgccggcaaacagctcgaagatggccgtagcttggccgattataatatccagaaggaatccaccctccacctcgtcctccgtcttcgcgggggcatgcagatcttcgtgaaaaccttgactggcaagaccatcaccttagaggtggagagttcggacaccatcgacaatgtaaaggcgaagattcaagacaaggaagggatcccaccagaccaacaacgtttgatctttgcagggaagcagcttgaggatgggaggaccttggctgattataacatccagaaggaaccgacccttcacctngtttgaggcttcgtggaggcatgcagattttcgttaagacattgactgggaaaacaatcacattggaggtggaaagttcggatacaatggataatgtgaaggcgaagattcaggacaaggaaggtt

SEQ ID NO: 199 - DNA, 302 bp, Gossypium hirsutum
  Clone ID: LIB3083-006-Q1-L1-C12
gcctgttgagcattcacaagttcccttaacaatttactttcaaatacacccaacaaaaatatcaagtttcaacccaaacacaaataaaacataaaacagcataacatacagtaaaccatttcaagtctttaacaagcttcaaagaatagaagcttgcataacacggaagcaacaggtaataaaagacatcgtaagcacactcaatcacacgtacttcttagtactcatcatcttcaccctcatcaccctcagctgactcagcaccaacttcttcataatccttctccaatgcagcaagatcc

SEQ ID NO: 200 - DNA, 161 bp, Gossypium hirsutum
  Clone ID: LIB3083-006-Q1-L1-C2
tctaaatcattactaaaactccattttcaaagcgatttttgaacatctttgtaacaatccagttgaatcttacaaagatgcagtttgcggctttcaaaaatcaactacttattcttaaagctgcttttaaaaatatgtcgaccccaaataagctaaaacta

SEQ ID NO: 201 - DNA, 317 bp, Gossypium hirsutum
  Clone ID: LIB3083-006-Q1-L1-C4
cagatcttcacagaagtgaacatcgatctaggtccagtgcctggatcttgaataaaggagtctatgaagtcatccacccgttctgcgtttcggcctggagtagttggggaccaaaatgtctaccgtgggttttgcgggatattgcaattgagcgatgaggtattgtctctcaagatactatcacgattgactccaagagatattgcatctgttggttctgtctgtagacggctatatgacctgacaaaaaacgaggacctttggctgatggtctgtcaaaatgcatggggttacgagactactcgtgttttagagac

SEQ ID NO: 202 - DNA, 301 bp, Gossypium hirsutum
  Clone ID: LIB3083-006-Q1-L1-C5
tttttgagtgtaagtgtaggcaactggatttataggtgggggaaccctaaatgcaagggcaaactccctcctggttccatgggattccctcttataggagagacccttaacttctttgtcactttcaactccattgacatgcatcctttcgttaatgaaagattgaaaagatacagtccgctgttcaagacaaacataacgggtcgacccgtggcggtgtcatcagaacccgaattcaactacttcgtgttgcaacaagaagggaaactcatcgaactctattacatggattccttttcac

SEQ ID NO: 203 - DNA, 341 bp, Gossypium hirsutum
  Clone ID: LIB3083-006-Q1-L1-C6
cataaatcaaaacgaagactccattttcaaagcattggagcaagatcttggaaagagtcctgttgaatcttacagagatgaggttggggttttgaagaaatcagtcacttatactttgagctgcttggagaaatgggtggcacctaaaaaggctgaagtgccattgctttttttccctgctaaagctgaagtgatgcctcaaccactcggtgttgttctcattttctcatcttggaatttccctttcacactggcattggacccattgatcggagcaatatctgccggcaacacggttcttttaaaaccatctgatctggcaccggcatgcatgttcgttc

SEQ ID NO: 204 - DNA, 354 bp, Gossypium hirsutum
  unsure (1)..(354): unsure at all n locations; Clone ID: LIB3083-006-Q1-L1-C7
cgatcttacactggcagccatagctatctgggtgcattgtcatctgcgccagtagtgtccttggcagttgagaggggatggagtgagtctgctagccctaatgtgaggggtccaccctctctcgtattcaacttttctcagctggacgaaaagctgaaggctgggtacaaggccacaacagatggaaagtttactgaggctcttaggcttttccttagcattcttcatacaattccattgattgttgtggagtcaaggagggaagttgatgaagtcaaagagttaattatcatcgccaaggagtatgttcttggtctgcagatggagcttaagcgtanagaattgaaagacaat

SEQ ID NO: 205 - DNA, 295 bp, Gossypium hirsutum
  Clone ID: LIB3083-006-Q1-L1-C8
cgaagatggaaaaattacaaagcctttgtgatgcttttagaggttgccatgctgtttttcatacatcttcctttattgatccacatggtatctctggttattcagaacaaaaggtgtttttggagactgaagtggcaaggactgtcatggaagcttgtgctaaggcagcctatataaagagatgcgtcttcactacatctctattggcatccatttggaggaatgaaaatatagatggaattattgatgacagctgttggagcagtgaagaattttgcagagaaaaaaagctatg

SEQ ID NO: 206 - DNA, 418 bp, Gossypium hirsutum
  Clone ID: LIB3083-006-Q1-L1-C9
ctcaacacaacaatgccaaagactgttggcttatcattgagggcaaggtatatgatgtgactaaattcttggaggatcatcctggtggtgatgaggtcctgttgtctgcaacagggaaagatgcaagtgatgattttgaggatgttggtcatagtagcagtgctcgggcaatgatggatgagttttacgtgggtgacgtcgatacatcaactatcccaactaagaccaagtacaccccttccaagcagcctcactatgagcaggacaagacctcggactttgttataaagcttctccaattcctcgttcccctgctgatcttgggattggccttcggagtccgcttctataccaaatcacctgcttaagcatcaagaccacaacccagaatggaaaaaactcttcaatatattaatat

SEQ ID NO: 207 - DNA, 271 bp, Gossypium hirsutum
  Clone ID: LIB3083-006-Q1-L1-D1
aaagtatcgtcgttcgagacggcagagattttgaggagaagcggtgttgtgtatctgcacgtggtgtgcactcgcagtcctagtgaaccgaaggatctaggggttcatcaaaggaatgccgctttgggacatattgaacggcataaggtcgatgggatcgtgtttttcgccgacgatgacaatgtctacacggtggagttgtttgaaagctttagaactatttgacgatttggaacttggcctgtaggcatgcttgcaccaagcaaaaaca

SEQ ID NO: 208 - DNA, 365 bp, Gossypium hirsutum
  unsure (1)..(365): unsure at all n locations; Clone ID: LIB3083-006-Q1-L1-D10
caaactcccaggacagcataagaaagatgaagaggacaccggccaaccaccagctgctgctgccccaattgagaacgaccaccatgaaggagagacaaaagagaagaagggatttttggtgaaaatcaaggagaaaattcctggttaccactccaaaacagaggacgagaaggaaaaagagaccactgctcccaattaatgaatcaatataatgcatttcaagtaaaagatgtgtagagattgtgtggtttatcaatttgttggaactgtctgttctctgtttttctttttggggttgcatacatcatataaatttctgcgtctgttttcctgcttgtaagttaaaaaaaaanaaannnnaaaaa

SEQ ID NO: 209 - DNA, 398 bp, Gossypium hirsutum
  Clone ID: LIB3083-006-Q1-L1-D11
agaaccacgtggacttattgagccttggtgcagagacaacgcttgccattgatgaaggaatgggtgaggtggtggattcttcacctgaggaacaacagcatcaaaggcaccccaatgaatcttcagaggctaacatctgggaggagcataaaaaggaatctgaaatggatcaaacccaagcgccattttctgattcaaagaccaatacaggttgtgatgagggagttccttcaaactctagccatcaagatatgtcttctagagaaagtccttcatcagaatcagagaaacaactgttgtttggtaaagatgaactgcctgttgatgaacatgataaactcgaggaaccatctataattgcaaccgagtctacaagggtagcagacattgtcaacact

SEQ ID NO: 210 - DNA, 324 bp, Gossypium hirsutum
  unsure (1)..(324): unsure at all n locations; Clone ID: LIB3083-006-Q1-L1-D12
gtaactgcttaccagtatcacgaatgtatgaagtcatgacgtctctgattaaaacaagcccattggatactcgacgaaacaagcaatacatccttcctaagtcctcatatttttcatcgacaatcatattaatcaaccccgagttctccatttgcacaagcctgtgcatatgactttcaatcatctccgtttctaccacatttgttatcttgacttcacttctggtgtccaagtaatgtgagactctctctatttcttcatttaggcgtctctcggctttctttagatactccccacaatcacaggactctatgaactctngag

SEQ ID NO: 211 - DNA, 334 bp, Gossypium hirsutum
  Clone ID: LIB3083-006-Q1-L1-D2
agaagaagcactttcttctgaggatctgctatacttggagttcttggagaaatttgagaggaagtttgttacccaaggagcatatgacacccgcaacatctttcagtcactcgatctggcgtggactctgcttcgcatatttcctcgtgaacttctccaccgtataccagcgaaaactcttgaccagtactacagtcgagatgcaggtaattgaaggaggcaaagtgatgcccttagattgcctcctccttggtagtgtttaaaagaagtttatttaccatccgcttcatctgctcgaataataatggttgaattccagttaggttttcccatg

SEQ ID NO: 212 - DNA, 293 bp, Gossypium hirsutum
  Clone ID: LIB3083-006-Q1-L1-D4
agggccatggcatattcatttactcatcagcaaacctggaagcatactgcaagatctatgaatccgttattcatggatccaaacaatccctcatggggatggagttggttggaacgatggatggcagcaccaccacaggagggtcgtggtacaacagaaaaggaacagaacgaccagtcatccataaggagtgcacgcagcaactttggaggagaaatcagcaaagcttatgctcgctaccaactcaatttggataagcaatccccaaagactggccaaaagccaaaccaaac

SEQ ID NO: 213 - DNA, 233 bp, Gossypium hirsutum
  Clone ID: LIB3083-006-Q1-L1-D5
gattctacatgttgacaagaatgcaaaagatgatgatttgaagaaagcttataggaagcttgccatgaagtggcaccctgataagaacccaaataacaaaaaggaagctgaagccaaattcaagcaaatctttgaagcttaataaggtttgagtgaaccacaaaagaaagctttctattaaccatattgggaaaaaaggcctaaaaggccaattccaacttaagaatcttgcc

SEQ ID NO: 214 - DNA, 342 bp, Gossypium hirsutum
  Clone ID: LIB3083-006-Q1-L1-D6
tacaaagtttcacctgtagagtgtgtgatcaatccccgcgaagccgaaagactgaaaaggttcgatccagtcacgtttggaggcaggcgtcaccacgggaagcgacaccaccgcggcagagcaagccggtctgaagctgataccatctaaaaaataataggccattggtagatttgatttcattacatgttggggcattattttcctctcagtttgatttataaaatagttgggggtcagttttgtgtatagagagaggaggagcaggagagcaacaaatatttatctcaaagaaagtgatagagttgtttcttatcataatatatgttcgattatgtgggt

SEQ ID NO: 215 - DNA, 313 bp, Gossypium hirsutum
  Clone ID: LIB3083-006-Q1-L1-D7
agaactagtggatgcacgaatctggaagaatgcagcacgagttcaattttttattatcatgaatagagatacaaggatttaagggtgtaaaaaagtgtgttctggatatcacatgacatattgtatggttattattactcccaaaagtatatttgcagtaagtagaaccacaatgtataaatgtttcttttagacactgtactgcttgctatatagtgtttatttaaaaaccctttaacctaactactgattcgacatagccctttaatgaagtatagttgcctcaaacttgaaacattatgtcagactattt

SEQ ID NO: 216 - DNA, 327 bp, Gossypium hirsutum
  Clone ID: LIB3083-006-Q1-L1-D8
agggccatggtatatacatttactcatcagcaaacctcaaggcatactcgaagatttataacgccgtcattcatggatccaaacaatccctcatggagattgaatttgttggaacaatggatagcagcatcaccacattagggtcgtcatacaacaataaaggcacagatcgaccagccatccataacgagtgcacgcatcatctttagacgagaaatcaccaaagcttatactctctaccaactcaatttggataaacacttcccaaagactggccagaaacacaaccaaactacaagactgctatccgtgtcaactcctaagaca

SEQ ID NO: 217 - DNA, 422 bp, Gossypium hirsutum
  unsure (1)..(422): unsure at all n locations; Clone ID: LIB3083-006-Q1-L1-D9
gttaccgccttatcttcttcatcattctgaagatgaaggagaaggcttcaccatttttgcaagagatgtatgcanaaaagacactagagcatcttgataaaaggccttccttcaggaaggtaccatctctggcttcttccaagcgccaccagcctctccactctctttcatctcaagagggtcttaactctccattacactaaattcttttttataatcataaggcatcggaaatatgccattgctatacatatgaattcatgattattaattattgtgttgaatgctgatgtttgtgtagcttaccaaatgcatgcttatacaaggggaaaatagagagagtatgtgttgaaattttatatgattacaatgaaataaggggattttcaataaactttgcgatcgaagttaaaacaggccat

SEQ ID NO: 218 - DNA, 288 bp, Gossypium hirsutum
  Clone ID: LIB3083-006-Q1-L1-E1
atgaagaagatgaaggatttaaacgtataagaaagcagttactgcattaagatgacatattataggtcattattactcccagcagtatatgtacaataagtagagccgaaatgtattatgtctttttcagacagtgtacgcttgctgaattgtgtctatgtcaagacccttcagtctaactactgattcgacgtgcccttttagtgtagtcagttccctcaaccttgcaatttcagctcgtctctttgcctcttcagccatttgattaagttcattgtaactagttcg

SEQ ID NO: 219 - DNA, 380 bp, Gossypium hirsutum
  Clone ID: LIB3083-006-Q1-L1-E10
tgaaaagccggaatacaaacagccaaagtatgacgaagagtacccaaaacatgagaagcctgaaattcacaaggaggaaaaacaaaaaccgtgcaagcaacatgaagagtaccacgagtcacacaaatcgaaggagcacgaagagtaccagaaagaaaaacccgagttccccaaattggaaaagcctaaagagcacgagaaacacaaagtcgaatatccgaaaatacccgagtacaaggaaaaccaagatgagggtaaggaacataaacatgaagagtaccacgaatcacgcgaatcgaaggagcacgaagagtacgagaaagaaaaacccgagttccccaaattggaaaagcctaaagagcacgagatacacgaagtcg

SEQ ID NO: 220 - DNA, 328 bp, Gossypium hirsutum
  Clone ID: LIB3083-006-Q1-L1-E11
gcagaataaatgttatgactgtgtttcagctatattgaaaggactccaaactgaacttgataatttgtacactgcgattggaagtgaacacaaggaaagcgattctgtgcctcctcctttaattgttgagagatctctttttattgggagactcttgtttgcattcgagaattactctaaacacattgctttgattcttggctctccacggttctgggtgaaatacacagctcctgcaatttttgagaagctcccttcctcgttgtggcaatctaaagctgtcaatggttctcctttctctgacagccttgaaggcaaatactcacta

SEQ ID NO: 221 - DNA, 367 bp, Gossypium hirsutum
  Clone ID: LIB3083-006-Q1-L1-E12
cagattccaaatcggaaaaaagaaaatggtgaagggacgcgaatgggagcgagtcagactctatgtaagaggaaccatcttgggttacaagaggtcgaagtcaaaccagtatccgaacacttcattaatccaaattgagggagttaacaccaaagaggaagtagcttggtatgccggcaagcgtatggcttatatttacaaggctaaggtgaagaagaatggttctcattatcgctgcatttggggcaaggtaactagaccgcatggtaacagtggtgtcgttcgtgctaagttcaagtcgaaccttccccctaaatctatgggagatagggtcagagtcttcatgtaccccagcaacatttgagtt

SEQ ID NO: 222 - DNA, 122 bp, Gossypium hirsutum
  Clone ID: LIB3083-006-Q1-L1-E3
cagttgcaccttgaagcctctccttgctagcttggcccaggactgacctggggatttcatccgtagtgcccatatcgcccttttctaacccggttggtgctttccttagaaacggctttaga

SEQ ID NO: 223 - DNA, 355 bp, Gossypium hirsutum
  Clone ID: LIB3083-006-Q1-L1-E4
tgcaagaatactattatccaagtacttattaccaaccacgtcagcaaacgtagtcaaacagatgcttctcaagtggtggtttcaactgtcaatgcagatgatcaagcttctttatcaactgaaacaaatacaggaaatttgagcactgtagaaagtggtgcgggtttgagtggtaatactggttctgggtcacaaaaatcaactttcaaggtctcctctctaaatccgaatgcttcctataaaagagaaagctttccaacaggtaaatccgaaggtcatcagaattcaagatttagctacgaaggggtccagccaacaattccttggatagatatgtcagtgtcttctaatgggc

SEQ ID NO: 224 - DNA, 363 bp, Gossypium hirsutum
  Clone ID: LIB3083-006-Q1-L1-E5
aggagcagtatgtacgtggggagggatttgcctagcatgggggaaagaggttcaggttaatcttagaactttctcaatgaaccatattgatgtgctaatcaaagaagaagatgttgatgaagaatggagatttacaggtttttatggatcaccttattcacagaataaaaaggcctcatgggatctattaagatttttggggtacgaacaagatctttctttgttagtgagtggagactttaatgaaataatttactcatttgagaaaaggggaggtcaaccgagggaggagaagataatggaagagtttcgcgatgtcctaaacgaatgccaacttattgatgtgggctactcgggaacatg

SEQ ID NO: 225 - DNA, 311 bp, Gossypium hirsutum
  unsure (1)..(311): unsure at all n locations; Clone ID: LIB3083-006-Q1-L1-E6
ccgtataaatcatatatatctttgcatgtgataattcgaaagctttgaagtcgtatagataaaagcataatatttgtttattgtcgaagaatattatctaaaatacaattgaatgatgagaaaaacttactggtggtaatttctcctccggccaagacaaaaggaacccattgtagccaatcccatgcaaactatgttaataaagttaaagcaatctctcaaaggtctagttggacttgcatagctgcaacatacaacctatgctactcaaactctntttttttcttttaaaatatcacgtctaacattca

SEQ ID NO: 226 - DNA, 439 bp, Gossypium hirsutum
  unsure (1)..(439): unsure at all n locations; Clone ID: LIB3083-006-Q1-L1-E7
cttcttcttcaccttatcttttgctacatacatatccactctaaccttaaaccaaaaccatccaccatcatcatcatcatcaagctggagaagcgataatgaagtgatgggattgtacaaatcttgggtcatccaacatggcaaagcttacaatggtatcagtgaagaagagaaaaggttcgaaatctttaaggataacttgatgttcattgatgaacataactctaacaacaacactacatataagcttgggttgaacaagtttgcggatttaaccaaccaagagtaccgagccaagttcttgggcaccaggactgacccttagcgtcgactcatgaagtccaagatccccagctcacgttacgctcaccgtgccggcgataacttgccggattcagtaaactggagaagatcatggagctngtagtcgagtcaagga

SEQ ID NO: 227 - DNA, 415 bp, Gossypium hirsutum
  Clone ID: LIB3083-006-Q1-L1-E8
attttgtgtaaaatcgagatctgaaatatgggtttcttagtaacaaccctaattttttctgtgattgcggtaattgcatcactttgtaccagaatctgttgtaacagaggtccctctgctaatctgttacatctaacattggtcattacagcaaccgtctgttgttggatgatgtgggcaattgtatacctagcacaaatgaaaccactcattgtccccattttaaagtgaaggagagtgaagagtgtgtgtgtgtgtatatatatattgcacaaaaatcatttggaagattatcagtaaatcagcaattatggattttggccattgagggaatacctgaattccattgcttaatggaatggatgattcaagtgtgtctcatatggtgatcctgtatgtgctttgaattggaaat

SEQ ID NO: 228 - DNA, 113 bp, Gossypium hirsutum
  unsure (1)..(113): unsure at all n locations; Clone ID: LIB3083-006-Q1-L1-E9
gtaaaaatcctatgatggctcttctttctttggtaaaactttcaggaattcaaaagtnaagatattggtcaaatttcattacttgaattagtgtataccatacataatatata

SEQ ID NO: 229 - DNA, 303 bp, Gossypium hirsutum
  Clone ID: LIB3083-006-Q1-L1-F1
cgtttctctccatttcctttcaactgtctctcttcaagtggaaaggattgcatttactctcaggtccctttgagccgaagccatggccactggacagttattttctcggactactcaagcgttgttctacaactacaaacaacttcctattcaacgcatgcttgattttgatttcctttgcgggagggaaacaccatctgttgctggtattattaataccggtgctgagggatttcagaaactcttctttggtcaagaggaaatttgcgatcccagtacattctaccattgaagcagcatgta

SEQ ID NO: 230 - DNA, 406 bp, Gossypium hirsutum
  Clone ID: LIB3083-006-Q1-L1-F10
aatctgatcacccatgatgcagccaactttaagtttgaggcatgccaggcatcttcctcgtcagtaacggatgattctgaacaacctcaaattgacagtgcaattaaatctgatctgaaagaggcctctcccgagatgaactcacaaggtcaaacaatgcaaatcagtgcacattctcaaatagaggtccattgtctttctaacaagcctgaaactgggagtgaacaacccaaacattctatggaaagatttgcttctgaacatctggaaacagaggcaaaaaaatttgtattgggttcaaaaaggacaagtaatcctgcatttattgctgcacaaaccaaaattgagggagtgagttcaacagccaattcaagtagatcaattgattcatcctaccaagatgtta

SEQ ID NO: 231 - DNA, 353 bp, Gossypium hirsutum
  Clone ID: LIB3083-006-Q1-L1-F11
gctattcgtaccagaagtcccatttgaagtacttgttcgagggcaaatagcacgtctgctagatccaagccttcaatgtgccaggttcatatatgatgagttaataaagataagccatcgctgtatggttaatgaactgcagcggtttcccgttctgagaaagcatatggaccaagttattggaaattttctccgagaaggtcttgaaccatctgagacaatgataggtcatattattgaaatggagatggattacataaatacttcacacccgaattttattggtgggagcaaggctgtggagcttgccaatcaacagctcaggaattccaaggttgctcttcccatatcta

SEQ ID NO: 232 - DNA, 384 bp, Gossypium hirsutum
  Clone ID: LIB3083-006-Q1-L1-F12
gaacccaaactagcattatgccatatagtgataaaagagctatttacagaagagctgaaatctctccggagaagaaaccaatctccatgtatatatatgatatgatatgatcctatatcaaaggcctcagtatacaggcttcaacttattacaaagacttttcactaagaaacaaaagaagaccaaaacccagtatacaatattaaaattttctgtgtgtataatgtgtaaaagcagctacctctataatttcctatcagttgaagcgatgatcttgataacaaggccggggaaaacatcgtcagggtcatggatatgcgggttccgctcgacgataaacggatcgccacacttgtcgctgatggagtgaagggttcaccttcg

SEQ ID NO: 233 - DNA, 331 bp, Gossypium hirsutum
  Clone ID: LIB3083-006-Q1-L1-F2
ggagccggaaagctgttgttatccatgtcccctaccgatggaggaaagcttttcgcaaggttcatgttaagcttgtgagggagcttgaaaagaagttcagtggaaaggatgtgattcttattgccacccggaggatattgaggcccccaaagaaaggttctgccgttcagaggcctcacaaccgcacattgacttctgtacacgaggcaatgctagaagatattgtcttgcccgccgagattgttgggaagcgcactagatatgcaattgatggatctaagttaatgaaggtgtttttggaccccaaagaacgaaacaacactgagtataa

SEQ ID NO: 234 - DNA, 247 bp, Gossypium hirsutum
  Clone ID: LIB3083-006-Q1-L1-F3
caacagaagtggaaaaacaaaccccaatgcaaaagtatacaatagcagctggagtgcagaagatgacagatgacaaagctgtagtgtgccacaagcagaattatgcatatgctgtcttctattgccataaatcagaaacaacaagggcttacatggttcctttagagggtgctgacggaacaaaagccaaagcagtagcagtctgccacacagatacatcagcatggaaccctaagcatttggcttt

SEQ ID NO: 235 - DNA, 334 bp, Gossypium hirsutum
  Clone ID: LIB3083-006-Q1-L1-F4
caaaagcgtcggaggaggatccacaacgttcaattcagccgccgttgcggttgttggagatgggttcattgctcgtggcattacgttcagaaacaccgctggtcctactaaccatcaggcagtggctctacgttcaggctccgatctctcggtgttctacaaatgcagcttcgaagggtaccaagacactctttacgtccattccgaaaggcaattttacagagaatgtgacatctacggggaccgttgattggatattcggcaacgcagccgttgtgtttcaaaactgcaacatatacgcacgcaattcccctgataagaccaacacggtgac

SEQ ID NO: 236 - DNA, 444 bp, Gossypium hirsutum
  unsure (1)..(444): unsure at all n locations; Clone ID: LIB3083-006-Q1-L1-F5
gtcaattacgacctcttgatccttcattatcagcgtctcgtgggcttgctcagctatgtagtcttgcattccttaaagttccgagcctggatgatgaatttggtaccgaagctgctcagtttttgagtgagcagacaatgggaagctcactgcagtttactgctatgatagaggaaagggatgtttctggcggaaaagtcaagggaaaaggaactggcaccgttctcattgtaactctcgttgctgagaagtcagaccttagcattaatgctgcaatgctccaggagggactagctaggttggagaaaaggaagagatgggaatccaaggatagaaaatcggtgattgacaacttanagaaacttcagaaggagggcaaaaactggtaggcgtggaaatttgggcatatgggagatgtggattcngatgatgatgaggatcttc

SEQ ID NO: 237 - DNA, 241 bp, Gossypium hirsutum
  Clone ID: LIB3083-006-Q1-L1-F6
ggaagtcgtatgtgccgaacatggcatcgattcaacgggtcgatatggtggtgactcggagcttcagcttgagcgaatcaatgtttactacaacgaagccagttgtggccgttttgttccccgcgcagttttaatggatctggaacccggaaccatggatagcgtaagatccggtccttacggacaaatttttcgacccgataacttcggtttcggacaggacggtgcggggaacaattgg

SEQ ID NO: 238 - DNA, 300 bp, Gossypium hirsutum
  Clone ID: LIB3083-006-Q1-L1-F7
tgttacttcaatgtgctatacattcgaaattagcttcttaagagtcctctctttacatgagagcattatacctttctgtatccgaaaaatcaaactcatcactacatacttgcctttaaacaatcaaaccaattctcaatataaaaaagacactgcaacctgttaaataaacaggaagctctatcgcctttatactaaccactactccttatgtaatgataacttcttcaagcatttctctttaactagatattgatcctacatacaaacgagtcctgcataacactgcttccttgatca

SEQ ID NO: 239 - DNA, 423 bp, Gossypium hirsutum
  Clone ID: LIB3083-006-Q1-L1-F8
agtactactactccaagcaagcattttccttacaagtttggttttcttgtgattaatcgatatggctagctcaatgtcccttaagcttgcatgtgtggcggtgttgtgcatggtggtgggtgcacccctggctcaaggggccgtaacctgtggtcaagtcacaagctccctcgcaccctgcattggttacttgacagggaatggtgctggtggcgttcccccatgttgctgcggcggcataaaatctctcaactccgccgcccaaacaacaccagaccggcaagcagcttgcaaatgcatcaaaagtgcggccgccggcatttctggcatcaactatggtattgcaagcggactcccaagcaagtgcggtgtcaacatcccttacaagatcagccctagcactgactgcaacagcgtcagtga

SEQ ID NO: 240 - DNA, 269 bp, Gossypium hirsutum
  Clone ID: LIB3083-006-Q1-L1-F9
cctcaaggagtatgtcatcaagcctgtcatccctgagaagggccttgttgagaagacaatgtggcagggtaacccatctggccgctttgtaattggtggtcctcacggtgatgcaggtctcaccggacgtaagatcattattgacacttatggtggctggggagcccacggttgtggtgctttctctggaaaggacccaaccatggttgacaggagtggtgcttacattggttggcaggctgtctagagcattgtatcttatggacttt

SEQ ID NO: 241 - DNA, 226 bp, Gossypium hirsutum
  Clone ID: LIB3083-006-Q1-L1-G1
gaactttggaagtattttcagcaagtatgctcgaactgtgcgccgacaaggtaacatttggagaactatggcatatgactgaagctaatcgaaatgcatatgacttcattggctggataatagcaaaaggagaatggatacttttgtatagacttgcaaaagatgaaaatgggtatctgtcaaaagaagctgtcaagggttgattcgatgggagtttgtttgaaca

SEQ ID NO: 242 - DNA, 350 bp, Gossypium hirsutum
  Clone ID: LIB3083-006-Q1-L1-G10
caacggtacccttgggatggaactgaccgtgattatatatgtgatgagctactcggtcgggtgttcaacattctccgggagaacaaccctgagcttgctggagacagacgtagaactgttatgaggcctccacaagttcttcgtgagggcaccaagaaaactgtttttgtaaatttcatggatctatgcaagacaatgcatcgacaaccagaccatgtcatggccttcttgcttgctgagctggggacaagtggatcacttgatgggcagcaaaggttggttgtgaagggcaggtttgcaccaaaaaattttgaagggatcctaaggcgttacatcaatgagtatgtcat

SEQ ID NO: 243 - DNA, 352 bp, Gossypium hirsutum
  Clone ID: LIB3083-006-Q1-L1-G11
caactagttcataccctttgcatgggaatgttagtactggggcttgttcacttccccgacaaagagggtcagattcagagggtcggttcccatcttcaccaagtgatatttgccactctgctgacttaaggagggcagcactcttgcagtctgtacagatgagaacacagccttccaatccatcaccatttgaattgccttttggaccaggccaagagaatgtgcctaatattgaagttgaggaacgaccatgctcatttatgaagtccttagttgatgatcaagaatatcagattgaggagtgttctttgtgagtaactcatatcctgagttcagtcaagagaaatcttgc

SEQ ID NO: 244 - DNA, 258 bp, Gossypium hirsutum
  Clone ID: LIB3083-006-Q1-L1-G12
catcttttccctagttttttcactttacttttttttctgtgtgttgagcaacttcattttgtgttcagcaatcttctattgaacaactcctatcttgacttgatacagacttataactctgatgacgtcttgataccttctctctgagggcacctagaaaacagaactatgcaaatcacatgcatctatgcaagacaatacatcaacaaccacaccatgtcatggacccactacttactcagctgaacacaaatccat

SEQ ID NO: 245 - DNA, 395 bp, Gossypium hirsutum
  unsure (1)..(395): unsure at all n locations; Clone ID: LIB3083-006-Q1-L1-G2
aaacctgagaaaaaggcagagtactctgagtggccaaagtacatgtttactcaatctggctcgggcactaagccttgaaccatatgacactggtgcatgtgccatcatcatgcagtaatttcatggtatatcttaattatatggttaataaaaaaaagatggtgagtgaataatgtgcgtgcattcctccatgcaccaatggtgaatctctttgcatacatagagattctgaatgattatagtttatgttatattttatgttgtagtgaaattaattttgaatgttgtttttaaattttgatgtcacttggcttgatttatgttttaacgaagcttatgttatgtattttactttaatgatcatgcatgtattggtaatttaacaangcttgatt

SEQ ID NO: 246 - DNA, 367 bp, Gossypium hirsutum
  Clone ID: LIB3083-006-Q1-L1-G4
agaaaaagcactcaaaaaaatccaaaattttcttacatttgaaaagtctggaccaaagcacaagttataatcataaatttcttgctttgaagttagatcccactaaatgaagacttaagcatagatagaaaggcataggaagaagctgtgttgagaagtctacaacatgtctttgtcttcctaccttggcagcaacacccgccgtggaggaggatgggctcagtcattactcccttcttcatcacccaccgtcaaatcaaccctcaaagtccaccccactcgaaagtcacggaagcgtacggttctgatcaacttcctcctgaccaacttcttcaccatagctctttccctttccttcatcttcttc

SEQ ID NO: 247 - DNA, 388 bp, Gossypium hirsutum
  unsure (1)..(388): unsure at all n locations; Clone ID: LIB3083-006-Q1-L1-G5
aatatgccggaagtcaagctgataggcgtgcaagggcagaagccgatgctgcaaagactgctgagcaactgaagaaaacaaaaatttcagatagcaagaaagagaaggctaagaaatcttcagccaactctaaagaaaagcccactgctgaaccggaaatttccatcacaagactcgatattcgggttggcaagattataaaagctcaaaagcatcccgatgctgattctctgtatgttgaagagatcgatgtgggtgaagcccagcctcgaacagttgttagtgggctcgtgaaatatattcctttggaagagatgcaggatcggatggtttgtgttctttgtaattngaagcctgcaaccatgcgcggtataaaatcacatgcaat

SEQ ID NO: 248 - DNA, 292 bp, Gossypium hirsutum
  Clone ID: LIB3083-006-Q1-L1-G6
tgaacataaacccttcagaacttcgaccgcgactctatagggcctgcatgggatcacgcaacgtatctagctcattcggtaatgggccttcgctgaagtgattcattattaaatgaacacatgcgcgtgaccaatggagcattggccacattattgagcgtgcctggtatctataccggaccccagatccggtctataattgcctgacgacaaacattgtaggacacttttcgacttcaagtttagacctaaggtggctctcgttgccgatagctctatagatatagtcatt

SEQ ID NO: 249 - DNA, 279 bp, Gossypium hirsutum
  Clone ID: LIB3083-006-Q1-L1-G7
cagttcttaatactttgtttcatttcatcaaaaaaagtgccatcatgagagaaatcctacacgttcaagccggtcagtgtggaaaccaaatcggaggcaaattctgggaagttgttagcgacgaacatggaattgatcccaaagggaactacgtcagtacttctcgtggtcaacttgagagggttaatgtttactacaacgaagctagtggtggtcgctacgtacccagagctgattgaattgaccttgaaccacgaaccatggatagcttgcgtactg

SEQ ID NO: 250 - DNA, 358 bp, Gossypium hirsutum
  Clone ID: LIB3083-006-Q1-L1-G8
ctggaccaaattctcgcgttgtatacatcgatggggcattcgagctctttcagtgcagggcatgtggagatccttaagaaggctaggcagcttggagactttttgcttgttggtatccatacagaccatattgcgagagagcacagggggatgccttacccagttatgcatgttcatgagcgcagtcttagtgtgttagcttgccgctatgttgatgaagttatcattggtgctccttgggaagttactaaggacatgattacgaccttcaacatttctattgttgagcatggaactgttgcagagagtaattatctgttgcctggtgaaactgatccatatgcatttccgaagagca

SEQ ID NO: 251 - DNA, 309 bp, Gossypium hirsutum
  Clone ID: LIB3083-006-Q1-L1-H1
ggtatgttggaattcacagttcgggattcagagactttctgctgaaaccggagctgcttcgatctattgtggattctggttttgaacatccttccgaagtgcaacacgagtgcatccctcaagctattctgggaatggatgtgctttgccaagcaaaatctggaatggggaaaacagctgtttttgttctatcaactcttcagcaaattgagcctgttgctgggcaagttgcttgcacttgttttatgtcacactagagaattagcataccagatttgccatgagtttgagaggttcagtacttatcta

SEQ ID NO: 252 - DNA, 398 bp, Gossypium hirsutum
  Clone ID: LIB3083-006-Q1-L1-H10
tggcaaccaagacgatgatgttgcaaatatttgcacttttcttcttattgttgagtatcggcaactccattttgcttggtgctaatggagatgacaatggtggttggcaaactgcccatgccaccttctacggtggtgctgatgctaccggcacaatggggggagctcgtggttatggaaacctgtacagtcaagggtatggaacgagcacagcagctttgagcactgcacttttcaacaatggcttgagctgcggcgcctgctacgagctccggtgcaacaatgatcctcaatggcgcattagtcgaaccatagccgtgacagccaccaactattgtccccgtaactatgctttatctagtgacaatggcggctggtgcaatccctcactagaacac

SEQ ID NO: 253 - DNA, 399 bp, Gossypium hirsutum
  Clone ID: LIB3083-006-Q1-L1-H11
gcttggaagttaatcctctggtatcacatattcgggtcatagatacgttgggattgcccttttcgtcctcgctactgtccagatctttgctttgtttttaaggcctaaaaaggaccacaagctccgattctactgggacatttaccaccacagttttggatacgcgatacttgtcctcggcatcatcaatgtgttcaagggcttcaatatcttgaagcctgagcataagtggaaatcggcatatatgattgtgatcattgctatgggcgggatttcgttgctattggaagctattacatggattgtagtgttgaagagaaagtgcaggaaatccacaaaaccctatgatggatacaacaatgctcaatctaatcaacaagcctcttgccatgtgatcaa

SEQ ID NO: 254 - DNA, 359 bp, Gossypium hirsutum
  Clone ID: LIB3083-006-Q1-L1-H12
tcctattgagcatggtattgtgagcaactgggatgatatggaaaagatctggcatcatacattctacaacgaactccgtgttgctcctgaggagcaccctgtgcttctcacggaagcacctctcaaccccaaggccaatagagaaaagatgactcagatcatgtttgagaccttcaatgtacctgctatgtatgttgccatccaggccgtcctctctttgtatgccagtggtcgtacaacaggtattgtgctggattccggtgatggtgtttctcacaccgtgccaatctatgaaggatatgcccttccacatgccatcctccgtcttgaccttgcaagtcgtgatctaaccgatgcct

SEQ ID NO: 255 - DNA, 384 bp, Gossypium hirsutum
  Clone ID: LIB3083-006-Q1-L1-H2
gtcactttggccaccatgtatctactggacaacccatcggctttgcaacgattaacagaggagcatgaggaaattctaaagaacagagaagatgccaattctggacttgtatgggaggaatacaaatccatgacgttcactcgttacgtgattaatgaaacacttaggttagaaaatgttcttcctgggatgttgaggaaagttatagctgacattcacgtcgatgaatatacaataccaaaaggttggatcctattggttatgcccacagctcttcatctgaaccctaatatatatgaagatcctcttaccttcaacccatcaagatggaagaacattgggagcaatggaatgggcaagaactttatgccttttgaaggaggg

SEQ ID NO: 256 - DNA, 64 bp, Gossypium hirsutum
  Clone ID: LIB3083-006-Q1-L1-H3
gaaccacttacttggcccaaaaaacaaccctttaatgaaccttgaatccgccacacaaaaatta

SEQ ID NO: 257 - DNA, 256 bp, Gossypium hirsutum
  Clone ID: LIB3083-006-Q1-L1-H4
aagtaaaagatatatgaattgcacaaagcggacaatatccgagttcgagcttttacagtataaatcttcagatgagtttcattccctatgacaataccaacaatatgacatccacaagatagtaaaagaccattgagttccttattacctttcacaaatacatatcacaagccaataacaatgaaaaacacaagactttaaaacagaatttaaagatataaaccaaacccttgtttcaaaatttttgtcgcttcct

SEQ ID NO: 258 - DNA, 408 bp, Gossypium hirsutum
  Clone ID: LIB3083-006-Q1-L1-H5
aaaacacaccctaaagagacaatgagaaagctgctagccggtgcctttcttttcttcttcttttgggataaaacattagctcaaatagctccggcgccgccgttaaaggtggacaacatcacttccatcctcgaaaaaggtggccaattcaccactttcatcaagctattgaaagccacacaggtggctgatcaactaaacaaccagctaagcacaccggaccctaacgacgggataacggtgtttgcaccgagtgacaacgcgttctccggactcaaacccgggacgttaaactcactttccgaccaagagaagcttcagttggttcagttccatatactcccgacgttaatgtcgacgtcgcaggttcaaaccgcgagtaaccctttgagaacccaagctggggat

SEQ ID NO: 259 - DNA, 324 bp, Gossypium hirsutum
  unsure (1)..(324): unsure at all n locations; Clone ID: LIB3083-006-Q1-L1-H6
gttcagaccaatcatcaatgtctgagtcagagacagagttggaaacgaggaaacgagttggcacattgccaaggccagctagtttaaacgcgttcgaccttatatctttctccccagggttcaacctatccgggttgttcgaggaaggagaagaaggttcccggtttgtttcaggggcaccggtttcgacaatcatatccgaattggaagagatagccaaagttgttagctntactgtgaggaataaggattgtagagtgagctcggaaggttctagagaaggagcttaaggtccattatcgattgctgctgagatattcgaat

SEQ ID NO: 260 - DNA, 442 bp, Gossypium hirsutum
  unsure (1)..(442): unsure at all n locations; Clone ID: LIB3083-006-Q1-L1-H7
tgagatcctcacgatgcccaaaatgttattcctggatgaacctactagcggccttgacagtgcctctgctttctttgtggttcaatctctccggaacatagctcgcgatgggaggaccgttgtctcttccattcaccagcccagtagtgaagtttttgcactgtttgatgaccttttcttgttatctggtggtgaaactgtttattttggggaggcaaaaatggctgtccagttctttgctgaagctggttttccatgcccaagtagaagaaacccttcggatcactttctccgatgtataaattcggactttgacgccataactgncacattgangggttctcaaagacttcgcgataaaccaacatnctcggatcctttcatggagatggcaacagcacagaaacaaaaaggtggagtcaagcaacatggtggaagcaac

SEQ ID NO: 261 - DNA, 190 bp, Gossypium hirsutum
  Clone ID: LIB3083-006-Q1-L1-H8
gtatagtgagaatggacctgattttggagcagcaagtgatggagacggcgacagaaacatgattctaggtaaaaagttttttgataccccttcggactccgtcgcaattattgctgcgaatgcacaagcagcaataccatatttccggagtggccctaagggtttagctcgatccatgccaactagtggt

SEQ ID NO: 262 - DNA, 353 bp, Gossypium hirsutum
  Clone ID: LIB3083-006-Q1-L1-H9
gattcttagcgttttctgcttcgttgtctctctgctctaagtcttcgtcattctcactctgtgtgcactgaactcttgctaaacggtatcgttttagtcagtctttcatcaatggcgaaagaaccggttcgcgtcctcgttactggagctgcatgacaaatcgggtatgctcttgtacccatgattgctaggggagtcatgttgggtgctgaccagcccgtgatccttcacatgcttgatatcccacctgctgcggaagctttgaatggtgtcaaaatggagttggtggatgctgcttttcctcttctaaagggtgttgttgctacaactgatgttgttgaggcatgcactgg

SEQ ID NO: 263 - DNA, 227 bp, Gossypium hirsutum
  Clone ID: LIB3083-007-Q1-L1-A1
cttttctttagctgattcaataataacaacccgaaggggtacttctactttcgatatgggaacctcccaaaaacctggcctatgaccatacttatctacataatatacccctaatacctcccatggatcgatatctggatatacaagggcaacgccttgatcatgctcttaatggcaaagttaagctctacactggcgtcaagcctttcattctattacttaccgta

SEQ ID NO: 264 - DNA, 313 bp, Gossypium hirsutum
  Clone ID: LIB3083-007-Q1-L1-A10
aggctacgaggtttgataccgcacattgaatcccagtaagacagccgatctacaaacttgaatggtgctgcttggtcttaatggtggctactgcagcattgacgttcttgggaacaacatcaccacggttcatcaaacagcgagccatgtactttccatggcttggattgcatctagccatcatagatgagggctcaaaggcactattggtgatttcagcaactgatagctgctcctggtaagcctttttatcatagatgactggggcatactatgaaagctttatttggattcttgagtagggaaccaagtt

SEQ ID NO: 265 - DNA, 304 bp, Gossypium hirsutum
  Clone ID: LIB3083-007-Q1-L1-A11
cttcttttcctccaacaggagttatgattggggtgtttaaagtaaaggagaagcagagagaacttgctgaaaatgcaaatgggggagctcctaccaaaaagcaaagtccaggagagttgcgtttgcacaaagatatttctgagcttaacttacccaaatcttgtgctataacatttccaaatggaaaggataacctgatgaattttgaggtttcaatttgacccgatgaaggatattaattctgtggcacatttttattctcctttcaagtttctaccgtctatccgcatgaagcacccaaagt

SEQ ID NO: 266 - DNA, 140 bp, Gossypium hirsutum
  Clone ID: LIB3083-007-Q1-L1-A12
attacgagcttgattatattataaaacaatcgtttttaggggggacaacataacataagtgggcgatcgttccacaaatataacctgcatatttctttacacttttgaatatattcaaatagaaggctccttgctcaaac

SEQ ID NO: 267 - DNA, 349 bp, Gossypium hirsutum
  Clone ID: LIB3083-007-Q1-L1-A3
ttattttacagctttcatttagaaatactgaaagtttttattccaaattcgattacatatattctcactaccaattaattctattacacttcacatttgatataaatatacaaattcacaattcacattactaaaaatcccagcacaaatgaaaaaacatggcctccttatttagaaccatcaaaatgaacaccatatttgatttctttttcctaggccattactatagaaagttgaaaagaattccgacaattttcctcagcttcatcttcatacccttcaccatcttcatcaaccacagcatcttgatattgttgatattcaaaaaccaaattattcatattacttt

SEQ ID NO: 268 - DNA, 369 bp, Gossypium hirsutum
  unsure (1)..(369): unsure at all n locations; Clone ID: LIB3083-007-Q1-L1-A5
gattctacagctttcagtgattgtaacggggggagatcgggggagttcccatcggcatcgtctcagaaccggcgattactactcgcctgtgctaattccgagaattcggatgatttgatacggcagctcgtatcggatctcgattcctgttcgattgacgagcaaaagcaagcggctttggagcttaggcttctggcgaagaacaagccggagaatcgaatcaagatcgctaaagctggcgcgattaggcctctgatttcgttaatttcatcctctgatccctatcttcaagaaaacggcgtgacagcgattttgaatctctctttatgcgatgagaacaaagaacttatagccttctncggagcaatt

SEQ ID NO: 269 - DNA, 350 bp, Gossypium hirsutum
  Clone ID: LIB3083-007-Q1-L1-A7
tggtattgaaagctgaaaacattttctggccggtcagcatcgactaccgagaaggaaccccgatagagatgcagaaattgggtgattttaagcttccccactttttcaattaccctccatacttcactttgcagccagtgagggagactcgcgagaagcaaatacaactttggaaggaactgattctggattactgcagaactcagaagatattcatagttaggcttgaggaagaatttcctctgttctcaaattctgtgatagaacgcacgctcagtcatgaagctagggaagcattcctctcagcgttggttgcaaaaaggcgcgcaaaatggttggataaaagacgt

SEQ ID NO: 270 - DNA, 375 bp, Gossypium hirsutum
  Clone ID: LIB3083-007-Q1-L1-A8
aattcccacgagtggttttgtagctcatcgtctaccatgggtgtgattttatgacggtgtgtggttctgaagaactagagtctaataaggatcgtttacttgatgaagctgtcgatgctttatatgaaaagaggggttctacaccggagaaggccttggctgcgattattgacgctttcaatatcaatttgcaacatggccagcagttcgcgtagaggaaatttgctacattactgcatcacagtttgaattctatcaaaaagggttccaacaaagagatttctttggcattccattccattgggtttctggccttaactggttttccaagagatcattcactgtaaatttttggaagaatcaatgattcctttt

SEQ ID NO: 271 - DNA, 271 bp, Gossypium hirsutum
  Clone ID: LIB3083-007-Q1-L1-B1
ctggcgtcaaaatggctatcattgttttatcctagatggagacttccgccggaaggtgttttacactgccgggcgggaaccccttatcatatgcatgcatcaaatatttccagagcgtgatgacttgcttaagctttgctcaaggaaaatcatcgtctccgtcgaatgagtgctgtaattcaatggcggtgattaaagagaataaacccaaatgtttgtgttatattttgcaacatacacaaacctgtggtgctcaaaatcttataagctt

SEQ ID NO: 272 - DNA, 364 bp, Gossypium hirsutum
  Clone ID: LIB3083-007-Q1-L1-B10
aggctgtcatgtcattccatcagtgtgggggcagcgtcggtgactcttgcgttattcctttgcccaaatgggttacagaggagatcgagaaggacccagacctcgcatacactgatcaatggggaagaaggaactacgaatacctttcacttggttgcgataaccttcctgtcttgaaaggccgtacgcctgttcagtgttatgctgatttcatgcgtgcctttagggacaatttcaaacaccttcttggtgataccattgtggaaatccaagtcggaatgggtccggcaagtgagcttcggtacccttcgtacccggaggcgaatgggacatggaagttccctggaattggagcctttcaatg

SEQ ID NO: 273 - DNA, 307 bp, Gossypium hirsutum
  Clone ID: LIB3083-007-Q1-L1-B11
cccaattcaactcttcagtctgcaacaaagggcgcatcggtgcaaggtctgtcaataaaggtttgattgccaacaatcctagtatcaccatctcaatgaattctccacgggacactgcaggacatgggactcatacatcatcaactgcagctggaacatatgtgggagatgcttcatactttggatatgcccagggaaatgctagaggaatggctccaggggctcgagttgccatgtataaagctctttgggatgaaggctcatatacgaccgatgtaattgctgcaattgatcaagcgattaatga

SEQ ID NO: 274 - DNA, 300 bp, Gossypium hirsutum
  Clone ID: LIB3083-007-Q1-L1-B12
cttgctttccacctccacggagttgtcgaggtggaaaagatatgcaccatgaaagtcatcggaataccgataagagtcgatgtgccgaccagcgtccgtgaataagcacgagcacctaagactttcatcggtcgggaacgggattcgtacctacacggacggaaagattcggattcaagacatcatgtctaaacctttaaaattatgcattacaagggctaccaataccaattaacatatgtcgtcttgactgggatatgacgtgtgtatgtatggatgtatatagcaattttatgggct

SEQ ID NO: 275 - DNA, 368 bp, Gossypium hirsutum
  Clone ID: LIB3083-007-Q1-L1-B2
ccgttgcttcaggggccgtcggttatatcggagtagggggcaacactcacgtcgggtggaccaaaatctgcaatgtctacgacaagttctgtcgatacacagcgagctcgcttgcactctcattgtttgctgccatccttctggtgttgctctcaatgatatcaaccttcacactttacaaaaagatccgcgactagacatatccctccatgtcccaagtttacagcttaaagaacatttgaaaatgtcaatctgtgtgtagcttaaatgtttttcttttggtctgcaaatgatatgtttttaatttgcttttgttatctgttggtcttcattgcgtatttcatgtagtaattcaattgaatgatatt

SEQ ID NO: 276 - DNA, 309 bp, Gossypium hirsutum
  Clone ID: LIB3083-007-Q1-L1-B3
ctcttcctccgatgggatgcagatcttcggtaagaccctgaccggcaagaccatcaccctcgaagtcgagagttccgacacgatcgacaacgttaaggcgaaaatccaagacaaggaagggatcccaccagaccaacaacgtctcatcttctccggaaaacagctcgaagatggccggaccttggccgattacaacattcagaaggagtccacccttcatcttgtcctccgtctacgtggtggcatgcagatcttcctcaaaaccctgacccgtaagaccataactttggaagtcgaaagctctgacac

SEQ ID NO: 277 - DNA, 364 bp, Gossypium hirsutum
  Clone ID: LIB3083-007-Q1-L1-B5
ggtttatctgatcttcccaaacttgttggggcgctgaatcgaatggccaagtgtgatcctatggttgtttgtacaattgaagagtcgggagagcacattgttgctggtgctggagagctccaccttgagatctgtcttaaggatttgcaagaagattttatgggtggtgctgaaatcgtcaagtcagacccagttgtctcattccgtgaaactgtcctagagaggtcttgcaggactgtgatgagcaagtctcccaacaagcacaaccgattatacatggaagctcgacccttggagaaagtcttgctgaagccattgatgaaagtcgtattggtccaagagatgatcccaaggttcgttcaaa

SEQ ID NO: 278 - DNA, 355 bp, Gossypium hirsutum
  Clone ID: LIB3083-007-Q1-L1-B6
tactttcaaggtggtcaatgcggcaaccggatgcgagccaagttttgggaaggtatctgcaccgaacatggaatcgactcaacgggtcgatacaacggcgactcggagcttcagctggagcgtatcaacgtttactataacgaaacaagttccagccgctttgttccccgcgccatcttaatggatctggaacccggtactatggacggcgtaagatccggcccgtttggacaaattttccgacccgataacttcgttttcgggcaatcccgtgctggaaataattgggccaagggtcattacaccgaatgagccgaacttattgattctggtctaaacgtcgtcagaaaagaag

SEQ ID NO: 279 - DNA, 351 bp, Gossypium hirsutum
  Clone ID: LIB3083-007-Q1-L1-B8
actcattactgtctggctgattatttatagtggcagcggctcgtcagcggctcgacatttattccagacacaaacaacctcatcagagctgccacaattggcttcaaaatacgaaaagcacaaagagtctgaatacaaacaaccaaaatatcacgaaaagtacccaaaacatgagaagcctaaaatgcacatggaggaaaaacaaaaaccctgcaaacatcatgaagagtaccacgagtcacgcgaatcgaaggagcacgaatagtacgattaagaaaaacccgatttccccaaatgggaaaagcctaaagagcacaagaaacacgaagttgaatatccgaaaatacccga

SEQ ID NO: 280 - DNA, 244 bp, Gossypium hirsutum
  Clone ID: LIB3083-007-Q1-L1-C1
gtttaagctactttcccttacgtatttgctgagagggagttcttacagcctggaacttttgatcttgtgggttcgattatctatgatattgatcagcaaccataccaaattacattctatgatggtaccattgaagttgttgaggctggtggtttcctcagagatgagtgcgttttccttgatacccttgggattgcacttctagctctccttggattgtggctttatggccaatttcaacgta

SEQ ID NO: 281 - DNA, 94 bp, Gossypium hirsutum
  Clone ID: LIB3083-007-Q1-L1-C10
cttgcttcagggccgtctgcacgctattgggggggcatggtgcatgggcggggggaagctgaagagactggcatatcatgctggactaaccaga

SEQ ID NO: 282 - DNA, 232 bp, Gossypium hirsutum
  Clone ID: LIB3083-007-Q1-L1-C11
ctttgatgcaacagactatattggtcattgctgggcactacacaatgaaggtcggcacttggctcacccagcttttaactttgttaaaagaacgaagctctatgcagagtctacggcactatttccaggaggatctccttatatctatccactatatggacttggagaattgccatacgcatttgcacgtctaaatgctgattatggtggtacttacatgctcaacaagctc

SEQ ID NO: 283 - DNA, 180 bp, Gossypium hirsutum
  Clone ID: LIB3083-007-Q1-L1-C2
gttttatctaccttcccttacgtatttgctgagatggagttcatacagggtgggactttagatcttgaaggttcgattatttataatattgatcagtaaccatactaaattacattctattatggtaccattgaagttgctcatagctctttgtatcctcatcgatgagtacgtcatcct

SEQ ID NO: 284 - DNA, 134 bp, Gossypium hirsutum
  Clone ID: LIB3083-007-Q1-L1-C3
catttgtctctcaaaggcttctctcatcctgagccgggtcactgcttgagctactatggtttcaaccctcaatgcttaatccccaaacccaaatcccacctcaagaacctgctccatatgcccatcattcgtct

SEQ ID NO: 285 - DNA, 370 bp, Gossypium hirsutum
  Clone ID: LIB3083-007-Q1-L1-C4
ttttcccttcctgatgccaaccacatggcagagatggctcgcttggtggctcgtggaccatactacatcgatttaatcgggcgttacaagctcagctctcaggctcgatccaaaaccgaagctgcaagagtgaaggcagcacaagaggcatacaaagaacttcaaaatgctaggctagaagctttgcagaaaaagaaagccgagaggaaaaagatgttagaggaggctgaagcaaagctcagtgcggaagcagttcgcaagaaagaagcaaaagagcgtgcacggcagatgatgaatgcaataccgaaaatgaagatgactcgtgcttaaatgtttttggatcattaatacacactctcgacgccattaa

SEQ ID NO: 286 - DNA, 349 bp, Gossypium hirsutum
  Clone ID: LIB3083-007-Q1-L1-C5
cggttcttggctcctgttcgattgatggggaagagaacgcggcttttgagcttagattgttggcgaagaacaaaccggagaatcgaatcaagatcgctaaagccggtgcgatcaaaccgttgatttcgttaatcacatcaaccgatcctaaccttcaagaaaacggcctgacggcgattttgaatctgtctttatgcgacgagaataaagaacttatagcttcatctggagcgattaagccactggttagagctttgagaacgggaacttcaacggcgaatgaaaacgcggcttgtgctctgcttcggttgtcacaagtggaagaaaagcaggttgcaatcggacggtc

SEQ ID NO: 287 - DNA, 363 bp, Gossypium hirsutum
  Clone ID: LIB3083-007-Q1-L1-C6
tcttttaccttccggttactgatctctttggccgagctttaacattggaggcacggaatgccccaaacaagctacagatgtcaccgccgacacatccaacccttcttttccaaccacttaagcacaacaatactgagaccatcgccctgactaccatacacaacccgaacaccaccgctaccgtcattcttgctgatcatgctacctttcaaccaccatagctatacacgatctcatacatatagccgctcgagcttctgctatactgtacgttctttaccgacactaccactctacttttactgattactatctcaaaatctctgcactaaacgtaacctcagcttccaagcttaacaccaa

SEQ ID NO: 288 - DNA, 362 bp, Gossypium hirsutum
  Clone ID: LIB3083-007-Q1-L1-C8
gtttatcggagtgaagaaaacaatggggtggtgcgataattcatatcacgaagctaagaaactcctcatttcacccaccgtgaaacaaccctttcacttgctagcaatcctcctcctcagcctatggcttccccttgctttcctcctcgtcgccaggctatcttatgttaactacaccttaaacgcaaccgtgttagacccttcttctacaccttcccaaccatcgtcccttttctctttctacttgtacaccaatccagctcttctttatttcctcgttgcagctattagcatcgtggctctggttcatggtttgactgggaaagtcagcttcgaacctgagtcaccgaatgcttttcatc

SEQ ID NO: 289 - DNA, 314 bp, Gossypium hirsutum
  Clone ID: LIB3083-007-Q1-L1-C9
cttgcctgctggcttccgacaagcttatgaaatgggattggtcagttcagcacaaatggtaaagttcttagcaattaatgccagaccaaccaccagtcgatttatttctcgaacactcccacaagcaatgtctcgggcatttattggcaggatgcttgcagatcctgcctttttatacaggcttcttttagaagaggttgctactattggttcttctgtttggtgggagttgaagaatcgaaaggataggattaagcaagaatgggatctagcacttatgaatgttctcacggtagcagcttgcaatgctcttg

SEQ ID NO: 290 - DNA, 368 bp, Gossypium hirsutum
  Clone ID: LIB3083-007-Q1-L1-D1
gtttatccaaatacccaaaagtcaagagtagaggaggctaatggccggaatcggacctttgactcaagattgggagcccgtcgttattcgtaaaaaagcccctaccgccgccgccaagaaggatgagaaagtcgttaacgccgtccgccgtgccggtgccgagatcgagtccatcaaaaaatcaaatgctgggacgaatagggcggcttcaagtagtacttctttgaacacaaggaagctcgatgaagacactgagaatcttgctcatgaccgagtgccaactgagctaaagaaagccatcatgcaagctcgaatggataagaaacttacccaagctcaacttgctcagatgatcaatgagaagcccc

SEQ ID NO: 291 - DNA, 304 bp, Gossypium hirsutum
  Clone ID: LIB3083-007-Q1-L1-D10
attaactggcaactattcttatgtgttgcggtgggtctctgagctggcctgattattggtttcggaactgagtactatactagcaatgcatacatacctgtacaagatgtcgctgattcctgcaagactggagctgcgactaacgttatttacgggcttgcgttgagttacaagtcttgcattattcctattcttgctattgcaatcagtatttccgttagttttagctttcctgagatgtatggcattgctgctaatgcccttggcatgctgagcaccatagctacccgggtggctattgatg

SEQ ID NO: 292 - DNA, 308 bp, Gossypium hirsutum
  Clone ID: LIB3083-007-Q1-L1-D11
ccagcttcattgctcaacaacttcagcccaggctggcggtcagtctcccgcaccacctggtccaccagacgtcaccaaaatcctgcaaaaagccggccaatactccgtcttcgttcgtcttctcaaatccacccaagtctccgaccgtctcattggcgagctcaaagacacagatgatgggaagaccatttttgcccccactgataaggctttctccgccctcaaatctggtgccttgaattcactcaacgatgaacaaagggttcagctggtgctatttcacgtcatcccaagttatatcccattat

SEQ ID NO: 293 - DNA, 308 bp, Gossypium hirsutum
  Clone ID: LIB3083-007-Q1-L1-D12
attggaacagagttagaagtgacgaaatcggggggggcaactggttttgcgcattaaacctggagttctcgtcggagaacacaaaagggctgccgttttgaaagaattcggcaccaacttgccagatttggggctaggagacagagaaaccgaccatgatttcatgtcattatgcaaggaaggatacatggtgccaagaaccaaatgcgaaccattgccaatgtacaagcttctaagccatgttatatttcatgagggccgtctaatgcaaaggccaacccctttggctgctctgctgacctttctat

SEQ ID NO: 294 - DNA, 138 bp, Gossypium hirsutum
  Clone ID: LIB3083-007-Q1-L1-D3
cccaagccaaatgggccgacacattaacactgaatatttcaaatgttgggattactaaaacccgagattccttaaaattttcaacatcaaagaacaaactcaacatcatcacatggtcttttaaggccaagttttcat

SEQ ID NO: 295 - DNA, 365 bp, Gossypium hirsutum
  Clone ID: LIB3083-007-Q1-L1-D4
cagtaaggatgctgtttacaatgtgatgaaaagacgggtggttgagttggcaagacagactttccgcccggagttcatgaaccggattgatgagtatattgttttccagcctcttgactccaaagaaatcagtaaaatagttgagttacagatggtgcggttaaaagatagactgcgacagaagaaaatctatctgcactacacaaaggaagctgttgaacttctggggacactgggatttgaccctaactttggagcaaggccagttaagagggtgatacaacaattagtggagaacgaagttgcaatgggagtgatgagaggagatttcaaggaagaagactcgatcattgttgatgtggagt

SEQ ID NO: 296 - DNA, 366 bp, Gossypium hirsutum
  Clone ID: LIB3083-007-Q1-L1-D5
agaccataaccctagaggtcgaatccagggatgctatcgacaatgttaaggccaagatccaggacaaggaaggtattccaccggaccagcagagattgatcttcgctggaaagcagctcgaagatggccgtactcttgctgactacaatattcagaaagaatcaaccttgcatctggttctgagacttcgtggtggcattatcgagccttctttgatggcattggctaggaaatacaaccaggataagatgatctgccgcaagtgttatgctcgtctgcacccccgtgccgtgaactgcaagaaaaagaagtgtggacacagcaatcagttgaagccaaagaagaagatcaagtagattacatata

SEQ ID NO: 297 - DNA, 323 bp, Gossypium hirsutum
  Clone ID: LIB3083-007-Q1-L1-D6
ccttagacgtattttccagggatgctttttaacatagaacggcggattcatagcgaaatttggataaatgctatataaaccattaaaatttctaaaaccaatgtttctataaaatgcactatctacctactgaatacgacatataatgctaccacaccaaagaatgtggtctcaggctgtgctccaacattaaaaccccatggtgcctatgctagtctcataccatcatacagatttgcccaaaggacatcacttctaaaagcctgttctataactaccaaattaccttacaactatcattcttttgctcactatgattaaac

SEQ ID NO: 298 - DNA, 342 bp, Gossypium hirsutum
  Clone ID: LIB3083-007-Q1-L1-D7
gaatgaagcagatcatttcagtaacccgggattagatcctgttttctaacaaagaagacatctcaaacctggtttgtaacatcaaacagaataaaaaacatatcattagatggatccgccattaacaactgtctcagaagagcaaaagcttgtagaattcgattgatggacaggtattctaaaaacccagagtttccctctagcagagaccaagttttgttcgcagaagaattcccaagaaaaccatttttcaatcgtccgatgaacatcgtgaacgacaacgtcagtcgtcttcttcccaatcccatcagttcttgccaacatgccggcagtgtaaatagt

SEQ ID NO: 299 - DNA, 364 bp, Gossypium hirsutum
  unsure (1)..(364): unsure at all n locations; Clone ID: LIB3083-007-Q1-L1-D8
gaatatcactcgtcctggtattaacggtacagcntttcgattttcatagagagacctcgaaacttctacgtagtgagaggaaagtttgagtacgtgcgatggctcgctcgtggagagcaagcggctctttggtggctctagctatagtcttgtccggatgcttctttgcaatctcaattgccaaggaggaagccgcgaaattgggaacagtcatcggaattgatcttggtacaacttattcttgtgttggtgtgtacaaaaacggtcatgttgaaattatagccaatgaccaaggtaaccgtattactccatcgtgggtggctttcactgacagcgagaggctcatcggtgaggctgcaaagaa

SEQ ID NO: 300 - DNA, 298 bp, Gossypium hirsutum
  Clone ID: LIB3083-007-Q1-L1-D9
gaattcattacgacgtgttccaggccttttaagtttatcaatgggtggttaaagaacgttggttgtgcccgcttgattgataaagaatgtactaatatggattgtttgaattgccaagtgctttgaaagttgagaaagcttaatggggtctagagaaagtgcattagtaatcactgtcatatgcttgaagataattttgctgattgcgaatcaaggattaatgtgtttgatgatactacgtgaacatgtacatattgtatgagtgctgaaacggaggaactaaataaattgaattccc

SEQ ID NO: 301 - DNA, 80 bp, Gossypium hirsutum
  Clone ID: LIB3083-007-Q1-L1-E1
attaaatcctgttttctaacaaataatacatctcaaactctttttttaacatcaaacagaatataaaacatatcatttta

SEQ ID NO: 302 - DNA, 373 bp, Gossypium hirsutum
  Clone ID: LIB3083-007-Q1-L1-E10
tgtacattgaacgacccacttatacgaatggtggccgccttgactctcaggggatctcatctcttaccgcatctttgaagtttgatggagccctgaatgtggatgtgactgagttccagactaacctggtcccatatcccaggatccactttatgctgtcttattatgcccctgtcatttcagctgtaaaggcttaccatgagcacctatcggtggctgagataaccgacagtgcttttgaaccctttataatgatggctcaatgggacccacgccatgggaagtacatggctcgctgtcttatgtacctaggatatgtttttcccaaagatgtgaatgctgctgtggccaccattaagaccaaccgcacaat

SEQ ID NO: 303 - DNA, 264 bp, Gossypium hirsutum
  Clone ID: LIB3083-007-Q1-L1-E11
gcgaggttgtggtgcagctgcagagaacagagtaggggcgaaaaaaagcgccggcgttactgcttcttcttctacttcgctctctctccttctgcgaagttcctctttcgatctttcatttattcaggatcgtaaaagatggccgactgtgaggatattcaacccctcggctctgatcatggaaccggaacggtcaacgctgcttttgatggtgatgatgctccaacggcagattttcccagtattgatggtggtcgccggcac

SEQ ID NO: 304 - DNA, 365 bp, Gossypium hirsutum
  Clone ID: LIB3083-007-Q1-L1-E12
ctactgcaatcggtcatgttgaccattttggtggttctcggagaggcgatgttttggggattcgaagcctaaagaacttgcaagaacttgataaaaacgtctcaaaatctcgcccccacaggaaaatagccgatgtctaggcggtcgtctctcggtttatctctctctctatctctctcccccgtcgctcgttcatggcctccttgtcaagcagaccataagtccacaagtgtcggtcacacttgcacgtgctagcaatttgtgcacaaaaattgttttgtctatcgtgtagaattaaattgcatgttaaattcttaggttgtgaagcaactagcttagcttgcgctgcgtggtggcccttgttc

SEQ ID NO: 305 - DNA, 358 bp, Gossypium hirsutum
  unsure (1)..(358): unsure at all n locations; Clone ID: LIB3083-007-Q1-L1-E2
cttcttgcccttttctctgtttctgtggtcatacgatcttcaatgtcttcaaacattttagtgttatttgtccatgaaggcaatgaagcccggagtgtcttcattgaacccatatgcagcatcatacatacctcttgccaaaagggaggccagtgataatgtgacagccaaagatattaaacacggcaatgagaatgcttggttcaaaccttcctcacactttgcatataacccgcacagtagcaatgcttttcttggctcttcagcctatggtactgaaaagcaccaggttgcagaaggttctgcagtgaaaagccatcctgctcatggttcnttgatgcataatcctggtgaaatg

SEQ ID NO: 306 - DNA, 368 bp, Gossypium hirsutum
  Clone ID: LIB3083-007-Q1-L1-E3
agattattcaattgactttattggtcatgcctgtgggctccacaatgaagatagttacttggctcagccagctttgaactttgttaagagaatgaagctctatgcagagtctttggcacgatttcaaggaggatctccttatatctatccactatatggacttggagaattgcctcaggcatttgcacgtttaagtgctgtttatggtggtacttacatgctcaacaagccagaatgtaaggtagaatttgacggtgatgggaaagtcattggagtaacttctgaaggcgaaactgctaagtgcaacaaagttgtttgcgatccatcttatttgtctgataaggttaagaaagttgggaaagttgctc

SEQ ID NO: 307 - DNA, 267 bp, Gossypium hirsutum
  Clone ID: LIB3083-007-Q1-L1-E4
ggcttttattcattcccttgttcacttcacgggggggctttttcatggccgtgtgatcttttctcttcgttatatccaagcactgttattaccactcataaaaactcagggtggttaccgtccactattcagttacgctgccaggtctgccacctacaggcttgctttacaccataacgcatctgtaacgggttcactaaccgtccggtcatcgcaccaagatgatacgatagtactgtatacatggtgtgaacttacgaggctcta

SEQ ID NO: 308 - DNA, 362 bp, Gossypium hirsutum
  Clone ID: LIB3083-007-Q1-L1-E5
tttgtaacagcgatagatcgggggagttcgcagcggcatcgtctcagaaccggcgattactactcgcctgtgctaattccgagaattcggatgatttgatacggcagctcgtatcggatctcgattcctgttcgattgacgagcaaaagcaagcggctttggagcttaggcttctggcgaagaacaagccggagaatcgaatcaagatcgctaaagctggcgcgattaggcctctgatttcgttaatttcatcctctgatccctatcttcaagaaaacggcgtgacagcgattttgaatctctctttatgcgatgagaacacagaacttatagcctcctccggagcaattaagccactggtt

SEQ ID NO: 309 - DNA, 365 bp, Gossypium hirsutum
  unsure (1)..(365): unsure at all n locations; Clone ID: LIB3083-007-Q1-L1-E6
cggtacgagcttttatagatcgttaaaaggggggtcttgaaggaaaatatttgcaattaagctgctaaaaagacaaaactcaacaaggtatatgaagaaggagtgagagcctaggtgattcaatcagaatggattcttgcaactgtattgagccgcaatggccaccagatgatctgttaatgaaatatcaatatatttccgacttcttcattgcgcttgcttatttctcaattcctttagagcttatatactttgtgaagaaatctgccgtgtttccatatagatgggtacttgtgcaatttggtgcctttatagtactctgtggtgcaacgcatcttattaactngtgggactttacaatgcat

SEQ ID NO: 310 - DNA, 367 bp, Gossypium hirsutum
  Clone ID: LIB3083-007-Q1-L1-E7
gaattcctcataattgaacttcatgcagggtgggggaataggtggtcccaaattgcggcacaattgccaggaagaaccgacaatgaaattaaaaacctatggaactcttgcttaaagaagaagcttaggcagcgaggcattgaccctgtcactcacaagcccctctcagaggttgaacatggtgaagacaagagtcaaccacgcaccaacagcaaggatatggcttcaagtgaattgaacatcaacaccaacaatcctaaacctggaacatcaccagttactccacgaggttaccaactggaaatggaaggctctcccacctacaagacagtgaacagcagcgataacaatggcaataccaccacca

SEQ ID NO: 311 - DNA, 376 bp, Gossypium hirsutum
  Clone ID: LIB3083-007-Q1-L1-E8
tgcttgtatcggcgtacgttagctctcttccatcgcttaaactctccaagcgaggacatgatctgcttcccaggctagacccttgaaactcctctccggcacccctgccacaatccgttattccatcagatcctctgacatggacccactctttgaccgaatcaacgtacgcgatcttctctccggtcacgacctctcggacccttcgacgccactattcacaccggatctccgcctcatcatcagccgcctcgaataccactctcttcatatcaaatcaaaagtccgttcttacctgctttctcaccgcgaagactttgactcactcttcttccagtgcaactatgccgatctcaagactagcgaaatctctgac

SEQ ID NO: 312 - DNA, 292 bp, Gossypium hirsutum
  Clone ID: LIB3083-007-Q1-L1-E9
tcattttcttcttgatcagctgcaacttcggtgggctgaaagttgtttttgcaaatcttttgatgatgtcttatcttttgacatttctcacactattgatctggcttttgccaacatttgaatggtggatgacctttctttccacaatgcttgctaggaaaaagaaattccgtttccctattgattttaggagaatcaaaacctgagttgtccttctagtaattcctttttcttttatcctttgtctccatggcttgattgaactcttttaccaaatcatcttacttctcgc

SEQ ID NO: 313 - DNA, 360 bp, Gossypium hirsutum
  Clone ID: LIB3083-007-Q1-L1-F1
tcttgatctctccttcattcccgtttctggttgtttgttctttttgttgagttgttagtaggtagccatgaatgctcttgctgcaaccaaccgcaatttccgactagcgtctcgtttacttgggttagactctaagcttgaaaagagtcttctgatcccttttagagaaatcaaggtggagtgcacgattcccaaggacgatggaaccttggcgacttacgttggatttaggatccaacatgataatgctcgtggcccaatgaaaggtggaatcagatatcatcctgaggtcgagcccgatgaagtaaatgctctggctcaactaatgacatggaagacggctgtagcagccattcctta

SEQ ID NO: 314 - DNA, 379 bp, Gossypium hirsutum
  Clone ID: LIB3083-007-Q1-L1-F10
ggacttctcaatctagatcttaacaataagatagtcttaaatgccgtgaaagctttttcaccattgaagattagattgggaggctcattgcaagataaggtcatatatggtacagatgacaatcaggaaccctgtacttcatttgttaaagacccttctgagatgtttggttttactaaaggatgtttacccatgaaaagatgggatgaacttaatgccttctttgcaaaagcaggggctaagattattgttggactaaatgctcttgctggtaaatctataaagcctggtggttcagctgtaggaacttggaactacaccaatgcagaatcttttatacgttacactgttgaaaagaactataaaatccatggttggg

SEQ ID NO: 315 - DNA, 312 bp, Gossypium hirsutum
  Clone ID: LIB3083-007-Q1-L1-F11
cctaatacgtcttgccagtctttcagttgcgggggatgtgtttgagataaggccgtcattgtacgtagttgaattaagaaaatcatatggcgattctacagtttatagacagttatgtacaaagctatttaatgactttggcgatcctcagggccaaggcctgttgtccacagaagcttgagtgacacacaggttgggttggctccaccaacatttaaggatctcagttagatctgtgagccttagaggggatgaatttatttaggctatatattttatggtataagtgatgttttatttttttttgaactt

SEQ ID NO: 316 - DNA, 307 bp, Gossypium hirsutum
  Clone ID: LIB3083-007-Q1-L1-F12
gtaatataagcctgaccttaacattgtctgcaaggctagctgcaccaccagctgtcttgctccattggctaaggtgatcaacgataaatatggcattgttgacggtcttatgaccactgctcattctattactgttacacaaaatactgttgatggatctttcatgactgactggaaaggtggtacagctgcttccttcaatatcattcctagcagcactggatctgtcaaagacttagtcaaagtattggcatcactgaatggcaagctgactggaatggctttgcaagttcccactgttgatgtc

SEQ ID NO: 317 - DNA, 368 bp, Gossypium hirsutum
  Clone ID: LIB3083-007-Q1-L1-F2
atctaggctactgttgtggcatgcaaggccggtggggaagctgtcaagatgatcattgatgccatagagcaagttggtggaatatatgttgtgaccgctgaccatggcaatgctgaggacatggtgaagaggaataagtccgggcaacctctttatgacaagagtggcaagctccaaatcctcacttcccacacttgtcagcctgtgcctattgcaatcggaggtccaggattggcagcaggcgttagattcaggaatgatgttccggatggcggacttgcgaatgtggctgcaactgtcatgaacctccatggttatgtagctccaaatgactatgagccaacactcattgaagtagtgagcaatta

SEQ ID NO: 318 - DNA, 370 bp, Gossypium hirsutum
  Clone ID: LIB3083-007-Q1-L1-F3
atctcgatagaaaagacctggtttcttgcatcggaggaaagcgggtgccatgaatgcccttgttcgtgtctctggggtgcttacaaatgctcctttcatgttgaacttggattgtgaccattatataaacaacagcaaggctgcaagagaagcaatgtgtttcttgatggatcctcaaattggaagaaaggtttgctatgttcaatttcctcaaagattcgatggtattgataggcacgatcgatatgccaatagaaacacagttttctttgatattaacatgaaaggtctagatggtattcaagggcctgtatatgtcggcacggggtgtgttttcagaaggcaagctctctatggctatgaacccccc

SEQ ID NO: 319 - DNA, 364 bp, Gossypium hirsutum
  unsure (1)..(364): unsure at all n locations; Clone ID: LIB3083-007-Q1-L1-F4
aaatagagcaaagttttcggttatggcgttggttgcaggaatggcaactacgtcgtcgtttgctatggtgaagcttcacagcatcccttcggtttctgccaaagggaaaactggtttgaaacttatgagcgtgaaagtgagagctggttcttttaagaccggtggtgctggtgtattggaacgacctagtttcgatcaatctcagtttgacccttcttcccaagctcttgaaggtggtgatattgggcgattgtgggataagaaaggtactggcagtggagacagttataaagttttgctggttgatgatgctcgtcattctgaaaaattagttgcanagggtttgcctcaagttgttccatct

SEQ ID NO: 320 - DNA, 363 bp, Gossypium hirsutum
  Clone ID: LIB3083-007-Q1-L1-F5
caatttcctcaaagattcgatggtattgaggggcacgatcgatatgccaatagaaacacagttttctttgatattaacatgaaaggtctagatggtattcaagggcctgtatatgtcggcacggggtgtgttttcagaaggcaagctctctatggctatgaaccccccaaggggcctaagcgcccaaagatggtaagttgtggttgctgcccttgttttggacgccgcaagaaggacaagaagtatcccaagaatggtggaaatgaaaacgggccaagcctagaagtggaggatgataaggagttactgatgtcccagatgaactttgaaaagaaattcggacagtcagccatttttgtaact

SEQ ID NO: 321 - DNA, 365 bp, Gossypium hirsutum
  Clone ID: LIB3083-007-Q1-L1-F6
ctttaaccaacaaaaaaaaaattgaaggggggacactctaacaatggctaccgaaacagtagagtctttgcctcctacattggaagctaatgctgagcaacctgcattgtttgatggaactaccaggttgtatacttcttatccttgcccttttgcacaacgtgtgtggatcaccaggaattataagggattgcaagatgagattaaacttgttcctttgaaccttcaaaatagacctgcttggtacaaggaaaaagtttaccctgtaaacaaggtgccatccttggaacataatggcaaaatcattggggagagtcttgatctgattaaatatgttgatagcaactttgaaggaccttctcttg

SEQ ID NO: 322 - DNA, 367 bp, Gossypium hirsutum
  Clone ID: LIB3083-007-Q1-L1-F7
catttctgcctagaggacgtgacaagattgtggggaacattgagcagagaattgcagattttaccttcatacctgtagagcacggggaaggacttcaagttctccactatgaagtaggccaaaaatatgagcctcactttgactacttcatggacgagttcaatactaagaatgggggccaacgcatagctacagtccttatgtacctctcagatgttgaagaagggggagagacggtgtttccttctgcaaaggggaacattagtgccgtgccatggtggaatgaattatctgaatgcggaaaaggggggctttctgtcaaaccaaagatgggtgatgcattacttttctggagcatgaagcctga

SEQ ID NO: 323 - DNA, 366 bp, Gossypium hirsutum
  Clone ID: LIB3083-007-Q1-L1-F8
ggtttatcctgtaactgaaatgatttccggtggggacttgattgaagaacaagttcgtgtagctatgggggaaaaactgcgctacaaacaggaagatattgtgctcagagggcattccattgaatgtcgtatcaatgcagaagatgcatttaaagggttcagacccggaccatggagaataacatcgtacttgccatctggaggcccatttgttcgaatggatagccatgtttattctgattatgtagttcctgcaagctatgattcattacttggaaagcttattgcatgggctccaacaagggaaaaagcaattgagcgcatgaaaagggctcttgatgacactgtaattacaggggttcctac

SEQ ID NO: 324 - DNA, 314 bp, Gossypium hirsutum
  Clone ID: LIB3083-007-Q1-L1-F9
atttgtagctgaaccaactgttttacagctgagggctcctattaagatttttggtgatctacatggacagtttggagatcttatgcgcctttttgatgaatatgggtcaccttctacagctggagacatcgcatatatagattatctcttcttaggagattatgtggaccggggccagcacagcttggaaaccattagtcttctgcttgctttgaagattgagtatcccaataatggacatttaattagggggaatcatgaggctgcagatatcaatgcactttttggctttcggattgagtgtatcgagcgca

SEQ ID NO: 325 - DNA, 368 bp, Gossypium hirsutum
  Clone ID: LIB3083-007-Q1-L1-G1
caattaatctccacttagttcatcgagtatatgatcgaggcatggtattggatgacgatacttaatcgtgattttgttcacggcgcgacagattacgcacattcgccaagtcccatcctttttcggcaccaacaagactggaatagtgcacagactaaggctctcgcgaatgaatcccttttcaaggagttcgttcacttgtttttccagctccttgatctccttgggattgctacgataagccggtcggtttggtatagacgcgccagaaatgaagtcgatttgatgttctattccctgaataagtggtaagccactcggaacttcgtcgggaaatacatcttcgaattcctacaagagagagacaa

SEQ ID NO: 326 - DNA, 359 bp, Gossypium hirsutum
  Clone ID: LIB3083-007-Q1-L1-G10
gttttcgctagggcttctggtgattacgcgtgttgttattagtcacaaccctgataacgacaccaccaggatcaagcttccatctggttcgaagaagattgttccaagtggttgtcgtgccatgattgggcaggttgctggaggtggtaggactgagaaacctctgcttaaggctggtaatgctttccacaagtatagagtgaagaggaactgctggcctaaggttcgtggtgtggctatgaacccagttgagcatccccacggaggtggtaaccatcaacacattggtcatgctagtacagttagacgtgatgctccacctggacaaaaggttggtcttattgctgcaaggaggactg

SEQ ID NO: 327 - DNA, 281 bp, Gossypium hirsutum
  Clone ID: LIB3083-007-Q1-L1-G11
tctacacggccgattcctgacaacatcaggggtgttacgagggaagatgagcacgaaagaggttgatgagccgatgatcaatgtgcataacaagaactcatcttactttgttgaatggatcccgaacaatgtgaagtccactgtttgtgacatccctacaattgtgttaaagattgcatccacatttattgggaactctacttcaatccactagatgtccaagagggtgagtgaacaattcactgccatgttccgtacgaaagctttcttgcatcggtata

SEQ ID NO: 328 - DNA, 306 bp, Gossypium hirsutum
  Clone ID: LIB3083-007-Q1-L1-G12
aattcgggaactcgtattccaaacaggtacgttcaactgaaagaatagattttagaaatctaatcattaagagcaaaatcttaggattcccaaagtactggctttacaataagtggacatataactgtacgggcttacaactttgatctagtatgactatgtggcaccgtgatatgcttatgcttggtgcgcgtgcatgcatatacgatttgtgttctcttttcatgttgggtgattgtgctttggctgctcgatactaggaacgttagagattgaattggaaagataatttttgggaagaaaaat

SEQ ID NO: 329 - DNA, 367 bp, Gossypium hirsutum
  Clone ID: LIB3083-007-Q1-L1-G2
ggatcctatgacataacctgtaaaggcaagaggggggtatcccctggttttgatggtactgtaacagattcaaggagtagtgggatgagtacaagtatgagcatgagcatcggtggtcgcagcctcgctagtgaagactccgacgggttaacacccagtgctgttttctcacagataatgaaccctaaagggcgttaaagcgacgcaaatggccagaactgagtagccaacagatcaaaaccagtaagccaataacgcttgctgttattattttgtgacatcattggaatcaaaatttgtttcactttggttgtattcatttttcttttatctaatatagcgtacatttattaccccttttcactgg

SEQ ID NO: 330 - DNA, 369 bp, Gossypium hirsutum
  Clone ID: LIB3083-007-Q1-L1-G4
gcttgttataaatgccattcagccacttgacggagggtggcggtgttaccggatgattggaggtgtccttgtcgagagaaccatcaaagaggttctccctgctgtgcaacgaatcaaagaagggctcgaggaagtaactgctcgtcttaacgagaccctggagaagaaaaagaaggaaattgctgatttcgagacaaaatacaaaattaggatcaaaaagtccgatgatgactcgaaagatgaaagcaacaagaaggaaggctccgctcaaggagtccttgtctgccctgcaagttcgagtcagtaatatgtatattccattctatttccttccttatatgcttgaacttgcttctgataaaccctaaa

SEQ ID NO: 331 - DNA, 354 bp, Gossypium hirsutum
  Clone ID: LIB3083-007-Q1-L1-G6
aaacaaaacagtgccatttataattaatagtggaagagtataatgatcaagcaatgttaaattaacaatacatgcaatatcattaaagtaaaatacataacataacataaatcaagccaagtgatgttaacattagatacaacatttaaaattaatttcactacaacatacactataacataaactataaccatttagaatttctatgtatgcaaagagattcaccattagtgcatggaggaatgcacacacacatttcccaatcaccatcttttttattaactatatattacgatataccatgaaattactgcatgatgatggcacatgcaccagtgtcatatgattcaaggc

SEQ ID NO: 332 - DNA, 367 bp, Gossypium hirsutum
  Clone ID: LIB3083-007-Q1-L1-G8
cttttcgggaaccaaccaaccaagaaacacgattttttccacttggcaggtggtctccaattccttcactttttctatcaaaccatccaatcatccttctttttcgatctccccatttttgggttattattttttttcataatatttttggtcgtttgtttttgtcatccggagaaggaaaataaatgagaacaggaaagcaaagtcaagaggaggaagagtacgaggaagaagagtttggttccaaaaaaacaaggcccatcttctaatcaaattatgtccggaaacgccattaacaactccaacaaaggtgggaagaacagtgataaggctaacgctataagatcgaaacactcggttaccgagc

SEQ ID NO: 333 - DNA, 231 bp, Gossypium hirsutum
  Clone ID: LIB3083-007-Q1-L1-G9
cctgtttctcttctctatcattctcattcggacgcactctatgatggtaagctcgactcccattcaaattcttgtctggatttgcgttgccatgtctgtatgcgcctctgcagcacccattaacatcatggtaagagtttttcgcacttatagcgattagttcatgcctcgcaccttatcatttgttctcacattgagtgcacaactctcgtttgcttatgcactatttat

SEQ ID NO: 334 - DNA, 303 bp, Gossypium hirsutum
  Clone ID: LIB3083-007-Q1-L1-H10
ctagtttacgtctactggtcctccaaacaggctgctgcaggttgctgttaaaaatagtcagcaaccagtctggtacttcaatgacaaaatcttgttgcacgtgttctttaccgaggatgggagaatggagcgaactagttttcttgagacatggaagtcactacccgattcaaatgaggtcttgaaagaattcccaggcatcatggtgactagtgctgaagcaacccttgatcgactagctgcatcaaacatgttctttatagcgaagcgcacacatgccaatcaagatgtattctacttctc

SEQ ID NO: 335 - DNA, 341 bp, Gossypium hirsutum
  Clone ID: LIB3083-007-Q1-L1-H11
tggcgataccccaacttttatttctattttgctgttcccttctctggctcatatctttttccgccgccgattcctccatcatagacgacttacgtctagccggttccagtttcccgtcggttcatgcaaagaagctgattagggagttgaatttgtttcctaaaggggaagtcaatgtcgttgacgaacatcgggtttcgttgccggagggtcccaaactggtggagaagcggttcaagttcccaactttggaagtgcccggtggagtttccgttgaggatttgggtcactatgctgggtattacaagcttcctaactcttatgatgcccgaatgttctac

SEQ ID NO: 336 - DNA, 342 bp, Gossypium hirsutum
  Clone ID: LIB3083-007-Q1-L1-H12
atcagttttttctattttaaatagggattggtggtgcgtgtgtggtttttgagaggatccatggctgcaccaccggcaagagctcgggctgattatgattacctcattaagcttcttttgattggcgatagtggcgtggggaagagttgtctgcttttacgtttatctgatggttcctttactactagtttcataacaactatcggcattgattttaagataagaaccattgagcttgatggtaagagggtcaaattgcaaatctgggatacagctggtcaagagcgatttcgaactattacaacagcttactaccgtggatcccatgggaatttgctggtt

SEQ ID NO: 337 - DNA, 238 bp, Gossypium hirsutum
  Clone ID: LIB3083-007-Q1-L1-H2
caatctacagccagctgaaccaaccggctgcattaattcatcacgaacttttttttcttttaccaatcctccaaattggctgttttcattaaatcgttgactcaaacatttacccaccccatcattatccaccacatccaatccacacacaccaacttactaactaccaacacacaaacatttaccttcataaaccaatttactcacatattaaccaataccacacacacacactcta

SEQ ID NO: 338 - DNA, 370 bp, Gossypium hirsutum
  Clone ID: LIB3083-007-Q1-L1-H4
gaagaaacctgagaaaggcatagtaccctggggggggtaaaatgcctgaatggccgaagtccatgtttactcagtctggctcgagcactaagccttaagccatatgacactggtgcatgtgccatcatcatgcagtaatttcatgggatattgtaattatattgttaataaaaaagatggtgagtgggaaatgtgtgtgtgcattcatccatgtagcaatgctgaatctctttgcatgcatagagattctgaatggttatagtttatgttatatcgtttgttctagcgaaattaattttgaatgttgtatgtaatgttaacatcacttggctagatttatgtgttaatgaagtctatgtagtgtatttta

SEQ ID NO: 339 - DNA, 385 bp, Gossypium hirsutum
  unsure (1)..(385): unsure at all n locations; Clone ID: LIB3083-007-Q1-L1-H6
cgagactcataatcagtggcgatcctcatggctcaagagggagagcantgatttcaatggtcttgaactcgttgacctgacaaggactatgagataaccaggcccaacanccgaaagaaagtcttataagagacaaccttatacattttctgtttgccagtgatggtacttacagtttaactcttacttggttcttctatctcatctccaaggcacccgtggttgaaaacaagatcagagaagaaataaagagacacttatcaatgaaacaagtggagggaagcttgcaaataccatccaactacgacgagttgagtaagctaacatatcttcatgcagcgttgtgcgaaaccctaaggctatatccaccgattccgttcgattt

SEQ ID NO: 340 - DNA, 367 bp, Gossypium hirsutum
  Clone ID: LIB3083-007-Q1-L1-H8
ctcttgccgtttggcttttatagaactggcggacaattatcatgtggtgggtaaagcttcaaatactggagagtttgcagctcttatattattacatcactaacatgaatgcgagagcaaataaatacagagagcaacatatgaataaacaaaccttcatttcacacttcatagtggcattttctgaaacacaacatataaaaaccaaaatcattttcaccagccatgactgccaataggcaacctccaatcttctccaccgtggccaccagcggtatccgggctacatccacctagacgcctagacggtatgcgagcaccgttactcttatggccagggctccttggtgcctggtagactgttgtt

SEQ ID NO: 341 - DNA, 322 bp, Gossypium hirsutum
  Clone ID: LIB3083-007-Q1-L1-H9
gcaaattaacgcctttttcttctgtttgcggaggtctctcccccaacatcaccatggcagatagggtataccccaaacaagcgacaaatggcaccgccgccacatccaacccttcttttccggccactaaagcacaacaatacggagccacccgccctgtctaccgtccacaacccgaacgccaccgctaccgccgctcttgctgttcttgctgcctttggaccaccatagctatcctcggtctcatcctcatagccgccgtagcttctgctatattgtacgttctttaccgcccttaccgtcctactttcactggttcctt

SEQ ID NO: 342 - DNA, 315 bp, Gossypium hirsutum
  Clone ID: LIB3083-008-Q1-L1-A10
aaaacacagaaacaaaaccgaagaactaagagaaaaatggcgtctttggctcaacaattcacaggtctaagatgtccaccactctcctcatctcggttttctgtgaaaccaaagcaaacccagaaagtgggcgcttttgcttctcctatagtttcagccgtcgctgtctcaaatgcacagaccaaagataggcttgaactcaagaagatgttcgaggatgcttacgaacgctgtcgaactgctcctatggaaggcgtggcttttactgatgaggattttcaaaatgctcttgagaaatatgactttgattctgag

SEQ ID NO: 343 - DNA, 369 bp, Gossypium hirsutum
  Clone ID: LIB3083-008-Q1-L1-A11
cgaatttgcaattttaaagggggaactcctgagcaagtcgaggcgtacttttccatattggtatgtgttcttccgaatgaccaacgaagatcgtggtgcaaccaggaactagaaatagttaaggtggttgccgatcaggtggccgctgcaatctctcatgccgcagttctcgaagaatctcaactcatgagggataaactagccgagcaaaatcgggcgttgcagctttcaagacagaatgctatgagagcaagccatgctagaaatgcatttcaaaaggtaatgagtgatggaatgaggaggcctatgcattcaattttaggcttgcttttaaacgttgcaggatggaaacttgaatgacgatcaacg

SEQ ID NO: 344 - DNA, 345 bp, Gossypium hirsutum
  Clone ID: LIB3083-008-Q1-L1-A12
ggaaagcagaaacggcttccacaaaagttggtaatttatgtaaaaaggatcctccaacaaaggccctaaaatctgttaaaaattcccaaaaggtacaaaagagtcctcagccagctacaatgaaggaaacagtaaaagaaaccacaaaagcttcaagtgcaaagaggatctcatctagaacatccccattgcctgctactcgtaagtcatggccttcaacgccatcaccaagaacaagaggaacatcaccagctaaaatttctgctggaatctcttcttctggcactgtgccaacaagtcggaaacctcagtcagcacaattagtacctcgactgagtcctaaag

SEQ ID NO: 345 - DNA, 323 bp, Gossypium hirsutum
  Clone ID: LIB3083-008-Q1-L1-A9
aggaggtgaagtttgcatgtggggcgagagagctgatacatcagatgttcagcaaacaatatggcctcgagctgctgctgcagcagagcgattatggagcaaaagggaggctgtatctgcacgaaacattaccttagccatattaccccggcttcattacttcagatgcctattgaataggcgcggggttcaagctgctcccgtcacaaacaaatacgctcgacaacctccatttgttgccggatcatgctacgagcaatagttcctcagttcattactagtcggattgctccagacctgcctgtatctgctccttggatatg

SEQ ID NO: 346 - DNA, 375 bp, Gossypium hirsutum
  unsure (1)..(375): unsure at all n locations; Clone ID: LIB3083-008-Q1-L1-B10
ctgtttatgtgggaacaggttgtgttttcgataggcaagcactttatggctatggtccaccttcaatgccaagttttcccaagtcatcctcctcatcttgctcgtgttgctgccccggcaagaaggaacctaaagatccatcagagctttatagggatgcaaaacgggaagaacttgatgctgccatctttaaccttagggaaattgacaattatgatgagtatgaaagatcaatgttgatctctcaaacaagctttgagaaaacttttggcttatcttcagtcttcattgaatctacactaatggagaatggaggagtggctgaatctgccaacccttncacactaatcaaagaagcaattcatgtcatcggct

SEQ ID NO: 347 - DNA, 317 bp, Gossypium hirsutum
  Clone ID: LIB3083-008-Q1-L1-B11
gtggttccgattgtgcttctgttggttctgttcgcgttagcgaatgccaagaaatcagctgatgtgaccgagctgcagatcggcgtcaaatataagcctgcatcatgtgaattccaggctcataaaggtgatagagtaaaagtgcactatcgggggaaactcactgatggaaaggttttcgattccagttttgaaagaggtgatcccattgagtttgagcttggtagtggacaagtaatcaaaggatgggaccaaggattgctggggatgtgcgttggtgagaagcgcaaattgaaaatacctgctaagcttggata

SEQ ID NO: 348 - DNA, 302 bp, Gossypium hirsutum
  Clone ID: LIB3083-008-Q1-L1-B12
ttatgacggaagctgataaccacgaccgagctccgatatggacagtgaactctcttgcgatcgcttcagttatcagacttacggatgcattctacgataaatcactttagatcacctgcataaggagccggaactctatcgagttgacgcgcaaaggatgaagatgctaatgcaggaaggagctgaaggtaatcaccaaactttaattaatggcggctatgcgtagcatgctatcatagaggaactatcttgtatctataagcatctaaaatctctgatatactgatatcccgatcctgaca

SEQ ID NO: 349 - DNA, 345 bp, Gossypium hirsutum
  Clone ID: LIB3083-008-Q1-L1-B9
attgaaagagcctccattgattactgccagtactgtgctttccatcgttgccttggactacccggtggataaggtctcttgttatatatctgatgatggtgcggccatgctgacatttgaatctctagtagaaacagccgactttgcaagaaagtgggttccattctgcaaaaaattttccattgaaccccgggcacctgagttttacttctcacagaagattgattacttgaaagataaagtgcagccctcttttgtaaaagaacgtagagctatgaaaagagattatgaagagtacaaaattcgaatcaatgctttagttgcaaaggctcagaaaacacctga

SEQ ID NO: 350 - DNA, 371 bp, Gossypium hirsutum
  Clone ID: LIB3083-008-Q1-L1-C10
tccattctttcctgctccaactccaccaaggggtggtacatgcgatttctggaggagtcaccccacactgatatggggtctgcttggttggtggggcactgtaggcaacgcatttggcgtgaccaacgctcctggacttggaacaagcatgagcttgccccaagcactttcaaacacacgtactgatggacttggggcgctttaccgggaaggaacagcctcatttctcaactccatggtgaataataggttcccattctcgactaagcaagtcagggagacttttgttgcagcacttggttcaaacagcgcttgcacagctcaagctcgtctcttcaagcttgccaatgaaggccacctcaagccaagga

SEQ ID NO: 351 - DNA, 333 bp, Gossypium hirsutum
  Clone ID: LIB3083-008-Q1-L1-C11
aaaggagttagctgctcgaatgggattagggaaatcggactctgaagttgaccccacagagtttggtgctgctgctgatggtgatgctgatcgtaacatgatactgggaaaaaggttctttgtcactgcatcagattcagttgccatcattgctgccaatgctgctaatgcaattacttactctgattgtggtttgaagggagttgccaggagtatgcctacttcagctgcccttgatgttgatgccaagaacttgaacttaaaatttattgaggtacccaccggctggaaattttttggcaacttaatggatgctggattatgttcgaattg

SEQ ID NO: 352 - DNA, 340 bp, Gossypium hirsutum
  unsure (1)..(340): unsure at all n locations; Clone ID: LIB3083-008-Q1-L1-C12
gtttaagcagagaggttgcgcaggataaaggctcttcaccattgtttcaacatgaaggtttgtaataaaaatttgtttctatcagcattgctttgcattgctattgcaggagttttgggtcaagctcctagtaatcctcctacgtctacgccggcgccacccacaccaccggcttctactcctcctccgacgactcaaccaccgcctacaccaaccgccactccgccaccggtttctactcctcctcccacttcatcaccgcccccagtgacagcttctccacccccagtttcaactcctncacccagttctccttctcccgcaactccaccacctgctt

SEQ ID NO: 353 - DNA, 374 bp, Gossypium hirsutum
  Clone ID: LIB3083-008-Q1-L1-C9
gggtcgccaatcgaagactcgcaacggatggacaaaatcgaagcacgtttaaggaatgttttgaaaggagataacgatattcgtagtgcaaaaaccacggtttctatggccgtaactcatactgaaagaaggttgcatcaaatgatgtttgcagatcgtgattacgaacggaaaccgattttggaacatacgtcggagttgccggctgtcactttgcaaaattgggtggaaaggggctattctgtggtgaatgttcaatgcaaggaccgaactaaactcctgtttgatgttgtttgcacattgacagatatgcaatatgttgtgtttcatgccactatcaaaacatcaaggcgataaacctatttggaaattta

SEQ ID NO: 354 - DNA, 339 bp, Gossypium hirsutum
  Clone ID: LIB3083-008-Q1-L1-D10
gaaggtttagttttacaaacatggctggtgccggtgtccttaagttggtttccatgattctcatcgtgtgcatggcggtgatgggtgcacccaaggctgccaaagccgccatcacgtgcagcgacgtggtgagccacttgatcccgtgcttgtcctacgtacaaaacggcggtacacccgctgctgcatgctgcagtggggtaaaaacactctacggccaggctcagacctccacggaccgccaagacgtgtgcaagtgcatcaaatcggcggtgaacggaatgccttacaccggctataacctcaatctcgcagccgggctacctgctaaatgtggtc

SEQ ID NO: 355 - DNA, 91 bp, Gossypium hirsutum
  Clone ID: LIB3083-008-Q1-L1-D11
catcgttagccaccgaaatggtacgcggtggtctccgaaggttacgttttaaccattatagcaatcaactacatggcaatggcgaatctaa

SEQ ID NO: 356 - DNA, 358 bp, Gossypium hirsutum
  Clone ID: LIB3083-008-Q1-L1-D12
gcacgagcgagttttttttgcacttttttttttccaggaggattgcaccaaatttgagagttcaagaggcagtaacacttaagtaagtcaacaacatcgatgacaactatcttgagtataaatgtaaatgtagtttcaagtttcagctcaggctagcaacgaaatatccaacacaataatgtttatatagtgactaacccgaatttctcaagcacattgtcgaaaaaaatctagaaggactgggaagcaagttttttcatcctcaaatatccataggggccacgccttcgccagcagcagcaccctgctcaggttcgggctcggctgaagcctactgtactgaatcaacatcaggttc

SEQ ID NO: 357 - DNA, 360 bp, Gossypium hirsutum
  Clone ID: LIB3083-008-Q1-L1-D9
tgaagaattatataatagggttctatgttggttttattattttaaataacaataataaaagaaaatattggcagatcgaatcgaattggaagttggaacctcctccttcttcttcatctttttgtccatctctctattcacagatcatcgaagaaaaaagatgttgaaattcctgaaaggagtggtaggcggatctggagcagggctcaaggatctaccttacaacattggagatccttacccttctgcttggggctcttggtctcactttcgcggcacctccaaggacgatggatctccggtttctatattttctctttccggaagtaatccgcaagacggccatttagctgctggtcg

SEQ ID NO: 358 - DNA, 353 bp, Gossypium hirsutum
  Clone ID: LIB3083-008-Q1-L1-E10
acgccactggcctgcatataaagcatgtggaaattgtggtgtctgtagttatgccggaacatttaatgagaagaaatgtggaactaattgtggagaggcctctcaaagatggtaccatgttcctcgttcatggctcaacccaacagggaatttgttggttgtgtttgaggaatggggtggagatccgaatggaattactttggtacgccgagaaactgacagtgtctgtgctgatatctacgagtggcaacctaacctaatgaattacctgatgaaagcctctggtaaagtcaacaaacccctaaggccaaaagtgcatttagagtgcgatgctgggcaaaaatctcagcagt

SEQ ID NO: 359 - DNA, 321 bp, Gossypium hirsutum
  Clone ID: LIB3083-008-Q1-L1-E11
aatggagccactaatactaatcaaaatggggaaaaaccaaccccggaccagcttgttcgagttgactcagaatgtctatcttccattgtcacaaacctagataaaaacgatccaaaaagtgccaaaaccattgaaacccatcacagcttgcatcaccatcaccatcatcatcaacaacaaagctttgcaacttatggtgccatggaattggacttatcttcctacaatcatcatcaagcagcagcatctaacggtggacgtgtgtcattgacgttagggttacaacaacatggtgggaataatggggtgagcttagcattc

SEQ ID NO: 360 - DNA, 360 bp, Gossypium hirsutum
  Clone ID: LIB3083-008-Q1-L1-E12
gttatttcccataccttgctcctcttgctagtccacctctcttcctcctccgccgctactcaccaccaccaccaccaccaccaccaccaccgttcactgtctccaaacccaaagctccaacaagcttacacagctctccaggctttcaaaaaagtcatctactccgacccaaacaatatcaccacaaactgggttggccccgacgtatgcaaatacacaggcgtgtactgtgcaccacaccctcacgacaaaaccatcaaagtcgtcgccggtattgacctaaacggagacgacatcgccggttaccttcccgatgaactcggtcttctcaccgatcttgctcttatccaccttaacagc

SEQ ID NO: 361 - DNA, 319 bp, Gossypium hirsutum
  Clone ID: LIB3083-008-Q1-L1-E9
gttgtggtgcagctgcagagaagagagtagaggggaaaaaaagcgtcggcgtttttgcttcttcttctacttcgctctctctccttctccgaagttcctctttcgttctttcatttattcagtattgtaaaagatggccgacggtgaggatattcaacccctcgtctgtgataatggaactggaatggtgaaggctggttttgctggtgatgatgctccaagggcagtttttcccagtattgttggtcgtccccggcacactggtgttatggttgggatgggtcagaaggatgcctatgtaggagatgaagcacactct

SEQ ID NO: 362 - DNA, 371 bp, Gossypium hirsutum
  Clone ID: LIB3083-008-Q1-L1-F10
tttgtcttgattcttattctcaggtgggagattcaaatggcggatattagcaatggttccaaagggtttgcagtgaaacaaggagaaccaactagggtccttcctgcagaagagacaaagaagggtctttattacctgggaaaccttgaccaaaacattgcagtcataattcgaaccatttacttctttcagtcagagtctaaagggaatgaagatgctgccgaacaagttaaaaatggtttgtcaaagattcttgttcatcattatccacttgctgggcgactaaccatcagctccgaagggaagctcatagtggactggcaccgggagggggctgtttttgtggatgctgaagctaattgtgggattga

SEQ ID NO: 363 - DNA, 270 bp, Gossypium hirsutum
  Clone ID: LIB3083-008-Q1-L1-F11
gtttcgagtatggttattattttgtgaggaatgcatataacatgtttgatggcagacgccaaaaattttatatttaaacccacacacccatttaacatgaaaaagcttaacataccttaaaccatttcaaatctttaacaagatctagatcatcttatcttagcgtaacacagtagccatttgcaatcaaacacctcatacgaaacctcaataacatgtgcttattctgactaatgatattaaacctcatcaccctgagacgacttatct

SEQ ID NO: 364 - DNA, 376 bp, Gossypium hirsutum
  Clone ID: LIB3083-008-Q1-L1-F12
ggaagatttgatagaaaaagctggaggctgtgctgtgatggatgggggttttgctactcagcttgagagtcatggtgcttccattaatgacccactttggagcgctctttgcttgatcaaagaccctcaccttatcaagcaggttcatcttgagtatttggaggctggtgcagatatcttggttacttcatcttaccaggctaccattcctggattcctttcccggggactatcccttgaagaaggggagtcattactaaagaagagtgtcaaattggcagtggaagcccgtgataagttttgggatcgtgtcggatgtgttcctgggaatagctacaaccgagctttggtagcagcctcaattggaagttatgga

SEQ ID NO: 365 - DNA, 368 bp, Gossypium hirsutum
  Clone ID: LIB3083-008-Q1-L1-F9
gaagttttgaacctttataaggccccgctgtgtgtagggggttgggatgaagcacttcatgaaatatgcaggttgtcacatgaaacaatcctttcaccacagaatgcgacatcgcttttaaatgctgttgaagagatgccggtattggtcattgctggtgctgaagattcccatatttctcttaaatcttctcaggccatggcttcaaaacttgtaaattctaggctggttgcaatatccgggtgcggccatcttccgcatgaggaatgccccaaggcattacttgcagctatttcacctttcataagcagattgctaatccaaaccagaattgcaaagagtcagtaggacacctttttaacttacgt

SEQ ID NO: 366 - DNA, 335 bp, Gossypium hirsutum
  unsure (1)..(335): unsure at all n locations; Clone ID: LIB3083-008-Q1-L1-G10
cttcctgtatgtcactgtgttgaccgtgagtggttacaaggtccaaaccgaccctgctaagaacactgttgaccccgattgcggtggcgttggtattcttggtattgcttgggctttcggtggcatgatctttattcttgtttactgcaccgctggtatctctggagggcatatcaacccggctgtgacattcggtttgtttgtgggacgcaaggtgtcactcatccgagccctgatgtacatggtggctcagtgcttgggtgccatatgtgggtgtggattggtcaaggctttccagaagacctactacaacaactacngnggtggtgcgaacg

SEQ ID NO: 367 - DNA, 310 bp, Gossypium hirsutum
  Clone ID: LIB3083-008-Q1-L1-G11
gcatgccctttgtgacacactgaaacaaataaacaagggtcaatattcacagaaaattaaagaaaaagaaaacttgaaaacgaactaaatgtgttgtctaaccctcacaaacaggtgcatttagcgttgaaagagattaagactacacaaaggcactcaatacataggttctatagataacaaatcacatatacccgaaactacgggattatcatcattaagactgataaaagtcttatggcataactctggaaatcccgagtttgccgtttcgaaacctataaacatttcacttaagtaaagacatact

SEQ ID NO: 368 - DNA, 372 bp, Gossypium hirsutum
  unsure (1)..(372): unsure at all n locations; Clone ID: LIB3083-008-Q1-L1-G12
tggagatcaatcataattttcactctgttggcctttcttttcttccctatttcagcgacgacgataacactctacaacaaatgctcacatccagtttggccagggattcaacccagcgccggcaagccaattttagcccgcggtggattcaaactcccaccaaacaaagcctactccatgaatctacctccgttatggtccggtcggttctggggtcgacacggttgttcctttgacgcctcgggtcacggccgttgcgcgacaggtgactgcggcggttccttattctgcaacgggctcggcggaaccncacccgctacgttagcggaaatcaccctcggccaacaacaagatttctacgacgtcagtttg

SEQ ID NO: 369 - DNA, 364 bp, Gossypium hirsutum
  Clone ID: LIB3083-008-Q1-L1-G9
cccaaattggaaaagcctaaagagcacgaggaacacgaagtcgaatatccggaaatacccgagtacaaggaaaagcaagatgagggtaaggaacataaacatgaggagtgccacgagtcacacgaatcgaaggagcacgaagagtacgagaaagaaaaacccaatttccccaaaggggaaaagcccaaagagcacgagaaacatgaagtcgaatatccgaaaatacccgagtacaaggaaaaacaagatgagggcaaggaacataaacatgatgagtgccacgagtcacacgaatcgaaggagcacgaagagtacgagaaagaaaaacccaatttccccaaaggggaaaagcctaaagagcatg

SEQ ID NO: 370 - DNA, 373 bp, Gossypium hirsutum
  Clone ID: LIB3083-008-Q1-L1-H10
cttagatagtgaacctgatgtagttgatggagtgggtgctgaaacagggcatgtgattagaacaaccattggtggccgaaatggtcattcaaagcagaatgtcagttatattgctgagcacgtggttggaactggttcttttggtgttgttttccaagcaaaatgtcgtgaaactggagaaattgttgccatcaagaaggttctacaagacaagcgttacaagaacagggagttacagattatgcaaatgctggaccatccaaatatagtttcccttaagcattattttttctcaaaaacagacaaggaggaactctacctcaatcttgttcttgagtatgttcctgagactgttaatcgcacagcaagaagc

SEQ ID NO: 371 - DNA, 332 bp, Gossypium hirsutum
  Clone ID: LIB3083-008-Q1-L1-H11
gtataaataaagggattggggaagagagcagtgagacggataagagtgaaggtgagatagagaatgcaggtagctcggatgatcgggttcgtgatggaattgatgggaataatgaagaagcgagagaagaacattacaagggggatgatgcttcaagtgaagtagtccatgatacccaaaatgagacgagtggttcagaaaatttcaacgacgctgagcagttggaaaacaaagataagaatgaccgggaggacgaaacaaatagcagtgaagcggtcaatgtcggtcatgaagagtcgaatgtgcaagaaaatggaacagctgaaaacaat

SEQ ID NO: 372 - DNA, 366 bp, Gossypium hirsutum
  Clone ID: LIB3083-008-Q1-L1-H12
cattcaaaccagatttattagacaaaaattagaacaattacaacaacttacacaacattgtaaaaagtatatattggattcaacttagagtatttaatacaatataacacttaagattatataagtataaatatggtaacacttcttaattaccactttaaccctgcaaattccttaactccatctcttcttaatcctaaccattaaccccttcttcatctgataaaccacactgtttttgggaccaatattctgcccttccaccacatgaacgttgtagttatgaatgatggctgttgcggtagccttcatcaagagaaacgacacctctttccctggacaaaatcctgggccccgcaaggaatg

SEQ ID NO: 373 - DNA, 342 bp, Gossypium hirsutum
  Clone ID: LIB3083-008-Q1-L1-H9
atttcctccaaaaacggactatctgaagaagctacactgaagattttgaatcaggttgagtactattttggcgatttgaacttggccaccacggatcatcttatgaggttcatcaacaaggatcctgatggatatgtgccaatatctgttgttgcatcttttaagaagattaaagcccttgtaactactcattcccagctagctactgttttgcggaactcagcaaagcttgtagttagtgaagatggaaaaaaagtaagacgccagcatccccttactgaatcagatatggaagagttgcaatctcgtataattgttgctgaaaatttggctgaagatcac

SEQ ID NO: 374 - DNA, 253 bp, Gossypium hirsutum
  unsure (1)..(253): unsure at all n locations; Clone ID: LIB3083-009-Q1-L1-D10
tacaactggtggatccccacatactgcattaattctgcactagcaaaatttttccaatactcgacaaaacacaaattctgacgtacattatacaaatgctgaaggcattnaaaatcattcttctcaaccatttcattttaatcataccaacaatataccataatttaacatttctattccttcttcaatttaatgatcatcacacgaaattcatataccttattacaatctcattcaattaattctacccact

SEQ ID NO: 375 - DNA, 262 bp, Gossypium hirsutum
  Clone ID: LIB3083-009-Q1-L1-D11
tagcttaattgtttctatacggtattaatcccttcttctgattgcctatattctaacctggctgtttattacatactctctttgattttctagatcttttcctttcctttttttcaatttgcttctttaaagctttatcttcttaataacatcaaacccttttatatatagcaccaccaattcaaactccaaccaatttctttttcttttaccactctttacatccttcttttaatgaaatgtttctttcatctattaacat

SEQ ID NO: 376 - DNA, 327 bp, Gossypium hirsutum
  Clone ID: LIB3083-009-Q1-L1-D12
tttggtttatccgcaatcctgaggatgatgttggcgggtgagttgtttttggtgggatggatccaaaacattacaagggggaacacacttatgttcctgtaaaacagaaaggatactggcagtttgatatgggtgatgttcttatttgtgaccaaacaactggactttgtgccagtggctgcagtgctattgttgattccagaacttccttgttgactggacctacggctgttattgctcaagtcaatcatgctatttttgcaacatggtttgtaagttaagaatgcaagactgtgttttcataataccgataaatgaatatttact

SEQ ID NO: 377 - DNA, 302 bp, Gossypium hirsutum
  Clone ID: LIB3083-009-Q1-L1-D6
caaagtcactattaaaacaggccttaatggatgcaaacagggaaagggaaaagaacatcttgaaaggaacagcttactcacttttatcaccgtcaccttcccgctctgattctgggttagacgacagtatttctgaggttagtgatgctgaactatgctgcatatgcctcgagcagatcctcacgatcgaaatccaagactgtggtcaccaaatgtgcgcacaatgcacaattgtccctttgcttccataacaagcccaaccctacaaactcaagcataacaccctccgtctgccccttttt

SEQ ID NO: 378 - DNA, 64 bp, Gossypium hirsutum
  Clone ID: LIB3083-009-Q1-L1-E10
atatccactctaacctaaaaccaaaaccattcatcattattatcatcatcaatctttataatct

SEQ ID NO: 379 - DNA, 335 bp, Gossypium hirsutum
  Clone ID: LIB3083-009-Q1-L1-E5
tttgaagtttttttaaacggaagctgacaaacccagcctggtctctttccttccgtcggaggggaagccgtaacggcaaacaaccaaacgtagaagcgctgattttgaattgtttggcgcgtgcagtgcagagaagtgaataggaactctcatcgatggtttttagacaaggtttgagcttgtgttggtcttaatcggcatggcggagtccacaatgaatcccaaaatgtcgccttctcctcctctctttgtctcctcgaatctgccgccctttcagtctttgctcataaccgatctctcctttctcttttacctctcagtttgggggcgacctg

SEQ ID NO: 380 - DNA, 384 bp, Gossypium hirsutum
  Clone ID: LIB3083-009-Q1-L1-E6
tcacaaccaaacccttttttatggagaaagttaaaacaaaaactggtcgacttaaaaagactgagtaaataataaaccttttgtgatgaaaatgagggtgtcaatggaagattgttcaagtggctacagtttgataagtttgcatgtcaagtcaactagttttcttctatgtaggtcaataaggatgtggtaatgtggctgatggaggcccaccgatagtagtcttgcaatggctaatttaacatgcatttgcatatttcaaagagtgacatacttcatgttccattgtgggggaatttttatgggtcatctgttatctgttaaaggatgggtttcttgggtcccaaaccacctttctttgcttattgttatttgtttgcttgt

SEQ ID NO: 381 - DNA, 280 bp, Gossypium hirsutum
  Clone ID: LIB3083-009-Q1-L1-F10
gaaatttatatttttacattgagtacatttgtcatggtgcttcacttggggggtgatatcaaatacaaaaaagggtagcctttatgagaagcataatagtaacttatcatgttaaattatgttacttctgtcaatcaacttgaactcatgacagctatttctcgaatcttagtgaatggctgaacttaatatctcactttttatatttcatgaaaaaaaacaccatttggaagtggagggtttctccaaacaaggagtctggtcaagtatccaataaaat

SEQ ID NO: 382 - DNA, 369 bp, Gossypium hirsutum
  unsure (1)..(369): unsure at all n locations; Clone ID: LIB3083-009-Q1-L1-F11
tcanntttttttttcttttggatttttttaaaaaaccgcttgtatattttccaggtcggctattttgggacgaaagggggagcaatttatttcactgaataattcaatgatacaacattctaattacaggacataaattatataaacgggaaactagaaaatatccttcacaaatgaaccctcagctaacctcacctcacctctctctctcactctaattagatccatctcgccgacatctacaaaacaaatcccgtttcaagacaatccataatgaactgtcccggcattcctttgcgctgctgcagcgactgcttcaacaccaacttcacccaactggtactgtgcctggagaaattttacatttat

SEQ ID NO: 383 - DNA, 256 bp, Gossypium hirsutum
  Clone ID: LIB3083-009-Q1-L1-F12
attcacaccactgaccttttttataaatagcgcccaaaacactggtgttggttatactatggtggtatggccacaaaattcccccaaatactcacattcttaagcaacttaccatcgccactatcaccatctagcgttctcaaatggtctctaatttttttcaacttatactacataatttatttttccactatatataataacaccaactacactattttttcatccactactaaattcataattcccgattaaa

SEQ ID NO: 384 - DNA, 165 bp, Gossypium hirsutum
  Clone ID: LIB3083-009-Q1-L1-F5
aaatgaacaactcaagagcgagatttcctagttcaaaaattaagctcttcaatcttcctcagagaatgaacttttatttcagacaaacattcacttgaagggcataattgatgagcttcaagaattgcttaattcagctctctctgaaaatgaatcaactgctca

SEQ ID NO: 385 - DNA, 373 bp, Gossypium hirsutum
  unsure (1)..(373): unsure at all n locations; Clone ID: LIB3083-009-Q1-L1-F6
aaataatctttcttttgcctatcctctgcaatccaatgccgtagggttgtcactggatggccatcactcntcatggcatcaaccggaatgatacgggacctatgatgaggtgctcatttgaagaaactgtagatatcctccttgatgctgctgtttatgctgagtcagattatttgaggggtgtgacagagaatataatgctgggtcagcttgcaccaattggtacaggagagtgtgccttgtatctcaatgatgagatgttgaagaatgccattgaacttcagctacctagttacatggaaggtctggaatttggcatgacacctgctcgatctccagtatcaggaactccatatcatgaaggcatgatgtc

SEQ ID NO: 386 - DNA, 289 bp, Gossypium hirsutum
  Clone ID: LIB3083-009-Q1-L1-G10
actaaataaataccaccccaccgccctcgtttaaacgcggcaaccaaaacaaacctgttgggttatatatagaactcaggccacaaaacaaacacaaaaacttcatcgttttaactcatcaaatacactataatctaatctaaacataaatactattacttttttaattctctttatttcattcataacaattctttccttaaataattcaaatttccaccatttcattttcaacttcactactacctctataattatacaataccaaatactttcacaccattataac

SEQ ID NO: 387 - DNA, 346 bp, Gossypium hirsutum
  unsure (1)..(346): unsure at all n locations; Clone ID: LIB3083-009-Q1-L1-G11
ccccggcttcantttttttttctangtttttatttaaactccataaaattaaatgcgtatgtttataagcatgttgtaacacacaataacattcttttataataacacacattaacatatatatgaaaaaaaatggcgtctaaaaatcacagaaaattaataaccctatatttccccccctttcaacataaaattataacctttcagaaaaaaataaccattcatccacctaataatgccaaaaccaactcaattcaaattccctattttatcattatcctaatatatcattaaccctaaaacgaaggctttttttatttaaccatttttttttaaatttgcttct

SEQ ID NO: 388 - DNA, 299 bp, Gossypium hirsutum
  unsure (1)..(299): unsure at all n locations; Clone ID: LIB3083-009-Q1-L1-G12
acattaatatgtgtttgtttttttttgtttgttgggtgcccattttatctttttttntatacaaaaccccacatttttttttttaaacataaaccccccccccaaaccaaattcaacaaaaaaatttttgaaaaaaaaataattcttattaacaatattttttcaaacaaccaataccacccttatttttccttttaaaaaacaaaaatttatttaaaaaatatcaaacaaacttatatatttttccctttaaaaaaaaaaaccaatgcaacccaattcaaccccaacaactaattcca

SEQ ID NO: 389 - DNA, 380 bp, Gossypium hirsutum
  unsure (1)..(380): unsure at all n locations; Clone ID: LIB3083-009-Q1-L1-G4
cacgctgcttttcttctattctnggcaaccagaactattcgttggtttaaagcaggctactgagactacaatgtgtccactaagactccattgcttcagctgatgaatgatgctttaatcgttgctaagcagaaggattttgacgttttcaatgcgcttgatgtcatgcataatgagtctttcctcaaagaattgaaatttggaccaggtgatgggcaacttcactactacctctataattataggatacgaaatgctttgagaccatcagaacttggtcttgtactcttatagttcgacatgttccagctttgttcgtgcagttttgttttcatattaggtcttggttgcatcatattaattgtttcgcttccattcac

SEQ ID NO: 390 - DNA, 299 bp, Gossypium hirsutum
  unsure (1)..(299): unsure at all n locations; Clone ID: LIB3083-009-Q1-L1-G5
gttgnnnnnttttttccaatggcngaattatgcgctgaatcatgcattcaagccaaatggtatagacagttaattcacattcacacaatcgagtcaaaattacagggaaacaccaagaatgttgctgtgaatatggccaatgtaagaggaatatatcaaaggaaaaatgaaaaatgcaactgtttcttatagatgatgaaccgaagaataaacacgcaacgacaactctatctatgcaagaaatgaaaatcgaaaaaagaaataaaagattgctgattgtttttcccagtccttttact

SEQ ID NO: 391 - DNA, 301 bp, Gossypium hirsutum
  Clone ID: LIB3083-009-Q1-L1-H11
ctgattttaaaggctgcataaacgatgtgaagagagggggcatattccttacagaacgctatcgattctctgaagaagacattacggtattgatagacaccgataattcttatgatcaacccacagggaagaacatcagaagggctttgaatgatcttgtgagatcggctgatcctgtggattttctgtttgtgcactacagtgtccatgggactaggcttcctgcttagactggggacaatgattatactggctaccataagtgcattctcccctgcgatatgaatctcatcacttatta

SEQ ID NO: 392 - DNA, 168 bp, Gossypium hirsutum
  Clone ID: LIB3083-009-Q1-L1-H5
caactactcttttttttcgtctcccaaccaaattctcccggtattgattttatttacaagatagcttccttcctcaaacaacttcttctctctaaaaactcatacattacccaacataattttctttctcctcattattatcttctaaatttactttatcatttatac

SEQ ID NO: 393 - DNA, 307 bp, Gossypium hirsutum
  Clone ID: LIB3083-009-Q1-L1-H6
tgggttttcctatgggtgttttcctgaaaccaaaggatttaccaggaaaaaaaaaggtttgtttggggggttttggacttaattaaagcatggtagagctcgaaaattcgtcggcgatgactgtttctacagcttctggagaagccactgcatcttctctaggtaatcagattcaagacaatcaactcacaggcggatgaccaccgaaaaagaaaagaaatcttccagggatgccagatccagatgctgaggtgattgctatatttcccaaaaccctactggcgaccaaccgattcgtttgtgagat

SEQ ID NO: 394 - DNA, 353 bp, Gossypium hirsutum
  Clone ID: LIB3083-010-Q1-L1-A12
cgcaatcaatgctcaaattcgtcgagctgttgaggcttaagggatccgttgacacttatgtgcctgctaactgctttgcaagctattttcttcctacattgtctcatccaggatccacctttcccccaagagacaagtgtgttattctaggtgattgaaatcctaaagctgttttcaaccatgaatctgacatcttaacgtacaccatcaaagctgtctattacctcataacagcgaacaatatcttattcatcaagccttccaagaacacctactcatttaacgagctcatcgccctgtgggagaaatttatttgtaaatctcctttaaaaaacattatttccttatgacca

SEQ ID NO: 395 - DNA, 402 bp, Gossypium hirsutum
  Clone ID: LIB3083-010-Q1-L1-A3
tttcttgtgatgcaagaaagctggtgccgggaactccctggttcgtttctcggtggtgctgagaaatgctccttttatgttgaacttggattgtgaccattatttaaataacagcaaggctttaagagaggctatgtgtttcttgatggaccctcaaattggaagaaaggtttgctatgtccaatttcctcaacgtttcgatggtattgatagacattatcgatattccaatcggaacacagttttctttgatattaacatgaatggtctagatggtatacaatgccctgtatatgtctgcactgggtgtgttttcagaaggcatgcttctttatggttatgaaccttcaaagggaccttagcgcctcaaaattgtaacctttttttgttgttccttgtttt

SEQ ID NO: 396 - DNA, 369 bp, Gossypium hirsutum
  Clone ID: LIB3083-010-Q1-L1-A5
gaacttttgggcgttcctattttaactcatgacaaatccgggaagttgccaggttcttttgatgctagaacagcttggccacaatgtacctcaattggaagaattctcgatcagggtcactgtggttcttgctgggcttttggagctgttgaatcactatctgatcggttctgtatccattttgacatgaacatatctctgtctgttaatgatcttcttgcatgctgtggctttctatgtggagatggttgtgatggagggtatccaatctctgcatggagatactttgtacgcagtggtgttgtcactgaagagtgtgatccatactttgatgatattggttgttctcaccctggttgctagcctgca

SEQ ID NO: 397 - DNA, 284 bp, Gossypium hirsutum
  Clone ID: LIB3083-010-Q1-L1-A7
gtttttcattttttataatcttttctgcagcaaatctacagcaacttataaggaagctctgcgattaaagcagaggttgagtaagaagaagatgggtgtagattattacaagattctacaattttacaagaatgcaaaagatgatcatttgaagaaagcttatatgaagcttgccatgaattggcaccctgataagaacccaaataactaaaatgaagcttatgccaaattcaatcaaatctctttagcttattatgttttgagtgacccacaaaatagagcta

SEQ ID NO: 398 - DNA, 84 bp, Gossypium hirsutum
  Clone ID: LIB3083-010-Q1-L1-A8
ctgaatggttttataatcacggagacctatgacaagcccggtagtactaatgtacatttgctgctactctccgatctgtgacac

SEQ ID NO: 399 - DNA, 224 bp, Gossypium hirsutum
  Clone ID: LIB3083-010-Q1-L1-A9
cgtccggcacttacactatcacactgcaaacttctcactcaacaacaatgatagccccagcgacaaccttcatagtcaacaccgatgtaagacgacaatacaactactacgttttctctgtactagctaatcaccatcagactgctgcccacgccacctgagatcacctcttctccgacggtgtctcgtataactctaacgcacaattcattaaccccactaac

SEQ ID NO: 400 - DNA, 333 bp, Gossypium hirsutum
  Clone ID: LIB3083-010-Q1-L1-B1
taaactagggatccccggctgaagaattcgcacgagctttctttgctttttcgaatttttcttaagcgagaatgatgcagtgcatttggattcacatgggtcaggccggtatccaagtcggaaacgcctgctgggagctttactggctcgagcatggaatccagcctgatggtcagatgccaagtgacaaaactgtctgatgaggtgatgatgcttttaacaccttttttagtgaaactggtgctaggaagcacgttcctcgagccgactttgttgatcttgaacccactgatatttattaaattagaactggtgcttactcgcagttctttt

SEQ ID NO: 401 - DNA, 299 bp, Gossypium hirsutum
  Clone ID: LIB3083-010-Q1-L1-B3
atgaattcgctgcgagcattctgtgcttgttcgaattttttttaagcgagaatgggggggtgcattaggattcacatcgttcaggccagtatccaattctgaaacgcctgctgggagctgtaactgtctagagcatggaatctagccttatggtcatatgccaaatgacaaaactgtctgaggaggtgctgatgcttcttacacctacttcattgatactggtgcctggaagcacgtgcctcgtgcctgttttgtggatcttgaacctcctgtaattgatgaagtgaggactggtgctt

SEQ ID NO: 402 - DNA, 403 bp, Gossypium hirsutum
  Clone ID: LIB3083-010-Q1-L1-B4
ttgtgcaggctgctttccttcatgccctcatgggagtaaccatggtttgtgcatctttttttgtggtcttcacccattttccatcggcattcatttcaaatctcctaccatgggtgtttgctctccttgttgctctatttcccttgacttacctattacaatgtcaagtgagtattaatagcttccttgcttaaaactaatttgttgacaccatataggtatacatgatgcttacaactctactgtctgtttatggttccttgacatctgttcttattctgtatgcatcaatctttattcttatagctttttaaataaaatattaactttccttacttattctggtaaagtctttttacatggtttcatttttacacaattaatctggttaaatttattcttt

SEQ ID NO: 403 - DNA, 424 bp, Gossypium hirsutum
  Clone ID: LIB3083-010-Q1-L1-B5
ctttctttgctttttcgaatttttcttaagcgagaatgagagagtgcatttcgattcacatcggtcaggccggtatccaggtcggaaacgcctgctgggagctttactgcctcgagcatggaatccagcctgatggtcagatgccaagtgacaaaactgtctgaggaggtgatgatgcttttaacacctttttcagtgaaactggtgctgggaagcacgtccctcgtgccgtctttgtggatcttgaacccactgttattgatgaagtgagaactggtgcttaccgtcagctctttcacccagaacaactcatcagcggcaaggaagacgcagctaacaactttgcccgtggtcactacactattggcaaggagattgttgacctctggttggaccgcattatgaaacttgctgtttactgcac

SEQ ID NO: 404 - DNA, 296 bp, Gossypium hirsutum
  unsure (1)..(296): unsure at all n locations; Clone ID: LIB3083-010-Q1-L1-B6
gtcgatccttcaccggcaccgctcatcgacatggctgagagcgagctttggtctttatacagagctctcatcgtcgaattcatcgatactctggtcttcctatacgtcaccatagccaccgtcatcggccacatgatacaacacgatgcatgcgatggtgttggtctattgggcatcgcttgggcttttggtggcatgattctcattctcgtatactgcaccatcggtatctcacgtggtcacattaacccggcggtgacattngggttggtaccggctatgaaggcgtccttaat

SEQ ID NO: 405 - DNA, 327 bp, Gossypium hirsutum
  Clone ID: LIB3083-010-Q1-L1-B7
acaacaacaatggctggggacacagtttacaccctctcagaagtgtctcgacacaaatccaagaacgactgttggcttgtcatcgatggccgagttctgaacgtgacaaagttcatggaagaacatccaggaggagaagaggtgttgttggaatcagcagggaaggatgcgacgaaagaattcaacgatatcggacatagcaagtcagctcagaatttgctcctcaagtatcagattggtgttctccaaggtcacactttaaagaataatgaacaggttggttcaaccgaagagcccaaaaagaaagagatgagtgcattcgtgatc

SEQ ID NO: 406 - DNA, 150 bp, Gossypium hirsutum
  Clone ID: LIB3083-010-Q1-L1-B8
taaacagtggatccccctgctgcaagattctcaccaggcttttatccttttaatcttatttcaaaccgtctgcttagcgttatcgacctggcaaaaataggagtcaattggcaacttcatctactccattaactacacattctatatact

SEQ ID NO: 407 - DNA, 211 bp, Gossypium hirsutum
  Clone ID: LIB3083-010-Q1-L1-B9
gatcactcaaaccgggtacaacagatccctttttgcaactacgccataatcacacaaccgcgcagactcgcgatcttcaccgcagacgacggacaccgataatctcaaaaccgaccaaaccgtcgagaatccttccgtcctctcaaacaactctcttaataacctttcaaatcaacatatgttttatactaagaaagcccataacaaagcc

SEQ ID NO: 408 - DNA, 369 bp, Gossypium hirsutum
  Clone ID: LIB3083-010-Q1-L1-C11
aaagaactcaaaatcaacagatcgaagtttaaatggagtgcgtgttcgggtgagtggtgaacgactttgccggagtgtcggcggacacttctttcttttcacagcatccttgttcacaaatctaactaagataagatcatgatcctcgattctcacaaactcatcgcctccagctgtgaatcctgtgacagattgcatttcacggagtatgtacagaaaaatgtgtccttgtatcatttcctaaacgtgtttcctttgaagactgccaccgtctttaatttcactctctgttagcttgccactgtcttatagaagaatccattcttttgtgaacatcctttcttgcctagctatgacaaatatacattc

SEQ ID NO: 409 - DNA, 424 bp, Gossypium hirsutum
  Clone ID: LIB3083-010-Q1-L1-C3
gttttggctttgggggatttgcatataccccatctggcgggtgatctccctcccaaattcaagtccatgctggttcctggaaagatccaacacatcatttgcactggtaatctttgcatcaaggaagttcaagattacttgaagacactttgtcctgacttgcatattaccagaggtgaatatgatgaagatacaagatatcccgagaccaaaacattaactatcggacaattcaagttgtgattgtgccatggccatcatgtcattccctggggtgacctagactccttagccatgctacagaggcaactggatgtagacatacttgtaacaagtcacacccactcagttcaccgcttacaaacatgaagccggagttgttataaacccggggtctgctactggtgcattatagcaacattac

SEQ ID NO: 410 - DNA, 371 bp, Gossypium hirsutum
  Clone ID: LIB3083-010-Q1-L1-C4
ccaccattctttacaagctgaagttgggagagattgtcagtactattcccaccatcggtttgaatgttgagaccgttgaatacaagaacatcagcttcactgtttgggatgttggcggtcaggacaagatccgaccattgtggagacactatttgcaaaacacgcaaggacttattttcgtggttgatagcaatgatcgtgaccgtgtggttgtagctcgagatgtgttgctcatgatgttgaatgaggattagttgagggatgctgtgctgctagtatttgcaaacaagcaagatcttcaaatgctattaatgcttctgatattaccgacaagctttgccttcatcctcttcgattgcgttactggtatt

SEQ ID NO: 411 - DNA, 425 bp, Gossypium hirsutum
  Clone ID: LIB3083-010-Q1-L1-C5
cgaaatgcaagaggtacttccacaaccgtttgaagccttcaaaacttacatggacagccatgtataggaagcagcataagaaggatattgcccaagaggccgtgaagaagagaagacgtgcagccaagaagccttactcccgatccattgttggtgccaccttagaggttatccagaagaagagaagtgagaaacccgaagtccgtgatgctgccagggaagctgctctccgagaaatcaaggaaagaatcaagaaaactaaggatgaaaagaaggcaaagaaagcagaagtagcggcaaagcaacaaaagactcagggcaagggtaatgttccaaagggtggagcaccgaaaggccccaagctcggtggctgttgctgaaaagcgtaaagttgtaaagttattaatctgttttccctaagccag

SEQ ID NO: 412 - DNA, 468 bp, Gossypium hirsutum
  Clone ID: LIB3083-010-Q1-L1-C6
aacttgtcgttggttacctacaacagccatcattgcataggtttcccctataaaagcctcacagttctgccatcactacgatgacagcagcgaaagggaagatggcaacatatctagtcttggttgtagtagctatgctttgtgcaggagccacagctcaatcaggttgcactaatgtgttgatcggcatgtcaccctgttagaatttcattacagggtcctcatcaaccccatcttaacaatgttgcacgcagctagctaatgacttgcgttcatcaccaacatgcttgggtcagatccttaatggcggtggttcatcatttgggatcaacattaaccagactcaagctttggccttacctgattcatgcaatgatcaaactccaccttgtagcaattgtaatgctgcttctataacttcagcagactctgctgtaggatcacctgaatctgggatcaaaatttcaa

SEQ ID NO: 413 - DNA, 258 bp, Gossypium hirsutum
  Clone ID: LIB3083-010-Q1-L1-C7
ggctttaccatcagaaatggctttaagactcttgttacccgtacttatgggggcaagattgctgcataaggactcttacacagactgcttgatgttatactgggtgatcttcaatgatgtggtgaggatcatactgtcatctagattcagttgttagctgaacatgttctaggaaaaaatgttttgaccaaattctggataatgaattttacgactgatatgcttatgtctttgtttttcaaattgttaatttttatc

SEQ ID NO: 414 - DNA, 280 bp, Gossypium hirsutum
  Clone ID: LIB3083-010-Q1-L1-C9
tccgtcgggctgcacgaatggggcactagcgaagaagattatccttttacttatatctaccataagaagcataaatgcaaattttcaaaggatatccggacagctcttgtaggtacatctttttgatgcaattgctgctgaacataattactgatgtggtacctaatgattgagacaatactccaaactaagaaagcattgtctatgtctatgatcattattgtgatgatttgattgctaaagctttgtcaggacagaataattccaatactgataaaaa

SEQ ID NO: 415 - DNA, 274 bp, Gossypium hirsutum
  Clone ID: LIB3083-010-Q1-L1-D1
tagcaattcctgttgctttttgttatcaccactaaatcatcgagacaaatagctcatctttcagctttcctactctcctatggctctcaatctatgtcagaaacaaacagaatgtataattcgaatgtttaatctgaaccagcctgtgaattcctctggaactgttaattaagatgtttacaagatcttgatatatgacaaattttgtcaaaatatactgtccctcttgatccatgttaatgatctacgtaaacatggtgtttccctgttactt

SEQ ID NO: 416 - DNA, 290 bp, Gossypium hirsutum
  Clone ID: LIB3083-010-Q1-L1-D10
acgaaatgttcgcgttatctgctgaagccaccagcaggcgtgctgatggtgaaataaccggggccaatgaaaaggggcctgatgctaaaaaacttgggaaatctgaggggaaactttcgaattaagaagttcgttctagagtttcaaatggacctcttgccaagagcaagtctgatgtagtatcaaagagcaggaaaccaccagcaggaagcaaaaccatgatacggagaactaagtccgatcaggaagagaacagatagaaaattgatgagttactgatccagctccag

SEQ ID NO: 417 - DNA, 105 bp, Gossypium hirsutum
  Clone ID: LIB3083-010-Q1-L1-D11
tagcacaatcattttatacctttccaacactttctttctgtcgggctactgtcgattcaagcagggaacaggcattctaacttacaacgtttatgccctttaaat

SEQ ID NO: 418 - DNA, 158 bp, Gossypium hirsutum
  Clone ID: LIB3083-010-Q1-L1-D12
gagaaagcttctagcctttgccttacttttcttcttcttgtgctattgaacattatctcaattagcttcatctctctctataatagtggacaacatcactttcatcctttaaatatgtgtccatttcactcacttcatcaatctatataaatccacac

SEQ ID NO: 419 - DNA, 402 bp, Gossypium hirsutum
  Clone ID: LIB3083-010-Q1-L1-D3
gatgcgaacttgagactcaggaagattctccaagaagagacaggatggaagcttctcggtggtgattttttcaggcctccatctaattctgatctactctgtgtctatgttggcacctgtgttcaatttttgggcatggttcttgttaccatgatctttgccgtttttggatttctttcccctttaaacctatattgtctgattacaactattcttttactttgggtctacattgtcatttttgctggctatgcttttgtccttttgtacaaaatgtttatatgatctcaatttaataaattaacttttaagactgctttcattttccattcatagtttttccatcttctatgtcttaattcaattattttgttccataatttatttttggcctttcctttt

SEQ ID NO: 420 - DNA, 444 bp, Gossypium hirsutum
  Clone ID: LIB3083-010-Q1-L1-D6
caaacacagatagagagagagttagagagagagagagagagagatctttgatggattgatagctattatattatagatttagatttacagagatcaaaggatgagtgaatgggcatcaagagaacagctgaggagaacaagacgaaaggaattttgcaattaggaaattacgaattagggaggaatctcggcgaacgaaatttcggcaaagttaaattggctaagaatctccattccggcctcactatcgccgttaagatcctcgaaaagtccaagctcattcaactcagcatcgccgatcagataaagagagaaatcgctactttgaaactacttaaacatactaacgtggttcgcttacacgaggtgttggcaagcaaaaccaagatttacatggtcctagagtacgcaactggaagggaatttgttgtcataattgcattc

SEQ ID NO: 421 - DNA, 289 bp, Gossypium hirsutum
  Clone ID: LIB3083-010-Q1-L1-E10
aaatttcacttagaataagaaaaagggggggggggaatcgaagctatgtttatgattgaatgttgcagaaaatggcaatgaggaaagtttatagcgagataaaagggatgaaagtgaatgaagtccctaactacgtgaaaccgatgctatcaatggattacgtgaagaaagcttttcaaaagggtcttgacaattacaattcaaagtacattcaaaccgattctatccatcctctttaccatgtctgtttctgttgtattgtcttttcttacctattcgctctctcaaa

SEQ ID NO: 422 - DNA, 373 bp, Gossypium hirsutum
  Clone ID: LIB3083-010-Q1-L1-E11
tagagaaaatccattctgctttctgtcggagttgactgctaacaaaaattgatcccattcccccgcttacgaagatttctaagcttctcctataaaacatccacatcaaactcccccaaaacaatatccctattagagaaaaaaaaatgatgtaagattgtcatgaatcaagctattaaaaatctttatgcttttcctctctctaatgaacatttgctgcataatactcattctttatcattagtgtccatctatggtttaattataattaccactcttttctttcactaacttacctattatctttctacatacacttttcatcatatttctttatactttaaacctttattaacacttttcatttcacatt

SEQ ID NO: 423 - DNA, 254 bp, Gossypium hirsutum
  Clone ID: LIB3083-010-Q1-L1-E12
gcttttaacacctttttcagtgaaactggtgctggaaagcgctttggtcgtgctgtctttgtggatcttgagcctactgttattgatgaagtgaggactggtacttaccgtcagcttttccaccctgagcaactcatcagctgcaaggaagacgctgccaacaacttcgctcgtggccactacactattggcaaagagatcgttgacttgtgcttggaccgtatcatgaagcttgctgataactgtaccggcct

SEQ ID NO: 424 - DNA, 189 bp, Gossypium hirsutum
  Clone ID: LIB3083-010-Q1-L1-E2
gccacatgatctctgttatcacttcaactacctttcatctgatcatcccacgttcatcttaaacttctctaaatgctctattcaaatcttacctcaatattatcattcttatttctctcttattttatttatacaattatatcattttaaactacattcttaattcatttatccttaattattctatat

SEQ ID NO: 425 - DNA, 281 bp, Gossypium hirsutum
  Clone ID: LIB3083-010-Q1-L1-E3
ctggacagattttaagaagggaggagattctcgaacttggagaatgtcctaatgacttctggggaattgaacgtggagccgtttgaggtgaaaatctcatgttccgatctgttgattaggcaattagggtgacttatactataatttttccactatcactctcatataatctaacattgtcttacgtaaatacttcagatttctaattacttattgttttgatattactgttaatataccttttattgttccttttttactataactatctatctttctta

SEQ ID NO: 426 - DNA, 310 bp, Gossypium hirsutum
  Clone ID: LIB3083-010-Q1-L1-E4
gtttatttgatatttcccccttatggccgccgctgatgtggagttccggtggttcgtctgagggctcgcatgggccaccgacgaccgggccctcgaagaagccttcagtgcgtttggtgaaatcgtcgaatcgaagatcattaatgatcgtgagactggaagatcccgaggctttggattcgttactttccgtgacgagaaagctatgagggacgcgatcgaaggaatgaacggtcaaaatcttgatggaaggaacatcaccgtcaacgaagcccaatctcgcataagtggaagcggtggctgatgattt

SEQ ID NO: 427 - DNA, 410 bp, Gossypium hirsutum
  Clone ID: LIB3083-010-Q1-L1-E5
gtgaaatattatgaagtggaactaacaggatatacccctgccatgataaaaggatctcccgatgatacttcatgagatcttctacaagatactgattcatccgatacgcaagctcaaaagcctgataacttaatgcataatgatcgtattacaggtgataccagcagcttcaatattcatatgacatctaatgctgattatcatgcaacagatgaaactatgatggataaatatccgctcccggtaagcaattcatatttgtttgatcccaattatggtgaaattgactccaaagtcttttcaccactaatgaactctcaacctttttgaagatcctgtctttctcgtagattctccttatccaaagattttggtcatgatccaaatggatttcaatttcatgaatggac

SEQ ID NO: 428 - DNA, 61 bp, Gossypium hirsutum
  Clone ID: LIB3083-010-Q1-L1-E6
taggtcaatgccttctgcaacaaaaacttgagagaaatattggggccatctattgattcta

SEQ ID NO: 429 - DNA, 220 bp, Gossypium hirsutum
  Clone ID: LIB3083-010-Q1-L1-E7
gtcccgagtttccaatgccaaatttcgataagtaccctagcatggacttgatggtatctaagctaccatgcaggtaccccattaatggatggtctagggatgtttttaggctccaagttcatttaataacagcaaaaatggctgtcaaaaatgggaagaagaagaatgacaatgaggtgttcacgtgcaaatgcatgccaatttttgagctgtctatgtg

SEQ ID NO: 430 - DNA, 472 bp, Gossypium hirsutum
  Clone ID: LIB3083-010-Q1-L1-E8
ccgcctgctttccgtaaagcaaaaatctggcaaatcctagaatcaattagccgtagaaaccggcttaaccaacgtttacgtggctcagctcctcaaacgccaggctcagctcaagactgaaaccgctcctaagctaagggcagccttgcccgaattgcctgaggagcttctccatgagatgatgaaaccaccgttacggtcctatgatccgaaccttatccaagaacccactgtttacaggttgaatgaggcagtgatgcattttggtgagagcataaaggagattatcaatgaagagtttggtgatgggatcatgtcagctatagacttctactgctctgttgacaaagttaaaggcgtggactggaaagaccgtgttgtcgtcacatttgatggaaagtacttgccatacagtgaacagaaatctgagcatatggtttcaagattaaggctgcaattaaagctgattaac

SEQ ID NO: 431 - DNA, 396 bp, Gossypium hirsutum
  Clone ID: LIB3083-010-Q1-L1-F1
gagaaaacctttggtgatgaaaacaagtccgaaggtaaaggatctgaatgtggtagctcgtgtactggtgatgaaaacaagtcagatttgaaggccgatgaaggtaaacattccgaaactggtagttacttgaacacgacggacagtaaatcaaatgatcacgacactggatcatcaaactctgagcatatctctcttcaaaacacaacagacacaacagatctcattgtccaagcaagcaataacactacggaagagagtaaagaaactaacaacttggctgcaaaagaaattccggattcactgcataacgggacttcagctctagatacaacaggatgtggtagggttattgcagaaatatatttggaataagccacggagaccgtattatat

SEQ ID NO: 432 - DNA, 135 bp, Gossypium hirsutum
  Clone ID: LIB3083-010-Q1-L1-F11
ttcactagctctgactctttggatcatttcccgagcttatatatctgatggttctggagaatctaatatggctagaactcgcatttagtactaatggtcttccaacaaataattatatacattttcgaatcataa

SEQ ID NO: 433 - DNA, 368 bp, Gossypium hirsutum
  Clone ID: LIB3083-010-Q1-L1-F2
acaacatccaacttgactcttttcattgcgcttcaaatttcaacaaatttactacataatgacactgaacttacctcacagtacaagtaaatcaatcctaaggcgggttaaattcattaaccgcccacgtccacactgcttctccattctttggaatttatttccccaatgtaaaaaagtacgactaaatggtaaaaattcaacctaaatataaaattaccatacatattacaaacaaacaaacttcggtatattcttcaccttcttttaccagagaagaaatggataggtaaattagtaaattatcaccaataagctatttatttactgtcttaacatttatgaggagagaacccgaccttattatt

SEQ ID NO: 434 - DNA, 422 bp, Gossypium hirsutum
  unsure (1)..(422): unsure at all n locations; Clone ID: LIB3083-010-Q1-L1-F3
accaaaactacctccttcacccggatctcgtcctggacaggtctcaccaagcaattcaattgatgggaattctgctgcctttagtttggagctcggaaacggtgagttcagtgaagctgaactgaagaaaattatggcaaacgagaagctcgcagaaatcgcaatgactgatccaaagcgtgcaaagaggattttggctaatcgtcaatcagctgctcgttccaaagaaaggaagatgcggtacatttccgagttggagcacaaggttcagaccctgcaaactgaagctaccacattatcggctcaattaacacttctacagagagattccgntgggcttagcaatcagaacaacgagttgaagtttcgtattcaatccatggaacaacaggcacaactccgtgacgctctaaacgaaacat

SEQ ID NO: 435 - DNA, 445 bp, Gossypium hirsutum
  Clone ID: LIB3083-010-Q1-L1-F5
ttcttagccacctccgatcctgataatgtgcgttatatattgagttccaacagttctgtttatttgaaaggtcctgaatggctgaaacagtttgatatcttctgcgaatcacttttcaattccgactgtgaggcatggaaatgtcaccgcaaagtgttccatgctttcttgaatcaccctcagtaccggcaatcactttcaaaggttctccatcaacgtatagaggaagcgcttgttaaagttcttgaatatgtttctggacgagagatcgtcgtgaacttgcaagatttgctggtagggcatgcgtttgacattggatgcataacgggcgtgggcttaaaccctggcctactcttcattgaatttcctgagaatcggttccaaaaagccatgactgatactctggatgcagctttttacaaatattgtgtgcctgacagtcttt

SEQ ID NO: 436 - DNA, 459 bp, Gossypium hirsutum
  Clone ID: LIB3083-010-Q1-L1-F8
caactatggatctgctggcgatggtatgaaagttgattgggtgcaccaccctgagtatctcgagcagaacgcaactattgccttccaggctgccatctggaggtggatgaccccaatcaagaagaaccaaccttcagcacacgacattttcgtgggtaactggaaaccaaccaagaatgacacataggaaaaacggggtcctacttttggctccaccatgaacgttctctactgagattacacttgcgggcaaggctatatcgatcccatgaacatcatcatctcccattaccttcattaccttgacttactatgtgttgtgcgagaggaagcattggcctcactatgagctaagctgttcctagcagaaagcaattatactaaccttatattcacctgctgccaatgcattctgatcttttggttaattcaattttatttgttaaaattcatttgtct

SEQ ID NO: 437 - DNA, 400 bp, Gossypium hirsutum
  Clone ID: LIB3083-010-Q1-L1-G10
gaaactgcttttagtgttttctataggcacaaacagttgagtcttcgatcactttgtattggtggctgaagttcacagtttgctgatatatttcgaagagctttcgcctctcgtgtttttcctccacatgtgactaacaagttgttaattaattcatgtttaagggattctacttttataccttctgtatctggcaaaactctcattgctagtcaaattgttaagattttgaattgaatggtactacatatttgttaatggcttctaaatttcttatcttattttttggataaactgataataatgtcatagaccttttttgcttattctttaaattaccaatggacttttgattattatagttattttcattcttttatatttttgttgaaatttattc

SEQ ID NO: 438 - DNA, 329 bp, Gossypium hirsutum
  Clone ID: LIB3083-010-Q1-L1-G11
gctctttaactagtagatccagcggactccacgacttcgacacatgaacacgaggttccatggttcaaactcacaaaattcccttcattctcaggcaaattctcctctgctgaggtcgccagtattatatccatgctcaaattctttcaaagatgataagtcctttattatttttttttctattcctccttttttaattttttttctcctattattttacattttttttttttagctttctgctgatataccttcactattgtagtttaagcgtttctactattaactgattattatgtattactatcatttcaattactacctttaaa

SEQ ID NO: 439 - DNA, 270 bp, Gossypium hirsutum
  Clone ID: LIB3083-010-Q1-L1-G12
gttctggtatgtggaatctctagaattcccaatgttcaacatctccggaaggactactttgatggaaaggagcccaacaagggtgttaacccggatgaagcatttgcttatggtgcttcagtacaaggaggcatctttagttgagagggtggtgatgaaaccaaagatattctacttcttgatgtggctcctcttacccttggtatcgagactgttgttggtgtaatgaccaagtttatttccattaacacctttatctcatctaataaa

SEQ ID NO: 440 - DNA, 183 bp, Gossypium hirsutum
  Clone ID: LIB3083-010-Q1-L1-G2
tacaccagacattatgttgcgtattgatcttctccttttactagctgtggcttcattgggggccctttgcttatccattgatgactatactgtcttttatgactcatgatattaaccttatgactgtccatcgatcgagtcctataaagattattacaaacgcttatggaaacatttcttaga

SEQ ID NO: 441 - DNA, 183 bp, Gossypium hirsutum
  Clone ID: LIB3083-010-Q1-L1-G3
cccacttgtctcatcgatttcatcgacctctcattggatctcttttaggcgattcttctttagatccttaacaatcctacccttcatcaaaactttacaacatctgatctccatacacaccatattgtcacaaagcacaatgtgatgctttacccatttatgcatgttcatgaacacaatctt

SEQ ID NO: 442 - DNA, 388 bp, Gossypium hirsutum
  Clone ID: LIB3083-010-Q1-L1-G4
tttccctccaattttctaaatataaaagttttaattttcgtgtctcgatcttcacactttcaaagctttagaaacgagtagatcggttctagaatttgagtgggaaaaaaatgggtgagcacgaagagaagcacgaggaatcgctgatggtgaagctagctgagaagatccacggccatgattcttcctctgattccgacatcgatgagccatcagaatcgtcgatcaatgccaaagtttttcgtctcttcgggagacaaaggtccgtacaccacgtttttggtggaggcaaatcggctgatacatttctttggaggaacaaaaagatttttgctggagtgctcggtgtgcgactgtgatatgggttttgtttgaattgctggagtac

SEQ ID NO: 443 - DNA, 287 bp, Gossypium hirsutum
  Clone ID: LIB3083-010-Q1-L1-G5
tctaatgtattgataatccactcaaaaggaatctcataggaatgttttgagccgatcaaacgtcatcatagtcacttgctaactctaaatttcataggcgattgcattgatagttgcacgtaaatgataaatcgtaatgataatgttgccactctacttatccagcttcgtcatagttctctattacaacaacaacatcatgaataaacaatgatggggtcaatgatagatggcatctatatgacctaatttcaacttacatgacttcattggtactactaattcaa

SEQ ID NO: 444 - DNA, 53 bp, Gossypium hirsutum
  Clone ID: LIB3083-010-Q1-L1-G6
taggttcctaggtatctgcatttaatagcagtgggtaatgtttactggtgact

SEQ ID NO: 445 - DNA, 411 bp, Gossypium hirsutum
  Clone ID: LIB3083-010-Q1-L1-G9
taggagaagcagtatcggggatgaaatcctcagaggcaagaaagacttcggtggcgtttacgaaagccaagtatgatccttgggaaggtatgaagcagatcctaaatctttttcattgatggtgaccaaaaattctttgatgacattttttctaatactgttcctgattttattgtttgataatagccattttttttaatttgttacattttttttagctgtggctacattagaatcagatgattttacaaagatattgtgacgtacaaagttggtactgttctcattatatacaaacttttaaaatgaatgtcgtctatagattcttgcggattgatagaagtgagattaggattgattttgatgaaggacatggctactttgtcctacaaataatgaaacaccataatt

SEQ ID NO: 446 - DNA, 284 bp, Gossypium hirsutum
  Clone ID: LIB3083-010-Q1-L1-H1
ttggagaatccatttcactccgtctcacttgggctctatccggggtgcttatagcaccaacaggtgactaccacctgatcaacatgtcgtatcaccacctctctgagttggactccaccaccgattccggcacgtcctttacacgcttccagcaccatgctcctcatgatgcccgtgttctgatcatgtgcagtttcagctgtaagatcccttcacgtccacatgataatcatcttcgttatgcctgtggtgatacccgcatcgttgtcgaacatcgtatcacc

SEQ ID NO: 447 - DNA, 256 bp, Gossypium hirsutum
  Clone ID: LIB3083-010-Q1-L1-H11
aatcgatcgtttcctgcttttcatatcgttaataaatcttaggacccagatgctataacaggcaatgattggagttggtaagataaagcaatactcaaacatcctttataagccccttatcaagggcaaacaatatgttatcttgagtgcctatacatttttgctctctgagcttgttcattacaatcaaactctgtttgacaacattgctttattataaagaatgctgtatgattcattgtattcttttataact

SEQ ID NO: 448 - DNA, 198 bp, Gossypium hirsutum
  Clone ID: LIB3083-010-Q1-L1-H2
aaaaatgaacaagtcttctcattttacttcgtcaaccagggtgtattgttgaggcaattctactaatgttaatgatcttgtaccagatacatcaacttgctcggtaaatttgtgctctatttcattttcttctgcttctagatgtgtttttacataatactgtttgcattgatatcgattcttatagtatcttatact

SEQ ID NO: 449 - DNA, 259 bp, Gossypium hirsutum
  Clone ID: LIB3083-010-Q1-L1-H3
ggaaatgcatggattgttcaatacgaaagtggattaaatggcgatgtgcagaagctcttaacaacgtgttacattttgggtttcaacatgtttgtagtttgaattagagtatagattatgggttatatgggtatgcagattctcttaaaagtattcccatgtgggtagagagattgatagacattaatattattccttaatcatgtggtttatgtattccatatatattttataaattaattatatggttgttatcaat

SEQ ID NO: 450 - DNA, 179 bp, Gossypium hirsutum
  Clone ID: LIB3083-010-Q1-L1-H4
acgtttttgatgcaagtgtgttgcctactgctattggtgttaatcctatgagtactgttatgtctactgcttattgtctctctaagagaatagcagctaaaatacaaaacttatagggttaaaatgtgtcataagtacttacacttttcataaatttggaatttaatccttttgttttt

SEQ ID NO: 451 - DNA, 370 bp, Gossypium hirsutum
  Clone ID: LIB3083-010-Q1-L1-H5
atttatcaagtgtgtcacggtcggtgatggagctgtggggaaaacttgtatgctcatttcatataccagcaatactttcccaacggattatgttccaacagtatttgataactttagtgccaatgtggtggtggatggcagcacagtgaaccttggcctatgggacactgccgggcaagaagattataataggctaaggccactgagttatagaggagctgatgtgtttttgatggccttttctcttataagcaaggccagttatgaaaacatctacaaaaagtggatcccagagctaaaacattatgctcataatgtaccaaatgtgcttgttggaaccaaactatgattgcgagaagacaagcagttc

SEQ ID NO: 452 - DNA, 388 bp, Gossypium hirsutum
  Clone ID: LIB3083-010-Q1-L1-H7
gtttatagaaccaaataccaggaatcacaaagaggtagcatcggaatcgtgtggcattgcatgtggtatgaaccgatcagcaactctgtagccgacaagctagcatccgaacgagctcaatccttctctatcaattggtttctagagccaatcatatactgacgatatcctcgcgaaatgcataacattctaggatccattttacccgaattcacaacatccgagaagcagaaactaaaccaaaggcttgatttcatcggagtcaaccactatacaagtttctatgtcaaggattgcatgttctacgtgtgtgaaccaagatcagggaacctaaaaaccgaatgattttgggcttcaagcttacagaaaaatggcattcctaatagag

SEQ ID NO: 453 - DNA, 296 bp, Gossypium hirsutum
  Clone ID: LIB3083-011-Q1-L1-A1
aaaaacacagagctccaacagaggtttaaatatcatcaaatcattaaatatagtgtcttgagtagtaaaaaaaaacatggtgtaatagatataaatcccaccagcaacattcaacactgttaagaagcttaaacaagcacaagcattggcaaataccatgcttcagggtaattattcttcagcagcactagcagcactcaaatccacactgaggtcaagaacctttccagttatcatggtatacatgttaagtacattactgacagttgatttaaaatgtgttgtagcatcataac

SEQ ID NO: 454 - DNA, 258 bp, Gossypium hirsutum
  Clone ID: LIB3083-011-Q1-L1-A10
tcgaggaattgcggctggaactagccatggggtattgttgtttaagagcaacggaatggacatagtctatggagcaaatcggataacttacaaggtcattggaggtattatagacttgtatgtttttggcggaccattgccccacaccgtcgtgcagcagtatactgaacttattggccgccctgctcccatgccttattggtccttcggattccatcagtgccgatatggttacaaaaacgtttctgacctcgaggg

SEQ ID NO: 455 - DNA, 396 bp, Gossypium hirsutum
  Clone ID: LIB3083-011-Q1-L1-A11
ctcggaagggacatcctcggtaaagaaagggaccggttttgctggaagtaatgtccatgaatcgcgtggtgctgcttctggctggcaggctgaatttcagtctgatgatcacggttctattagcaccatgtttgctgaacactcttttgcatcagtatactgaacttattgtccgtcctgctcctatgccttattggtccttttgattctattagttcctatatggtttcaaatactgtttttaccttttttttttttttgttgtttctttaattttatctttttttttttagttttttttttattttattttttttcttttttttatttttttttttttattctttttcttttttttttttttttttttctttgttattatatttcttttttttt

SEQ ID NO: 456 - DNA, 451 bp, Gossypium hirsutum
  Clone ID: LIB3083-011-Q1-L1-A12
ggttagctttcatatcatgactctggtgtacctgataatggagcaaacatcataggacgtgtactccttaagaacattaatgtaagatggagaatgcatgctgggttggactggcacaaaactagaaagagtaacatgtgttccaataatattcttggaagggatagaactgtatgtctagagcttgcagtatctgggttggaatttcaatatgacatattcacacctgccggattctttgttacctaacttgtttgtttatgttaattttttctattttatcatctattttgtaattattcttttatttttttttgtttcttttttttctatattttttctttcttttccttcttattttttttcttttttttattttgtatttatttatttttatcatttatttcttttatttttttttatttatttttaatcattttatttttttatt

SEQ ID NO: 457 - DNA, 425 bp, Gossypium hirsutum
  Clone ID: LIB3083-011-Q1-L1-A2
aaaaacacatagctccaacaagggtatatatgtcatcaaatcattaaatatagtgtcttgagtattaaaaaaaatcatggttttatatatttatattccatcatcatcattctacaatttttataatctttatcatgtatatactttgatatattactatcttctattgtaatttttctttaattttcttatcttttatttaatccatattttattttttattcttttctattattatgttatttattttatttttattattttattttttattcattattgttttatatcttttattttttttaatttttataatattttttttttatctttatttatttttttttttttttttatttattttttttatatttttttatttttaaatctttatttatttattttttttcttcttttatcttttt

SEQ ID NO: 458 - DNA, 85 bp, Gossypium hirsutum
  Clone ID: LIB3083-011-Q1-L1-A5
ctttagcgggactaacatgacactgataaacggggaaaaatgggaaacataataacacgtatactgttgaacaacatcaatctaa

SEQ ID NO: 459 - DNA, 197 bp, Gossypium hirsutum
  Clone ID: LIB3083-011-Q1-L1-A6
tcgagtttactagttttatctttattaggaaatcagagttccaaaaattcattatggcaaatataaataatattgcaatcctactctacttttattgacatgtttatttacattgctactcttatcgcttaaaactaatatttcttattcctttattgattcccttattttaaagctttaactatgcattatatatt

SEQ ID NO: 460 - DNA, 59 bp, Gossypium hirsutum
  Clone ID: LIB3083-011-Q1-L1-A7
attttacagaattagcatcacatattacaagctgtgcattttgggaagttaacaccaca

SEQ ID NO: 461 - DNA, 390 bp, Gossypium hirsutum
  Clone ID: LIB3083-011-Q1-L1-A8
gacggttcctttgatttcgagagtagatattcgctcgtttctggctttcgtcgaactccgcgtaataatcgctcatatttctcgcagacgtgaagaatggggctgtctttcacaaagctgttcaaccggctttttgccaagaattgagatcttatattgaagtgtggacttgatgcttctttttaaatccttatttttttactatccctagtttttatagtattttttactcttttttcattctctttgttttatatttgttatttttttattttttttttctttttttattattttttttttttataatattctattttttttttttttttttttttatttttttatttttttttatcttttattttctatattttttatatttttttt

SEQ ID NO: 462 - DNA, 426 bp, Gossypium hirsutum
  Clone ID: LIB3083-011-Q1-L1-A9
tgaaaattcattttctttggactttactctccgaaatccgagtcctaggaaggatgcgtttgattcttcatattcagggagggcagttcggcaactatatcggttccttgttttgtttgtttatttattttttattttttttatctttttttttattttttttttttttatttattattttctttttttttattttttttcttttttcttttttttttttttttttatttgtttttatttttttctttttttttatttttttttatttttttttttctttatttttttttatttatctttctttttatttcttttttttttctttttttttttttttttttttttttcttttctcatttatttctttatcttatttttttttttcttttattatttatatttttttttacttattttttatttttt

SEQ ID NO: 463 - DNA, 269 bp, Gossypium hirsutum
  Clone ID: LIB3083-011-Q1-L1-B1
caagagcagagctgcggcatttcttcctcagaagacccatcagacagaaatgaagttcaacattgcaaatccgactactggttgccaaaaaaagctggaaattgatgatgaccagaaacttcgagccttttttgacaagaggatctcacaggaagtcagtggtgatgccctcggtgaggagtttaagggctatgtattcaagatcatgggaggctgtgattaacaaggttttccaatgaagcatggagttcttattcttgggcgtgttc

SEQ ID NO: 464 - DNA, 286 bp, Gossypium hirsutum
  Clone ID: LIB3083-011-Q1-L1-B10
gacaagagcttgatcgtcagcttcggtgagatgctgatcgattttgtccccactgtctccggtgtttctctagccgaagctcccggcttcctcaaagcccctggcggtgctccggctaacgtggccattgctgttgctagactcggaggcaaagcgtcatttgtcggaaaacttggagacgactagtttggtcacatgctggccgatattctcaagcaaaacggtgtctccggtgacgggatcttgtttgaccaaggcgctagaactgctcttgccttcgttactt

SEQ ID NO: 465 - DNA, 147 bp, Gossypium hirsutum
  Clone ID: LIB3083-011-Q1-L1-B11
gacaagagcttgatcgtcagcttcggtgagatgctgatcgattttttccccactgtctccggtgtttctctagcctaatctcccgtcttcctcaaagcccctggcggtgctccggctaacgtggccattgctgttgctagactcgta

SEQ ID NO: 466 - DNA, 257 bp, Gossypium hirsutum
  Clone ID: LIB3083-011-Q1-L1-B5
gtgatgttgatatcaggaaggatctctatggtggcattgtgcgcagtggtggttcaactatgttccctggtattgctgaccgaatgagcatggagatcactgcccttgcttctagcatcatgtatattaaggtagttgcaccaccattgagaaagttcagtttcttgattggatgttctatcatgtcatcacttatttctttctctttgattttgttttttatggtttttttttattattttctattatttttattt

SEQ ID NO: 467 - DNA, 402 bp, Gossypium hirsutum
  Clone ID: LIB3083-011-Q1-L1-C10
gaaaaaaaatactaaagattttgtgcagaaatatttgtgggatagcctgtatgaagaaattttcaaaaaaaaaaaaaggagagaagctttggattatacatgaaaatcaataataattattaaaatagagagtttctatggaattttaaagcacctgtgtttatatggagtgatattagtaactataaaaaagagttgatttgttgtatgttaggttttgaaataagcaaattgagtgatcattttgttgtatgctttgactgttttacgtatcttttatgttgtttattttttttttaactttatgttttttgacttttttattttatatttttttttttatttttttttttttttttattttttattttttatttatattttttattttttttattattt

SEQ ID NO: 468 - DNA, 269 bp, Gossypium hirsutum
  Clone ID: LIB3083-011-Q1-L1-C11
tctgtctccagatctctctgtctcccccttctctttctctgctaaactcaaataaaataaattcgtgaacaccatttcagtcttctcttcttcttcttcttcttcttcaacaagtaaagcttggatagttcacagtattttaacttgcacaacaattgctgtagccattggtgcccgtgcctatctgggtcgggctaggaagtttcggacactggtcgttggaattatacccgccagatattcattttctcggttcgaaagcaagcctt

SEQ ID NO: 469 - DNA, 242 bp, Gossypium hirsutum
  Clone ID: LIB3083-011-Q1-L1-C12
gagaaagatttacccgagttccccaaattggaaaagcctggggagctcgagaaacacgaagtcgaatatccggaaatacccgagtacaaggaaaagcaagatgagggtaaggaacataaacatgaggagtgccacgagtcacacgaatcgaaggagcacgaatagtacgagaaagataaacccaattttcccaaaggggaaaagcctaaatagcacgtgaaacatgtagtcgaatatcctaa

SEQ ID NO: 470 - DNA, 250 bp, Gossypium hirsutum
  Clone ID: LIB3083-011-Q1-L1-C2
ccttatagcacccgtaagccttaagagcaggacccaaagttcagtcctgaagcccagagtggttatgagcacttacgggcacgagtcatgacaacgctcaggctgaggctaaggctcaagcacgcacagtattagcaccgcagaaacttatgaactcgacagcacccgtgttagactccaggctgatgagcattataacagcatacagtagtgcagcatcaatggcgacactcactactgcagcaagaat

SEQ ID NO: 471 - DNA, 418 bp, Gossypium hirsutum
  Clone ID: LIB3083-011-Q1-L1-C3
caacaccacatttaattaccaagctggaggatttgaagtctggtaagaatgctccccaaactcccacaactcctcaagttcaatctacaggatcaaagacactgttcgttggaaacttacctttccaagtagaacaagctgatataaagaatttctttaaagatgctggtgaggtcgtggatattcgtttatccactgattttgaagggaactttaaggggtatggacattgttaatttgctactgcatatgctgcacatattgctttatagttgaatggttaatttttgatgtaattttcccttagacttgattagtctctttaaatggtgtccttttcatctattcatttcttttttttattttttttttttattgttttttttttattttttttatctttttttttatatttttt

SEQ ID NO: 472 - DNA, 312 bp, Gossypium hirsutum
  Clone ID: LIB3083-011-Q1-L1-C4
ctcgtgccgattcgcacgagtcatcatccagaaggagtccagtcttcaccggtaccttttcctccgcagctggatgcaaattttcttgcaaaccctgacttgatagaccatcttcctttacgatctatgcttttatactatttatttctctttctcttttttccttttttcttttttttttttcttttattcttcttcctaatttttatttcttattattttttatttttcatcttatatttatatttcttttttttattattttctttatttctcttattattttcttttattttctttttttattattct

SEQ ID NO: 473 - DNA, 191 bp, Gossypium hirsutum
  Clone ID: LIB3083-011-Q1-L1-C6
gatatctaaaattctacgtacgatcaactaaagggtcctcaggggcacttttaactacaaactcaataacccgaaatacatcaattacattgaattacatgataattttatattacatatttcattgatatgtacatatattcacacctttcataagttctttattagttttagtttcttattcctatttt

SEQ ID NO: 474 - DNA, 277 bp, Gossypium hirsutum
  Clone ID: LIB3083-011-Q1-L1-C7
tagctaatatggaatctacctacattatatattctgaacctgtattgaaaccttagtagatttatctattcaaaatatgcctaacaatttatacttcatatgaaattttattttcttatgttctattctaatttttatctatatttaatattataattttcatctttttattttatttttatttttttatttatatctatattcttttctttaaattattaacttttcatttatttatatattattttatatatttattttatttatatattttttt

SEQ ID NO: 475 - DNA, 148 bp, Gossypium hirsutum
  unsure (1)..(148): unsure at all n locations; Clone ID: LIB3083-011-Q1-L1-C8
caacaccacaattaantaccaagctcaataaagcgaaacacgaaagatttcaacacaaactcccacaaccccacacgctcaatcaacaagaacaaagacacaaacacaatgaaacatacctaaccaagtacaacaagcatcaacaaac

SEQ ID NO: 476 - DNA, 435 bp, Gossypium hirsutum
  Clone ID: LIB3083-011-Q1-L1-C9
cgcaggtcgagccggcgcgggtccggccggtcgtaaagagtcatgtgcgacacgaattcctggccggcgcccaggctgctgcccgggtgcgagccgggccgctgaccggcggcgcgctgcggcaggcggtagtggaattcgtgcagctcgtcggcggcactcatcgcggcgtggcgaccttctctatgatctgcgcgaccagcgcgtttgcgatcttgtcgctggtcattttttttatctgtgtgtttttttatgtgtttttttttttttctttttctgttattttttttggtttttttatttttattatattttattttctttttttcttatcttttattttttcttattcctttctttgttattttatttttttctttttttttattattttttttttttttttatttatttttttttatttttttatttttt

SEQ ID NO: 477 - DNA, 399 bp, Gossypium hirsutum
  Clone ID: LIB3083-011-Q1-L1-D1
aggaagcttgctatgaagtggcaccctgataagaacccaaatgacaaaatggaagctgaggccaaattcaagcaaatctctgaagcttatgaggttctgagtgacccacagaagagagctatctacgaccagtatggtgaagaagggctaaaatgccaagttctactttaagatgctgtctgaccttttggagcatctttttttcaaacttgatattttctaatttgttttataattatttctttatttttttatttttttatttttatatttttttattatttttatttttatttttatatttttgttttatttttattttttttttttttttttttttttatttttttatttttatatttttttttttattatattttttatatttttttttttttt

SEQ ID NO: 478 - DNA, 417 bp, Gossypium hirsutum
  Clone ID: LIB3083-011-Q1-L1-D10
cccaacttgtagtatgtcggtattgaattgtggcaggtagaatctgtaacaatgtttgataacatcttagttgccgatgatgtagagtatgccaagaaactagctgaagaaacatggggcaagcagaaggatgctgaaaaggcatcgtttgaggaggcagataaaaagagagaggaggattcaaaggatgtcccatttgatttctattcttttgattaattattttcctttttttctgtatgtcttttgttttttttttatccttatttttttattttttcttttttgattctttttttttttttttattttttttatttttctttttttttttttttttttttattttttattatcataatttattattttttttatttttttttattattttttttttttattttttttatttta

SEQ ID NO: 479 - DNA, 164 bp, Gossypium hirsutum
  Clone ID: LIB3083-011-Q1-L1-D11
ctacagttctatcccgtgggtatggaaatgtaacatttagattctttgacaatgcgaaaaatcatctaacaagccaacattgtacagtttacagagttcctaatgtaaaaaacatgactctagcataaggtatctgaacatacatttataaaggatccagatta

SEQ ID NO: 480 - DNA, 196 bp, Gossypium hirsutum
  Clone ID: LIB3083-011-Q1-L1-D12
ataaaacagtagcatgatcaacttcccaagtatgccacagctgttctcttgtcagctgatgtgaggaagaaggctgaagcacttgacaggttttgcaggccaataatgattaaacctaaaccggctaaaccagccacacctgaagcacctgaaaccccaccacatcctggatgtgaggctcaaccactatgtgcaa

SEQ ID NO: 481 - DNA, 420 bp, Gossypium hirsutum
  Clone ID: LIB3083-011-Q1-L1-D2
ccgacctggacttttcgaacctgcacctgcttttggtgactagggaaggaagcctgaatatgagcaattcgaatctggtcatggacgcaaaccggagttcggacgacccggctccgaatttgaatctgattttggccgtagacttgatttcgagcagtcttctgaggagttcggatttgtacattgtatttttttttctttattttattttttacatttcttgttcttttattcacttttttttattattcatttatttttatttttttttatttttttttctctttttatttttatttttttatatttttttttttttttatattttataattttttattttttatttatactttttattttattctattcaataatttttttttttcttattatttttttattattatttttttattt

SEQ ID NO: 482 - DNA, 439 bp, Gossypium hirsutum
  Clone ID: LIB3083-011-Q1-L1-E1
taactctccaactgttgcttccacttcctctcttccagatctgaatcgcaaaagggaattttcagttgaaaaagatgggtcgcggagttagcagtggtggtggtcttagctcattttgtttttgagtgttattttcttattattattttattgttttttattttttttttttttttttttttttttttttttttttttttttttaatttccttttatttttatttttttatttttttttttttttttttttttttattttttttttttttttttttttttctttatattattttttgttttttttattttttttttttctttatttcttaatatatttttattttattgtatttttttttttttttttttttttttttttttttttatttttttttattattttttttattttattttatttatttttttttttttttt

SEQ ID NO: 483 - DNA, 430 bp, Gossypium hirsutum
  Clone ID: LIB3083-011-Q1-L1-E10
ctgttgttcattgcactatgtgtgcttccagctttggttgttgcttcacgcattctgaataatcaattggtggtagaaggctatgtgtactgtgatacttgccgtgctggttttgaaacccttaatactagaagcctagctgatgccatggttaggttggtatgcttttactggaatattgtgtcttattgtttatatttatttttgattcatcttttttatcttgttattatctattttctttttttctttttatttttttatttttattgtttttttttttttattttttatgtttttttttttttttttttattttttttttatattttttttttttctttttttttttcttttttatttttttttttttttttttttttttttattatttatttttttttttttatttattttttatatttttttt

SEQ ID NO: 484 - DNA, 433 bp, Gossypium hirsutum
  Clone ID: LIB3083-011-Q1-L1-E11
cactaccgatttgagccattttggttactttcaaaggtcagtcctctatggaattcatcgtcttcgtttctcgaactgttgctaaacgtactccttctggtcagcgccagtcctttcagctcgaatagttcaaggttcatgcttactacagatattgacctttttccttggtatttaatgatgtttcatttttcattttttatttttaatttttctttttttttgttttttattctttttttatttttttttttttttttttttttcttttttttttttatttttttttttttttttgttctattttttttttttattttttttttttttttttttttttattttttttatttttttttttctttttttattatttttttttatcttttttttctttttttttttttttttttatttttattttttttttttt

SEQ ID NO: 485 - DNA, 298 bp, Gossypium hirsutum
  Clone ID: LIB3083-011-Q1-L1-E12
ctctacctatttgagccatttcggttactagcgaatcttgtgcttctacgaatgcatcttattcaattcttgtactttttctaaacttacttttttcttttttattttattgttccttttatttctttatatcaccattttcttttttacttcttatatttactttgttcttttttattttattattttttatatttttattttttttattaaattatctttttttatttttatttatttatatttttcttatttaatatttatttatttttcttttttttattatatatttttattt

SEQ ID NO: 486 - DNA, 140 bp, Gossypium hirsutum
  Clone ID: LIB3083-011-Q1-L1-E2
atttcaaagacatggattatgtgaatgttccatcaatatactgggaatacagcacactacaggtcttgacaatggagtatgttcctgtgatcaaaataaacaagattcaagctttagaccagctgtgagttgatcggata

SEQ ID NO: 487 - DNA, 333 bp, Gossypium hirsutum
  Clone ID: LIB3083-011-Q1-L1-E9
gaaatgttatcttcatccttactgcaaattggttaccatggaatcttaatttctcatcaaatggtattattaccctggatgaaaagaagcttgccagtttagctagcggaggttggcagttaaagttatctcttagtgtgaaatcatcatagcgtctagcctgttatcttcttttctttatactgtttttctttttttttttttgtttctatttttatttttttttatttatttttttttttttttttttctttttttctttttattatttttttttttttcttattttttttgttgttttatttatttattattattttctttttatttttt

SEQ ID NO: 488 - DNA, 115 bp, Gossypium hirsutum
  Clone ID: LIB3083-011-Q1-L1-F7
gttcttggcgtttcttttctttaccttttgggcgctgcttatgtcaccgtcggtatctttcacctgttcctcccataagtgtacgaaaaaccaagtttactccaactgcctctac

SEQ ID NO: 489 - DNA, 427 bp, Gossypium hirsutum
  Clone ID: LIB3083-011-Q1-L1-G10
tggaggaggtagacgaggacaaagaaaagaagtcgaagaggaagaatgttaaggaggtgagccatgagtggcaacttattaacaagcagaaaccaatttggttgagaaagccggaggagattacaaaggaggaatattcctcgttctataaaagtattacaaacgattgggaggaccaccttgccgtgaagcacttttctgtcgagggacatctagagtttaaggctttcctttttgtacctatgagagccccgtttgatctttttgtctcatggattaagttgatcaatattaatcttaactttatgatggtttttttttttttcttctgttttatacttattttttgtatatattttctttttttaaatcttttttttattttttttttttttttttttttatttttttttttttttttcttttt

SEQ ID NO: 490 - DNA, 399 bp, Gossypium hirsutum
  Clone ID: LIB3083-011-Q1-L1-G11
caattgctcttgaagctgtaatattgcaggttgaagttcgttctttgtatcctgatgtgttctattgagcatgttattctcctccattagtgaagaaatcttagactgaaatctcttttttcagaagctatttgcttagttaaatcttctatagccttctttgaagagtgaaagtgatcagcattttcatccttctctgccagggcaacaacccagtttgccctccaaatcactgagttttgactcgtatgtggctagttcctcattcagctccaaattttcctcggccagcccttccactttccttttcaaagtgagattacttgttttgcattttcttaacatggcttttcaagcttctttaagttttacaagaatttttttccttcctaaattttt

SEQ ID NO: 491 - DNA, 438 bp, Gossypium hirsutum
  Clone ID: LIB3083-011-Q1-L1-G12
ttatgatgttccaattgctcttgaagctgtgatattgcagattgaagttcgtgctttgaatcctgatgtgttttattgagcaggttattctccttcattagtgaagaaatctgagactgaaatctctgcccttcagaatctatctgctgagttaaatcttactatagccttctttgaagagtgaagttgatcagcattttcatccttctctgccaggtcagtttccagtttgcccttcatatcacttgagttttgactcgtattgttgctatgttctcatttagcttcatattttttttttttatttttttatttttcttttttttttttgttattttttttgcatctttttatttatgtcttttttttttttttttttttattatttttttatatttttttttcttttttttttcactttttttttagttttttttt

SEQ ID NO: 492 - DNA, 441 bp, Gossypium hirsutum
  Clone ID: LIB3083-011-Q1-L1-G2
cagtcagcacgtgagataattttatggattgaggaaaatgtatatcctattgacggccaggaaattaccctcagtgtggttatacaaactcttcttgacattggatctaaaagtttcactcatttgatcactgtcttggagaggtatggacaggtcatggcaaaactttgctctgatcaagataagcaggtcatgctcatatctgaagttggttcatattggaagaacaatgcacatatgtcagcgatagcaattgatatggtgatgggttattgtcttatatctaatttggcctttttgagatgggttttcttttctgtaaactttgtgtttttttttattttttttcgtcctttttttgatattttggttttttattttttttgtttttttatttttttatttttatcttttcttttttttttttatttttttaatttt

SEQ ID NO: 493 - DNA, 54 bp, Gossypium hirsutum
  Clone ID: LIB3083-011-Q1-L1-G3
tggcttccctctagaacagtggatcccccagctcaggaatctgcactaggtttt

SEQ ID NO: 494 - DNA, 181 bp, Gossypium hirsutum
  Clone ID: LIB3083-011-Q1-L1-G5
cttcaatctgagtttctcgacaatctctcctctcgtttgccctgaaaaacaagtgaatctaactcctctagattgtccagaccgcacaacaaaagagaccatattggttactggtacccatggtcaagacccaagacattttctgaaaacattgttgctatcttctttcacatttcgacac

SEQ ID NO: 495 - DNA, 482 bp, Gossypium hirsutum
  Clone ID: LIB3083-011-Q1-L1-H3
aagttggtgaatattgtagtatatagtgccaatttctcttattgttacctgggcatctcacatagttatattcattattttctttatataaattttgttatttttcttattattttcttttttttatttttaattctttatatttttttattctttttatttcttatcatatttatttatatctttaattttttttttattttttatttttatttttttttttatcttatatttattatattttttttactattattcatatttattacttttctatttctttattcttctattatttatatattttttatttttttatttttatttttttatattttattatttatatattttatttatattattatttctattattttattttctttttaatttttttatttttttatttattcttcttatatctttttttattttttattttttttatttccatatttatttttattaatttatatttt

SEQ ID NO: 496 - DNA, 259 bp, Gossypium hirsutum
  unsure (1)..(259): unsure at all n locations; Clone ID: LIB3083-011-Q1-L1-H6
ttgtttttnttttttggtgattatagaaggctaaagctgattataggaaatctcttagagaaatggcttcttcaattatatcattgcatacctgcaattttagttttttatatttggtatattttatcttttatcttttttttttattttatatttttattttttttattttttatttttatttattattatttttttttctactttttttctttcttttttctattttattttatattatttttttttttttttttat

SEQ ID NO: 497 - DNA, 306 bp, Gossypium hirsutum
  Clone ID: LIB3083-012-Q1-L1-A1
acagtggcaagcttgctactttcttatcacaggacaaggagtatgcatttgttgccaactcgaacaacttgggtgctattgttgacttgaaaatattgaaccatttggtcaaaaacaagaatgaatactgtatggaggttacacccaaaaccttagctgatgtgaagggtggtactcttatttcttatgaaggaaaagttcagctccttgaaattgcacaagtccctgatgcacatgtcaatgaattcaagtctatagagaaatttaaaattttcaatacaaacaatttgtggctgaacctaaatg

SEQ ID NO: 498 - DNA, 292 bp, Gossypium hirsutum
  Clone ID: LIB3083-012-Q1-L1-A10
caaccattttccttacaagtttgttattctcgcggagaatccatatggctagctcaatgacccttaagcttgcatgtctgttggtgttgtgcatggagatggctgcacccctggctcaaggggccataacccgtgctgatggctcagtcgatctcccacgctgacttccttttttgtcatggaatggtgatggtgctgatgccacaggttgctgtgccatcgtcatgaatgccttgtgatcgctctgtggagatacataggaaccgatctagcttgaaatcgggttcggatt

SEQ ID NO: 499 - DNA, 361 bp, Gossypium hirsutum
  Clone ID: LIB3083-012-Q1-L1-A11
gctcaatctaatctccttgttttaaaacctctcgggtgtcctaaaacaatgacaaccagcatccacgtcactgctttagacagcgtcgtgaacgtaaactcccttttcacactcgccgttttcatcggtttagcttggaacccatacgatcccagcaacacactcgtagacccaaacagccgatgtgccccaacatcaaaaatcgccgaggatttgattaaattccatgtctactccttcagttctttccttttctccagccttgtagctttagctatcaagcaagcaatcaagctttccaaatcccatacttttaacatccatgttactttccgtggatccgagtttttggacatgttga

SEQ ID NO: 500 - DNA, 122 bp, Gossypium hirsutum
  Clone ID: LIB3083-012-Q1-L1-A12
ccatattttttcctccttgtatcaaaacctcctggcctttttataacatttacatcggcaattcatatcacagttttatacagttttaattactttaactctctattcacacttactatatt

SEQ ID NO: 501 - DNA, 387 bp, Gossypium hirsutum
  unsure (1)..(387): unsure at all n locations; Clone ID: LIB3083-012-Q1-L1-A2
aaaattcgaatcaatgctttagttgcaaaggctcanaaaacacctgatgaaggatggacaatgcaagatggaacttcttggccaggaaataacccgcgtgatcaccctggcatgattcaggttttccttggatatagtggtgctcgtgacatcgaaagaaatgaacttcctcgactggtttacgtctctagagagaagagacctggctaccaacaccacaaaaaggctggtgctgaaaatgctttggttagggtgtctgcagttcttacaaatgctcccttcatcctcaatcttgattgtgaccactatgttaacaatagcaaggcagttagggaggcaatgtgcttcttgatggacccacaagttggtcgagatgtatgctatgtg

SEQ ID NO: 502 - DNA, 335 bp, Gossypium hirsutum
  Clone ID: LIB3083-012-Q1-L1-A3
tttatatctagaaaagcctcaggtgtcattcatcaattttggcgttggaatatggacctgtatgtggtgacgctacacattattagaaactgtgtttgacaacaaaaccgttgaattctgaagtgtattatggtgtttttgaaacatgtctgctgtttcacattacatggcaacaaggattgtcacttgtttggcagcaaaaaaactgtccaaaatgaaaggtgatgatgattgaggcattgtcgaattgattaaaagtaggaataaataagcgcgtgcacaaatctctttgcaatttcagaccactatgttaacaatttcaccggcacgagggg

SEQ ID NO: 503 - DNA, 342 bp, Gossypium hirsutum
  Clone ID: LIB3083-012-Q1-L1-A4
gtctcgagttttttttttttacattctgcttaccattacgtcccagccttatctccctctttttcatgcttctatactaaccaaccggatcttcctttgacaaaatagagagaaaatagagaggcctttcgatcgtttcttcggggatatcggcggcgatagcagcagcttttatggtgaggcgaaggagcggactattgaggagttttacaatgcgatcgaaataatctatgaaccagagtagggagctgtgaaaaaaatgagttttcgaaaaaaaattggtcgattggtttgatgcttgctttttgttttacagattctgatcgcattatataggacatg

SEQ ID NO: 504 - DNA, 219 bp, Gossypium hirsutum
  Clone ID: LIB3083-012-Q1-L1-A5
gtcaagcgttagagctagctagctattactcagctggcggcgattacgatgatggagcatacatctccactcaagagctttacgaacaacggctgcgagtacattttccttgatgcttatggagatgacgatggtggttggcaaactgctcatgccaccttctacggaggtgctgatgctaccgtctcaatgcggggagcatgcggatatggaaacatg

SEQ ID NO: 505 - DNA, 301 bp, Gossypium hirsutum
  unsure (1)..(301): unsure at all n locations; Clone ID: LIB3083-012-Q1-L1-A6
tacacctcttaagaatgaggagcctaaacctaaaccacggggatatgaacctccaaagaaggagaaacctganccaaaaccaccgatttatacacctacaaagaaagagaaacctgatacccaaaccacccgtatatgaacctccaaagaatgagaagcccgagccaaagccaccgttttatacaccttcaaagaaagagaaacctgaactcaaaccaccagtgtatgaacctccaaaaaaacctccaatgtacgaacctaagccaccataaccaccggtttatacacctgcaaagaaaga

SEQ ID NO: 506 - DNA, 292 bp, Gossypium hirsutum
  Clone ID: LIB3083-012-Q1-L1-A8
gaaaaaaagagcatgactggctcaaacctttagcatttcaaagcaaaggaaactatatataattagaaaataaaaaaaaagatcatcacaagaaattaaccgcaaggctcaataaataaaattttagcttcattgttgtttttgccaattaattaattaccataatacttatcatatattaaagccagcgcttgttttgtttgatgttcttcacaaatcacacatcaaatgtagaaatactgtacgacaggtgatcagggttcgaactcttcctcgctttcctcgaactcct

SEQ ID NO: 507 - DNA, 299 bp, Gossypium hirsutum
  Clone ID: LIB3083-012-Q1-L1-A9
ccacaagacctccctggggtgtccacagttctctgacggggtgtatcttcagcttcatgagatgcaaaacaacgttccactgatttgaatggctgtaatgctcccttcgagcgacctacttatggatcgagggacgatctgattccaagatatggaacatatagatctgcattgtctgctacattatgaccaccagccctctcgatagtgcggtcagcattttcgacattggggtgatcataactgctccgatagacattgctcagttcatgctcgaagccaacacatcaaattcactc

SEQ ID NO: 508 - DNA, 317 bp, Gossypium hirsutum
  Clone ID: LIB3083-012-Q1-L1-B1
tcccgccccaccggcgcaactggccgcaaaagccgcacccgtgaaggaccaacctccacaacagccccagcaaacggcggcgccaaaaaaacccacctttacaaccccacgtcacgcccaacttaccgttcacaaccccatcacgtaaccgtccgcggcggaactactgttgctggaccaccctcaaaatactcatactcattcttttagccgccataaccggcaccgtcctttacgtacgtttaccgcctcaccgaccttgtttcaccctcgcttcattccgcatccaccgcctgaacctaactaccagtgcggac

SEQ ID NO: 509 - DNA, 305 bp, Gossypium hirsutum
  Clone ID: LIB3083-012-Q1-L1-B10
aaatcctatttccccaaatgggaaaagcctaatggccacgagaaacataaagccgaatatccgaaaatacctgagtgcaatgaaaaactagatgacgataacgaacataaacatcagttcccaaagcatgacaaagaagaggagaagaaacctgagaaaggcatagtacctctgagtgggttaaaatgcctgaatggccaaactccatgttaactcaacctggctcgagcactaatccttacgccatatgacactgatgcatgtgccatcatcatgcagtaatttcatgggatattgcaattata

SEQ ID NO: 510 - DNA, 365 bp, Gossypium hirsutum
  unsure (1)..(365): unsure at all n locations; Clone ID: LIB3083-012-Q1-L1-B12
cgcaaactccgcctcagttcttcttccaaattgagacctcgaccgtcgatctgggaccgtcgttgccgtctccgatgttgttaagcaaaagaaatccaagtccacccacagtctcctaattacgaaagaggaaggattggaattatacgaagatatgatactaggaagagcatttgaagatatgtgtgctcagatgtattacagaggcaaaatgtttggttttgttcatctttacaacggccaagaagctgtttcaactggttttattaagctcttaaagcagcaagattctgtcgtaagcacataccgtgatcacgtgcacgccttgagcanaggagtccccgcacgcgccgtcatgagtgagc

SEQ ID NO: 511 - DNA, 199 bp, Gossypium hirsutum
  Clone ID: LIB3083-012-Q1-L1-B2
cgtagctgctaataaaccaatcaatcattttctgcaattggggtaatcgggtggaactggtggccaagaaaattacagaacttgggtactcttgcttttatattcatgcaaagatgcttcaagaccatcgtaacagagtatttcatgatttccgtaacggcgcatgcagaaatcttgcttgtactgatctttttacaag

SEQ ID NO: 512 - DNA, 227 bp, Gossypium hirsutum
  Clone ID: LIB3083-012-Q1-L1-B3
aatggctgctattgacttccatcgggtcattacaagggtcaactaggggactactacatactcgtcatggatatgcttggtccaaatttatgggatgtttggaactcaaacaaccagatgcttacaaaaaaaattgttgcttgtatagcaattgaggccatatcaattttagagcagcttcattacaaaagctttgttcatggagatgttaagcctgggaacttttt

SEQ ID NO: 513 - DNA, 324 bp, Gossypium hirsutum
  Clone ID: LIB3083-012-Q1-L1-B4
gaaagaaaaacccgatttccccaaatgggaaaagcctaaagggcacgagaaacataaagccgaatatccgaaaatacctgagtgcaaggaaaaactagatgaggataaggaacataaacatgagttcccaaagcatgaaaaagaagaggagaagaaacctgagaaaggcatagtaccctgagtgggttaaaatgcctgaatggccgaagtccatgtttactcagtctggctcgagcactaagccttaagccatatgacactggtgcatgtgccatcatcatgcagtaatttcatgggatattgtaattatattgttaataaaaa

SEQ ID NO: 514 - DNA, 335 bp, Gossypium hirsutum
  Clone ID: LIB3083-012-Q1-L1-B5
gaaaaatggccaccattgatgttcctgagcaggtttcggttgttgcagatgcagaagctcttagaaaggcttgtaaaggatgggggacagatgagaaggcaataatttcagtgttgggtcacagaaatgcagttcaaaggaagcaaatcaggcttgcttatgaagacctttaccaggaagatctcatcaagcgtcttgaatcagagctttctggtgatttcgagaaagcagtgtatcgttggatattggatccagcagaccgagatgccgtgttagctaatgttgccataaagagaataagccctgatcaccatgtgatcgttgaaattcatgca

SEQ ID NO: 515 - DNA, 290 bp, Gossypium hirsutum
  Clone ID: LIB3083-012-Q1-L1-B7
gaaggtgtcacaagggagggggtattggacaactttacaccaaaaaatttaccaaataaatcacaaggtggagaagccgatgactactcaactgatttaatggacattgcgattaatcaaaccctcaaatattgcataaagatctctgttatccgggccaaaaatctcctctgctttcctcaaagtctcttctctcgtttgtttgtgggagtttagttctttaacatttgccaggaatgcaccaaactgctcatacgacaagcggctcctgacttgactgaagaattctt

SEQ ID NO: 516 - DNA, 386 bp, Gossypium hirsutum
  unsure (1)..(386): unsure at all n locations; Clone ID: LIB3083-012-Q1-L1-B8
ggagcccatggtggcggtgctttctctggaaaggaccctggcaaggtggacaggagtggtgcttacattgttaggcaggctgccaagagcattgtggctaatgggcttgcccgaaggtgcatcgtgcaggtctcttatgctattggtgtgcctgagcccttgtctgtctttgtagacagctatggaactggaaagattcctgacaaagaaatcctccaaattgtgaaggagaacttcgacttcaggcccggtatgatcaccatcaacctggatctcaagaggagtggcaatggccggtttttgaagacagctgcctacggacactttggaagggacgacccggacttcacctgngaaggtgtgaagcccctcaagtgggaaaaagc

SEQ ID NO: 517 - DNA, 273 bp, Gossypium hirsutum
  Clone ID: LIB3083-012-Q1-L1-B9
ggattccattttcgcggtgctttctctaaaaagggccctgtcaaattttacagtagtggtgcttacattcttagacaagcttccaaaatcataatatctaatttgcttgccctaatgttcatcgtacaagtctcttattctattgatttacctgagcccttgtctttctttgtatacagttatgtaactttaaatatttctgacaaataaatcctccaaattgttaagtataacttttattttatgccctgtataatcaccatcaacctttat

SEQ ID NO: 518 - DNA, 372 bp, Gossypium hirsutum
  unsure (1)..(372): unsure at all n locations; Clone ID: LIB3083-012-Q1-L1-C1
gcaagatggcaccccatggcccggaaataacactcgtgaggatccgggaatgattcangtctatctaggaagtgccggtgcactcgatgtggatggcaaagagctgcctcgacttgtctatgtttctcgtgagaaacgacctggttatcagcaccataagaaagccggtgctgagaatgctctggttcgagtttctgcagtgcttactaatgcacccttcatattgaatctggattgtgatcattacatcaacaatagcaaggccatgagggaagcgatgtgctttttaatggatcctcagtttggaaagaagctttgttatgttcaatntccacagagatttgatggtattgatcgtcatgatcgatatgc

SEQ ID NO: 519 - DNA, 302 bp, Gossypium hirsutum
  Clone ID: LIB3083-012-Q1-L1-C10
gtaagaaagttaccagcacagctgatgatcaaatgcttgaactatgggagtctgctgagcatgaatgtggtgttgattcaaaaaccaatgacatgcaggtacgggcttttgtaccgggggagatcattgcttgtcatcagtccagtgatctagaaccggaaaaccagagttctttgggagcattggtggagaaagagttgagcgttgataagttagagatatctaccagcattagagagccaaagaaacgagctaaaaaccgaaaggtcttagacagacttgctttgatgctaataaattga

SEQ ID NO: 520 - DNA, 293 bp, Gossypium hirsutum
  Clone ID: LIB3083-012-Q1-L1-C11
tgattcaagaaatacccaatttgtgttttgatttgagtagtttgaaaggaaaatgagttttagctttaagcaatcaggtttagctacatgcatgaatgttacaaattctgggtttcataaaagattaatttcaacaatttgtagcagatcttcgttttcaccatgtttgaaccttcaaaatccggaaagaagaaatctttcagtgtcaaaaccattgcatatttcatcgattgagaaaattaatgagaaaaaaccagtgtttgaatgcaaggcttttgaagctgacaagtcac

SEQ ID NO: 521 - DNA, 168 bp, Gossypium hirsutum
  Clone ID: LIB3083-012-Q1-L1-C12
ttattaaatatacccccacattttattatcataggcgagggctataggatattgctgattgagaatgaacaataattcaaaaatcatgccattcagttccggcctgatcaactggtctatatttaaacatgacataaaacattactatcttccatccaagaatcaaac

SEQ ID NO: 522 - DNA, 455 bp, Gossypium hirsutum
  unsure (1)..(455): unsure at all n locations; Clone ID: LIB3083-012-Q1-L1-C3
gcggccggctctagaaacctagtgnganntcccccgggcctgcagggannattcggcaccgaggaataccagcncactcanntcaattcaaatctgatggatcaaagatcccatcgtactgtcaagannaaagctgaaggggtgagttctcgtgctcggatggcctaagaaggggagggctaacaagggggatggaagggtcggatcaacaattgtctgcacaacacatatnntactttcctgtgaattggggcacgcttgcaannngaagaatttctcgggccagattactctnntctgggtganaggaagggttttggcccgagttgtataatagggcgtattggaagaagcactaatcaaagttggtgnngcaatcaagcangtctttgatcgtaatggacctgcaaggggaacccgggaaattcctttgttgaaagtatnttgatgttgag

SEQ ID NO: 523 - DNA, 363 bp, Gossypium hirsutum
  unsure (1)..(363): unsure at all n locations; Clone ID: LIB3083-012-Q1-L1-C4
ttttcttcttctttgctgcagcagactctgcaggttcatcctcacgttctttctcacctgtggcatcagcagctataactggctctggctctggctgaacctgggctttctcctcctggggaggggctgctgttgtgggttttgttacggcaggcccctcaccaagttcagcaagaattttatccaaatcttcctcctcttgttcagtccttccactcttattcttcttcttattcttcttcttgttcttcgaggtttccacagcctcttcactcttgttgttggttttagaatcaacagcttcaacattactagttcctaaactngatagttcggttttcaccatgtctgaacttcactttg

SEQ ID NO: 524 - DNA, 167 bp, Gossypium hirsutum
  Clone ID: LIB3083-012-Q1-L1-C6
ccgccgcagcaatgtctttgatcctttctctcttgatgtatgggatcctttcaaggacttccccctttcttcttcactcacctcacaaaccccggaaacctcagcgtttgtgaatacccgaattgactggaaagaaaccccagaagcgcacgtgttcaaggctgatg

SEQ ID NO: 525 - DNA, 293 bp, Gossypium hirsutum
  Clone ID: LIB3083-012-Q1-L1-C7
gagcaaatcaatggttatctgtcagtaataagatatatgtactaataactgatatcgttcagaacatagctaaggcttcttagtgcattattgcaggtcatgtatattatgtgtttttatgcagagcacacacccaactctccccctttcagcctgaaactacgaccccactaaagcagaagcttagttgccagaagcagagaccccattttgagacaataacaaagttaccaccataatttcatatggtacaatatacaagcattaatttgtggtgccagtaccctcaactt

SEQ ID NO: 526 - DNA, 344 bp, Gossypium hirsutum
  Clone ID: LIB3083-012-Q1-L1-C9
tcttcacattgtttacttgcattgcctacatcggtatctgatatggagaagactttatatgcattttcagacagctagaaccgttttccaaacgagctatctctagaccagcgaagaaaagggagaagttggtattcgccatagggaagactgaagagaaatgtgatgctttcaaaggcaggtggctgaggcacgagtagacccgtccgctgtatcaagaatcggagtgtccgtacatacaaccacagttgacgtgtcacgaacatggaacacctgatactgagtatcacagatggagatggccaccttcatgctgtgatcttcctatttacaatgctacattt

SEQ ID NO: 527 - DNA, 277 bp, Gossypium hirsutum
  Clone ID: LIB3083-012-Q1-L1-D10
agggggatcgcacattttgctcttgcattaccaacaaaatcgtaagagattttttacaaacaagataaatcccttttagaatcacagcaaatcaacaattgtggcaaaaaggaaaaataaaataataacaaaggtttgtaaaacaccatttagcactccacgccacattgtttaagaactggacctttttgtttgggcaagaagggatcgatccgtacccaaacaagtgagaaaatctattccaaaagtattgaccaaagcactacaatggtgggcg

SEQ ID NO: 528 - DNA, 308 bp, Gossypium hirsutum
  Clone ID: LIB3083-012-Q1-L1-D11
gagagaactagtgtcgagtttatgatggaagctggttcggacgcatggagagggacagaaaacctcacagaaaataaagcttgaatataaaggagtgcttcattcagatgttgggtctgatcgggttcagttgggtttggttggttgagcctcgatgggaagatttgatttgtgaacttataattgaattttaatttgtgttcatgatttcgaatgtataatggtagaaacaaatgtatctgcctattcattcatgtttcacatatttattctatttcttataaaaataagtatgaattaccatagtc

SEQ ID NO: 529 - DNA, 326 bp, Gossypium hirsutum
  Clone ID: LIB3083-012-Q1-L1-D12
aaaacctgtcattattgagcttattgatgccaagaccaaggagcccaaggacaccttggaggtagatgcagccttaattgcaaccggaagggcaccattcaccaatggtctcggcttggagaatgttaatgtagtaacacaaaggggtttcgtgcctgttgatgagaggatgcgagtaattgacacaaatggcaatctggttcctcatttgtactgcattggtgatgcaaacggtaaaatgatgcttgctcatgcagcaagtgcacaaggaatttcagtggtggaacaagtgacaggacgagatcatgtgcttaatcaccttagca

SEQ ID NO: 530 - DNA, 194 bp, Gossypium hirsutum
  Clone ID: LIB3083-012-Q1-L1-D2
gaaggattccgcgccagggaaaccaccaccgatttcagatccttcttcccagctctggagaaaggactgggtgccgaaagggaagaacaaccatggggcttgcatttacaaagctctttatcccgcttttttgccagaaagagaagcctattttaatgggggggcttgatgccactggtaaaaccaccattttg

SEQ ID NO: 531 - DNA, 258 bp, Gossypium hirsutum
  Clone ID: LIB3083-012-Q1-L1-D3
ggcctgctctaaagggccgggaggtatgggtcaaatcgtgcaagaaaatcagaagggcatagagatgatgcagtcgaccacccttggaccataaatctatacttgctggactgaaaaaaaaggtgcatggaattgctccactcgctcagctaggaggcacacagaaagaactcaacattgcattgagcaagtatccaaaagctcttgagaaaacccttaatcctgatatattcaaagcttatcgaaatatcgagtttg

SEQ ID NO: 532 - DNA, 384 bp, Gossypium hirsutum
  Clone ID: LIB3083-012-Q1-L1-D4
gtgtcctcccatcctcgagctgctttccagcaaaaatcaggctctgctggtcaggtgggataccctccttatcttggatcttggccttcacattatcaattgtgtctgagctctccacctccaatgtgatagttattccagtcaaaattttcacaaaaatctgcattccaccacgcagtcggagcaccaagtgaagggtagactctctctggatattataatctgcaagtgtcctaccatcttctagctgcttgccagcaaaaatcaacctctgctgatctggtggaatcccttccttgtcctggatcttagcttttacattgtcaatggtgtcagaactctcaacttccaaaagtatagtctttccggtgagagtcttcacaa

SEQ ID NO: 533 - DNA, 331 bp, Gossypium hirsutum
  unsure (1)..(331): unsure at all n locations; Clone ID: LIB3083-012-Q1-L1-D5
aactacgattaaaagctatgcggtacggatggttntcgtgaatgaagatgttagaaagaaatcagcgaacattccgcccaaaaaaaagtgcaccctcaggaagtaagggtgcacagcttaaaaagcacattgatgctaccttgggcagtggaaacctaagggaagcagtaaggctacccccaggggaggatttacatgaatggctcgcagtcaatactgtggatttcttcaatcaagtgaatctgctctatggcacccttacagagttttgtactcctgagaactgtcctacaatgactgcangccctaagtatgaatatagatgggcaga

SEQ ID NO: 534 - DNA, 348 bp, Gossypium hirsutum
  unsure (1)..(348): unsure at all n locations; Clone ID: LIB3083-012-Q1-L1-D6
ggccagcccatgagcatggtcttgccaggtgttgttgggtgtaactattangaaagttgagggatggtgtgacagctaccgatttagtgttgacagttactcaaatgctgaggaagcatggggttgttggcaagtttgtcgaattctatggggaaggcatgagtgaattgtcattagcagaccgtgcaactattgccaacatgtctcctgagtatggtgcaaccatggggtttttccctgtggatcatgtcaccctgcaatatctgcaattgactggcaggagtgaagagactattgcaatgatagaatcttatttacgggccaataagatgtttgtagactacaatg

SEQ ID NO: 535 - DNA, 342 bp, Gossypium hirsutum
  Clone ID: LIB3083-012-Q1-L1-D7
ggtcattcttcatctttacccagaatgcgaagaacagtgggccgaacaatggaccccatgaaccatagccgttgttgattgcgtctgaaactccggccacgactccgaccatgttcagtattatcagagttgtgggagggattaagagagttgtccatttgaagagataaagttcaccgaattctgtatcgtctgctgcttttgctgttacggtgaagttggtgtctactccagctaggactttgaggaggccctggaagacagcaaaaagatgggcggagacacctccgatcacccagaattgttcattgcattctgggtcattcttcatctttacccatt

SEQ ID NO: 536 - DNA, 387 bp, Gossypium hirsutum
  Clone ID: LIB3083-012-Q1-L1-D8
ccatattcaatctactaggaaagccatgggagaggggggggcagattcaccagggacatgcaaaggtgaaacaccaaggctaatgatactcgaccaagctttgaggcaacaaaggtcttatcatcaaatgaacatgatggaatcacatccatggagaccccaaagaggcttgcccgaaagatcagtctcggttcttcgagcttggttatttgagcattttctacacccgtatccaagcgatgttgataaacatatcttagcccagcaaaccggtctctcaagaagccaggtatacaattggttcattaatgcaagagtgagactatggaaaccaatggtagaagacatgtattttgaagaaacaaaggaacatgaaaacaaccacat

SEQ ID NO: 537 - DNA, 299 bp, Gossypium hirsutum
  Clone ID: LIB3083-012-Q1-L1-D9
cccataagctaaccacaaaggaaagcctggagagagagcgataaacaacgcttacagatggtagccaaaaacgacacgaccgctaggactatatctaccctccaccgacccctttaaatgacatggctgaactcaacgtcatggtctcttaacagaaccctaatacatagtacacagccactctattcattacctatgtcactaatgctactgttattatctacatgaaacaacaagacgcatgtaatatgcttcatctcttgggtatgccatgcgctttgggtggcatcatctatata

SEQ ID NO: 538 - DNA, 310 bp, Gossypium hirsutum
  Clone ID: LIB3083-012-Q1-L1-E1
gggttgttaaaaagcttcaggattcggggatgcttgattgtctgcaattgctacacttccatattggatcccaaatcccttcaacagctttgcttcaagctggtgtcgtcgaagctgctcaaatctattccgaattagcccgtcttggtgctgacatgaaagttattgacattggaggcggccttggaatcgattacgacgggtcaaaatccggtaattctgatctctctgtttcttatggccttcaggaatatgcttcagctgttgttaatgctgttcggtttgtctgtgaccgtaaatctatcaagca

SEQ ID NO: 539 - DNA, 190 bp, Gossypium hirsutum
  Clone ID: LIB3083-012-Q1-L1-E10
tttactgatatgtaccaagaaagatataaagatgtggagatgaatagttctaagaagagactaatggaattgaaagccatagggagaatagaacgtgatttacattgaacatacatcaatgtcatcagcatagccctttttctttactgatatttacagatttgatgttaatgggttttttaaaaaatat

SEQ ID NO: 540 - DNA, 300 bp, Gossypium hirsutum
  Clone ID: LIB3083-012-Q1-L1-E11
aaaacccattattctgtcatcactatggaggccgaatgggtgctatgttttacaatggcagcactaatggcagtgtcaaatggccaggaatcagtgaagccattggtgaagatagttaaaggcaagaaactttgtgataaagggtgggaatgtaaagggtggtcacagatttgttgtaaccaaaccatttctgattatttccgaacttatcaatttgagaaccttttcactaaacgtaatacaccggtggcacatgcggatgggttctgggattaccattctttcattacggcggcagct

SEQ ID NO: 541 - DNA, 293 bp, Gossypium hirsutum
  Clone ID: LIB3083-012-Q1-L1-E12
gcttgatcttgaattcttattggaagacctcgagaccgtgaaagttatcggcaatggccgtggaggtccggtacaacttgctcgccatatatgggatggaaaattatatgccttgaaggttataaaaatgaacttacaaaaagaggaggttcttaaacaattcgtgcagtatcttaaaataaacaaggcatcaaaatgttcgaatgtcgtgtcttgcaaccattcattctatcacagaggagacgtatttcttgtattagactacatggaccggggatctttgatcgaagtgc

SEQ ID NO: 542 - DNA, 213 bp, Gossypium hirsutum
  Clone ID: LIB3083-012-Q1-L1-E3
ggcaacttatctcacctgctgggatcatttttggtatttggcaggggcggtttaattttgctcaaataatggtttctctcttcactgatgtttccatacaattagtggcattggcaaagctcccgttctactttaatggtggatcatccaaaatttgcgtccataggccccccaaattctggatgacttattagaagaagcagaaaagaaaat

SEQ ID NO: 543 - DNA, 312 bp, Gossypium hirsutum
  Clone ID: LIB3083-012-Q1-L1-E4
gagaagagagagagaactttttggcggcattggacaagtgggaagaattaagcagaagcgtggctataaagatcaatggccatggaatattaaaatatacacagatgagaaaggaaaccagaaaggtgatgcagttttgtcttatgaagatcctcaggctgcccactctgctggcggtttctttcacaatcatgtcatgagaggctatacaatcggagtggctatggcagagaagactgcgcccaaagtatatgatcatggaagtggtaaaggtggctacggaggtggtggctacaggcgcaaggatagata

SEQ ID NO: 544 - DNA, 326 bp, Gossypium hirsutum
  Clone ID: LIB3083-012-Q1-L1-E5
accagagagaaagtacagtgtctggattggaggatctatcttggcatcactcagcaccttccagcagatgtggatttccaagggtgagtatgatgagtccggtccatccattgtccacaggaagtgcttctaagttttgtaattgcttttgatggtgatctacattttgcatttagttggctttttttggtgtgccgtgtcaagtgaactcaaaagtctggtttatgtgggggaagttagcgatcattgtaggacggtgtacttgatattgacgtattattattttagcctttcaccgtatcaccaccattaagatgatgggccct

SEQ ID NO: 545 - DNA, 383 bp, Gossypium hirsutum
  Clone ID: LIB3083-012-Q1-L1-E6
atctcacaaaggatattgatggaattgtggatgcgctggggaaagaggaaatgtattttccttctatattgagccatgaagtgaaatttcaattttattcgttgtctttgtttgctgcttttgtgttttagggaggcgtttaaagcaaaactaatacattaataaggagggattgcagatgcgctggcgaaagatggaatgtatttactggttctattctgagcctcggggtagaatttcggctatatctgttgtctcttgctgctagttgtcgtttggcgaggcatttttcttgtatcttgtttcgagattttgtcatagttttattttgagtgtttgtttttcttctacttctggtgatgtattttgttttggagtgggat

SEQ ID NO: 546 - DNA, 301 bp, Gossypium hirsutum
  Clone ID: LIB3083-012-Q1-L1-E7
gctcaacatgccataagcgcgtaggtcagacaggattgggctgcaggtgtggaaacctcttctgcgcggctcatcgatactcagacaaacacgagtgcactttcgattaccaggctgctgctcgtagcgctatttctaaagccaaccctgttgacagagctgcgaaactggatgaaatttaatagtgctggatgaaggtgaagatgcgcgtactcaaatatgatgattctccctctattccttgggtatggggcccattgtagtgaaggtttataagttgtgtgctagtctccccatgata

SEQ ID NO: 547 - DNA, 304 bp, Gossypium hirsutum
  Clone ID: LIB3083-012-Q1-L1-E8
gttttttatatcctactcgcatattgaagacagtcgttggctgattttctataaatcggttctctttacttaactatggccaagaacgacatatctgaccaataaaatacaatgcaactccatgaagtatctatagccaattcaaccatacacactcaatctccacaacccttacaactactacaaccaagaagacaactagagacaacatgaatatgataataaatgattcatagatgatcatgtggaggatgaacatgtagatgaagctgaatagacggaatacttccatcaccataatctg

SEQ ID NO: 548 - DNA, 265 bp, Gossypium hirsutum
  Clone ID: LIB3083-012-Q1-L1-E9
cagtttcaacccaatcaccgtcgcgcttgtcacggacgaggacatcgctattggggaaggttccttcctttccttcgagcacggaactaaaaacacgaccctcttgaaagctgccatcactagtaacaaccaagaactcgatgacacgttagctgccaattttaagaaagctttcaagagcaagacggggctgacattaaagatcaagctcgatgctaaactgctagcatatatgggagcattggatacaccaaaagtcgggata

SEQ ID NO: 549 - DNA, 234 bp, Gossypium hirsutum
  Clone ID: LIB3083-012-Q1-L1-F10
cgcaaactccgcctcagttcttcttccaaattgaacctggaccgtcgatctgggaccgtcgttgccgtctccgatgttgttaagcaaaagaaatccaagtccacccacagtctcctaattacgaaagaggaaggattggaattatacgaagatatgatactaggaagagcatttgaagatatgtgtgctcagatgtattacagaggcaaaatgtttggttttgttcatctttac

SEQ ID NO: 550 - DNA, 302 bp, Gossypium hirsutum
  Clone ID: LIB3083-012-Q1-L1-F11
cgcctttttcttctgattgctgagctctctccggcaacagcaccatggcagatagggtataccccaaacaagcgacaaatggcaccgccgccacatccaacccttcttttccggccactaaagcacaacaatacggagccacccgccctgtctaccgtccacaacccgaacgccaccgctaccgccgctcttgctgttcttgctgcctttggaccaccatagctatcctcgttctcatcctcatagccgccgtagcttctgctatattgaacgttctttaccgccctcaccgtcctactttc

SEQ ID NO: 551 - DNA, 299 bp, Gossypium hirsutum
  Clone ID: LIB3083-012-Q1-L1-F12
ctcttgccgcgaaacaagcatataacagttacgcgctctgaaataatgaaatagaatcacgttatttttttaatttttttaattctttttaaattttcacagggaattcttgaattaatttccaatccaggtttcgatcaacagattctctcaactcgtgatggtgttggattctaatgtaatgagtaacaagtagtgttatatgggctgcagacagaaaggaaaggaatgggtggttgttgctgctgttgctcttctagaggagttgaaataagtagtgcaccagcatattattatta

SEQ ID NO: 552 - DNA, 348 bp, Gossypium hirsutum
  unsure (1)..(348): unsure at all n locations; Clone ID: LIB3083-012-Q1-L1-F2
aacccctggacatcccgagaactttgaaacacctggagttgaagggacaactgggcctcttggtcagggtattgcaaatgctgttggattggctcttgctgagaaacacttggctgctagattcaacaagccagacaatgagattgttgatcactacacatatgttatcttgggagatggttgtcaaatggagggtatttcaaatgaagcttgttcacttgctggacactggggacttggaaagcttatagctttctatgatgacaaccacatttcgattgatggtgacactgaaatngcgtttactgagaatgttgatacacgttttgaggggctagggtggcatgt

SEQ ID NO: 553 - DNA, 264 bp, Gossypium hirsutum
  Clone ID: LIB3083-012-Q1-L1-F3
ctccaaggatggtcatactcgtgagcacgcattgcttgcttttacccttggtgtcaagcaaatgatttgctgttgcaacaagatggatgccactacccctaaatactcgaaggctaggtatgatgaaattgtgaaggaagtctcttcctacttgaagaaagtgggatacaaccctgacaagattccatttgttcccatttctggttttgagggggacaacatgattgagaggtctaccaacttggactggtacaagggccctac

SEQ ID NO: 554 - DNA, 322 bp, Gossypium hirsutum
  Clone ID: LIB3083-012-Q1-L1-F4
gatgctttgaatagagaagttagagaaaagaaagagaggctggagcgtgagaggcaacaaagggaaagagaagaggaagagagagagcaaaggaggcgtgaagtagagagggaaagggaggagaaggagagagaacaaagaaggcttgagaaagagagggagcgaattatgcagatggagagggaaagggaaagggccagacaagctgttgaaagggctactagagaagcacgggaaagagcagctgctgaagctcgtgcaagagctgaaagggcagctgttgaaaaggcagccactgaagcccgagaacgtgcggaaaggg

SEQ ID NO: 555 - DNA, 176 bp, Gossypium hirsutum
  Clone ID: LIB3083-012-Q1-L1-F5
ccgaacataacttcaagtgatgcacttgctgaagcttaacaagggggcacgcttgatgccttaagtccgtgccatgtaattaatgatttgggtgggttgaggatttcaaaaacagttgtggcttgaacttgaagttcaagcaatgatcccttacctttcggaaatggaagttcata

SEQ ID NO: 556 - DNA, 342 bp, Gossypium hirsutum
  Clone ID: LIB3083-012-Q1-L1-F6
ccacgttcctcgttcatggctcaacccaaacaggaatttgttggttgtgtttgaagaatggggtggagatccgaatggaattactttggtacgccgagaaactgacagtgtctgtgctgatatctacgagtggcaaccgaacctaatgaattacctgatgaaagcctctggtaaagtcaacaaacccctaaagccaaaagtgcatttagagtgcgatgctgggcaaaaaatctcagcagttaagtttgccagttttggaacaccaggaggagtctgtggaagctaccgcgaaggaagctgtcacgctcaccactcttatgatgcttttactaggctttgtgt

SEQ ID NO: 557 - DNA, 203 bp, Gossypium hirsutum
  Clone ID: LIB3083-012-Q1-L1-F7
ctgccttgaacatggaatccagcctgatggccagatgccgagtgacaagactgtcggaggaggtgatgatgcttttaacacctttttcagtgaaactggtgctggaaagcacgtccctcgtgctgtctttgtggatcttgagcctactgttattgatgaagtgaggactggtacttaccgtcagctttttcaccctgagcaac

SEQ ID NO: 558 - DNA, 336 bp, Gossypium hirsutum
  Clone ID: LIB3083-012-Q1-L1-F8
ccttactcctattattcgcttcctttttgtacaccagaagagatagtggacagtgcggagaatcttggggaagtgcttcgtggtgaccgtattgaaaactctccttatgcatttacaatgcaagagccacaattgtgtactgttctttgccggattatgattgatgccaaaactgcaaagcagtttaaagtgaagattgacgatgaatatcgagtcaatatgatcctggataaccttccccttgttgtccctattaaaagattagatcaggcttctaatactgtttatcagcttggctaccatattgggcttaaaggccaatatgccgggaacaag

SEQ ID NO: 559 - DNA, 312 bp, Gossypium hirsutum
  Clone ID: LIB3083-012-Q1-L1-F9
cagtcttctaatacacaccaatgctggtggcaccggggaactgcatgcactgaatgtgcaaatattcattaacatgcatcggtcggactatgcagagagacagctgaaggtcatgcagcagattgatcaggatcatacactgacacaactagcaaatgcatgggtgaacctggcagtgggtggttccaagatacaggaagcctactctgatcttccaagatttctctgagaaatattctatgactggactaattctcaatgggaaggctgactgctgtatgcatatagggaactttgattaaacttaaacac

SEQ ID NO: 560 - DNA, 223 bp, Gossypium hirsutum
  Clone ID: LIB3083-012-Q1-L1-G10
cgagtaaaaatcaaacgaaaaacaacttaaataagattgagggattttgattttgatcatcaaattttctgtttctgatccaccagtccagtcagagtgttgaagtattgaagctgtctggtgttttgtttgttttttgaaatctgatgtctccgccgcttcttggcgtggaagaagggggtcaaaacaatgtgactttactgggttcttctggctctattga

SEQ ID NO: 561 - DNA, 170 bp, Gossypium hirsutum
  Clone ID: LIB3083-012-Q1-L1-G11
gttcaagatatggactctctgttggtgcaaattgtgtgtggctcgtgcgtattctgatgataatttgttatcccatcgcttaccctattggaaaggttctggatgctgtgcttggccatagtgatgctttgtttagacgggctcagttaaaagccctagtcttcattcac

SEQ ID NO: 562 - DNA, 303 bp, Gossypium hirsutum
  Clone ID: LIB3083-012-Q1-L1-G12
atacttccgagccatatctaacaagcccttttcgatcaaggcatcaatcagagcattgtatgcaaactcattcgggctacttcctagttcttccatcttcttccaaaccataaaaaccagtcgaagaaatccccatctcccaaacttcctcataagcatcacatatgtgtccatccttggctgaaccccattcctaatcatcaaatcaaacaacttaaggatctctctaagcttctcaagagacccaaaaaaagcaatggtatgtaatcacatcaggtgcacaatcattctttagcatttgat

SEQ ID NO: 563 - DNA, 277 bp, Gossypium hirsutum
  Clone ID: LIB3083-012-Q1-L1-G2
cagggttatttttttttttttttttttggcacaaccttaaaactttagtgaacattgaaaggttacctcttaaggggacaaaaagcaatccttcttaacaatatacttaaaacacccactcaaggtatatagccagtgaaagtacaaaaagatttcaaggaatgaaatacggagactagtttacaacaataaaaatatggctgatgaagtaaaatgaaattttgaggaacatgggggatcattgactgcgactgctgatttcttgtaatatggatct

SEQ ID NO: 564 - DNA, 271 bp, Gossypium hirsutum
  Clone ID: LIB3083-012-Q1-L1-G3
tcgaggacctatttaactataaagacttggatgaagaatttttggagcgggttactgagaacactcgaagatacattgaaattttcgcaggtgccattgacgagcttttaccggagcctactgaggcatttcatgatgatgatcatgatatattgatgacacagagagccgaggacgctaccaataatacagatgggtctgatccgcgtcagaagatgcctccagagattaaacgttactatgaagtttatatcagagcaccttcaaaggg

SEQ ID NO: 565 - DNA, 233 bp, Gossypium hirsutum
  Clone ID: LIB3083-012-Q1-L1-G4
attattttttaggtgatttaattcttaaaatttgcatcagatcggtggttttcggtgcataatagtttggaaaaatggaaggtatcatcgttagaagggtcatcccctcagataacagctgccttttcaatgctattgagtatgttatggaccatgacaagaccaaagcttcggaattgagacaggttatagcagcaacagtggccagcgatccgacgaaatattctgaggca

SEQ ID NO: 566 - DNA, 290 bp, Gossypium hirsutum
  unsure (1)..(290): unsure at all n locations; Clone ID: LIB3083-012-Q1-L1-G5
anaaaattacaaatcaatttcttgggtttctcgcagtttgtgaatctatagtttgtataaccttactctgtgctgtcacgaagatgaaaggttacattcatacttgggatcactcctgatggagactacattgcttcatctcaccattgcaatatgcttcaagcactntctaaacacagctctgtggaaaattacttaatccgaacttacaaaaggagcttcaatggatttgcagctaagctaactaatgaagaggcaaagaaactttcaagctttaaaagagtggtttc

SEQ ID NO: 567 - DNA, 303 bp, Gossypium hirsutum
  Clone ID: LIB3083-012-Q1-L1-G6
cacaatcactcaatctttgacattgtggcaaccgtgaagcgtgccccgtgggttccctacggttttcatggactatttgtgagggaaagtgatctaaataagctgtagaagtagattcacttcctctcggtcgggttcaggtggatgatcattcattaaacacatataatagcagtgaataccatagcagatgaaagttacaaggcgtttacaacatattgtataaacatatagtattttgttacagatgattgaagtcccaatatcataatcattgcatgtaatccttgtatctacatttta

SEQ ID NO: 568 - DNA, 237 bp, Gossypium hirsutum
  Clone ID: LIB3083-012-Q1-L1-G7
gaagtgattgttactatgcacaatctgaaacccgaagctgtccttgaaatgcttgagagatctacaagccactctaccccaaaataagcaccaaacccagagacctaaacttaactataacccttatagacgaaaaaacctataaccgaacgctgacacccattcccgcaccctgttattgggcatcaaaacccgctacattagtaccctgatacgggaactgacccaccgagacta

SEQ ID NO: 569 - DNA, 412 bp, Gossypium hirsutum
  unsure (1)..(412): unsure at all n locations; Clone ID: LIB3083-012-Q1-L1-G8
acggccatatacataaaatcacgtactatatgaggtaacgaaaccaatacccctggaccgggagctcattcaactctcacggctattgctacctctagaatgaaaattgggcgtatcgaggatggtccacccatatcgacagatagcacccggaaaaagggtggtcgaagagggagaaggctataaactagcacattatgttctagcaaatctatccttcagtgttttttcggtggtattggaatttggttatttggtaataactggtctttatgagccctttttcatagttttatattggtgtattttatattgcaataatgttttatatgaatctcatgtcataagtagaaatgnttaaatgaaaatagtctggtgatatttttattaaaaaattggtgggttttatcac

SEQ ID NO: 570 - DNA, 262 bp, Gossypium hirsutum
  Clone ID: LIB3083-012-Q1-L1-G9
tcgaatgttactaataagaaatggcaactgaacaggcaaggccttaaaatgaagacataaatatggatcaattcgaagatgacaataaattttaagaatatgaaatcgatggagagtgggatgacaaggaacaaagcaaggaagtgacacagcagtaggaagatgaatgggatgactatgatgtcagtgacgacttctcactgcaacttatgaaggaactctagaatcacaccaagaactgaaccagagttgtgcttctata

SEQ ID NO: 571 - DNA, 275 bp, Gossypium hirsutum
  Clone ID: LIB3083-012-Q1-L1-H10
cggcacgagtttttgtttggatgcctttgtggctatctagtgatgtatggacaccattgtggctatcttatgaagtaaggacacccttgcggctttctatttttttatggacacctttgtggctatctagtgctcctgaatgtttttatagctactaagtcaaaggaggacatctaaagtgaagagtatgcctttgtggcgcagtctatgaaatgaccttgggataacaattcaaaggaaaagccaagcaggtgaactttgaatggaactgcagc

SEQ ID NO: 572 - DNA, 284 bp, Gossypium hirsutum
  unsure (1)..(284): unsure at all n locations; Clone ID: LIB3083-012-Q1-L1-H11
tagatgcgtaccctaagataaacgaggatttgtgcagccgcacgctttccggtggcgttatcactgtcntctcctccgttgctatgttcttgctcttcttctccgagctccgattatatcttcatgctgcaaccgaaacaaaactcgtggttgacacttcaaggggggaaactctacgcatcaattttgatgttacatttcctgctcttgcatgctcaatcgttagcgttgatgcaatggatataagtggagagcaacaccttgatgtgaaacatgacataatc

SEQ ID NO: 573 - DNA, 311 bp, Gossypium hirsutum
  Clone ID: LIB3083-012-Q1-L1-H12
gagaaatcctccatgttcaagccggtcagtgtggtgatcgaattggtggcaagttttgggaagtagtatgtgatgaacatggcattgatgccagtggtaactatgtcggcacttcgcctgttcagcttgaaaggcttaatgtttactataatgaagccagtggtggcagatatgtgcctagagctgtgttaatggatcttgagccaggaactatggacagtttacgaacaggtccttatggaaaattgtttagaccagataactttgtgttcggccaaaatggagctggcaataactgggctaagggacat

SEQ ID NO: 574 - DNA, 299 bp, Gossypium hirsutum
  Clone ID: LIB3083-012-Q1-L1-H4
aaaaaataacttgtaggtgtatacgttcaggttcttaaaaagtatgtaagcattcattaaataacactttaacaagtgacagcattgaaaggaattacatcgattaaacaaaatttctcatcctgcatggatccaacaccttcagtgtctgcataaaattttctaggtatgtctagttctcatcactcatcaacttcaacacctgacattggaattcctccactagttttgctcctttcccttaacataatccacaccaaaggcataattatcatcatcatcatccatagcatcatccc

SEQ ID NO: 575 - DNA, 271 bp, Gossypium hirsutum
  Clone ID: LIB3083-012-Q1-L1-H5
aaccagtgaggaaaaaatatcaagggaggttgcccttatctaaaggttgaagggtcaagccatgggcattcctgcaaccaactcaattcacgtttcttaagaattcctcgtttacagatgaggtttcaaaccagacattggtttttcatttagagggtgcattattgaaagcatattcactcttcccttacttcatgttggtagcttttgaagctggtggactctttagagctctcatcttgcttcttttgtaccctcttgtttggttact

SEQ ID NO: 576 - DNA, 300 bp, Gossypium hirsutum
  Clone ID: LIB3083-012-Q1-L1-H8
gcaattttagctgaggagaaacaccttcccatgtgtcaagaaatggcatccaagcccaatgtagagtatattgctggaggtgctactcaaaattcaatcaaagttgcacagtggatgcttcaaattcctggtgcaactggttacattggctgcattgggaaggacaagtttggggaggaaatgaagaagaactcaaaagctgctggtgttaatgttcaatatctcgaggatgaaactgcaccaacaggaacttgtgctgtttgtgttgttggtggtgaaaggtcactcattgcaaatcta

SEQ ID NO: 577 - DNA, 407 bp, Gossypium hirsutum
  Clone ID: LIB3083-012-Q1-L1-H9
cacatcaccacaccaattttaattactttaacacctcctgtccctccttccttcgttcttcattagaatatttcagatttaaacggactcgatccctaagctagttttgtactaatgggagcagttaatgttgcaaacaaggatatcaatgttagcttagctgaaaaaaagcctagagttgtttttgttttgggtggccctggcagtgggaaaggtacccaatgcgcaaatatagtcgaacactttcattacacccatctcagtgctggagatcttctccgagcagaaattaagtctggttcggaaaatggaaccatgattcagaacatgatcaaagaaggaaaagatgttccttccgaggtcacaattaagcttctcgagaaagcaaatgctgaaagtggtaatga

SEQ ID NO: 578 - DNA, 385 bp, Gossypium hirsutum
  Clone ID: LIB3083-013-Q1-L1-A6
gtcacatgtttggtctttggtgaacaaacagaagcccatctggatttggaagcctgaggagattaccaaggaagaatatgctgctttctacaagagccttacaaatgactgggaagagcatttggccttcaagcacttctcattttttggtttatttttattattatgttttttttattattttttttatttattttttttttttatttttatttttttttttattttttatattattttatatttattttttttttttttttttttttatattttatgttttatttattatggtattttttttttttattttttttttttattttttcttttttatttttttatttttatattttgttttcttttttttattattttcttttta

SEQ ID NO: 579 - DNA, 340 bp, Gossypium hirsutum
  Clone ID: LIB3083-013-Q1-L1-B2
ccccatctctatcttttcttctctccctctaaaccaaacccaagcaaattctctatcttcaagcaaaacttaaactatgaattaatcccattctttataaattgctgcaaaatgtttggttttgttcttaatatcatttatttttatttttttcatttcatttattttcaaattcttatttttctttttttcattcttttttattttttatttttttttttttttttttatatttatctttttttttttttatttttcttattttttttttttatatatttttatttctttttttttttttttttttttattttattttttttttattttattttatttt

SEQ ID NO: 580 - DNA, 255 bp, Gossypium hirsutum
  Clone ID: LIB3083-013-Q1-L1-B5
taggattatttttttagacaatgtatctatttcagcgattagctttaatcaaaatctgtgcaggtatctattcatttcattttttataatttctattttctattacttttttttcaccatttacattatatttctatatttatatttattttttttattttcttacaattctattttttatttatttataatattcttttttatttatttattattctttttatttttttttttttatctttttttatttttttt

SEQ ID NO: 581 - DNA, 332 bp, Gossypium hirsutum
  Clone ID: LIB3083-013-Q1-L1-B6
ctgcacgagtctggattcaagtgcggtatcaactacgcaacgacccactgttgtccctggtggtgatctcgccaaggtccagagagctgtttgcatgatttctaactccaccagtgttgctgaagtcttctctcgcattgaccataagtttgatcttatgtattccaaacgtgccttcattcactggtatgttttgtatgttttttaattatgttaattttcatattctcttttttttttttcttaattttatttttatttttttatttattttcttttttttattttttataatttttctttttattatttttttattttttaatattttt

SEQ ID NO: 582 - DNA, 107 bp, Gossypium hirsutum
  Clone ID: LIB3083-013-Q1-L1-B8
acttctacattaattcatcactaacattattattattttctattacaattattcctcgggttaggtttcatttctaacactgatggtaaccactcctatctttttta

SEQ ID NO: 583 - DNA, 149 bp, Gossypium hirsutum
  Clone ID: LIB3083-013-Q1-L1-C2
gaacagattttgacataaaagaaggtccaaaccctacaagaattgcttagaaattggctcctgaaaaacgacacaattttctccacaacggtgaaaaggtatttgaatgggatcaaaccttgtaagaggtgaatatttacataaactta

SEQ ID NO: 584 - DNA, 382 bp, Gossypium hirsutum
  Clone ID: LIB3083-013-Q1-L1-C3
ctgatatttaacctaccttgctcttttctatgaaatccgcttcggtcaatacaaaatggggctacatttttccattattgatacatttccaacaattaaacttcctttagtacaaattttcttgctcagctttttttttcatatttttttttccttattgttcttttaatattttttatatttttttcttcttatatattattattcatattttcttttttttcttttatttttttttttcttttattttttttttttctattattttttttttttaatattttttttttttttttattctatttttatattttcaatttttttaattttttttatttttatttttataatttatttttattatttattttttttttctttt

SEQ ID NO: 585 - DNA, 274 bp, Gossypium hirsutum
  Clone ID: LIB3083-013-Q1-L1-C7
gttggttgctgcacacttaaagtaggaaatgtggagtagattccaccaaataaattgaagtttgacttccttggtaaagattcgattcaatatgtgaacacagtggaggttgagcttcctgtctacaatgcaattggacagtttcacacttggaaaagcaaaagtgatgatctttttgacaagcttgatacaagtaaactaaatgcacattttaaggagctcatgccagggcttacatcaaaagtctttcgtacctacaatgcttccattacat

SEQ ID NO: 586 - DNA, 371 bp, Gossypium hirsutum
  Clone ID: LIB3083-013-Q1-L1-D3
attgattcttttcttgatgttgttcgtaaagaagctgaggattgtttttacttacaaggcttccagatttttcattctttgtgaggtttaactgtttcttttatttttacactttttatttcatattataattttattattctttttttcttattattccttttttatttatatcttttctttttattttatattttttttatttttttttattctttttttttattattattttttattttttttattttatatttttatatttattttatctatatatttttttatttatttttttttattatttttttatttttttattttatctattattttatttttattttttaattatttttatttttatttta

SEQ ID NO: 587 - DNA, 203 bp, Gossypium hirsutum
  Clone ID: LIB3083-013-Q1-L1-D5
catccaattttttgagctagctagctcttactcgaatggggaccattactatgatgttgggaatattttcacttttcttctttttgctcagtgtctgcatcttcattttccttgtatcttattgatatgacttttgttttttatttacttttctgctatcttttttttttgtttatattctttctctcttatttttttttttt

SEQ ID NO: 588 - DNA, 179 bp, Gossypium hirsutum
  Clone ID: LIB3083-013-Q1-L1-E5
ctgagtgggttagttcatttcgctggacttaccggtgtggacgatcttgatgggtgaaggaacttagacaaattgaggtgtttggcacttggccaatggccctgctatcagcaaacgagagactggttgtgattgaaggacctttttgtgattcatcacaagttataggatggcaccta

SEQ ID NO: 589 - DNA, 305 bp, Gossypium hirsutum
  Clone ID: LIB3083-013-Q1-L1-E7
ggaaccttgtgagctgtatcattgtgtgcttgagagcagttcatttcttgaaaagatgaccgtccttgaacatacaattcctttctttctgccaatacgagaagtataaaatgatcttctttcttctaatgccatgagatttatagatcatattggagaattattgcaagcttatgttgacagactggaacaggttctgctcgttaaagaattttattgaaattaaatttgatagctttattattatctttcctaccacatttattaatttttcctttaagatttttatatcaattttctttatc

SEQ ID NO: 590 - DNA, 363 bp, Gossypium hirsutum
  Clone ID: LIB3083-013-Q1-L1-F3
aagcaaccattttccttacaagtttgtttttcttgtgatgaatccgtatggctagctcaatgtcccttaagcttgcatgtctgttggtgttgtgcatggtgatgggtgcaccccttgctcaaggggccataacccgtgctgatggcttattctgccttccacgctgcctttcttttttgtcagggaattgtgattgttctgataccatactttgctatttctttttatgatatcttttttattgttcttatcttttcatttttttcttttctttttttatatgtgttttgtatttttttatttttttttttttcttttttttttttttttttttttattattttttattttattttttatttt

SEQ ID NO: 591 - DNA, 217 bp, Gossypium hirsutum
  Clone ID: LIB3083-013-Q1-L1-F5
aggatgaccagtgaggtaaagatcattaaccaagacaaattcacacatatggcaactataggctataaacatgtacaagatgcaatatacgtagtgagtgaaagttgactttcacagaatgtgtttattaaacatacaaactttaaaaaaaacaaaataacaaaatggggtcagcatatacatatacagatatactcttgctctatcaagtccttta

SEQ ID NO: 592 - DNA, 73 bp, Gossypium hirsutum
  Clone ID: LIB3083-013-Q1-L1-G1
tagggttgctgatgttctattactggataaagcattttactagatagttcatactgacaacaagcattcttca

SEQ ID NO: 593 - DNA, 229 bp, Gossypium hirsutum
  Clone ID: LIB3083-013-Q1-L1-G3
gccgtatgcatcatgggttaagaacgagacactgcgattgtagattaaccgcgatcctggcgcaagaagaagtggatgagcttaaagataaaggcagagggatgggcagaatccaaccggtgaaatcaagcggaggggaggtggacttgatccaagggttcgatttcgcggagtggtttattaacactgttacagatagcgattttttagttattaattttgatttttt

SEQ ID NO: 594 - DNA, 234 bp, Gossypium hirsutum
  Clone ID: LIB3083-013-Q1-L1-H1
gtcaattctttgattattgttctcttcctttctggaatggtagcatttatcattctgaggacactataccgtgacatttctaggtataactaacttgagactcatgaagaatcccaagaagagacattgattgaagcttcttcatgtttatttttacatatctttattaaatttttatctattttttttttttttttacacttttattttaatttttattcatattttatttta

SEQ ID NO: 595 - DNA, 247 bp, Gossypium hirsutum
  Clone ID: LIB3083-014-Q1-L1-A1
cgggatgggttttttttgttgggtacttgtctttgttgcccaagaattgtttggtcaaagttctgcatatttgttgattcatggtgagcctaccaactacgtttctgccgttggggaccctggaatgacgaacccaaacgtcagagttgctttggaagcttggaatttctgcaacgaagttggctttgaagttcctaacgtgggcagcccccgctgggctgattgaactgatctttactgctctttt

SEQ ID NO: 596 - DNA, 354 bp, Gossypium hirsutum
  unsure (1)..(354): unsure at all n locations; Clone ID: LIB3083-014-Q1-L1-A10
tttttttttttttttttactctgaaatgaactcttgatataaataagaggaagaaataagtacccaaaatatcaattatttatatagtttgtacaaaaaagtaggctggctcttctccatatcaagcaatcacaatgtactttgcatgcaagctttgcatctaatttaaagttcttaaattacaaaccacagcgaattcggataaagaaccgagtacttggcccttctgatgatgtaaccttctgatgatgtaaaagccgtaacagcctacaaccattaagatcaaactccatttgtcagagggatgcacctcaaaaccacaagatgtgatgcttccatctacccngtggagtc

SEQ ID NO: 597 - DNA, 310 bp, Gossypium hirsutum
  Clone ID: LIB3083-014-Q1-L1-A11
gagaaggttatcccttcttgttgtttgaaggccagggctgcagcccctgagcttgaggcaaaatgccattctactgttgtttctgggtggttctcggaatctcagtcttccactgatgatgctggtaaaatggtctacttcaacaatcctatgtggccgggagaagcgcattctctgaaagttgaaagcattttattcaaggaaaaatcagactatcaagaggtccttgtttttgagtcatcgacatatgggaaagtgcttgttcttgatggtatagttcaactgactgagaaagatgaatgtgcatatc

SEQ ID NO: 598 - DNA, 277 bp, Gossypium hirsutum
  unsure (1)..(277): unsure at all n locations; Clone ID: LIB3083-014-Q1-L1-A4
gtctcgagtttttnttttttttttttttnnttttagtaagagccttgataaacttgtttattgaaaataccatgaactggaaatatcacccaaagttgccaaaacccaaaaaaaaaaaaaaaacattgaaatctaaagcaacatcatagtcgtaaaggtgtagtcgtccctgaccttcgctcagaactcatctccctcatcctcctcatctccttcagcagagtcagctccaacttcctcataatctttttccagggcagcaaggtcctcacgagcc

SEQ ID NO: 599 - DNA, 304 bp, Gossypium hirsutum
  Clone ID: LIB3083-014-Q1-L1-A5
ctattcactatttttttttttttttttttaacataataagtgccagataatatatatgaatcgaataaacccaaccaaacatattccaaacaaaataaacaatacattccttcaaatacaaaaaaagagtgtcctcaaaaggtaaaaaaataataatgtctcaaagaatacaatataatggtaaagctactctccctcttcctcctaaattccttcatcagattaagctacaacttttttatattattttcccaacgcagcacggcccttacgagcctattagaatttttcttactttatgcct

SEQ ID NO: 600 - DNA, 290 bp, Gossypium hirsutum
  unsure (1)..(290): unsure at all n locations; Clone ID: LIB3083-014-Q1-L1-A6
ggttattggtggtgtgtcggcacatcttttngcggttgccaagggcttctcaaagttcttgctggcattgacactaacttcacggtttcttcaaaagcatcagatgaagatggggatttcgctgaactttacatgttcaaatggacaacccttcttattccaccaaccactctcctcattataaacttggtgggggttgttgcaggaatatcgtatgccatcaatagtggctaccaatcatggggtcccctctttggtaagctattttttggcttctgggtgatcattca

SEQ ID NO: 601 - DNA, 303 bp, Gossypium hirsutum
  unsure (1)..(303): unsure at all n locations; Clone ID: LIB3083-014-Q1-L1-A7
ctattctcgttttttttttttttttttttaaatgagaaattgtgcaagtcactgttgctctggatgcnacttacataaaatcacacaaaaatgagatgggatgggtaacttcactctccctatctacatcaccataacttcagagtaatttctaatatatttatagtaccaaattccatagttaccaaaaagcaacattccatacaaaaccatatgcatccggacgagtctagtatctatctactgatgtaaagatgttcgtaaacaaaaaaacataatccaggaaaccacatttctaacacc

SEQ ID NO: 602 - DNA, 146 bp, Gossypium hirsutum
  Clone ID: LIB3083-014-Q1-L1-A8
tgaactccgataatctcatcccaatttcctcccagcatcgactctgtttgtttcttggtcagtttccgttattaaacaatggaaaagattcaacacaaccatgtccaagcgcgaggattaaagcttcacgtagcccaaagtggaac

SEQ ID NO: 603 - DNA, 364 bp, Gossypium hirsutum
  Clone ID: LIB3083-014-Q1-L1-B1
atttaacgcaattacagggtttttgaaaattaaaatggaggtagagaatgcagaaaaagtaaatctggaacagaaaaagaagcataaagggaaacacgataagccaaagccatgggacgaagacccaaacatagaccgttggaagattgaaaagtttgacccttcttggaaccccgatgggttactggaagtcagctctttttccaccatcttccctcgttaccgagaaaaatacttgcaagaagcttggccaaaggttaaatctgctttgaaagaatatggtattgctgctgagctcaacttggttgaaaggtctatgacagtttcaacaacaagaaaaactagggatccatatgttatcatt

SEQ ID NO: 604 - DNA, 358 bp, Gossypium hirsutum
  unsure (1)..(358): unsure at all n locations; Clone ID: LIB3083-014-Q1-L1-B10
gagtttcattttataatacgatgaccaanttaccttcttggtttctttttttgactgtggtgtctntttttgtttgtgggtttggaaaaaggataccaattctttcattttatgaagggtatagtcagttgtttggagattattatctagttctccacaganatngtaaagctgttcacttgtctttgaatgagaaaacacggtctggatttttgtctcaagacctttacttgcattgtttcttcagtgcttcaataaaattaccttctgattatactgcttgagttgtggttgctttctatatgttaaattgttattttttctaaaataaccaccattaaataaatttttaattctt

SEQ ID NO: 605 - DNA, 216 bp, Gossypium hirsutum
  unsure (1)..(216): unsure at all n locations; Clone ID: LIB3083-014-Q1-L1-B2
tgtaaatattggattgcttggatgtagcgaatctcatattcgatcactgacttaccatggacaccacttacccaactcgacgacgcgccttcgncgaggcaaaccggcgttaatttcggagcggcggttgcgacggtgctcctagctttgcttttacaaatattttgccgttgctgtcgctcaatttaccgtaatcatgtcaagaaatacaagttt

SEQ ID NO: 606 - DNA, 334 bp, Gossypium hirsutum
  Clone ID: LIB3083-014-Q1-L1-B5
ttgaagctatctagctccacattttctatggcttcaaaggttcttgtgattgctgtctttggtcttgatctcattgcttttggtttagctgtggcagctgagcaaagaagaagcactgccaagattgtccaagacagtgaagttaattataactattgtgtctatgactcagacatatcaacaggctatggtgttggtgcatttttgttccttatggttagccaagcccttgtaatggctgcaagcaaatgcttctgctgtggaaagggtttaaaccccagtggttcaagggcctgggcagtcatcctttttataaactgctggttgttttttc

SEQ ID NO: 607 - DNA, 305 bp, Gossypium hirsutum
  Clone ID: LIB3083-014-Q1-L1-B6
ttttgagtaaggaaaaacgacataactatgcataacatgaaaaatataacaaggttcgtgttaacccagctctgcagaattagatgtttgtgcacctaatctggagaactcatttgattgaatcaacaaaacaaccaccacaagacctgcaatattacaccacaagagacaggcatgttttcattgcttctatgttcaaagattataagaacagcatttcatccacagctttactgcttcccccaaatccacaaacaatactctcccttatcaaagatgttattaaggcacaatctcatttacta

SEQ ID NO: 608 - DNA, 174 bp, Gossypium hirsutum
  Clone ID: LIB3083-014-Q1-L1-B7
tgtttttctttattgatggtgataacctcagccggtatgacacactcctcctcccagatgacccaaaagattgctggtatttttgtatttgaatgttgtattcatatatgaacatttgaataagtcagttggaaatggttttatcttgttatgaatatgcattttgagttttat

SEQ ID NO: 609 - DNA, 327 bp, Gossypium hirsutum
  Clone ID: LIB3083-014-Q1-L1-C1
agaaggtagtcatttctaatttcacgttaattttaatttgctttgatttattggttggttggtttctggtgctttctttctctatcctgaaaccacagccgtaaccatgtcttccttgctagccaacggtatttccagcttctcaccacagcctactttcgattcaaccaagttccttaaagggttcttcccaaagctcgattccgtcaaacccataaccccaaaactccaaagttcaaggcttttgaaggtcagagcagatgttggtttcgatcctcaaaccctcacgtcagatcccagctcttcatcaggtaaatcctacgatga

SEQ ID NO: 610 - DNA, 391 bp, Gossypium hirsutum
  unsure (1)..(391): unsure at all n locations; Clone ID: LIB3083-014-Q1-L1-C10
tcanatatgggagtatgtagcaccggtaaaaggagcttttatagtcgagtcttgtggacatgctcgaacggtggagcaactgtatattcaagtccactttgcaccgagttttggggaatggtcaggagagatattctattgcatactttgttgagccgagtcatgactgtcttgtcgaatgtttacccacttgcaagtccgaaaacaatcctcccaagtttccaccgatctattgtgcaacgtacctgagccaacgatacaaggacactcatgctgagttaagcgtatacgagaaacatcaaacttgaagtcctcctggattatgtctaggtataaggttaccttataattttcgtatcataggctcattatcaatttcaatgtgctaata

SEQ ID NO: 611 - DNA, 320 bp, Gossypium hirsutum
  Clone ID: LIB3083-014-Q1-L1-C11
gtaccgtggtgatgttgttcccaaggacgtcaatgctgcagtcgccaccattaagaccaagcgcaccattcagtttgtcgattggtgtcctactggattcaagtgcggtatcaactaccaaccacccactgttgtccctggtggtgatctcgccaaggtccagagagctgtttgcatgatttctaactccaccagtgttgctgaagtcttctctcgcattgaccataagtttgatcttatgtacgccaaacgtgccttcgttcactggtatgttggtgagggtatggaagaaggagaattcttaaaggctcgtgaggatc

SEQ ID NO: 612 - DNA, 237 bp, Gossypium hirsutum
  Clone ID: LIB3083-014-Q1-L1-C12
ccgccccaagttttttttttttttttttaaatttgcttttaaggacctgggggtccaaaaaaagattcattaactataccaaaaactaaagacctaaacttaaccactgtcgggatcttgtatccatgatcctcttcactacatcttttacaaaagaatcgaaacaagttaagcaacaacctttcattaagctcgcctgtccagctgccactctttcaatgtgcacacaatttgatg

SEQ ID NO: 613 - DNA, 272 bp, Gossypium hirsutum
  unsure (1)..(272): unsure at all n locations; Clone ID: LIB3083-014-Q1-L1-C2
caggtanaaggtttagttttacaaacatggctagttcccctgtccttagtttggtttccatgaggctcatggtntncattaccatnatnagtgcacccaaggcagccaaagccgccatcacgtgcagcgacgtggtgaaccacttgatcccgtgcttgtcctacgtacaaaacggcggtacacccgctgcttcatgctgcagtggggtaaaagcactctacggcgaggttcatacctccccggaccgccaaaacgtgtgcaagtgcatcaaa

SEQ ID NO: 614 - DNA, 392 bp, Gossypium hirsutum
  unsure (1)..(392): unsure at all n locations; Clone ID: LIB3083-014-Q1-L1-C3
ggcgcgtctagactagggatccccggctgcanngaatcgcacgaggtcacccctgttagattccaccctgatgagccctataagagcatccccgaatcctccaacaataaagacacttactactacaacaagaatgcctacgagtccactaagcagcaaaacttgggcgaggccattttcaccgagaaaggatggagcaccaaggaaaaccagaacaacaactactacaacggcaacaatggttacaacaatggcgagaagcaaggcatgagcgatactaggtacttggagaatggaaagtactactatgacgtcaagagtgagaacaactattatccaaaccggttcgacaactcaagaggagttgcttcgaggaacgagttcaatgagaa

SEQ ID NO: 615 - DNA, 292 bp, Gossypium hirsutum
  unsure (1)..(292): unsure at all n locations; Clone ID: LIB3083-014-Q1-L1-C4
ctggtgagggtgcaccttacggagtggacatcaacactggcgggagagcatattcatttgcaaactttctnttggagccatcacttgtaaagatcaatgcaatcaatgctgcaactgaggctgcatgtcttattctaagtgtcgatgagactgttaagaatcccaagtcggagagtgcacacggagaagctgctgcaagtgccatgggtggcaaaggtcgtggaggtggttttcctggccctggacgaggaatgaggaagcgtttagataactgtttcatttttttgttatc

SEQ ID NO: 616 - DNA, 272 bp, Gossypium hirsutum
  unsure (1)..(272): unsure at all n locations; Clone ID: LIB3083-014-Q1-L1-C6
gcctgctanctccttcttcgttttcatggacganttccgggagcggtacaataaggagcaccctaaaaacaagtccgttgctgctgttggcaaagccggtggagataaatggaagagcctttctgaagctgaaaagcgaccttatgttgataaggccgagaaacgaaaggtcgagtatgaaaagaacatgaaagcctacaataagagacaggctgagggtccccaagaagatgaggaggaatctgagaagtctgtatctgaagtgaatgatg

SEQ ID NO: 617 - DNA, 341 bp, Gossypium hirsutum
  unsure (1)..(341): unsure at all n locations; Clone ID: LIB3083-014-Q1-L1-C7
atttctttttcttgctagttttanaaatggcagagcttggcttctctaaaggcgtgatgatcatgtttgttgccgttgtgctctcactcaccaccactgcatcagctaaggacagtgcaatggcgcctgcgccgtcaatggataccggagctgctttctcgccggcggtttccggaattgcggttatgttctctctgattgtttcccttgttgcgcttttgaagcactgggttgagtacatttgagtgattgagtattgtatcatattgagtttattattaattaattactgtattggctaatatattttttatttataattaataagtactgttattggt

SEQ ID NO: 618 - DNA, 324 bp, Gossypium hirsutum
  unsure (1)..(324): unsure at all n locations; Clone ID: LIB3083-014-Q1-L1-C8
tttaagctacatgatanggaacatagggaaattcaagagagatgtttgggtttttaactcaagggctgatttgcaaaccccgactgagatttcaatgaaagaacatagggagctttgtttgagacagcttttggggttagttagagaaggaaagatcaagccttttagatatgttgttgaagatcctgctaagtattttgctatttctgaggcggttgggagtattgatatatcacttggtatcaaatttggtgtccagtatagtctttggggaggttctgtgttgaacttatgcactaaaaaagcaccggataagtattttga

SEQ ID NO: 619 - DNA, 351 bp, Gossypium hirsutum
  Clone ID: LIB3083-014-Q1-L1-D11
gagaaaatcaattggccttggaggccatattatttgctaacaaatatttcatcaagaaaacaaagtaattgaaacaattgagagatttttcttaatcattcatggacatttccaatctttcataaagccctctttcacttggcactagcaagttgggttcggagcaacttagcggcagcaaccatgttgttgagtgccggtttcacctctgcatacttgcgagtcttgagtccacagtcagggttaacccacaagatgttggtctcgagcaccgcaagcatctttgtgatcctatcggcgatctcttcggtcgatggtattctttggagaagtgatataataaacaccagg

SEQ ID NO: 620 - DNA, 305 bp, Gossypium hirsutum
  Clone ID: LIB3083-014-Q1-L1-D2
tttccttacaagtttgtttttggtgtgggttatctatatggctagctcaatgtcccttaagcttgcatgtgtggcggtgttgtgcatggtggtgggtgcacccctggctcaaggggccgtaacctgtggtcaagtcacaagctccctcgcaccctgcattggttacttgacagggaatggtgctggtggcgttcccccaggttgctgcggcggcataaaatattttaacttcgccgcccaaacaacaccagaccggcaagcagcttgcaaatgcatcaaaagtgcggccgccggcatttcttgca

SEQ ID NO: 621 - DNA, 326 bp, Gossypium hirsutum
  Clone ID: LIB3083-014-Q1-L1-D3
gtgagttgacatctgctgctgatagccttcagttaaaacgtctagttgatcttactagtcgtgcccttgcacgaattattgagggaaaaagtcctgaggagatccgggagatatttcatttgcctgatgatcttactgaggaagaaaagttggagcctctgaagaacacaactgatgacccgcgcattcgactgttgaatagattgtatgcaaaaaagaggaaggaactaaaggagaggcagaaactaaagaacattgaggttgaagaagagcgtgttgatgatcgttcagttgatgatctcttgtcatttattaatggagacaat

SEQ ID NO: 622 - DNA, 239 bp, Gossypium hirsutum
  Clone ID: LIB3083-014-Q1-L1-D5
gttaaccaaataatttgctggggtgaacccaaactagcattattccatatactgataaaaaagctttttacaaaaaaacttaaatttttccggaaaaaaaaccaatctccatgtttatatatgatatgatatgatcctatatcaaaagcctcaatatacaggcttcaacttattacaaagacttttctcttaaaaacaagagaagacccaaaccccgtttacaatattaaaattttttt

SEQ ID NO: 623 - DNA, 254 bp, Gossypium hirsutum
  unsure (1)..(254): unsure at all n locations; Clone ID: LIB3083-014-Q1-L1-D7
gtttatctatttaattgattgaatcaaaacaatggaacggaataaaattaatgtagggagtgtanattcaacaatgaaaggcgtctccttggcgcccggagattacatccacttcaagtcccaagtcccccttcacaagatacccattggcacaaagcaatggcgatattatgattttggtcccaaagtagtttctcctctcatatgtcttcctggaattgcaaggacagcaaatatctactataaacagatca

SEQ ID NO: 624 - DNA, 237 bp, Gossypium hirsutum
  Clone ID: LIB3083-014-Q1-L1-D8
tttttcgagatttttacacaaaaactatgtgcatataccaacgtagcgggtatatatttataaacgagcagtcaaaacttgaatacacaagacactgtgttgtacaaaatacccccttcaaaaaaaaaaccaaggagataagctctgtacactctctttgccattatttttcctttcattctgcggcacccagttctatgacagtgtatatacacgatcgcaaaatgggggaaatta

SEQ ID NO: 625 - DNA, 310 bp, Gossypium hirsutum
  Clone ID: LIB3083-014-Q1-L1-E10
ttgttctgctagagaaactttgggatgatgtaggggccggacctcaaccggaacgtggccttggccggctgaagaagatcacaaccaccccacccttgtccaccaaagatggggcttcatcaatggcgatgccgacgagtcctactacacctgggacaccgtcgacgccggtgtcggctcgtagggacaacgtgtggaggagcgtgttcaatccaggtagcaaccttgcaaccaaaggtattggcgctgaagttttcgacaagcctcaacctaactcttctactgtttatgactggctttacagcgggga

SEQ ID NO: 626 - DNA, 336 bp, Gossypium hirsutum
  Clone ID: LIB3083-014-Q1-L1-E11
cttttaacaatgaccatttagccttcaacggtaaactctatctcatcttcgttatcggaaagattgttaatctcttcttcattcttgtctatttcctcctccgattctatttcaccattagggagtatcaccattgtgttgcgatttgggcgttggctcgctatgtgccctctcccttgacacttaaaacacttaatatcacgtgttcgggattgagtattttcaatggcccttcctttgctagattcggccacagacttgttggacttcatgggcaccacagtttcttttgattgattcgttgaaacattcttacttgcccccttgttccactta

SEQ ID NO: 627 - DNA, 330 bp, Gossypium hirsutum
  Clone ID: LIB3083-014-Q1-L1-E3
agacacccataaattctacttttgcgagagagtttattctgcgctcttgattccacctccggccgtccttggcgacggtgtttatgccgcttctttttcagcttgtacctgacttggatttagagggatttagtttccttttcaagacatggaacaagtgtgcttctggtcaaattgctaccttttccgagtgtttttcttccaagaagtactcgattggcggttccttgcccgtggagattttcttttggtttcctttgtcaattgcacttagttctcagtctccttttaacactcaacacaggagctggaatgctagttttttctgag

SEQ ID NO: 628 - DNA, 117 bp, Gossypium hirsutum
  Clone ID: LIB3083-014-Q1-L1-E4
catcactttttaaccgactactgattgacaaaaaaaaaactttgtatttgaaccctctattctgctaaactgtttaaacacacacatctcaccttctattgaaggaaaacccctcat

SEQ ID NO: 629 - DNA, 319 bp, Gossypium hirsutum
  Clone ID: LIB3083-014-Q1-L1-E5
aaacagtgataacgttcatccatagtggcgcgaccaacactgacctcaaacaaatcccccactctagtaatgaaaaacacgtcatggtgtttttctagtacgacagataagggtgaaagtacaatcatctccttggtttattattatgacaagctatcatcaattccttaaaatgttcaatgtttttcatcagattgaaattgggtctcataaaatttactaaccttagaacaggggcaaacttggtgggaaccgcacatgcatccattgtctttcatacgttgataaatgattccatccaatctcatccagcaatgac

SEQ ID NO: 630 - DNA, 321 bp, Gossypium hirsutum
  unsure (1)..(321): unsure at all n locations; Clone ID: LIB3083-014-Q1-L1-E6
acagnggagcccgcgggctgcaagaagtattcaacaaagccaattttttattttaatacaaaaaaacataacaatcgtgtcgcttgtaaaaaccatctaagtccaccactcaacaaaatatataaagaactcactatcatcattgcataaaacgagtgacgaaacctcttcaatcaattattattttgttgcttagcttacacctcgtcctcttaatcctagagcggtgtcatcttcttcttcaattccttactcttactgatctaatcaacataccttgctacctgggaaccatgttccaatacatctcatgacatcata

SEQ ID NO: 631 - DNA, 211 bp, Gossypium hirsutum
  unsure (1)..(211): unsure at all n locations; Clone ID: LIB3083-014-Q1-L1-E7
tgttctagaaatcttctttattctcatncttttttcactttagcgcggcgaaacagnatcgggggaggcagnctttcatcaatggcgaaagaaccagttcgcgtcctcgttactggagctgcaagacaaatcgggtatgctcttgtacccatgattgctaggggagtcatgttgggtgctgaccaacccgtgatccttcacatgcttgata

SEQ ID NO: 632 - DNA, 192 bp, Gossypium hirsutum
  unsure (1)..(192): unsure at all n locations; Clone ID: LIB3083-014-Q1-L1-F10
aacttttgataacaacccacccccatcccaaccatgtagtgtcaattaagacgggtcgcattccacaaaattaaaccaccctaanacatcctaatcatcaaccaactaagatatacaatccagcgaatacctctgaacattcttctataaaatacctatcaaatgaaaataattccaaattacaagacaatc

SEQ ID NO: 633 - DNA, 282 bp, Gossypium hirsutum
  Clone ID: LIB3083-014-Q1-L1-F11
gttgttttttcaatcttgattttccttttccttggctcggtagagcgtttcagttcaaagagccagccttgcacgtacggcaaatctaagatttgcaagcctgctctagccacagctgcattcagcaccatatctttcttgcttggtgccatcacttcagttgtttctggatttctcgggatgaaaatcgctacctatgcaaacgctagaaccaccctcgaggcaaggaagggagttggaaaggcatttataaccgcgtttagatctggtgctgtcatgggc

SEQ ID NO: 634 - DNA, 212 bp, Gossypium hirsutum
  Clone ID: LIB3083-014-Q1-L1-F12
gtttttattttaatttacattcaacctttccattgcatgttctaatatttcaaatacacttgcctaccttccatcatattttaaatctcaaaaattgcacgactagcataccaccaactcccttcagtaccatatctaccttacttcttaaccttccttcaattgcatctacatttctttgtatgaaaatatcttcctatacaaacactata

SEQ ID NO: 635 - DNA, 227 bp, Gossypium hirsutum
  Clone ID: LIB3083-014-Q1-L1-F2
ttaatccattatacctgttgagcattcacaagttcccttaacaatttactttcaaatacacccaacaaaaatatcaagtttcaacccaaacacaaataaaacataaaacagcttaacatacagtaaaccatttcaagtctttaacaagcttcaaaaaatagaagcttgcataacacggaagcaacaggtaataaaaaacatcttaagcacactcaatcacacgtact

SEQ ID NO: 636 - DNA, 310 bp, Gossypium hirsutum
  Clone ID: LIB3083-014-Q1-L1-F3
taattttcttccaatgttaaaggagttgtttataggcatgactgaagttccatttatatgtgcagaagaagtctctttgtgggttttggctgcaatgaaagatgttggacttgggttcttaattggagtcggctttgctgctttcagcttcgtttttgccttgggaactatagtaggagcaatgaaaggccaaacgactgaaactgggtcgttcagtgggactggacttggtgctgttgcaggtgcaaccacagcccttcaattgcttgaatcattggctgatggggagttattatcacagataacttta

SEQ ID NO: 637 - DNA, 182 bp, Gossypium hirsutum
  Clone ID: LIB3083-014-Q1-L1-F7
gtttgatgaagctgatcacatgctggctgaagatggtttggaagatgactccttgagaataatgagggatattgaaaagatgagttctcactgccaggttcttctgttttctgccacatttagcgacactgtgaagaattttgtctcaaagatagtcaagagagatcacaatcaactttttg

SEQ ID NO: 638 - DNA, 52 bp, Gossypium hirsutum
  Clone ID: LIB3083-014-Q1-L1-F8
gggcgcgctctaactagggatccccgctgcagatcgccggagctccgtaaaa

SEQ ID NO: 639 - DNA, 250 bp, Gossypium hirsutum
  unsure (1)..(250): unsure at all n locations; Clone ID: LIB3083-014-Q1-L1-G1
ctgcggcggttgcaatatgtcccctgagatgaactttgcggancagaccacaaccgggacacttgttcttggcgtggcaccccggaaagtgcactttgatggagctgaaatggaaactggggctgaaaatggctgcaaatgtggagataactgcacttgcaacccttgcaattgtaaatgagaaaaaaaagctaagcatattattgaagctgatctaaataatatatgatgtatttgggtttttactatt

SEQ ID NO: 640 - DNA, 333 bp, Gossypium hirsutum
  Clone ID: LIB3083-014-Q1-L1-G10
cagcagtccaaattgatgtgtctgggagccggaaagctggtgttatccatgtcccgtaccgattgaggaaagcttttcgcaaggttcatgttaagcttgtgagggagcttgaaaagaagttcagtggaaaggatgtgattcttattgctacccggaggatattgaggcccccaaagaaaggttctgctgttcagaggcctcgcagccgcacattgactgctgtacatgaagcaatgctggaagatattgtcttacccgctgagattgttgggaagcgcactagatatgcaattgatggatcaaagttaatgaaggtgtttttggaccccaagg

SEQ ID NO: 641 - DNA, 101 bp, Gossypium hirsutum
  unsure (1)..(101): unsure at all n locations; Clone ID: LIB3083-014-Q1-L1-G11
ctatattttttatttatntttcccacacccaccggtctggttttaaacaacccccgcacctataaaccaaaactcctttcaaccctcatctcacactcacc

SEQ ID NO: 642 - DNA, 150 bp, Gossypium hirsutum
  unsure (1)..(150): unsure at all n locations; Clone ID: LIB3083-014-Q1-L1-G2
ttataacacaaccatattcttaacacacaataacattctttttataataacacacagtnacatatatattaaagaaaattgggtctaaaaatcacacaaaatttagaaccccatattttcccccctttcaacataaaattataacttctc

SEQ ID NO: 643 - DNA, 311 bp, Gossypium hirsutum
  unsure (1)..(311): unsure at all n locations; Clone ID: LIB3083-014-Q1-L1-G3
gcaagagcttgctttggttcntaagtggacgccggagattggaaaaaaaagatgcgcttgatctgttccaagtttcatttccaactcttcccaaaaaattggtgcttggacgggatgggcaactgcactgcagagtatatggtggatagcaaatactagagaatctattaaggtttcctggctgaattatggcttctgcaagcctaagaaatggtggagcaagtagttcaaggtctgtcaacagtttcaaaagttcttctagttctgttgattggctggggagagaaatgctcgaaatgagattgagagac

SEQ ID NO: 644 - DNA, 154 bp, Gossypium hirsutum
  Clone ID: LIB3083-014-Q1-L1-G5
cagccaatttttttttttttttttttttcaacatccaaatcggaggctgtatcaaactccattatctaccaaaattttttactctcctatcatacctaatgtaattttcaacttttataaaaaaacttctccatccttccacatacacacttac

SEQ ID NO: 645 - DNA, 272 bp, Gossypium hirsutum
  unsure (1)..(272): unsure at all n locations; Clone ID: LIB3083-014-Q1-L1-G6
ttggtgtgcaacaacaacagcgggtgaacaaattatctagcctcantcagccatctatgagttctaattctatgaatcganctggncgattgaaaaccctgaccccatcaaatctcgaagatctattttccactgagagctcttcaccccagtactctgatcaagcattggcagcagttgnnttctctccttcccataaatctgctgnnctcaatcaatttcagcagcagtcaagcatgctatcacccattaatacaagtttttctcctaaa

SEQ ID NO: 646 - DNA, 330 bp, Gossypium hirsutum
  unsure (1)..(330): unsure at all n locations; Clone ID: LIB3083-014-Q1-L1-G7
gcacctcgttaaatcacgattaggttttcttgagtttctgcgaaattttgttcaaaatgcatttgacccttgaattcggtggaggcttagagcttttatgtaaatctgttaaatttcataatgtgaacgttgatctgccaaaaggagcagataagttaagcatgagggatttactagcctgggttcgtaccaatttgatcaaggagagacctgaaatgttcatgaaaggggagtctgtgagacctggtgttcttgtccttgtaaatgactgcgattgggagttgagtggccagcttgatactaccttagaagagaangatgtggtagttt

SEQ ID NO: 647 - DNA, 169 bp, Gossypium hirsutum
  unsure (1)..(169): unsure at all n locations; Clone ID: LIB3083-014-Q1-L1-G8
aaattatatatattcttcattttcaangttggcgatgtggtaaccaaagcggatgctggttgtgggaagttcatttcgatcagcaccacatatatcctactactatgtacattggattcttgcatctgcagtttgagcatttttatttttactattacgaggcttcata

SEQ ID NO: 648 - DNA, 148 bp, Gossypium hirsutum
  unsure (1)..(148): unsure at all n locations; Clone ID: LIB3083-014-Q1-L1-G9
aaaacccggggtccccaaactgcantaatttncactaatccacttttatattttttttttttgcaaaacctactttccgttcgttttaaaacggtggttgagttaacaaaaaaattctcttaatcttttccaattttcatttccaacc

SEQ ID NO: 649 - DNA, 368 bp, Gossypium hirsutum
  unsure (1)..(368): unsure at all n locations; Clone ID: LIB3083-014-Q1-L1-H1
ccaagagaaaaaccttttgtttggggttcttgaacttacctttggatatattcatccatggcttctaagcttcttttgattgctgtatttgttcttgatctcattgcttttggtttagctgttgcagctgagcaaagaagaagcactgccaagattgtgcaggataatgaaattcaatacaactattgtgtgtataactcagacatagcaactggctatggtgttggtgcatttttgttcctcatggctagccaagtccttataatggttgccagccgatgcttttgctgtggaaaggctttgaaccctantggttcaagggcttgggcagncatccttttcattggttgctggctatttttcctaat

SEQ ID NO: 650 - DNA, 213 bp, Gossypium hirsutum
  Clone ID: LIB3083-014-Q1-L1-H11
ttttaatttcaatcatccgctgatgaaactatcggcgatgtaattgagctcgatttgctttttttttcccgaatagtttaaacgcttccatttagattcattacgaaagcgatcttcaaagataaatcagatgaattatatgttgtattggtggttttggaatatgccatggtgatagcgatttgttcttctatggtatacttcccatttgct

SEQ ID NO: 651 - DNA, 218 bp, Gossypium hirsutum
  unsure (1)..(218): unsure at all n locations; Clone ID: LIB3083-014-Q1-L1-H2
ccatcggngcccttcccgggggtggataaaattgctgtgcgcgaggttcnnngggaaatccatgggcactttcttccaaacctgttgatcacaacagccacttccactcccatggcctccccttactctatatatcgccacctttcaatctctgcctcattcaaaagccaggtgaaagaactaccagaagaaaatatcatgttccatacttagcaaaa

SEQ ID NO: 652 - DNA, 219 bp, Gossypium hirsutum
  Clone ID: LIB3083-014-Q1-L1-H5
tcgaattttttttttttttttttttttaacaacataacaggtctacgccaaataaaaaaactgaataaccatacctatattaattctcttaaaatttacagtaaaaaatatattggcactcaatttaactctgattctatacatcgattttttgcagcaatctaagcttctgtatattacacttgcacctgtatcaatctttgtatgttacttcaaaac

SEQ ID NO: 653 - DNA, 259 bp, Gossypium hirsutum
  Clone ID: LIB3083-014-Q1-L1-H6
aacaaaaccatacttcaaacaaaagggaattttcttgtcgggattgggtgaggaattcatcgatggcaaccaaaatgtatattgtatactattccatgtatggacatgtggaaaaactagcagaggagataaagaaaggggcggcatctgttgaaagtgttgaagcgaaactatggcaggtccctgagactctgtcagatgagattcttggaaagatgagtgcaccaccaaaaagtgatgtaccgatcattacaccaca

SEQ ID NO: 654 - DNA, 286 bp, Gossypium hirsutum
  Clone ID: LIB3083-014-Q1-L1-H7
aatttatacttaattttaatcaaaaaaaaaaatgggggtcgttattttattacgaaggcatagactgctaccaaagtttatatattatactattccatatataaacatttagaaaaactatcacatgtaataaagaaaggttctttttattttcaaagtaccaaatcctaactcttgcaagcactcaacactatgctatattatattctaacataaaataactcaccacctataaattattttccaaacatttcaccacattaccatacagaagctaatactttta

SEQ ID NO: 655 - DNA, 62 bp, Gossypium hirsutum
  Clone ID: LIB3083-014-Q1-L1-H8
ttcttctgttttctgagctctctcccccaacatgaccatggcagatatggtataccccaaac

SEQ ID NO: 656 - DNA, 639 bp, Gossypium hirsutum
  Clone ID: LIB3083-015-Q1-L1-A1
attcaacaaagtcctgactatgcggaagagccagattttgaagctggattacaagactttacaacccggttagctaattacgaaaaggtttatgaaccagttgatgaagggtcttacatcaaaatgattgatatggctagtgggcatggtggacaaatacaagttaacaacatgagtggctatcttccaggacgaatcgtcttcttcttggttaatacacatttgacacctcgcccaatactacttaccaggcatggagagagtcgtgataatgttagaggcagaattggtggtgacagtgtattgagtgataccggagaaatttatatgaagaaactcgcaaactttgttgagaagcgactgaaatctgaaaggactgcttctatatggaccagcacccttcagagaacgattctgacagcaagtccaattgttggatttccaaagatacaatggcgtgcactagatgagataaatgctggagtatgtgatggaatgacttatgaagaaataaagaagaatatgccagaggaatatgaatcttgcaggaaagacaagcttagatatcggtttcctcgtggagaatcttacctggatgttatttcaaagcttgaacctgtaattatgagcttgaacgac

SEQ ID NO: 657 - DNA, 313 bp, Gossypium hirsutum
  Clone ID: LIB3083-015-Q1-L1-A10
ctgcttctaagcgttccggaagtggaaggtatgtgataggacggattgcattcacatacgaggaaaacgttgagataggaagcaagctgaaaaacatcatgatggtgggcgatggtatagggaaaactataatcacagggagcaaaatcttctgatgaggatccacaacgttcaattcagccaccgttgccgctgttggagatgggttcattgctcgtggcattacattcagaaacaccgatggacctactaaccatcatgcattggctctacattcaagcttcgatctctaggtgttctacaaattcaattt

SEQ ID NO: 658 - DNA, 333 bp, Gossypium hirsutum
  Clone ID: LIB3083-015-Q1-L1-A12
aatgattctagtgtaaacattgaattaaatcttctcaggtcaagctcccttagtttcgaggggcatcaaatgaatagaaacccaaagctcaagatagtgctctcaaaatggagttagaaaagttaaacgaagagaatcggagactaagaagcatgttggatcagattaccaaaaattacaatgaactacaaggtcaactattaatggcgttgcaaaaacaggcccacagaaatcaacaagaccagaatgattcattatatgggatggcgagtaccataatgtcagtccaacaattcatgtacccactgcctttggctgcattagatgtcaact

SEQ ID NO: 659 - DNA, 289 bp, Gossypium hirsutum
  Clone ID: LIB3083-015-Q1-L1-A2
tgtccataatggtaccttgaatgaagatgtgttaggtgtcaaaagctcaaattttggtaccgatatccctgatgagaaaaaggaaaagatcggagatcagaagttcaccgaccatgtgaaattaagccctgtcgcatctaaatctggtggtgccggagatattcgtgtgcaccataactcaaaagctggtgctaacggcatagcaagtgttcaatctacaccttctcctattgctacaaagaattttgagcgaagctctactctgactccttcgatgtcaaggaagcta

SEQ ID NO: 660 - DNA, 529 bp, Gossypium hirsutum
  Clone ID: LIB3083-015-Q1-L1-A3
ttggattctattagcttcctcttagacatatataccggtagtcttttaatcttatttcatttcgttgatataaccgagagaaatcctccgattacgccattgtcacgcttttcttcactttctgtttcaactacgagcttctttgttggtgacttaatggcgatccgaagagctatgtctggtcgcatcatggatcggacggccgtcgttggtgcgcgatacatgtcatcgtggtggcgtagcgttcaacccgctcccaaggatcctattcttggtgttacggaggcttttttggccgatcaaagtcccgataaagttaatgttggagtcggtgcttaccgtgatgataatggaaagccagttgttttggaatgtgttagagaagccgagcgaaggattgctgggaatttgaacatggaatatcttcctatgggaggaagcgtgaagatggtggaagaaacactgaaattggcctatggtgagaattctgagttgataaaagaaaaaaggatagcagcaggtcaagctc

SEQ ID NO: 661 - DNA, 431 bp, Gossypium hirsutum
  Clone ID: LIB3083-015-Q1-L1-A4
aacaggaacccttcctattccaatctaccgcttgatgtgaggtggtggcttcagttgcagcctagctatggaccccaaaagggtttaacaaatgagcagttatatgccttggaggatgaagtggaaagtttgaaagctgaaataaagtctccctccaatgtaagtagagttcacccgcatgatgcacaagatgcttctggtgttgacagaaaaaagaacaatggaggttctcttgattcaactgagacggtgcgaaactatgaacttttggagatggaatctgttgaatgccatgtttccaaaaaaatcaatgactgctgttacgatccagagtctccttgggctggggatgggaaggcttgaccatggtggcgcacaacagataaagatgagcttgcctctttggttgcacagaagtcgttggatttcat

SEQ ID NO: 662 - DNA, 596 bp, Gossypium hirsutum
  Clone ID: LIB3083-015-Q1-L1-A5
gagaaatcggctttgacaacggacaccaaaggtctgaaatcagaaacatccaccattgacagcaaaacttcgaaaccagaagcttcccaaccagctcaggctggagcctccccttccaatatgggacctgggtttgtcccccccaatccgtttgatttctcagccatgagtggccttcttgaggatccaagcattaagacactagctgagcagatagcaaaagatccttcatataaccaaatggcagagcagctcactatgatgtttcaaggggcatcagccgaagagagtttgcctgagtttgaaccacagcagtactattcgaccatgcaacaggttatgcagaatccccagtttatgaccatggctgaacgccttggtaatgcattaatgcaggatcctgctacgtctagcatgcttgaaagtttgtccaatcctcagcaaaaagaccagattgaggaaagaatggcacgtatcaaagaggatccatcattgaaacatattctagaagaaatagagacaggtggtcccgcaaccatgatgaggtactggaatcataaagaagttctccagaagttgggtgaagcaatgggtct

SEQ ID NO: 663 - DNA, 436 bp, Gossypium hirsutum
  Clone ID: LIB3083-015-Q1-L1-A6
aaaccatttatttttcttcagctctaatcgagaagaacaatggctgacttcaagaaagccactgctttgattctcacagtggctttgcttgtgaatctcgctttaatggttgatgctgatggtgatgatgataagaagattcgagtcaggaaacataagggtgagaaggagtgtatacaagggtgggaatgttcctactggtcgaaatattgttgcaaccaaacgatttcagatgtcttccaggtttatcaatttgtggacctgtttgctaaaaggaattcgccggtggctcatgctgttggattctgggattaccatactttcatttgggctgcttccatttatgagcctttggttttcgggactactgccgctaagcatatcctaattaaggaagtcggggatatactggctcatgtattctcttagacatttt

SEQ ID NO: 664 - DNA, 487 bp, Gossypium hirsutum
  Clone ID: LIB3083-015-Q1-L1-A8
aaacagcggagcaggaaattgattcattaaatactgttcgaatcacaaaaagacagaatggaaacatgtcatttcttacataccgaaagcaaactttttttttcttatgatttgtactaaaaatgctgggaaaagaagaaacttaatatgaaatatacaacaaatacaacctcaaaacaaaaacagatatttttttaacaattgaagaaacacacaatcccatcagtatttttatgtgaacttgaatctcaagccttttctttttcttcatctgatttggagtgtttaccatgaagcttctccttgatcttctccagaattcccttcttttcctttgactccccttcgtgatggggctcagctgctgtggctggagctgtgctactggcctcttcagctttcttgtgaagtccagggagtttctccttgatcttctccaggggggaccccggtcccaattacccctatagtgagtcgcattacaatt

SEQ ID NO: 665 - DNA, 371 bp, Gossypium hirsutum
  Clone ID: LIB3083-015-Q1-L1-A9
ctttacttttctctcaaaaaatagaaaaccagttcagagttcggtcgcattatgtaatggattaatttttttaaagatccgataatgtaatttttttttgtgattttttcaaccaatcagatggcttcgattcgtagaactctgtcgccggcatatcaccaccgttcttaccagaacggcgccggattctcctcttcgtctcacatgtttttacccaacgggaacagcaaacattcctcttcaaggcatttaccgctgttattcactgccttaaatctagtctaccgcacaggatggcggcgatctttgtgctggtgtctcttctttttccttatagggttcgtttttggaatcacgctgtttggaaacat

SEQ ID NO: 666 - DNA, 369 bp, Gossypium hirsutum
  Clone ID: LIB3083-015-Q1-L1-B1
ctctagtttatttctctgctgctttgatctcttcgtctaggtgtttcataaagggcaccaacaatggctcatcctcgttcacctttttgtgaagggaaatgcaaagggaggtgcaataaagcggcggtttgggatcggtgcttcaaatattgcggcatatgttgcgaggagtgtcaatgcgttccgtccggtacttacgggaacaaacactagtgtccttgctacagagataatgtgaacaacaagggcaaacccaaatgcccttgaaaatgaaatatattcgagttcgggatttaatcaagcttaaagatcgatgactaataggccatatatatatatatatgcatgtttatgatgatgttattataa

SEQ ID NO: 667 - DNA, 430 bp, Gossypium hirsutum
  unsure (1)..(430): unsure at all n locations; Clone ID: LIB3083-015-Q1-L1-B10
ggtaaatgtcgtaaaagcgggccttccggaaccgttaagggtttaagaacanaccccacagtgattccagatgaacccgttaatccgagattggcggaaattctggaagctgttgccgtcggaagagagcttatagtggcacttgcaaactggaacgtgaaggagtcgttagagatttggttcacaaacattaagagagttggcataactaattatttggttgttgctttggatgataagatcactgaattttgcaagtcaaataatgttccagtgtataagagagatgcaaatgatgggattgcttncattgggaggacggngaataaccatgctgttttcggaatgaaatttcatatcttgagagagttttgcagctggggtatagtgttctcctttcggatatcgataatgggtatttgcaaaaccc

SEQ ID NO: 668 - DNA, 413 bp, Gossypium hirsutum
  Clone ID: LIB3083-015-Q1-L1-B11
tttataacatcaaggttcttgtagagtacagaaacaaagatcagatccatgttgaatgggccaaagctttgaaggaactgtatttaccgggtctgagggattatgtcaaaagccattatcctcttggcccggtatggagtgcttccggtaaaaaggcatctagtgctccgccaaaagctcctccaccaggggcccctgcacctcctacctctccacctgcttctcttttcagctcagaaccttctcagccttcttcatcaaatccaaaacaagggatgtcagctgttttccaagagattagtagtgggaatgtctctgcacgcctgaagaaggttactgctgatatgaagacaaagaaccgtacagatagaacaggtgttgttagtgccagtggaaaggaaacacgttcaagc

SEQ ID NO: 669 - DNA, 472 bp, Gossypium hirsutum
  Clone ID: LIB3083-015-Q1-L1-B2
gttttgttttgatggggcatttgaggtttctaagatgtagtattagctttttcaaattccaaattcattttcagaattcatcattttttaggtgatagaatcaagaggatacagggctcagtgactcagtcctgcagaaatgatgactgaagaagatgatctatatccatctagtgttaagatgagataccccattttcattttcttcaaggatgtcaaacatgttttcaaactggacgaactgggatcagagatagcacaaattgctttgcctgcggcactggctttgacagccgaccctattgcttctcttgttgacacagcattcattggccaaataggtgctgtggaactggctgctgtaggagtctctattgccttattcaatcaagtctcaagaattgcaatattcccccttgttagcgtcacgacctccttcgtggcccaggaagatacaattggaagagtgagc

SEQ ID NO: 670 - DNA, 428 bp, Gossypium hirsutum
  Clone ID: LIB3083-015-Q1-L1-B3
gttaatgataaatccaatgataagaattctgagagaatgttagctcatctggggatgagcaaatcgagtgatcctgataatgcaagtcaatgcagctcaatttaccatcacgagagaggttttagttctcattcaggagaagaagggagctccggaacggttcgaaagcagtcttcattgtcatatggaggactagtgacggcctctcccttagttggtctgccagaaatttcacatcttgggtggggtcactggtttactcttagggatctcgatcttgccacaaatcacttcggcagcaaagaatgtccttgaaaagggtggatatggggtggttaacaaggttagactgacaatggaacctgagtagccgttaagaaaattcttaataatctgggacaagctgaaaaagaatttagggtggaagt

SEQ ID NO: 671 - DNA, 528 bp, Gossypium hirsutum
  unsure (1)..(528): unsure at all n locations; Clone ID: LIB3083-015-Q1-L1-B4
ctcttgtttctaactttgctgctttgttctcttcttctatgttcttcagtttttgcaccaacaatggctcagcctcgttcacctttttgtgaagggaaatgcaaagggaggtgcaataaagcggcggtttgggatcggtgcttcaaatattgcggcatatgttgcgaggagtgtcaatgcgttccgtccggtacttacgggaacaaacacgagtgtccttgctacagagataaggtgaacaacaagggcaaacccaaatgcccttgaaaatgaaatatattcgagttcgggatttaatcaagcttaaagatcgaggacgaagaggccatatatatatatatatgcatgttgatgatgatgttattataaaaataaacttgttttgttgctgttattttcctttgggtttttgtgttggtagtgttgaataatatttcccttatattttccctctcaccgccgtgtccaccgncatgcacacatngttttgtgtcttttgatcatgggtggtggtgatgatggtgaaaa

SEQ ID NO: 672 - DNA, 394 bp, Gossypium hirsutum
  Clone ID: LIB3083-015-Q1-L1-B8
ccataattcaggaacttctttaaaaccttttgatctaacggtggagaaaaacagcttcttttgcaaagtttggtggataaaaagtaggtctaggtgttgggagggcaaatgcggttgattttctctatctagtctgctttttttcttgtttggctaccgagaaaaattttgttcttgtttctgtttctgggtcttttggttttagtgaaggagaagtagagggaataaaaaaaaacaaaaacagagaagagatctttttggtggtttcttaatttgggttgaagaaaagatgcaacaaaatcagttgaagaaggagctaaaagagatggactttttcaccgaatatggggatgcaaacaggtacaagattcttgaagtcattggtaagggaagc

SEQ ID NO: 673 - DNA, 309 bp, Gossypium hirsutum
  unsure (1)..(309): unsure at all n locations; Clone ID: LIB3083-015-Q1-L1-B9
tttttgttttttttttttttttttttttttttttttttgtnttgtttttattgtttgtttgtttttttgaaattgaatttttttaaaaaaatccccttaattttccattgcctcattttcataatcttcatcattggcatttgcaacagcattttgatattgctgatactccgaaaccagatcattcatgttactttccgcttctgtaaactccattttatccattccttcccctgtttaccagtgcaaaaacccctttttacggaacataacggggaatttttccgaaacaccccggaacatcttttg

SEQ ID NO: 674 - DNA, 466 bp, Gossypium hirsutum
  Clone ID: LIB3083-015-Q1-L1-C1
aagcagctcagtagccgtaaaatctcaccttctgctagaatttctgggcaggcgactcatttgaaggccagcgatgaaatgatgatgagttttccggttcccagaaaagctcgctcagcttcagtgaaaaggtcacatgagaattgggtggctggaaatggtggtttcgtcgatgaacaaaaccatctgcgaggttcggtgtcaccggctcgtcggagcgttgagtctgaccgtgtttcaccgtcttcatcaaatggttcagtcaggaagaagatgaagacgaatcgacccaagactcggcttccaaaggcgaccaagtcttcgagctcagctcaagaggatattgagattgaaattgcagaggttctttacggattgatgaagcaatcgcatagctccaagaaggaagatagcgctggaaacccttcgtcaaagcttgaatctgaagatgcgaatgttttctcta

SEQ ID NO: 675 - DNA, 98 bp, Gossypium hirsutum
  Clone ID: LIB3083-015-Q1-L1-C10
ttattctcttctctctcgtcgccatcgcctcttctgaaggtttgtttcaaaaaccccttggaaaatgattggaaaattcgttgggtaaaatctgcctg

SEQ ID NO: 676 - DNA, 162 bp, Gossypium hirsutum
  Clone ID: LIB3083-015-Q1-L1-C11
tgaagtgaaagccactgctggtgacactcatcttgagggtgaggttttgattaccggatggggaaccaatttggtcaagaatttaaaaggaaggaccaggagggcctttatggttaacccaaaacctttaagaaggttaagacctgttggtaaaaggccaaa

SEQ ID NO: 677 - DNA, 433 bp, Gossypium hirsutum
  unsure (1)..(433): unsure at all n locations; Clone ID: LIB3083-015-Q1-L1-C12
atctcagttatggatggacattccaaaatccaacctaggcggcacgatttccccgaaccgttgctcattgaggttgatcagatctaccatcttgcttgcccggcttcgccaatcttttacaaatacaatcctgttaagacaatatagacgaatgtgatcggtacattgaacatgttgggtctggcaaagcgtgtcggatcaaggattttacttacctcaacttcagaggtntatggagatccctntgaacatccccagaccgagagctattggngaaaatgtaaccctatcggagttcgaagctgctacgatgagggaaaaacgagtggctgaaactttgatgttcgattaccataggcagcatggcatatagattcgaaattgctcgatcttcaacacttatggaccacgcatgaacattgatgatggtcgt

SEQ ID NO: 678 - DNA, 353 bp, Gossypium hirsutum
  Clone ID: LIB3083-015-Q1-L1-C2
tggacgtgccgcgtatactggtggtggcagaccattggcattaggacaggcttcaagggatcggtcaagtcaatcacgaggaacaggcggatactctgggagagccggttcaggaatgagaggttaccagatggatgcttcagctcgcatggttagtctcagtcggggtgttcgcggttagttgtatttcttagcagtaatcttaacctaattttgtcaaagttatttacttggggttgaacttgattattggattttgtgttttgccatttatgcaatagctgttggactcaaaaaaaaaaaaaaaagcaaaaagaaaaaaaaaaaaaaaaaaaatatataaacataaataa

SEQ ID NO: 679 - DNA, 525 bp, Gossypium hirsutum
  Clone ID: LIB3083-015-Q1-L1-C3
gtgggtttagtaacaaataaagctctgaagcccatcaacaataaaatttctggttttatgcttttgtatcttgccagaggaaattaatggtggatttagctgaccagcagcacagttgatgtttttatagtttctaatacaagcaatcttcttctgaagatatatctcatatgactatcgttgtttcttatacatctcttgaataaagaaagggctactttttgttctgcaagaatggagaggtacaagttactcagggaagttggtgacgggacatttggttgtgtgtggagagctattaataagctgtctggtgaagttgttgcaattaaaaaaatgaagaagaaatattgctcgtgggaagagtgtgtgaatctgagagaagttaagtctctgacgagaatgaatcatcccaatattgtgaagcttaaggaagtcatcaaggaaaataatgttctgtactttgggtttgaatatatggaatgcaatctttaccagcttatgaaagacagaaaaaagcatttt

SEQ ID NO: 680 - DNA, 533 bp, Gossypium hirsutum
  unsure (1)..(533): unsure at all n locations; Clone ID: LIB3083-015-Q1-L1-C4
aatccccaggttaaggaaatccgatgcattgccatgccaccgcaatggggtactcatcagcaagtcaatcttccatcagctcttcctgaacatgatttcttgaatgatctggagcctttgggatggctccacacacagccaaatgagcttcctcaattatcgccacaggatgtgacatcccattctcggatattagagaataacaaacagtgggatggagagaagtgcataatcttgacatgcagtttcactcccggttcttgctcattaacagcctacaagcttaccccaagtggttatgagtggggacgggttaacaaagattcaagaagcaaccctcatggttaccctccaacgcattatgagaaagtgcaaatgctcctaaatgatcgggtccttgggatttatatgatacctgacaatggtccgtggaattacaanttcatgggagtgaggcatacagtgagcatgaaatacggggtgaaactggggacaccgaaagagtactacaatgaggagcataggccgacaca

SEQ ID NO: 681 - DNA, 312 bp, Gossypium hirsutum
  Clone ID: LIB3083-015-Q1-L1-C5
ggcttgcttatgagcatggtcttgccaggtgtggtggggtttaaactattaggaaagttgagggatggtgtgacagctaccgatttagtgttgacagttactcaaatgctgaggaagcatggggttgttggcaagtttgtcgaattctatggggaaggcatgagtgaattgtcattagcagaccgtgcaactattgccaacatgtctcctgagtatggtgcaaccatggggtttttccctgtggatcatgtcaccctgcaatatctgcaattgactggcaggagtgaggagactattgcaatgatagaatct

SEQ ID NO: 682 - DNA, 403 bp, Gossypium hirsutum
  Clone ID: LIB3083-015-Q1-L1-C6
cggctcgtttaaaaaggcatggagcaaattggagaacaacgtgtattagaagcacaacttagaatgaggcagcaggaacttcaggatgaagaagaaagaatgcagaaaagacgagaatcgagtacttcaactggtgttgcaccaggagaagttcaaaacagttcggttgcagctcgttcatctggtgcggaggaagtagtttcttttcaagattcacaacctgccttgatgattaaacaaccttcaaatcctaggtcaaacagggatgagtttgacatagatcttgagggcataatggtcacggaagcaatttggcagtcaattcaggagaactgtggacacagaaattctagctgcagagatgctgcttctttagtccaacatgtttcaggatatcgttata

SEQ ID NO: 683 - DNA, 604 bp, Gossypium hirsutum
  Clone ID: LIB3083-015-Q1-L1-C7
catggctttttcaccaaaactcttctctatgtgtatgctcttcctttttgccctcttctccatgcaaatccatgctagagagtacttcagcaaattcccaagagttaacatcaatgagaaagagacaacaaccagagagcaaaagcacgagaccttcgttccccagaccacccaaaagccagaagaacaagagccaaggttcattcctgaaacccaaaatggttatggcctttacggccacgagtcaggctcaggctcaggctcaggctcaggctcaagccggcccagtttcaccaccaaagaaacctatgaaccctatgtcacccctgttagattccaccctgatgagccctataacagcatccccgaatccttcaacaataaagacacttactactacaacaagaatgcctacgagtccactaagcagcaaaacttgggcgaggccattttcaccgagaaaggatggagcaccaaggaaaaccagaacaacaactactacaacggcaacaatggttacaacaatggcgagaagcaaggcatgagcgatactaagtacttggagaatggaaagtactactatgacgtcaagagtgagaacaac

SEQ ID NO: 684 - DNA, 573 bp, Gossypium hirsutum
  unsure (1)..(573): unsure at all n locations; Clone ID: LIB3083-015-Q1-L1-C8
ccttcactggtttagaaccagtgggaagttcctgcagaagcaaatcagcaaatgggatccttctctttttcttcatcactttcaaatggattttcctgacgggttatttagtgccggaggaaagtcagacatagaaggcatattccctcctccatactttgaatggttccaattcaacaaggaattcacagagtacacaaaccttgaggaatgcatctctcacttgtgtcaatatatcacccacaatggcccttttcatggattgctcggcttttcccagggtgcaactcttggtgctcttctattgngctacaaggcacaggggaaggtgttaaaggagcatccacctttcaaaatgtttgtatcaatatcaggatcaaaattcagagagccaagcatatgcgaggtggcttacaaagacaaaatcgatgtgaaatcagttcacttcatcggagctaaggattggttaaagttgccttcngaggatttggctactgctttccatgatcctcttatcataaagcacccccaaggtcatactgtcccacgtttggatgaggtatccatagagca

SEQ ID NO: 685 - DNA, 386 bp, Gossypium hirsutum
  Clone ID: LIB3083-015-Q1-L1-C9
gcagatttttgtgaagacacttactgggaagaccatcggcctggtagttgagagctctgacccaatcaataatgttaaggccaaaattcaagataaggaaggtatccctccagaccagcaaaggctgatatttgctggaaagcagctagaggatgggaggacccttgcagattacaacatccagaaggagtccaccctccacttggttctccgtctccgtggcgggatgcatattttcgtgaagaccctgactggaaagaccatcaccctggaaagtgagagctcagacacgattgataatgttaaggccaagatccaggataaggaatgaattccttcagaccagcataggctgatttttgctgggaagcaacttgaagatggga

SEQ ID NO: 686 - DNA, 344 bp, Gossypium hirsutum
  Clone ID: LIB3083-015-Q1-L1-D1
aacaaatacactttaagcaaaggcatttgctcttttatctgaggagggaattgctaaaggagttcgaaggataactgctgtcaccactgagagtgctttgaaggcaatggaattgggtggcctgcttttgaaggaagtagatgatgcttccaatatggaagtaagcttgctggaaaagaaagtggcttctctaaaaactactgtggattctgcatcaattcctgctgcccagaaagctgatattagggccaaaattgcacaacttcagaatcaactgaaaaaagcacaaaagaagattgctgaacaaaatatgcagagagctgtcgcgacagcaaccgaattgg

SEQ ID NO: 687 - DNA, 392 bp, Gossypium hirsutum
  unsure (1)..(392): unsure at all n locations; Clone ID: LIB3083-015-Q1-L1-D10
ctgaagctttctgactggcaagattttgttggcattatgggctctttttattaggaatgcagcaataagtttcatacaagagaacaatgctggcaatgcagctgctgctttaatggctcgtcttgctcctaaagctaaggtttttcgagatgggaagtggtctgaagaagaggcctctattcttgttccaggtgatatcatcagcattaaactcggtgacattattccagcagatgctcgactcctcgatggtgatccactcanaatcgatcagtcttcattaactggtgagtctttttcggtaacgaaaggccctggtgacagtatttactcgggttctacatgcaaacaaggagagattgaagctgtcgtgatcgccaccggtgttcata

SEQ ID NO: 688 - DNA, 413 bp, Gossypium hirsutum
  Clone ID: LIB3083-015-Q1-L1-D11
cgcggactataacttcatcaaaaaccacacggaacctgggcatgctttcaatggcgaacgctggacccggaacaaacggatctcaattcttcatctgcacgaccaagacggagtggctggacggaaagcacgtggtgttcggacaggtagttgaaggcatggatgtggttaaagcgattgagaaggtggggtctagcggtgggaggacttccaagcctgttgttattgctgactgtggacagctttgaaaaagggcttattgaattgtgtttccttcataatatctggtctttttaggctccttttttttatgctatgctgcttctatggctactgggttttggtgttttttaagaagttgcttgatgtagctttttcattaactgccataaataagataggctttaattttc

SEQ ID NO: 689 - DNA, 296 bp, Gossypium hirsutum
  Clone ID: LIB3083-015-Q1-L1-D12
tctttgcataatatatcttataaccgacctactattttgctggcttaaagtgtaaagggagaggaagaaattccgcatggtacagttgctgagttgacccctgacatgccagatgttttgccacatgtttctgtccgagcaacaaattgcaaggtgcgctttgctacttgatgcgatcctaatagtctggctgacctacaagcggacttagggaaactgttgcacctatgaccttcatctgcagatgtagatgatagagaggagaatgaaggcgagctagttgatggaagttcaag

SEQ ID NO: 690 - DNA, 467 bp, Gossypium hirsutum
  Clone ID: LIB3083-015-Q1-L1-D2
aagaaattaaagttccaatcatgaagcttgacaccagcggactagaatcggctgctcctgtctggggtgctcccagtgaacttgttgacgggttttcggctgctccgtcgttcgatctcccaaacactactgattttgatgggtttcaaaaagaagctatccagatggtaaaacctgctaagggtaccaccacgctagctttcatctttaaggaaggggtcatggttgccgctgattctagagctagcatgggaggctatatctcttcacaatcagtgaagaaaattattgaaatcaatccttacatgcttggaacaatggctggaggagctgctgactgccagttttggcaacataaattaggcatcaagtgccggctgcatgaattagcaaacaagcgtagaatttcagttacaggggcatcaaaactgttggcaaacattctctattcttaccgaggaatggga

SEQ ID NO: 691 - DNA, 438 bp, Gossypium hirsutum
  unsure (1)..(438): unsure at all n locations; Clone ID: LIB3083-015-Q1-L1-D3
cttcaaggtcaagttccgaccacgttctttgggcttgcacatttgcaggctgtggaactagaaagcaaccaacttaatggtacattggtaatcggcacgagttttaccaaccaactacaactcgtagatttgcagaacaataagatttcggaattcaatgatgccggatacaattttgaaatagtacttgtagataacccggtgtgtatggagactggaaaaaccgacaagtattgccaactaccttcacgaaagtccttgtattcaacacctcaaaagaactgtgtatcgggttcatgtcgttcgagtcaaatcacgagcccaacatgtacatgtgcatatccatataccggaacactacttgttagaggctataccttcacggagataggaaacacagctncgtatctttctcttgagcaaagcttgatgaagttc

SEQ ID NO: 692 - DNA, 459 bp, Gossypium hirsutum
  unsure (1)..(459): unsure at all n locations; Clone ID: LIB3083-015-Q1-L1-D4
ctcgtgccgcgttattccaaaaagcagagaaaagaacgttaaggaggaaagatgttgggaatagtaaggcaaaaaatgttagggcagtcattgctgaagattcgtcctgcaatatcggtgttacgaagttactcatcagcagcaaaacagatgacagtgagagaggcattgaactctgctcttgatgaggaaatgtcagctgatccgaaagtctttttaatgggtgaagaggttggagaatatcagggtgcatacaagatatccaaggggcttttggagaagtatggacctgagagggttcttgatactccaattactgaggctggttttgctgggattggggttggtgcggcttactatggtctgaagcccgtagttgaatttatgacatttaacttctccatgcangcgattgaccacattattaactctgctgcaaagtccaactacttgtctgct

SEQ ID NO: 693 - DNA, 431 bp, Gossypium hirsutum
  Clone ID: LIB3083-015-Q1-L1-D5
aacacgtcctacagggtacattttcacttagctaaaaattacttttttcttcttttttcttgcagttgaaaattagaattttgtagatttatttttatttgtgtttgagatagacaagtgatacaaactcgcctcggtgatgattcgagttgtttgttgcccgatcgttaaaatgaagaagtatcgttcttgaacagaataatggttgaatttggctaagtaagactttaaacaaaggttggctagatggttcagaggttataattgtgttggggatggtttggttaagtataatgatgatggaaaaatggttaaatgaatgaggattatggaaattcggctaatcaaagaaacaagataaataagttggataatgtggatgggaaaacgatcttaagcccaaggaagaaccaacactatatcaagtgttg

SEQ ID NO: 694 - DNA, 305 bp, Gossypium hirsutum
  Clone ID: LIB3083-015-Q1-L1-D9
cttcagtgtacggaagcaaatatcatataaagcttcatggtggattccatacattgatgggcattctcaacaagctggtgaacagagagagtagcattgtaaggttcgacaacagtgtcagacaccttatgggaagggaacacagagaaagtgagcatcattcggtctgggtattcttctcggatcttggaaatcaaaagtgtttccatgcccgatccagatacttctaccaatgaatggcatacttgtaatccttgcaagcagtcacagttttcggcttctttcgtaccacatctagcactgat

SEQ ID NO: 695 - DNA, 537 bp, Gossypium hirsutum
  Clone ID: LIB3083-015-Q1-L1-E1
cagaaatcttgaggaaaaaattattcatgcaacaaacacaagttctgctacaaatgaggcttgcaaaggattggagacagaagtacccaaggttgcatctgaaaaagttagaagcacttcacctttccgtcgttttagcttcagcatgggtaagataggcaaaagttctggcctcaaagagggctcttctatgcctcagatgagctcaacatgtagttctgccaaaaccaagccagagaatcttgttgcttctggtgttgatacttcttgtggtgataaactcaatgctaaaagcagagcaaggtccaagccttttgagaagactaatagagccgcttctgaaaccaaaggcagtgaattgtcgcagttttaccaatcaattacaggagtcaattgtaacagaaggtggcttgaagtcatcagaacggacaggacattcaactatgactatgcaaccagcaaaagtgaaatcagacacaaccagcacaacagtaaatgattcagcactgaacaaaaagtgcggatcttcagcagttc

SEQ ID NO: 696 - DNA, 422 bp, Gossypium hirsutum
  Clone ID: LIB3083-015-Q1-L1-E10
agatattttaagggccaaagaatacccctgaaaaggccgatgttttggaacagcagtgtgggcaggaagttatgatgcttgctacactgaagcatccaaatattgttcgatttattggggcttgtcgcaaaccaatggtttggtgcattgtgacagagtatgcaaagggtggctcagttcgacagtttctaacaaggaggcagaatcgtgctgtgcctttgaaattggcagttaagcaggcattggatgttgcaagagggatggcctatgtgcatggacttgggtttattcacagggatttgaaatcggataatcttctaatagctgctgatagatcaataaagaatgcagaatttggagttgcacgtattgaggtgcagactgagggcatgactccagagactgtgacataccgttggatg

SEQ ID NO: 697 - DNA, 411 bp, Gossypium hirsutum
  Clone ID: LIB3083-015-Q1-L1-E11
ggcttgccgatctagaagcgtagccggatgccctcgggctagttcgacacgaggctagaagttctagctcgtattgacactaatttcactgggacagacaacgcaactgatgacgacgagtccggtgaattgcatactttcaaatggacaacccttctaattcctgcaactactgtcttaatcatcaatttagtcggtgtcgttgccggcatctcagatgccataaacaatggataccaatcatggcgacctctttttgggaagctcttcttctctatctgggtgattgtccatctctatccattccttaaaggtttaatggggagacataacaggacaccaaccattgttgttatatggtcagtgctattggcttgaatcttctccttgctttgggtccgaattgatcca

SEQ ID NO: 698 - DNA, 370 bp, Gossypium hirsutum
  Clone ID: LIB3083-015-Q1-L1-E12
cttctgattcctttattgctttgtagaatatttcttaagcgaggatgagagagtgcattgcgatccacatcggtcatgccggtatccaggtcggaaacgcttgctgggagctttactgtctcgagcatggaatccagcctgatggtcagatgccaagtgacaaaactgtcggacgaggtgatgatgcttttaacacctttttcagtgaaactggtgctgggaagcacgtgcctcgtgccgtcttcgtggatcttgaacccactgttattgatgaagtgagaactggtgcttaccgtcagctctttcacccataacatcggatcagcggcaaggatgactcagctaacaactttgtccgtgggcactacac

SEQ ID NO: 699 - DNA, 552 bp, Gossypium hirsutum
  unsure (1)..(552): unsure at all n locations; Clone ID: LIB3083-015-Q1-L1-E2
tctctcccttcccatcatccccccaggccccagctgcgttagcaccgtcaccttccgccgaaaacaagcaataatatctcttcattaatttagccatgcctcttaacttgatagcaacgaaaccagaacatggcatcagtagtggcccattggaggctctgtcagagacgcctgagccccacaacagtgctatgcttgcgtttccaatacaacgcaactcacaacctcctgtcagactcaccactttgtatcctataactatgaagtttgaagagatcgtgtacaaggtgaagttggagcagaaagggtcatgctggggtggatggatcacacgagaaaagaccatactcaatggcatctcaggtgttgtttatccaggagaaatactagcaatgttaggtccatcaagaaagtgtaaaaccacccttcttaactgctctggagccgnctcactggcaagctatcccggaagatcacatacaatggtcagccattttgtggtgccatanagcgaaaagcaggattcgtggctcaagatgaatgtttgaccct

SEQ ID NO: 700 - DNA, 474 bp, Gossypium hirsutum
  Clone ID: LIB3083-015-Q1-L1-E5
gacagcggaggaattgtattacattattgcaaaaaaacagtacatgtgatggtattacagaaattgtttgtgaggccccacatggttgcatattagcctaatgttttgtctccctctcatccatctcagcacgatcttcatgtgcctcttgcttgtaagtcctctcagtccaacctccttgattcgttcccaagtatcaccgacggtgaggggcccatgctccttgagaatgtcaaaggtgacactctgcttatggtctgcgtttgctcaggcgacgtttttaactcgattggcttcattttcggcttgggtttcgttgaaagtaccgaatcatactcccaaacatcttgcttttaatttcattttatattaattggataatattaattaaataatattataaatgctatatatatcatgtcaatttgcttttaattctaaaatatttaaaccctaacatttatacactatgac

SEQ ID NO: 701 - DNA, 238 bp, Gossypium hirsutum
  Clone ID: LIB3083-015-Q1-L1-E7
ataaaatggatgggcttgatcccaaattcaacattgtttcccctggtgctgatatggatatatactttccttacaccgaatagaagcggaggttgaaacatttccatactgagatcgaataccttctttacagcaaagttgagaatgaagaacacttatgtgtgctcaatgaccggaacaagccaattctgatcacaatggcaaggctttaatcgtgtcaagaacttaacccggactt

SEQ ID NO: 702 - DNA, 441 bp, Gossypium hirsutum
  unsure (1)..(441): unsure at all n locations; Clone ID: LIB3083-015-Q1-L1-E9
agaacctgttacagaaaaccgaagctcttaacccgactgagaatgcaccccagaaaagcaggacaagtgtgaatactaaataatggacaagaaacgaagtaatccaatggagtggttgaatcagatggtaggagagccgtattatttcttccatttcctagctttcttctcttatttcatcgttcggagctctgcttctaatgtcctctcccctcaaatcactcaactactctattatagggaaattcaagcggttttggccttctttatgctgattgcatacaagatggcaagagaagatacatgggaggctttcattgctgatacnattgtttttgggaaagatctttcttaattgcccttactctaataatggactatcactnngacttgtggtattaagtgggtgtttcagtgatatatgtttaacacagcaacctc

SEQ ID NO: 703 - DNA, 508 bp, Gossypium hirsutum
  Clone ID: LIB3083-015-Q1-L1-F1
acgagagccacactgctttcactcttcctggtctctaccgtgttgtacatggtatcgatgtgtttgatcccaaattcaacattgtttcccctggtgctgatatggagatatacttcccttacaccgaagagaagcggaggttgaagcatttccatactgagatcgaagaccttctttacagcaaagttgagaatgaagaacacttatgtgtgctcaatgaccgcaacaagccaattctgttcacaatggcaaggcttgatcgtgtcaagaacttaaccggactcgtcgagtggtacggcaagaacgcaaagttgcgtgagttggctaacctcgtagttgtaggtggtgataggcgaaaggaatctaaagatttggaagagaaggccgaaatgaagaaaatgtttgagctgatcgagaagtacaacttgaacggccaattcaaatggatatcatctcaaatgaacagaatccgaaatggtgaactttaccgatacatttgcgacacgaa

SEQ ID NO: 704 - DNA, 430 bp, Gossypium hirsutum
  Clone ID: LIB3083-015-Q1-L1-F12
ggtgccgttgctgattagttcatcagcttgattgaatctgacgcctattatgttcgcctgcaccgatctgttgctgtaaaaagaaatggataatttaatttctcttgtgaacaagattcaaagagcttgcaccgctcttggtgaccatggagaagcaagtgcattgccgactctttgggactcattacctgcgattgccgttgtcggcggtcagagttcagggaagtcttcggtgctcgaaagcattgtcggaaaagattttttaccccgtggatcaggaattgttacccggagacctctggtgttgcagcttcataagagtgatgaaggaagcagagaatacgctgaatttcttcaccttccaagaaaaagatttaccgatttcgctgccgtcaggaaagagattcaagatgagacggatagagaaact

SEQ ID NO: 705 - DNA, 244 bp, Gossypium hirsutum
  Clone ID: LIB3083-015-Q1-L1-F2
cagaatcacttttctttcactcttcctactctgggccgggttttacatactatcgatccctttaatcccaaattcaacattcttaaccctgcctctaatacccacatatacttaccttacacctaacataatcccatatttaaccatttccatacttatatccaacaccttctatacatcaaatttgataatgaacaacacttatgtccactcaatgaccgcaacatgccaattttctcacaat

SEQ ID NO: 706 - DNA, 438 bp, Gossypium hirsutum
  Clone ID: LIB3083-015-Q1-L1-F4
ggaaggtatggttttattcaacagatctaattgtattgtgcttttctccacattctaatcaatgttctttttatgaaaaaaactaatcttgttattgagttctgattactgggttgttgatactgaagcggaatcaataaaaagatacaaatttcctctcttttaagcaattttgaaatctggttttcttcaaaaagagaaaaacaatatggttacagttaatatagggatgcttcattacattctagaccatgtatatggtgcatttgtgcatagaacaaagattagcccaccgttcttctcaagagggtggggtggaacaaagcttgagcttctggagagattgataagcccagtggtccctgaagttggaaggcaaaactgggcctcaagcttgatttcacccaatttgagaactgtttgggagacccaaaatgc

SEQ ID NO: 707 - DNA, 265 bp, Gossypium hirsutum
  Clone ID: LIB3083-015-Q1-L1-F5
tgatcttgttgtcattcatggccatgaagagggtagggctctgaagaacttggatggtcaagtttgtgagatttgtggtgatgaaattgggttgacggtcgatggagatcttttcgtggcctgcaacgagtgtggttttccagtttgtaggccttgtattagtatgaaaggagagaatggagtcaacaatgtcctcaatgcaaaactagatacaagcgtctcaaagggagtcctatggtggagggagatgaagatgaagaggatg

SEQ ID NO: 708 - DNA, 354 bp, Gossypium hirsutum
  Clone ID: LIB3083-015-Q1-L1-F6
acacttcatacctccaatcttttcagcgtccgatggcataagccaagctccattgccatggattggtactcttggttgtcaaaaactgcccttgagccctgactaatctatgactatggcctcgccttctcccgtaatgagcttcaaaaagaggatttagcctactccaatcatgagtttcttcagagcatgggcatatcagttgccaagcataggctcgagattctcaagcttgctaggaaggaagtcggagaaacccctaatagcctgtccaagataattttggcaatcaacaaaaccagaaagagctttaacaagtatgttaacaagttggatcaccatgagaataactcg

SEQ ID NO: 709 - DNA, 481 bp, Gossypium hirsutum
  unsure (1)..(481): unsure at all n locations; Clone ID: LIB3083-015-Q1-L1-F7
gtttgttcttcagcagccaatgttgaccgcacgagcaagcaggagaaagaattagcagctgcggcagagaaattagcagaatgtcaagaaaccatattccttctcggcaagcaattaaaagctttccgccctcaaaccgaaacgaagggatcgccgtacaacgagaggataccaggtttccatgaggatgaaaccgttaccagcagcattaacttgcatgatctaaaccaggcagagatagaaacagctggttcggggaatgcaagcagatcgtgtgcagaatcacccatggagtcatcatttaacaccccatgcagcccttcagatactgaagcanaccttttgagatcaccaatcaactcgaacaactcaaatcacaggtctaccatgtcaagctccgagtcttcctcgtctacaccgacaccggagaaacaatctcgaggctttagtagattcttttccttcaaagcgaagaacggac

SEQ ID NO: 710 - DNA, 239 bp, Gossypium hirsutum
  Clone ID: LIB3083-015-Q1-L1-F8
tgttcgagcttggaattccttctgtcaaacaccgcttttattggggggcatctcacttgagtcaggtttcccaaagatgaacggtcaaatccatggcttggatgtgcatccttctaggtcaactctcgggaccataaaagctttgcttaaaccttctacaagacgagtttcccttgctgaaacaaagaatgatgcccataccgatcaatggctccagaatttcaataacatagtatcca

SEQ ID NO: 711 - DNA, 378 bp, Gossypium hirsutum
  Clone ID: LIB3083-015-Q1-L1-F9
tatgcaggctatgttgggttcttggagcaaaaatgctgggggggtaaagcacaatgggttgtgagcttgcacaaagagttggcattaatgaaattgcagaaagcatgatggctttcaacaccaactataaagatactggtctttttggtgtctatgctgttgccaagcctgattgtttggatgatttggcctatgctattatgtatgagacaacccagctagcttatcgtgtttcagaagctgatgtcattcgtgctcgtaatcagtttaagtcatccttgatgcttcatatggatggaactagtcctgttgctgaggatattggccgtcagctacttacgtaccgtcggagaattccatttgctgaattatttgcta

SEQ ID NO: 712 - DNA, 470 bp, Gossypium hirsutum
  Clone ID: LIB3083-015-Q1-L1-G1
agcagtttggttgggtttttttgttttggttttgcttagtgtgaacagtgaagggtcgaggcacggcggtgaactgagccatagtgatgttttacggcagcaagaagcggacagggtggtggagcttccaggacaaccggcggtggagttcaagcaatatgcagggtacgtgacggtgaacgagagtcatggtcgagccctgttttattggttctttgaagccaccagcaaacctgagaaaaagcccctcttactatggctcaatggaggtcctggatgttcatccattggatatggagaagcagaggagttgggacctttcttcactcagaaagatgaacaaaccctaaagcttaatccacataggtgggataaagctgccaacttattggttcttgaatctccggttggtgttgggttttcttataccaacacaagcagtgatatccatcaactgggtgataaaatca

SEQ ID NO: 713 - DNA, 446 bp, Gossypium hirsutum
  Clone ID: LIB3083-015-Q1-L1-G10
atcagggaggcttctcagaccaccatgaagggaattctgggttacgtagatgaagatttggtctcaaccgactttgtcggagacagcaggtcaagcatttttgatgctaaggccggaatcgcattgaatgacaactttactaagcttgttgcgtggtatgataatgagtggggttatagttctcgagtgatcgacttggttcgacacatggcttcttgctaagtgagtgaagttttagcttctaacttcagctttggcaagcaatttagaaactagaagagatattcctgtcttttgggtgttggtcatgcagataatagaaattgtatgcaacatttttttttcgtgtgaacactcttcttttgagtggattggaagggtttctattttgactcccttcatccattttatgacaataataattgcaagatcaactgaaaaaatat

SEQ ID NO: 714 - DNA, 369 bp, Gossypium hirsutum
  Clone ID: LIB3083-015-Q1-L1-G2
cttggaacgcctgcggcgaaacaccgcatggattaccggggacgccacttgattcatgtatccgaaagatgtacggtcaataccagcgcttggatgtggatcctactggttcaacgctcgggatcatgaaagctaagcctgagcatgctacaagaggtcatgcactagtcaagccagagagtgatgcccttaccgttcaatggattcagatacgcaatatgatagtatccacctatggatgaacgtgcgtgactctgtacaccatttcactttacttaactgatgccaagtacgttggcggtgagaacacggtgcatggcagccatggcattgctcagcttgctcatctcaaagttcgaacccgacttg

SEQ ID NO: 715 - DNA, 305 bp, Gossypium hirsutum
  Clone ID: LIB3083-015-Q1-L1-G3
catagtaaagaatcccttgttattctacttctttcacctttcaaaatacaaaaccaaaaaaaaaaaaaaaaaccttttaccaattaaccctatagactagtatgaatgtgcactccaacaaccaaaaagaatgacaaaaacaatggtttctttgtccctccttacaaactaaaaacgacaacttcccaacttcggaatacatatttacaaaaacacaacagtaaatatgaacattttcaggttggaggtaagtcaaggggattacaaaaaatagtcgggggttctgcctgtggtctaaggctcaa

SEQ ID NO: 716 - DNA, 527 bp, Gossypium hirsutum
  Clone ID: LIB3083-015-Q1-L1-G4
ctcaagtaaggtagacaatggtttcatcagagagtgaagataatctgatcacctatgatgcagccaactttaagtttgaggcatgccagccatcttcctcgtcagtaacggatgattctgaacaacctcaaattgacagtgcaattaaatctgatctgaaagagacctctcccgagatgaactcacaaggtcaaacaatgcaaatcagtgcacattctcaaatagaggtccattgtctttctaacaagcctgaaactgggagtgaacaacccaaacattctatggaaagatttgcttctgaacatttggaaacagaggcaaaaaaatttgtatttggttcaaaaaggacaagtaatcctgcatttattgctgcacaaaccaaatttgaggagttgagttcaacagccaattcaagtagatcaattaattcatcctaccaagatgttagtgttgaatcaaacttggacactgtgccttctggggcagatatgataagcaggtcaaaggagccaagcttctcagaaaat

SEQ ID NO: 717 - DNA, 576 bp, Gossypium hirsutum
  Clone ID: LIB3083-015-Q1-L1-G5
ctatgccacttgattgagtaaaactagaaatgcatggccatgctcgaataagttcatatgagatatcatacttatttgtttttcatagtctactcaggacatcaaaaaacattagatgggctatgcaagtgtgactattccatgacttgtgtccattctagatataaagaacaaaaggatttataatacatgaaaggttaatcacaaagaggttatgtcgaatcatgacttcttgtaacttaggtagaaatgatgcattgctagatgtcactcatagtttgtaatattagaatcgttctagtattactgctaacattataagaacctacaaggtcacaccctatggttgaaacgaactaaatccaaatatagttggtattgagtttagttatctcatgaattaaattgattatagaattaattcaattgggcagttaaatatcacagaaattatatgtgtaagtatgttgtacacatttcatacaatatggttaaattaatatacgaatttgattcatataaaatttaacttaaaataatttaccaaaattcttgttataattattgcaattataa

SEQ ID NO: 718 - DNA, 305 bp, Gossypium hirsutum
  Clone ID: LIB3083-015-Q1-L1-G6
aaatataaatatcactccgttgatagcataagaaggcattagacaaatcttacaacatgaaaaacagaacaatagcttgtaaggctattcatgttcttatggagcatcataagtaaaagacaagcatttctaacaacaaaaaaatgacaagcaaacatgactaaatttattccataggcataatttgagaaacctcacacgaataagaaagaacaggataccctcacagggtgaacccatcatcttcaaaataaatgatattgcgatagtagcatcaatattcttcaccttcctcttcataatct

SEQ ID NO: 719 - DNA, 498 bp, Gossypium hirsutum
  Clone ID: LIB3083-015-Q1-L1-G7
tgagcatttgacttgaacctcacaggatctctgatcgagtggtagagccagaaataaaatcataggtcgaagcatttagaacatcagtgtagcatatcaatattgacatgttccgtttatatatgacatgggactcgattactacaaatgtatacacgacgaactgaaacgcaataatgctgacgactcgggtttgagaagagaggatgaatgggtactcttatgataatgcagcagatgggtgcaataaaaagggagatattacggatgaagtcataggagacattgcgaaagaagcatttatgacgaacgaatgtcagcctaaccttcaggaacggctactcgtcgctactgtcgagacgagttcacccactgtgactctggccaccatgtatctactggtcaacccataggctttgcaacacttatcagcggatcatgaagaaattgtgatgaacagagaatatgccatttctggactagtatggtaggaataca

SEQ ID NO: 720 - DNA, 276 bp, Gossypium hirsutum
  Clone ID: LIB3083-015-Q1-L1-G8
ttgcaagctttcagaggaaggtgggtgatgtcttatacaaggttgctgacattcctttcttaagcaaatacaagcatcaaattctcgatcttattgagcatgctgaaacacagccgaacctcaccattggtgtcttggtctctattgtggtgattattctcacgattttcttcaagctcatttttggtgggaagaaacagccaagagtatagaagaaaccagaagttgctaaaacatcaaatggtgaaagaagcagtggataaaaagcttaagaag

SEQ ID NO: 721 - DNA, 333 bp, Gossypium hirsutum
  Clone ID: LIB3083-015-Q1-L1-G9
gccaggattcagatattatccatctgggataaggccgagattatcaaggtcagcgatgttgagctagagttcctcaccggtagcaacaaaatcgacgatgaaactgctatgaaactttggcgccccaacttgacactactcttgatcaccctcggtgaaaagggtagcatgtattataccaagtacttccatgggtcagtggatgcattccatgtgaatacagtggatacaactggcgccggggactcttttgttggtgctttactatgcaagatcgtggaagacccaaccatacttgagaatgaatcgaaattgacggaggtactgaaattc

SEQ ID NO: 722 - DNA, 572 bp, Gossypium hirsutum
  unsure (1)..(572): unsure at all n locations; Clone ID: LIB3083-015-Q1-L1-H1
cttgattcttattctcaggtttgatattcaaatggcggatattagcaatggttccaaagggtttgcagtgaaacaaggagaaccaactagggtccttcctgcagaagagacaaagaagggtctttattacctgggaaaccttgaccaaaacattgcagtcataattcgaaccatttacttctttcagtcagagtctaaagggaatgaagatgctgccgaacaagttaaaaatggtttgtcaaagattcttgttcatcattatccacttgctgggcgactaaccatcagctccgaagggaagctcatagtggactgcaccggggagggggctgtttttgtggaggctgaagctaattgtgggattgaagagatgggggacataacaaagcctgaccctaacattcttggaaagttggtttatgaaatctctggtgctcagaacttgctaaagatacctcttttggtgattcaagtgactaaatttaagtgtggaggattttctattgggatgagcatgaaccactgtatgctngatgggattgctgctatggaatttgtgaatggatggggtg

SEQ ID NO: 723 - DNA, 350 bp, Gossypium hirsutum
  Clone ID: LIB3083-015-Q1-L1-H10
gctcctcttagtttccctttttgtcccttgtttatttggtactcccccctcatggctgccgctgatgtcgagttccggtgcttcgtcggagggctcgcatgggccaccgacgaccgggcccttgaagaagccttcagtgcgtttggtgaaatcgtcgaatcgaagatcattaatgatcgtgagactggaagatcccgaggctttggattcgttactttccgtgacgagaaagctatgagggacgcgatcgaaggaatgaacggtcaaaatcttgatggaaggaacataactgtcaacgaagcccaatcgcgcagaagtggaggcggtggcggaggatttggaggaggaaa

SEQ ID NO: 724 - DNA, 433 bp, Gossypium hirsutum
  unsure (1)..(433): unsure at all n locations; Clone ID: LIB3083-015-Q1-L1-H11
ctgtggttctcccactcctaaaagattacagctaaggagatctttggatggagcaagcaccagtggcaatgacaacaattacataagttacaaacaccaccaaacttcccagaagacaaaaagcttgtccaaaagcacccaccagattccaatgcttggttttgagaatatagctttagatagaactcctagcagacagaaaagtgacaaaaaagtatctaacattgttgaagttgtggacataaagtgtgggaaatatcctgatagagcatggtcaaaccctgtaacaaatcgactcaagaagcttgggttctctaaactntcccaaagcatttctagacctgcaactngttcacatcagatttcaggttcctataactgagacctgaaatnccaagtgacctgttgtctgaaatttcaccatgaacatatg

SEQ ID NO: 725 - DNA, 309 bp, Gossypium hirsutum
  Clone ID: LIB3083-015-Q1-L1-H2
gccgattctgccatgcttgcaggctttcagaggaaggtttgtgatgtcttatacaaggttgctgacattcctttcttaagcaaatacaagcatcaaattctcgatcttattgagcatgctgagacacagccgaacctcaccattggtgtcttggtctctattgtggtgattattctcacgattttcttcaagctcatttttggtgggaagaaacagccaagagtagagaagaaaccagaggttgctaaaacatcaaatggtgaaggaagcagtggagaaaaagctgaagaggcggagacagaagaagct

SEQ ID NO: 726 - DNA, 525 bp, Gossypium hirsutum
  Clone ID: LIB3083-015-Q1-L1-H3
atctgttgaaattttcctaagcaggcattgccctctatggtatggctttggaggtggtcgtcttaaatggcttcaaagactagcatatataaacaccattgtctatcctttcacatcccttccactcattgcctattgttcactaccagcaatctgtcttctcacaggaaaatttatcataccaacgctctcaaacctggcaagtgttctctttcttggccttttcctttccattatcgtgactgctgttctcgagctccgatggagtggtgtcagcattgaggacttatggcgtaacgagcagttttgggtcatcggtggcgtttcagcccatctctttgccgtcttccaaggtttccttaagatgcttgcgggcattgacaccaactttactgtcactgccaaagcagctgatgatgcagattttggtgagctctacattgtgaaatggactacacttctaatccctccaacaacactcctcatcgtcaacatggttggtgtcgttgccggattctccgatgc

SEQ ID NO: 727 - DNA, 488 bp, Gossypium hirsutum
  Clone ID: LIB3083-015-Q1-L1-H4
gtatattgaaattttctttctcgattttctctttagcgagggaagatgcagatcttcgtcaagactctaaccggcaagacgatcactctcgaggtcgagagctccgacacgatcgacaacgtgaagaccaaaatccaagataaggaaggcatccctccagaccagcagcgtctgatcttcgccggaaaacagcttgaggacggccggaccttggccgattacaacatccaaaaggagtcaactctgcacctcgtcctccgtttgcgcggtgggatgcaaatcttcgtgaaaaccttgaccggcaagacaatcactctcgaggtcgagagctccgacacgatcgacaacgttaaggcgaagatccaagacaaggaaggcattcccccagaccagcaacgtctcatcttcgccggaaaacaacttgaagacggccgtaccttggccgactacaacatccagaaggagtcaacgctccatcttgtccttcg

SEQ ID NO: 728 - DNA, 231 bp, Gossypium hirsutum
  Clone ID: LIB3083-015-Q1-L1-H5
ggatatctcaagccttaagaacatagcaggagagaccggaaagaagctgagctcctttgcgtccacttttatgagcgatttccaggacagaatcctgtaatggagtgttctggccttgaaaaactatatatatgatatatatctgagtttgttatgttagatcaccggccaatatcttttggtagtgaaatgtagtagacccattttataataacaattctttcacgggac

SEQ ID NO: 729 - DNA, 538 bp, Gossypium hirsutum
  Clone ID: LIB3083-015-Q1-L1-H6
caagcattttccttacaagtttgtttttcttgtgattaatcgatatggctagctcaatgtcccttaagcttgcatgtgtggcggtgttgtgcatggtggtgggtgcacccctggctcaaggggccgtaacctgtggtcaagtcacaagctccctcgcaccctgcattggttacttgacagggaatggtgctggtggcgttcccccaggttgctgcggcggcataaaatctctcaactgcggcgcccaaacaacaccagaccggcaagcagcttgcaaatgcatcaaaagtgcggacgccggcatttctggcatcaactatggtattgcaagcggactcccaggcaagtgcggtgtcaacatcccttacaagatcagccctagcactgactgcaacagcgtcaagtgaagttttggcatggaaagttcaccagctagtggaagccaaaataacgatagctacagaataaatatggatgttaaaattccaaagttgtgggttgtgtactatgcctgtttatgcgactacgtaatattaac

SEQ ID NO: 730 - DNA, 423 bp, Gossypium hirsutum
  Clone ID: LIB3083-015-Q1-L1-H8
aataattttaaacatgcgcgacggataccatcaacggactcacagctacggtcacaggtacccagcagctcagacttacactgccggtacatacacagatggagcaccgtcgacacctcaaccgtacggtactggatacgccgctggaccatacggctcacatgctgctgcctactctgcccgatcaagcgagaaaccaccacaggacaagcgcgaagcgcatggcgtcgatagtgctcctgcagatcacaggctaagctatgatgacacatgaggctatactggcccgttcgcatctctgacgtcgtcggcattgtcaccggggacagatcctaacgtccctccctgatttcaaatggcctgacaagatggaagtggcctaattgatgataaagagttgaaaagggcgctgttgccgaataa

SEQ ID NO: 731 - DNA, 394 bp, Gossypium hirsutum
  Clone ID: LIB3083-015-Q1-L1-H9
atcagggttgcttctcagaccaccatgaagggaattctgcgttacgtagatgaagatttggtctcaaccgactttgtcggagacagcaggtcaagcatttttgatgctaaggccggaatcgcattgaatgacaactttactaagcttgttgcgtggtatgataatgagtggggttatagttctcgagtgatcgacttggttcgacacatggcttcttgctaagtgagtgaagttttagcttctaacttcagctttggcaagcaatttagaaactagaagagatattcctgtcttttgggtgttggtcatgcagattatagaaattgtatgcaacatttttttttcgtgtgaacactacttctttgagtggattgtaagggtttctattttgact

SEQ ID NO: 732 - DNA, 509 bp, Gossypium hirsutum
  Clone ID: LIB3083-015-Q1-L2-A1
attcaacaaagtcctgactatgcggaagagccagattttgaagctggattacaagactttacaacccggttagctaattacgaaaaggtttatgaaccagttgatgaagggtcttacatcaaaatgattgatatggctagtgggcatggtggacaaatacaagttaacaacatgagtggctatcttccaggacgaatcgtcttcttcttggttaatacacatttgacacctcgcccaatactacttaccaggcatggagagagtcgtgataatgttagaggcagaattggtggtgacagtgtattgagtgataccggagaaatttatatgaagaaactcgcaaactttgttgagaagcgactgaaatctgaaaggactgcttctatatggaccagcacccttcagagaacgattctgacagcaagtccaattgttggatttccaaagatacaatggcgtgcactagatgagataaatgctggagtatgtgatggaatgacttatgaaga

SEQ ID NO: 733 - DNA, 409 bp, Gossypium hirsutum
  Clone ID: LIB3083-015-Q1-L2-A10
ctgcttcgaagcggtccggaagtggaaggtatgtgatagacgttaaggcaggcacatacaaggaaaacgttgagataggaagcaagctgaaaaacatcatgatggtgggcgatggtatagggaaaactataatcacagggagcaaaagcgtcggaggaggatccacaacgttcaattcagccaccgttgccgttgttggagatgggttcattgctcgtggcattacgttcagaaacaccgctggtcctactaaccatcaggcagtggctctacgttcaggctccgatctctcggtgttctacaaatgcagcttcgaaaggtaccaagacactctttacgtccattccgaaaggcaattttacagagaatgtgacatctacgggaccgttgaatggatattcggcaacgc

SEQ ID NO: 734 - DNA, 426 bp, Gossypium hirsutum
  Clone ID: LIB3083-015-Q1-L2-A11
ggttcctctacggcggcgtatttagctcgaagggcggggcaaaaggagagggttcggatcctctaccgccgtgccctgaaagacacactcaactgggccgtccatcgccacctcttctatcaagatgcttctgaccttcgcgagaaattcgaagccaacaagcatgtggaagatcttgatacaatcgacaaaatgatagatgcaggtgaagcaacttataataagtggcggcatcccgatccttatatcgttccttgggctcctggtggttccaagtttactcgaaaccctgtcccaccttctgggatcgagatcgtgtatgattatggtcgagaagaaaatgactaagacatccatcttttcaacttcctcagaaataaagttgatgcatgtctaaaggatcgttgagtgtgtaacgagtggtct

SEQ ID NO: 735 - DNA, 346 bp, Gossypium hirsutum
  Clone ID: LIB3083-015-Q1-L2-A12
attgattctagtgtaaacattggattaaatcttgggaggtcaagccccagagtttcaagggcatcaaatgaagagatacccaacgctcaagagagtgctctcaaaatggagttagaaaagttaaacgaatataatcttagactaagaatcatgttggatcagattaccaaaaattacaatgaactacaaggtcaactattaatggcgttgcaaaaacagtgcccacagaaatcaacaagaccagtaagatgcagtaaatgggatggcgagtaccataatgtcattgcaacaattcatggactcacggccttcagatgcattatatgtctactagccttttgggtct

SEQ ID NO: 736 - DNA, 492 bp, Gossypium hirsutum
  Clone ID: LIB3083-015-Q1-L2-A2
tgtccataatggtaccttgaatgaagatgtgttaggtgtcaaaagctcaaattttggtaccgatatccctgatgagaaaaaggaaaagatcggagatcagaagttcaccgaccatgtgaaattaagccctgtcgcatctaaatctggtggtgccggagatattcgtgtgcaccataactcaaaagctggtgctaacggcatagcaagtgttcaatctacaccttctcctattgctacaaagaattttgagcgaagctctcctctgactccttcgatgtcaaggaagctatttcagcctttcgacaggaggcatcccgatgatgaggataattggtctgttgcatccactacggttgcatcttttcgtacttctagatccagggtaactattggaactgctccaactttcaaaagtgccgaacgtgctgagagacggaagcagttttacctgaagttagaggaaaaacatcaagctttggaggccgaaagaag

SEQ ID NO: 737 - DNA, 547 bp, Gossypium hirsutum
  Clone ID: LIB3083-015-Q1-L2-A3
ttggattcgatttgcttcctcttagacatatatacccttactcttttaatcttatttcatttcgttgatataaccgagagaaatcctccgattacgccattgtcacgcttttcttcactttctgtttcaactacgagcttctttgttggtgacttaatggcgatccgaagagctatgtctggtcgcatcatggatcggacggccgtcgttggtgcgcgatacatgtcatcgtggtggcgtagcgttcaacccgctcccaaggatcctattcttggtgttacggaggcttttttggccgatcaaagtcccgataaagttaatgttggagtcggtgcttaccgtgatgataatggaaagccagttgttttggaatgtgttagagaagccgagcgaaggattgctgggaatttgaacatggaatatcttcctatgggaggaagcgtgaagatggtggaagaaacactgaagttggcctatggtgagaattctgagttgataaaagaaaaaaggatagcagcagttcaagctctgtctgggactggtgcat

SEQ ID NO: 738 - DNA, 531 bp, Gossypium hirsutum
  Clone ID: LIB3083-015-Q1-L2-A4
aacaggaacccttcctattccaatctaccgcttgatatgaggtggtggcttcagttgcagcctagctatggaccccaaaagggtttaacaaatgagcagttatatgccttggaggatgaagtggaaagtttgaaagctgaaataaagtctccctccaatgtaagtagagttcacccgcatgatgcacaagatgcttctggtgttgacagaaaaaagaacaatggaggttctcttgattcaactgagacggtgcgaaactatgaacttttggagatggaatctgttgaatgccatgtttccaaaaaaatcaatgactgctgttacgatccagagtctccttgggctggggatgggaaggctgagccatggtggcgcacaacagataaagatgagcttgcctctttggttgcacagaagtcgttggatttcattgagaattgtgatcttcccccacctcagaagatgcatgtaagaaggtactcgtgtgcatcttccggttcttatggcggtaatgaaagtgtctctttgggt

SEQ ID NO: 739 - DNA, 599 bp, Gossypium hirsutum
  Clone ID: LIB3083-015-Q1-L2-A5
gagatttcggctttgacaacggacaccaaaggtctgaaatcagaaacatccaccattgacagcaaaacttcgaaaccagaagcttcccaaccagctcaggctggagcctccccttccaatatgggacctgggtttgtcccccccaatccgtttgatttctcagccatgagtggccttcttgaggatccaagcattaagacactagctgagcagatagcaaaagatccttcatataaccaaatggcagagcagctcactatgatgtttcaaggggcatcagccgaagagagtttgcctgagtttgaaccacagcagtactattcgaccatgcaacaggttatgcagaatccccagtttatgaccatggctgaacgccttggtaatgcattaatgcaggatcctgctacgtctagcatgcttgaaagtttgtccaatcctcagcaaaaagaccagattgaggaaagaatggcacgtatcaaagaggatccatcattgaaacatattctagaagaaatagagacaggtggtcccgcagccatgatgaggtactggaatcataaagaagttctccagaagttgggtgaagcaatgggtcttgc

SEQ ID NO: 740 - DNA, 569 bp, Gossypium hirsutum
  Clone ID: LIB3083-015-Q1-L2-A6
aaaccatttatttttcttcagctctaagcgacaagaacaatggctgacttcaagaaagccactgctttgattctcacagtggctttgcttgtgaatctcgctttaatggttgatgctgatggtgatgatgataagaagattcgagtcaggaaacataagggtgagaaggagtgtatacaagggtgggaatgttcctactggtcgaaatattgttgcaaccaaacgatttcagatgtcttccaggtttatcaatttgaggacctgtttgctaaaaggaattcgccggtggctcatgctgttggattttgggattaccattcttttattttggctgcttccatttatgagcctttgggttttgggactactggtggtaagcatatgcaaatgaaggaagtcgcggcttttcttgctcatgtcggcgccaagacatcttgtggagatggtgtcatagacggaagaccgttggcttgtggtctttgcttcaagagagaaatgagtcctaaccaggattactgtgatgattactacaaatacatgtatccatgtgcccctggagctcaatacta

SEQ ID NO: 741 - DNA, 658 bp, Gossypium hirsutum
  Clone ID: LIB3083-015-Q1-L2-A7
gtcatctgagtgtggcccctggagcaaaactggtggacttggtgatgtcctcggtggacttcctcccgcaatggctgccaaaggacaccgtgttatgacagtgtgtcctcgctatgatcagtacaaggatgcatgggatacaagtgtgttagttgatctaaaagtcggagacaaagttgtaactgttcggttcttccactgctacaaacgtggagttgatcgtgtctttgtcgatcaccccatgttccttgagaaggtatggggcaaaacagcatccaaaatctatggccccagagcaggtttggactacgaagacaatcaactgcggttcagcttgttatgccaggctgctttggaggcacctagagttctaaatttaaatagcagtaaaaatttctcaggaccatatggggaagatgttgtctttattgcaaatgattggcacagtgctcttcttccatgctatttaaaaagcatgtaccagtcaaggggtatctacatgaatgcaaaggttgtattttgcatccacaacatagcctatcaaggaagatttgcctttgcagatttcaaacgtctcaatttgcctgaacggttcaagagttcattcgatttcattgatgggtataacaagcccgtcaagggaaggaaaataattgga

SEQ ID NO: 742 - DNA, 416 bp, Gossypium hirsutum
  Clone ID: LIB3083-015-Q1-L2-A8
accttaaacaacaaagcgggaaattgattcattaaatactgttcgaatcacaaaaagacagaatggaaacatgtcattacttacataccgaaagcaaactttgtttttcttatgatttgtactaaaaatgctgggaaaagaagaaacttaatatgaaatctacaacagatacaacctcaaaacaaaaacagatatttgtttaacaattgaggaaacacacagtcccatcaatattattatgtgaacttgaatctaaagcctttacttcatcttcatctgattaggagtgtctaccaggaagcttctacttgatcttgtgcagaattccgttattttcctttgactccgcttacagatggggctcatctgctggggctttagctgggctactggcctcttcagctatcttgagttgt

SEQ ID NO: 743 - DNA, 372 bp, Gossypium hirsutum
  unsure (1)..(372): unsure at all n locations; Clone ID: LIB3083-015-Q1-L2-A9
ctttactcagctctcaaaaaatagaaaaccaggtcagacttcggccgcattatgtaatttattaatttttttaaagatccgataatgtaatttttttttgtgattttttcaaccaatcagatggcttcgattcgtagaactctgtcgccggcatatcaccaccgttcttaccagaacggcgccggattctcctctccgtctcacaagttnttacccaacgggaacagcaaacattcctcttcaaggcatttaccgctgttattcactgccttaaatctagtctaccgcaaaggatggcggcgatctttgtgctggtgtctcttctttttccttatagggttcgtttttggaatcacgctgtttggaaacatg

SEQ ID NO: 744 - DNA, 425 bp, Gossypium hirsutum
  Clone ID: LIB3083-015-Q1-L2-B1
tctagaaccacgtggatccgcaggaattcaggactagtttacgaggatatatgagattggcccccggagcaaaacagggggacagggggaaattctaagaggactccctcccgcaatggctgccaaaggacaccgcgatatgacagtgtgtcctcactatgatcagtacaaggatacatgggatacaagtgtgttaattgatctaaaaatcggagacaaagttgtaactgttcagctcttccactgctacaaacgtgcaatacatcgtatctttgtcgaacaccccatgttccttgagaaaggatggggcaaaacagcattcaaaatctatggccccagagcaagtttggactacgaagacaatcaactgcagttcaaattgttaatccaaactgaatttgaagcacctagaaatctaaatttaa

SEQ ID NO: 745 - DNA, 412 bp, Gossypium hirsutum
  Clone ID: LIB3083-015-Q1-L2-B10
ggtaaatggcgtaaagcggggccttccggaaccgttaaaggtttaagaacaaaccccacagtgattccagatgaacccgttaatccgagattggcggaaattctggaagctgttgccgtcggaagagagcttatagtggcacttgcaaactggaacgtgaaggagtcgttagagatttggttcacaaacattaagagagttggcataactaattatttggttgttgctttggatgataagatcactgaattttgcaagtcaaataatgttccagtgtataagagagatgcaaatgatgggattgcttccattgggaggacggtgaataaccatgctgtttcgggattgaaatttcatatcttgagagagtttttgcagctggggtatagtgttctccttttcgatatcgata

SEQ ID NO: 746 - DNA, 434 bp, Gossypium hirsutum
  Clone ID: LIB3083-015-Q1-L2-B11
tttataacaacaaggttcttgtagagtacagaggcaaagatcagatccatgttgaatgggccaaagctttgaaggaactgtatttaccgggtctgagggattatgtcaaaagccattatcctcttggcccggtatggagtgcttccggtaaaaaggcatctagtgctccgccaaaagctcctccaccaggggcccctgcacctcctacctctccacctgcttctcttttcagctcagaaccttctcagccttcttcatcaaatccaaaacaagggatgtcagctgttttccaagaaattagtagtgggaatgtctctgcaggcctgaagaaggttactgctgatatgaagacaaagaaccgtacagatagaacaggtgttgttagtgccagtggaaaggaaacacgttcaagctccccttctttctcaaaagcc

SEQ ID NO: 747 - DNA, 338 bp, Gossypium hirsutum
  Clone ID: LIB3083-015-Q1-L2-B12
agattctgaagccacttagagagccaggaaattcgtatgctaagatatgttttagcaacagaagttttggcttggatgcagcaaatgttgctgcacccctcttgtcatccgttaagaaacaattaactgagatagacctttcagattttattgctggaaggccagagtctgaagcacttgaagtcatgaatcttttttcttctgtcctggaaggttgtcagttaaggtacctgaacctttcaaacaatgccttgggtgaaaagggtgttcgggcatttggggctctcctgaagtcacagaataatttggaggagctttatttgactaatgatggcatt

SEQ ID NO: 748 - DNA, 556 bp, Gossypium hirsutum
  Clone ID: LIB3083-015-Q1-L2-B2
gttttgttttgatggggcatttgaggtttctaagatgtagtattagctttttcaaattccaaattcattttcagaattcatcattttttaggtgatagaatcaagaggatacagggctcagtgactcagtcctgcagaaatgatgactgaagaagatgatctatatccatctagtgttaagatgagataccccattttcattttcttcaaggatgtcagacatgttttcaaactggacgaactgggatcagagatagcacaaattgctttgcctgcggcactggctttgacagccgaccctattgcttctcttgttgacacagcattcattggccaaataggtgctgtggaactggctgctgtaggagtctctattgccttattcaatcaagtctcaagaattgcaatattcccccttgttagcgtcacgacctccttcgtggccgaagaagatacaattggaagagtgagctctgaagcacaaggaagtgattacgtggaaacaagttcctgtgtagatactgaaagcaatgaagttataccacaaaaagaatgt

SEQ ID NO: 749 - DNA, 520 bp, Gossypium hirsutum
  unsure (1)..(520): unsure at all n locations; Clone ID: LIB3083-015-Q1-L2-B4
ctcttgtttctaactttgctgctttgttctcttcttctatgttcttcagtttttgcaccaacaatggctcagcctcgttcacctttttgtgaagggaaatgcaaagggaggtgcaataaagcggcggtttgggatcggtgcttcaaatattgcggcatatgttgcgaggagtgtcaatgcgttccgtccggtacttacgggaacaaacacgagtgtccttgctacagagataaggtgaacaacaagggcaaacccaaatgcccttgaaaatgaaatatattcgagttcgggatttaatcaagcttaaagatcgaggacgaagaggccatatatatatatatatgcatgttgatgatgatgttattataaaaataaacttgttttgttgctgttattttcctttgggtttttgtgttggtagtgttgaataatatttcccttatattttccctctcaccgncgtgtccaccgncatgcacacatgtttntgtgtcttttgatcatgggtggtggtgatgat

SEQ ID NO: 750 - DNA, 345 bp, Gossypium hirsutum
  Clone ID: LIB3083-015-Q1-L2-B5
ggattttcaagtctggttcgcttgagagttcatcggacttgctctctattgcacccaacataaacgtctgaggcatgtacatctgtggatggcactaaccacgaagggtggcccaatacagcagaagtttgctactcatgcttcaaatgttcgagcttataattgcaagcactgtcaatgcgttccgtccggtacttactggaacaaacacaagtgtccattgtacatatataaagtaaaccacattgtcaaacccaaatgcccttgaaaatgaaatctattctaagttccggatttaatcaatcttaaatatctaagactaataagccatatatatatatatat

SEQ ID NO: 751 - DNA, 616 bp, Gossypium hirsutum
  unsure (1)..(616): unsure at all n locations; Clone ID: LIB3083-015-Q1-L2-B6
cggcacgagattcgccgcacggcatcagtctcatcaggcggggaagaatgtctcacaggaagtttgaacacccaaggcatggctcccttggatttcttccgaggaagcgagcttctcgtcacagagggaaagtgaaggcatttcctaaggatgacccaagcaaaccttgcaagctcactgcctttttgggctacaaggcaggcatgacacacattgtccgagaggtcgaaaaacctggatctaagcttcacaagaaagagacatgtgaagctgttacgatcgttgaaacccctcctatggtgattgttggggttgttggttatgtcaagacaccacgtggtcttcgcagcttgaacaccgtttgggctcagcatctgagcgaggaagtcaaacgtaggttctacaagcattggtgcaagtccaagaagaaggctttcaccaagtactcaaagcggtacgagagtgaagaagggaagaagagtatcgaggctcagctggaaaagatcaagaaatatgccactgttgttagggttttggcccacacacagattangaaaatgaaaggattgaagcagaagaaagcacacctaatggagatccaaggttatggtggaac

SEQ ID NO: 752 - DNA, 624 bp, Gossypium hirsutum
  unsure (1)..(624): unsure at all n locations; Clone ID: LIB3083-015-Q1-L2-B7
ccgttccatcctgctctttgtgtattatggtcggtgatggagttcagatccttggtatgggagttgtgactatattgtttgccgctcttggattcatgtctccagcatcccgtggaactctcattacaggtatgctattcttctacatgattcttggaattgcagctggctatgttgcagttcggctttggaggactatcggctgcggtgatcacaagggatgggcttcggttgcatggaaagctgcttgctttttccctggtatcgcatttttaattctcaccattttgaatttcctgttgtggggaagtcacagcactggagctatcccattttcgctctttgtcattctactcctactatggttctgcatctcggttccactcaccttagtcggaggatacttcggagccaaagcacctcacattgaataccctgtccgaaccaaccagatccctcgagaaatcccagctcaaaaatacccatcatggctgttagttcttggtgctgggactctacctttcggtaccctttttatcgagcttttcttcatcatgtcaagcatatggatgggacgcgtgtactacgtcttcngctttcttctcatcggtatgggcctcctcg

SEQ ID NO: 753 - DNA, 555 bp, Gossypium hirsutum
  Clone ID: LIB3083-015-Q1-L2-B8
ccagaattcaggaacttctttaaaaccttttgatctaacggtggagaaaaacagcttcttttgcaaagtttggtggataaaaagtaggtctaggtgttgggagggcaaatgcggttgattttctctatctagtctgctttttttcttgtttggctaccgagaaaaattttgttcttgtttctgtttctgggtcttttggttttagtgaaggagaagtagagggaataaaaaaaaacaaaaacagagaagagatctttttggtggtttcttaatttgggttgaagaaaagatgcaacaaaatcagttgaagaaagagctaaaagagatggactttttcaccgaatatggggatgcaaacaggtacaagattcttgaagtcattggtaagggaagctatggagtagtttgtgcagcgcttgacacacatacgggtgagaaagttgcaataaagaaaatacaagatgtatttgagcatatgtccgatgcaattaggattttacgtgaagtcaagctacttaggcttcttagacatcccgacatagttgaaattaaacg

SEQ ID NO: 754 - DNA, 262 bp, Gossypium hirsutum
  Clone ID: LIB3083-015-Q1-L2-B9
caaatcaaatttttttaaaaaaatccccttaattttccatcgccccatcttcataatcttcatcattgccatctgcaacatcattttgattttgctgatcctcctaaaccagatcattcatgttactttccccttatttaaactccatttcatccattccttcccctgaataccatttcaaaaaccccttcctaccgaacataacggtgaattgttccgaaacaccccggaacatttttcgaatctacttcgaatcgtcacc

SEQ ID NO: 755 - DNA, 371 bp, Gossypium hirsutum
  Clone ID: LIB3083-015-Q1-L2-C1
aagcagctcagtagccgtaaaatctcaccttctgctagaatttctgggcaggcgactcatttgaaggccagcgatgaaatgatgatgagttttccggttcccagaaaagctcgctcagcttcagtgaaaaggtcacatgagaattgggtggctggaaatggtggtttcgtcgatgaacaaaaccatctgcgaggttcggtgtcaccggctcgtcggagcgttgagtctgaccgtgtttcaccgtcttcatcaaatggttcagtcaggaagaagatgaagacgaatcgacccaagactcggctttcaaaggcgaccaagtcttcgagctcagctcaagaggatattgagattgaaattgcagaggttcttta

SEQ ID NO: 756 - DNA, 439 bp, Gossypium hirsutum
  Clone ID: LIB3083-015-Q1-L2-C10
ttattctcctctctctcgtcgccatcgcctctggggaaggtttcttcgaagaacgcttcgaagatggatgggaaagtcgttgggtaaaatctgactggaagaaagatgagaacatggctggggaatggaattacacttctggaaaatggaatggagatcctaatgacaaaggtattcaaactagtgaagactacaggttttatgctatttcagctgagttcccagaagttaacaacaagggcaagactctagtcttccaattttctgtgaagcacgagcagaagcttgactgtggtggtggctacatgaagttgctcagtgataacattgaccagaagaaatttggtggcgacaccccgtacagcatcatgtttggacctgatatttgcggctacagcaccaagaaagtacatgccattcttacatacaatgggacaaa

SEQ ID NO: 757 - DNA, 417 bp, Gossypium hirsutum
  Clone ID: LIB3083-015-Q1-L2-C11
tgatttgaaagccactgctggtgacactcatctgggaggtgaagattttgataacagaatggtgaaccactttgttcaagagtttaaaagaaagaacaagaaggacattagtggtaaccccagagctcttaggaggttgaggactgcttgtgaaagggcaaagagaactttatcgtccactgctcaaacaaccatcgaaattgactccttgtatgagggtatcgatttttactctaccattacccgagccaggtttgaagaacttaacatggatctattcagaaagtgtatggaaccagttgagaaatgtttgagggatgctaagatggacaagagcactgtccatgatgttgttcttgttggtggttccactagaattccaaaggtccaacaacttttacaagatttcttcaatgg

SEQ ID NO: 758 - DNA, 422 bp, Gossypium hirsutum
  Clone ID: LIB3083-015-Q1-L2-C12
atctcaagtaaatggattggacatccgatattcgggctggttcgtcacgatgtcaccgagccgttgctcattgaggttgatcagatctaccatcttgcttgcccggcttcgccaatcttttacaaatacaatcctgttaagacaatgaagacgaatgtgatcggtacattgaacatgtagggtctggcaaagcgtgtcggagcaaggattttacttacctcaacttcagaggtttatggagatcccttggaacattcccagaccgagagctattgcggaaatgttgaccctatcggagttcgaagctgctacgatgagggaaaacgagtggctgaaactttgatgttcgattaccataggcagcatggcatatagattcgaattgctcggatcttcaacacttatggaccacgcatgaacat

SEQ ID NO: 759 - DNA, 354 bp, Gossypium hirsutum
  Clone ID: LIB3083-015-Q1-L2-C2
tggacgtgccgtgtatactggtggtggcagaccattggcattaggacaggcttcaagggatcggtcaagtcaatcacgaggaacaggcggatactctgggagagccggttcaggaatgagaggttaccagatggatgcttcagctcgcatggttagtctcagtcggggtgttcgcggttagttgtatttcttagcagtaatcttaacctaattttgtcaaagttatttacttggggttgaacttgattattggattttgtgttttgccatttatgcaatagctgttggactcaaaaaaaaaacaaaaaaaaaaaaaaaaagaactaaaaaaaattagatttttttacctaaaaa

SEQ ID NO: 760 - DNA, 528 bp, Gossypium hirsutum
  Clone ID: LIB3083-015-Q1-L2-C3
gtgggtttagtaacaaataaagctctgaagcccatcaacaataaaatttctggttttatgcttttgtatcttgccagaggaaattaatggtggatttagctgaccagcagcacagttgatgtttttatagtttctaatacaagcaatcttcttctgaagatatatctcatatgactatcgttgtttcttatacatctcttgaataaagaaagggctactttttgttctgcaagaatggagaggtacaagttactcagggaagttggtgacgggacatttggttgtgtgtggagagctattaataagctgtctggtgaagttgttgcaattaagaaaatgaagaagaaatattgctcgtgggaagagtgtgtgaatctgagagaagttaagtctctgaggagaatgaatcatcccaatattgtgaagcttaaggaagtcatcagggaaaataatgttctgtactttgtgtttgaatatatggaatgcaatctttaccagcttatgaaagacagagaaaagcatttttca

SEQ ID NO: 761 - DNA, 495 bp, Gossypium hirsutum
  unsure (1)..(495): unsure at all n locations; Clone ID: LIB3083-015-Q1-L2-C4
aatccccaggttaaggaaatccgatgcattgccatgccaccgcaatggggtactcatcagcaagtcaatcttccatcagctcttcctgaacatgatttcttgaatgatctggagcctttgggatggctccacacacagccaaatgagcttcctcaattatcgccacaggatgtgacatcccattctcggatattagagaataacaaacagtgggatggagagaagtgcataatcttgacatgcagtttcactcccggttcttgctcattaacagcctacaagcttaccccaagtggttatgagtggggacgggttaacaaagatacaggaagcaaccctcatggttacctnccaacgcattatgagaaggtgcagatgctcctaagtgatcggttccttggattttatatgatacctgacaatggtccgtggaattacaatttcatgggagtgaagcatacagtgagcatgaaatacggggtgaaactggggaca

SEQ ID NO: 762 - DNA, 566 bp, Gossypium hirsutum
  unsure (1)..(566): unsure at all n locations; Clone ID: LIB3083-015-Q1-L2-C5
ggccttcccattatcatggtcttgccaggtgttgttgggtttaaactattaggaaagttgagggatggtgtgacagctaccgatttagtgttgacagttactcaaatgctgaggaagcatggggttgttggcaagtttgtcgaattctatggggaaggcatgagtgaattgtcattagcagaccgtgcaactattgccaacatgtctcctgagtatggtgcaaccatggggtttttccctgtggatcatgtcaccctgcaatatctgcaattgactggcaggagtgaggagactattgcaatgatagaatcttatttacgggccaataagatgtttgtagactacaatgagcctcaaattgagaaagtgtactcttcctacctgcaattgaaacttgaggaagttgaaccctgtatatcaaggcccaagaagcctcatgatcgagttcctctgaaagaaatgaaagcggattgtcaggcatgcttatacaacaaggttggatttaagggatttgctataccanaggaatcttaggataaggcttcaaagtttttatttcatgggac

SEQ ID NO: 763 - DNA, 549 bp, Gossypium hirsutum
  Clone ID: LIB3083-015-Q1-L2-C6
cggctctaggattaggcatggagcaaattgaagaacaacgtgtattagaagcacaacttagaatgaggcagcaggaacttcaggatgaagaagaaagaatgcagaaaagacgagaatcgagtacttcaactggtgttgcaccaggagaagttcaaaacagttcggttgcagctcgttcatctggtgcggaggaagtagtttcttttcaagattcacaacctgccttgatgattaaacaaccttcaaatcctaggtcaaacagggatgagtttgacatagatcttgagggcataatggtcacggaagcaatttggcagtcaattcaagagaactgtggacacagaaattctagctgcagagatgctgcttctttagtccaacatgtttcaggatatcgttatatctctcctgctatgacaacagtggctggttcatcatcatctgcttttgctggtcatgtttgtgcggtagctggcctaactgagtggcagcagatgactggagaatcttctcccaattataatgtaaatttgccagcatttcatatgc

SEQ ID NO: 764 - DNA, 643 bp, Gossypium hirsutum
  Clone ID: LIB3083-015-Q1-L2-C7
catggtttccttaccaaaactcttctctatgtctagcctcttcctttttgccctcttctccatgcaaatccatgctagagagtacttcagcaaattcccaagagttaacatcaatgagaaagagacaacaaccagagagcaaaagcacgagaccttcgttccccagaccacccaaaagccagaagaacaagagccaaggttcattcctgaaacccaaaatggttatggcctttacggccacgagtcaggctcaggctcaggctcaagctcaggctcaagccggcccagtttcaccaccaaagaaacctatgaaccctatgtcacccctgttagattccaccctgatgagccctataacagcatccccgaatcctccaacaataaagacacttactactacaacaagaatgcctacgagtccactaagcagcaaaacttgggcgaggccattttcaccgagaaaggatggagcaccaaggaaaaccagaacaacaactactacaacggcaacaatggttacaacaatggcgagaagcaaggcatgagcgatactaggtacttggagaatggaaagtactactatgacgtcaagagtgagaacaactattatccaaaccggttcgacaactcaaggagagttgct

SEQ ID NO: 765 - DNA, 525 bp, Gossypium hirsutum
  Clone ID: LIB3083-015-Q1-L2-C8
ccttcacgggtttagaaccagtgggaagttcctgcagaagcaaatcagcaaatgggatccttctctttttcttcatcactttcaaatggattttcctgacgggttatttagtgccggaggaaagtcagacatagaaggcatattccctcctacatactttgaatggttccaattcaacaaggaattcacagagtacacaaaccttgaggaatgcatctctcacttgtgtcaatatatcacccacaatggcccttttcatggattgctcggcttttcccagggtgcaactcttggtgctcttctattgggctacaaagcacaggggaaggtgttaaaggagcatccacctttcaaaatgtttgtatcaatatcaggatcaaaattcagagagccaagcatatgcgaagtggcttacaaagacaaaatcgatgtgaaatcagttcacttcatcggagctaaggattgggtaaagttgccttcggaggatttggctactgctttccatgatcctcttatcataaggca

SEQ ID NO: 766 - DNA, 396 bp, Gossypium hirsutum
  Clone ID: LIB3083-015-Q1-L2-C9
gcatatttttgtgaagacacttactgggaatacgagcggttttaaagttgagagcgctgacacaatcgataatgttcaggccataatacaagataaggaaggtatcccttcacaccagcaaaggctgatatttgctggaaagcatctagaggatggtaggacccttgcagattacaacatccataatgagtccacccttcactcggctctccatctacgtgtcgagattcatattttcgttaacacccttactggaaagtccattaccctagaagttgacagctcagacactaatgatcatgttcatgccatgatccaggattaggaaggaatttctccagaccagcagaggctgattcttgctggtaagcaacttgaagatgggaggacccttgc

SEQ ID NO: 767 - DNA, 531 bp, Gossypium hirsutum
  Clone ID: LIB3083-015-Q1-L2-D1
aacaaatacactttaagcaaaggcatttgctcttttatctgaggagggaattgctaaaggagttcgaaggataactgctgtcaccactgagagtgctttgaaggcaatggaattgggtggcctgcttttgaaggaagtagatgatgcttccaatatggaagtaagcttgctggaaaagaaagtggcttctctaaaaactactgtggattctgcatcaattcctgctgcccagaaagctgatattagggccaaaattgcacaacttcagaatcaactgaaaaaagcacaaaagaagattgctgaacaaaatatgcagagagctgtcgcgacagcaaccgaattggctgaagttgctgccaaagagggaaagactttctgtgtcactcgtattgatgttggtttagatgcagctgctctccgcgaagcggtttcaaaagttattcaacaaaagggtatgccggttatggttttcagtattgacgaaaccacaaacaaggctgtcgtttatgctggtgtacccgagaaatctga

SEQ ID NO: 768 - DNA, 409 bp, Gossypium hirsutum
  Clone ID: LIB3083-015-Q1-L2-D11
cgcttactttaacttatcaaaagcacactgtgcttgcttcctttgcatggcgagcgctggacccggaacaaacggatctcaattcttcatctgcacgaccaagacggagtggctggacggaaagcacgtggtgttcggacaggtagttgaaggcatggatgtggttaaagcgattgataaggtgtagtctagcggtgggaggacttccaagcctgttgttattgctgactgtggacagctttgaaaaatggcttattgaattgtgtttccttcataatatgtggtcttactaggctccttttttttatgctatgctgcttctatggctactgagtattggtgtttaataagaagttgcttgatgtaactatttaattaactgccataaataagataggctttatttttc

SEQ ID NO: 769 - DNA, 435 bp, Gossypium hirsutum
  Clone ID: LIB3083-015-Q1-L2-D12
tctttgcttaataaatcttataaccgacctactggttgagtggcaaaaagtgtaaagggagaggaagaaattccggatggtacagttgctgtgttgacccctgacatgccagatgttttgtcacatgtttctgtccgagcaagaaattgcaaggtttgctttgctacttgttttgatcctaatattctggctgacctacaagcaaaaaaagggaaactgttgcgcctaaaaccttcatctgcagatgtagtttatagtgaggtgaaggaaggtgagctagttgattcaagttcaagcaacttgaagggagatggtccatctgtcactttggtcagaaagcagtttgttggtaaatacgccatatcagcagaggagtttacacctgaaatggttggtgctaaatcacgcaacatctcatatctaaaaggaaaagtg

SEQ ID NO: 770 - DNA, 520 bp, Gossypium hirsutum
  Clone ID: LIB3083-015-Q1-L2-D2
aagaaattaatgtaccaatcatgaagcttgacaccagcggactagaatcggctgctcctgtctggggtgctcccagtgaacttgttgacgggttttcggctgctccgtcgttcgatctcccaaacactactgattttgatgggtttcaaaaagaagctatccagatggtaaaacctgctaagggtaccaccacgctagctttcatctttaaggaaggggtcatggttgccgctgattctagagctagcatgggaggctatatctcttcacaatcagtgaagaaaattattgaaatcaatccttacatgcttggaacaatggctggaggagctgctgactgccagttttggcacagaaatttaggcatcaagtgccggctgcatgaattagcaaacaagcgtagaatttcagttacaggggcatcaaaactgttggcaaacaattcttaatcttaccgaggaatgggactttcgggtggaaccatgattgctggatgggatgaaacgggccctggactata

SEQ ID NO: 771 - DNA, 223 bp, Gossypium hirsutum
  Clone ID: LIB3083-015-Q1-L2-D3
aacaaattcaattaccaattatgaagctagacaccaacagacgagaagggtccactccagactgggaagctcccatgaaactagaagacacatttaaccctgacaaacgcgatcaagcttgcacacacaacaaaaaagcatccaatgcaaaaaaaagcaatccagatttgcaaaccaagcaatgggaccaccacacgagagatcatatgtaaagaagaacaca

SEQ ID NO: 772 - DNA, 459 bp, Gossypium hirsutum
  Clone ID: LIB3083-015-Q1-L2-D4
ctcgtgccgcgttattccaaaaagcagagaaaagaacgttaaggaggaaagatgttgggaatagtaaggcaaaaaatgttagggcagtcattgctgaagattcgtcctgcaatatcggtgttacgaagttactcatcagcagcaaaacagatgacagtgagagaggcattgaactctgctcttgatgaggaaatgtcagctgatccgaaagtctttttaatgggtgaagaggttggagaatatcagggtgcatacaagatatccaaagggcttttggagaagtatggacctgagagggttcttgatactccaattactgaagctggttttgctgggattggggttggtgcggcttactatggtctgaagcccgtagttgagtttatgacatttaacttctccatgcaagcgattgaccacattattaactctgctgcaaagtccaactacatgtctgct

SEQ ID NO: 773 - DNA, 335 bp, Gossypium hirsutum
  Clone ID: LIB3083-015-Q1-L2-D6
ctgtaccgcatatccctttagcagatggacaacgtggggaagagggatgtttgcagtagtaggtgcgcacatgttacggcagtaatcgctgaagattcgtcctgcaatataggtgttacaaagttactcatcagcagcggaacagatgacagcgagagaggcattgaaatctgctcttgatgacgaaatgtcagctgatccgaaagactttttaatgagtgaagaacttgtagaatatcacggggcatacaagatatccacggggctcttggagaaaaatagacctgagagggttctcgatactccaagtacaaaggctggatttgctgggataa

SEQ ID NO: 774 - DNA, 580 bp, Gossypium hirsutum
  Clone ID: LIB3083-015-Q1-L2-D7
tccatgttagggctaaggcaagagggagtgaaaatggttgagaaaacaagaggaagaaaggaagaggtggtgaccagggagtacaccatcaaccttcacaagcgcctccatggctgcacattcaagaagaaggctcccaaggctataaaggagattaggaagtttgcagaaaaagcaatggggacaaaggatgtgagagttgatgtcaagctgaacaaacatatctggagccgagggatccgaagtgttcctagaaggattagggtccgcattgcccgcaagagaaatgatgatgaagatgcgaaggaagagctctactctctagtaactgttcctgaaatcccagctgaaggactgaagggtttgggcactaagcccatcgatgatgatgatgagtaatttattgatgtttagttttatgaaaacttgcatttgttcaccaagaaatttacccgagttttggctagtgttacatttgtgacctgtgaaacatcattctactcatatatttggtttattgttgtcaagactatttaagcttgttccttgtgcaattgaagtttccagcagattttagaat

SEQ ID NO: 775 - DNA, 398 bp, Gossypium hirsutum
  Clone ID: LIB3083-015-Q1-L2-D9
cttcagtgtacggaagcaaatatcatataaagcggcatggtccaaaaccatacattcatctgcattctcaacaagctggtgaacagagagagtagcattgtaaggttcgacaacagtgtcagacaccttagggtaagggaacacagagaaagtgagcatcattcggtctgggtattcttctcggatcttgtaaatcaaaagtgttcccatgcccgatccagttcctcctcccaatgaatggcatacttgaaatccttgcaagcagtcacagttttcggcttcttgcctcaccacatctagcactgagtcgatcaactcatccccttccgtgtaatgacccttggcctagttattccctgcaccggactggccgaatactaagttgtcaagcctgaaaa

SEQ ID NO: 776 - DNA, 250 bp, Gossypium hirsutum
  Clone ID: LIB3083-015-Q1-L2-E10
agatctctttaacagaaaacctattctcttaaccggactgatatccaaccacagaagagcaagactagtgttaatacacaatattggacaagacactaatttattcaatgaagtgtctgaatcagatggtaacaaatccttatgtatccttccacttactatactacttctcttatcagatcttccgtacctatcacttataatagactcttccctcaaatcactcaactactgttttatagggaaattc

SEQ ID NO: 777 - DNA, 437 bp, Gossypium hirsutum
  Clone ID: LIB3083-015-Q1-L2-E11
gttgaaagttctagctggtattgacactaatttgactggcacatccaaggcaactgatgacgaggagttcggggaattgtatactttcaaatggacaacccttctaattcctccaactactgtcttaatcatcaatttagtcggtgtcgttgccggcatctcagatgccataaacaatggataccaatcatggggacctctttttgggaagctcttcttctctttctgggtgattgtccatctctatccattccttaaaggtttaatggggagacaaaacaggacaccaaccattgttgttatatggtcagtgctattggcttcaatcttctccttgctttgggtccgaattgatccatttgtgatgaaaaccaaaggaccagacactacaatgtgtggcattaactgttgaaaaaaatcatcttgcgtggttcttt

SEQ ID NO: 778 - DNA, 434 bp, Gossypium hirsutum
  Clone ID: LIB3083-015-Q1-L2-E12
ctttttattcctttattgctttttagaatttttgttaggctaaaatgagagagtgcatttcgatccacatcggtcaggccggtatccaggtcggaaacgcttgctgggagctttactgtctcgagcatggaatccagcctgatggtcagatgccaagtgacaaaactgtcggaggaggtgatgatgcttttaacacctttttcagtgaaactggtgctgggaagcacgttcctcgtgccgtcttcgtggatcttgaacccactgttattgatgaagtgagaactggtgcttaccgtcagctcttgcacccataacaactcatcagcggcaaggaagactcagctaacaactttgcccgtggtcactacaccattggcaaggagattgtcgacctctgtttggaccgcatcaggaaacttgctgataactgcact

SEQ ID NO: 779 - DNA, 551 bp, Gossypium hirsutum
  unsure (1)..(551): unsure at all n locations; Clone ID: LIB3083-015-Q1-L2-E2
tctctcccttcctatcatccccccaggccccagctacgttagcaccgtcaccttccgccgaaaacaagcaataatatctcttcattaatttagccatgcctcttaacttgatagcaacgaaaccagaacatggcatcagtagtggcccattggaggctctgtcagagacgcctgagccccacaacagtgctatgcttgcgtttccaatacaacgcaactcacaacctcctgtcagactcaccactttgtatcctataactatgaagtttgaagagatcgtgtacaaggtgaagttggagcagaaagggtcatgctggggtggatggatcacacgagaaaagaccatactcaatggcatctcaggtgttgtttatccaggagaaatactagcaatgttaggtccatcaggaagtggtaaaaccacccttcttactgctcttggaggccgnctcactggcaagctatccggaaagatcacatacaatggtcagccattttgtggtgccataaagcgaanagcaggattcgtggctcaagatgatgttttgtac

SEQ ID NO: 780 - DNA, 654 bp, Gossypium hirsutum
  unsure (1)..(654): unsure at all n locations; Clone ID: LIB3083-015-Q1-L2-E3
cgaaatggtgaactttaccgatacatttgcgacacgaaaggtgcctttgtacagcctgcattgtatgaagcctttggattgacagttgtggaggcaatgacttgcggtttgccaacattcgcaacctgcaacggtggaccagccgagattattgtccatgggaaatctggtttcaacattgatccttaccatggtgatcaagctgctgacatactggtcgatttctttgaaaagtgtaagaaagatccatctcactgggataagatctcccaaggaggcttgaaacgtatcgaggagaagtatacatggaagatttactcggagagactattgaccctgaccggagtgtatggattctggaagcatgtttccaaccttgaacgccgtgagagtcgtcgttaccttgagatgttttatgctcttaagtaccgcaagctggctgaatcagttccattggcagaggagtaaatttaagctgttaaataacattgggccggtttttcttggagaataatattctgttttgtaatttcaattggagaagctcttttggatttcatcttgtcttttccttttcctttnttcgccggcattgtttgaacatggggttgtgcgcccgtcaattccagttaaatatggtgacttttgtttttc

SEQ ID NO: 781 - DNA, 145 bp, Gossypium hirsutum
  Clone ID: LIB3083-015-Q1-L2-E4
aacatgggttggatcggagacaccgtagactccatcaaatcgatccagatccgtcagctgctcacccaggtcgtcagccttggtatgattgatacgtctgccctgatagtatggaagggcttgatgtgtgtcactggccgtgagt

SEQ ID NO: 782 - DNA, 603 bp, Gossypium hirsutum
  Clone ID: LIB3083-015-Q1-L2-E5
gacagcagaacaattgtattacattattgcaaaaaaacagtacatgtgatggtattacagaaattgtttgtgaggccccacatggttgcatattagcctaatgttttgtctccctctcatccatctcagcacgatcttcatgtgcctcttgcttgtaagtcctctcagtccaacctccttgattcgttcccaagtatcaccgacggtgaggggcccatgctccttgagaatgtcaaaggtgacactctgcttatggtctgcgtttgctcaggcgacgttttcaactcgattggcttcattttcggcttgggtttcgttgaaagtaccgaatcatactcccaaacatcttgcttttaatttcattttatattaattgtataatattaattaaataatattataattgctatatatatcatgtcaatttgcttttaattctaaaatatttaaccctcaacatttatacactatgacaacattgaaaaaggaaaatcaaacagcacttgtataaggtaataattatcaaacgattgaccaaagacaatctttaaatcctgtaagctgaaatgaggttccggttaagcagcgaatttcaaaaatcac

SEQ ID NO: 783 - DNA, 480 bp, Gossypium hirsutum
  Clone ID: LIB3083-015-Q1-L2-E6
ggcatatatgattgtgatcattgcgatgggcgggatttcgttgctattggaagctattacatggattgtagtgttgaagagaaagtccaggaaatccacaaaaccctatgatggatacaacaatgctcaatctaatcaacagcctcttgccatgtgatcaaccgattccttgtagtccaacctggttttgtagcaaccgtcgccctctctagagtcgagacgctacatgaggtttaccgatcccggaccagttatttatttttgtctattatatgatctcttgattccatatattgctatcatcactagtatttgtatgtatgtacatatcgtgtgtatatatatactgccgagtatatcagctatctttttttcggatagaatataggaagggtgaaactttataagtttgaatatgtattgaaaatgattgtgaaacagattgtattcataattcttttttcttaaaaaaaaaaaaga

SEQ ID NO: 784 - DNA, 516 bp, Gossypium hirsutum
  Clone ID: LIB3083-015-Q1-L2-E7
cgaacaccataaagtagcaccatccccccacaaaaaaagagaaaaaaaatactgaccccattttcccaaaggaaattcgaacaagggtttgggaaactatgagaacttcatgggcggattctgtgtcaaattctgcagctgaaattgcaatttcggacaaaaattcattaccttgtcctactcgttccacttatgtccctccccaccttcgtagcggttcaatttccgacctgtcaggtccggttaccgggaccaatggcgggtcccgttggaccggcagtgatggtggagggacaaagcctgaactcaggcgtcaaggacaggcgaatagttatgctacagccggacgagatgccgctgccggtggtggtggtggtggtggtcggaataatagaagtggaggttgggataggagagaaagggaagtaaacccatttggtaatgatgataaaatttatgatataaaacaaaattttagtgaacaagaagattccggtatcaattttgatgcatacg

SEQ ID NO: 785 - DNA, 527 bp, Gossypium hirsutum
  Clone ID: LIB3083-015-Q1-L2-E8
ggcgggtggtgcaatcccccacgagaacactttgatttggccgaaccggcattcttgcggatagcagaatatcgagctggaatcgtccctgttatgttcagaagggtgtcatgtgtgaagaaaggaggcatcaggtacaccatgaatggacattcgtacttcaacatggtgttgataacgaacgtgggaggggcaggggatataacgtcagtgtccatcaagggttccagaacaggatggctacctatgtccagaaattggggccaaaactggcagagcaatgcttaccttaacggacaaagcctctcttttaaagtgactgccagcgatggcaggactatcacagcctacaatgtagtgcctgctggttggcaattcggacaaacttttgaaggaggccagttttaagacaatattatagtgtctgtctaatataaaactggaattgacatattacttatataaggcacatgagcgttttatgccgaggtagcaaaatggcgcccgctggctttatgtgtgaaata

SEQ ID NO: 786 - DNA, 388 bp, Gossypium hirsutum
  Clone ID: LIB3083-015-Q1-L2-E9
gacgtaattcagctacgagcgtctagaggttctctagtctgcagattagccagcatgactcttacatcggcacaggactatcgcaacgctgatagacaacagagacacagtgtaaatatacatacataataggtcgacaaacgattctaattcaatggaactactgaatcaataatgaatatagccggattatttgtcgcattttctaacgccatactcttatgataccattcatagctacgtttctaatgtactctctccttatatcactcaactactgtccaatagtgtacatcaatcagaggtggaatgctgtaacctgactgcatacaagatagtcggagaatatacatagtacgcttgcattgatgatacatcgtgctttgga

SEQ ID NO: 787 - DNA, 572 bp, Gossypium hirsutum
  Clone ID: LIB3083-015-Q1-L2-F1
acgagagccacactgctttcactcttcctggtctctaccgtgttgtacatggtatcgatgtgtttgatcccaaattcaacattgtttcccctggtgctgatatggagatatacttcccttacaccgaagagaagcggaggttgaagcatttccatactgagatcgaagaccttctttacagcaaagttgagaatgaagaacacttatgtgtgctcaatgaccgcaacaagccaattctgttcacaatggcaaggcttgatcgtgtcaagaacttaaccggactcgtcgagtggtacggcaagaacgcaaagttgcgtgagttggctaacctcgtagttgtaggtggtgataggcgaaaggaatctaaagatttggaagagaaggccgaaatgaagaaaatgtttgagctgatcgagaagtacaacttgaacggccaattcagatggatatcatctcaaatgaacagaatccgaaatggtgaaacttaccgatacatttgcgacacgaaaggtgcctttgtacagcctgcattgtatgaagcctttggattgacagttgtggaggcaatgact

SEQ ID NO: 788 - DNA, 355 bp, Gossypium hirsutum
  Clone ID: LIB3083-015-Q1-L2-F10
cgtttttcgcaagcatctagaaccgagacgggatgtccaatcgtgggggtggtattcaagctaactgtggatgcaacatagggccgacgctgactgacgacctcactaacatcatccaatatgcacgattgacctagttcgagatcctctttatgctgatactgatcatcgctattatcatcactaaagatctaacgtcctgaaccgaatacatgcaacatgctactacaaatctgaccattctaaattggctgccgcactaataatgggaagtggatgctaaacgaattatgtcctgcatcatttcattcttcatgattatcttgactgctcatacatttcatatttcacttac

SEQ ID NO: 789 - DNA, 429 bp, Gossypium hirsutum
  Clone ID: LIB3083-015-Q1-L2-F11
cggttgtggtttcttccggctttcgattcaaatgggttggggaactgtccttcaattgaaaacaagcagccaacatggggaagacacgaggtatgggagctggacgtaagctgaggacccaccgaaggaggcaaaggtgggccgataagtcatacaaaaaatccaaccttggtaatgaatggaagaagccatttgctggttcttcccatgccaaaggcattgtccttgaaaagataggtattgaagctaagcaacctaactctgctatccgaaagtgtgctcgagttcaattgatcaagaatggaaaaaagattgccgcgttcgttccaaacgacggttgtttaaactacatcgaagaaaatgatgaagtgttgattgctggatttggacgaaagggtcatgccgtctgtgatattcccgggtgtagat

SEQ ID NO: 790 - DNA, 300 bp, Gossypium hirsutum
  Clone ID: LIB3083-015-Q1-L2-F12
ggtgccgctgctgattatgttatcagctcgatcgaatctgacacctgttatgttcaactgcaccgatggggtgctcaaaaaagaaatgtataatttaatctatcttttgaacaagattcaaagatcttgcccctctcttggagaccatggagaaccaagtgcatatacaactatttgaggactcattacctactgaatgacgccatcttgctgtcagagttcatgcaagtctcatgtgctctaaagcattatctgtaaaaattttttaccctaagtatcatgaattgttacccggagacc

SEQ ID NO: 791 - DNA, 565 bp, Gossypium hirsutum
  Clone ID: LIB3083-015-Q1-L2-F2
gtcgaatatccgaaaatacccgagtacaaggacaaacaagatgaggataaggaacataaaaatgaagagtaccacgaatcacgtgaatcgaaggagcacgaagaatacgagaaagaaaaacccgagttccccaaacgggaaaagcctaaagagcacgagaaacacgaagtcgaatattcggaaatacccgagtacaaggaaaaggaagataagagtaagaaacataaagatgaagagtgccaggagtcacacgaatcgaaagagcacgaagagtacgagaaagaaaaacccgatttccccaaatgggaaaagcctaaagggcacgagaaacataaagccgaatatccgaaaatacctgagtgcaaggaaaaactagatgaggataaggaacataaacatgagttcccaaagcatgaaaaagaagaggagaagaaacctgagaaaggcatagtaccctgagtgggttaaaatgcctgaatggccgaaatccatgtttactcagtctggctcgagcactaaaccttaagccatatgacactggtgcatgtgccatcatcatgcagta

SEQ ID NO: 792 - DNA, 569 bp, Gossypium hirsutum
  Clone ID: LIB3083-015-Q1-L2-F3
accgatttatacacctccaaagaaagagaaacctgaacccaggccacccgtatatgaacctccaaagaaggagaagcccgagccaaagccaccggtttatacacctccaaagaaagagaaacctgaacccaaaccaccagtgtatgaacctccaaaaaaacctccaatgtacgaacctaagccaccaaaaccaccggtttatacacctccaaagaaagagaaacctgaacccaaaccaccaatgtatgaacctccaaaaaaacctccaatgtatgaacctaagccaccgaagccaccggtttatacaccttcaaagaaagaaaaaccagaacccaagccaccaatgtatcaacctcccaacaacccaccaatatatgagccaaaaccacctaagccaccagtttatgcaccaccaaaggaagaaaagccaaaacctaaaccaccagtttatgagccttcggcacatgagccaccatacggtcactatccaggacatccacctttggggaaaccctaatagaatgctcccatcgactagccattcccaacaattgagctactagaaaaat

SEQ ID NO: 793 - DNA, 361 bp, Gossypium hirsutum
  Clone ID: LIB3083-015-Q1-L2-F4
accgaataattttccagattcgaaagcgaggccaaacccgaggccaatgtgaaacttaccaaggaagagggccacgcacaacccaaatccaccgagcactacacatacaaagaaagagaaaccccaactcacacaaccagtgaacgaacctaaaactatacacacaatgtacgaacctatgaacaaacccccaacaacgaataaaccagaaaagaaagataaccttgaacccaaaacacccacgaatgaaccttctataaaacccaccaagaagtctccaaagaaaaaaaacctattcccaaatacacaaacactcaaagacacgacaaaaataaagccaccaattctaaaataccccaat

SEQ ID NO: 794 - DNA, 575 bp, Gossypium hirsutum
  Clone ID: LIB3083-015-Q1-L2-F5
tgaacttgttgtcattcatggccatgaagagcctagacctctgaagaacttggatggtcaagtttgtgagatttgtggtgatgaaattgggttgacggtcgatggagatcttttcgtggcctgcaacgagtgtggttttccagtttgtaggccttgttatgagtatgaaaggagagaagggagtcaacaatgtcctcaatgcaaaactagatacaagcgtctcaaagggagtcctagggtggagggagatgaagatgaagaggatgtggatgatatcgaacatgaattcaacattgatgatgaacaaaacaggtatagaaatatcgctgaatcgatgcttcatggaaagatgagctacgggagaggccctgaagacgatgaaggtttgcaaatcccacccggtttagctggtgttcgatctcggccggtgagcggagagttcccaataggaagctctcttgcttatggggaacacatgtcaaataaacgagttcatccatatcctatgtctgaacctggaagtgccagatgggatgaaaagaaagagggaggatggagagaaaggtttgatgatt

SEQ ID NO: 795 - DNA, 296 bp, Gossypium hirsutum
  Clone ID: LIB3083-015-Q1-L2-F6
aaatggcgagtgccccaaattacaggaaatgaaagagcaccaacaataccaggaaaaaaaaccccaggttcccaaacagggaaaacctcaagagcacgagaaacaccaagacgaatattcggaaataccccagtaccaaggaaaagaagataagagtaagaaacatatagatgaaaagtgccacgaagtacacgaatcgaaagagcaccaagagtaccagaaagaaaaacccgattttcccaaaaggggaaaacctaaagggcgccagaaaaataaagccgcatattccaaaatac

SEQ ID NO: 796 - DNA, 617 bp, Gossypium hirsutum
  Clone ID: LIB3083-015-Q1-L2-F7
gtttgttcttcagcagccaatgttgaccgcacgagcaagcaggagaaagaattagcagctgcggcagagaaattagcagaatgtcaagaaaccatattccttctcggcaagcaattaaaagctttccgccctcaaaccgaaacgaagggatcgccgtacaacgagaggataccaggtttccatgaggatgaaaccgttaccagcagcattaacttgcatgatctaaaccaggcagagatagaaacagctggttcggggaatgcaagcagatcgtgtgcagaatcacccatggagtcatcatttaacaccccatgcagcccttcagatactgaagcaaaccttttgagatcaccaatcaactcgaacaactcaaatcacaggtctaccatgtcaagctccgagtcttcctcgtctacaccgacaccggagaaacaatctcgaggctttagtagattcttttcctccaaagcgaagaacggacattaatccggcaagtcgataggtgcataatagtattttgttggactttgaatgtgaatttgtaagtaatgactggatatggttttcgtgtgacatctatggtttaaagctggttaatatattttgaaatatatttt

SEQ ID NO: 797 - DNA, 381 bp, Gossypium hirsutum
  Clone ID: LIB3083-015-Q1-L2-F9
tcggaattcccgggtcgacccactcgtccgttcatgcgttcgtcaactagcggtttatctcgcgcgggagacgtatatggctgggtggggggtcgcagcggcggtggctacaccggtgacgcctactgaggggacggttatcgcgatccacagcctggaggagtggagcatccagatcgaggaggccatcagcgccaataagctggtggtgattgacttcactgcatcatggtgtcctccgtgccgcgccatggctccaatctttgctgatatggccaataactccccaaatgttgttttcctgaaagttgatgtcgatcaaatgaagaccattgctgaacaattcagcgtagaggccatgccaacattcctgttcatgat

SEQ ID NO: 798 - DNA, 547 bp, Gossypium hirsutum
  unsure (1)..(547): unsure at all n locations; Clone ID: LIB3083-015-Q1-L2-G1
cgatgtcacntttttgagtaaaactagaaatgcatgaccatgctcgaataagttcatatgagatatcatacttattctgatttcatagtctactcatgacatcaaaaaacattagatgggctatgcaagtgtgactattccatgactggtgtccattctagatataaagaacaaaaggatttataatacatgaaaggttaatcacaaagaggttatgtcgaatcatgacttcttgtaacttaagtagaaatgatgcatagctagatgtcactcatagtttgtaatattagaatcgatctagtattactgctaacattataagaacctacgaggtcacaccctatggatgaaacgaactatatccaaatatagatggaattgagttcagttatctcatgaattaaattgattatagaattcattcaattgaccagtttaatatcatagaaattatatgtgttcgtatgctgtacacataccttaaaatatggctgaattaatatacgaatatgattcatatagaatttaactaagaataatttaccaa

SEQ ID NO: 799 - DNA, 441 bp, Gossypium hirsutum
  Clone ID: LIB3083-015-Q1-L2-G10
atcagggaggcttctcagaccaccatgaagggaattcttggttacgtagatgaagatttggtctcaaccgactttgtcggagacagcaggtcaagcatttttgatgctaaggccggaatcgcattgaatgacaactttactaagcttgttgcgtggtatgataatgagtggggttatagttctcgagtgatcgacttggttcgacacatggcttcttgctaagtgagtgaagttttagcttctaacttcagctttggcaagcaatttagaaactagaagagatattcctgtcttttgggtgttggtcatgcagataatagaaattgtatgcaacatttttttttcgtgtgaacactcttcttttgagtggattggaagggtttctattttgactcccttcatccattttatgacaataataattgcaggatcaactgaaaa

SEQ ID NO: 800 - DNA, 330 bp, Gossypium hirsutum
  Clone ID: LIB3083-015-Q1-L2-G11
cataaaacactttcacataaaaaccgaaagtctaaacataaacaaccgtcatccaaactccaaaacagtaccatatctgaaatttcaaacaaaatttctagcttaaatgtgctttaacagtcattgatgtcaatataaacgccaaaacaactagtagtatcctattaagccttatcggccttggcagcagtggcagcagcttgtcctctgagcctaccagtcctccttgcagcaataagaccaaccttttgtccaggtggagcatcacgtctaactgtactagcatgaccaatgtgttgatggttaccacctacgtggctatgaacccag

SEQ ID NO: 801 - DNA, 393 bp, Gossypium hirsutum
  Clone ID: LIB3083-015-Q1-L2-G12
ctgtttgagggataggtcagccattggcacttctgatcgggatgtctccgctagtttcggcactgaacctctacgatatagcgaatgtgaagggagttgctgctgatctcagtcactgcaatactccttctcaagttctggatttcaccggtgcttcggaattaggagattgtttgaaaggtgcaaatgtagtggttattcctgccggagttccccgaaagcctggtatgactcgtgatgatctcttcaacatcaacgccaacattgtgatgagcttggttgaggctgttgctgataactgtcccgatgccttcattcatattattagcaatccagttaactccacggtaccaatcgctgctgaagttctgaaacagaaaggtgtttacaatc

SEQ ID NO: 802 - DNA, 369 bp, Gossypium hirsutum
  Clone ID: LIB3083-015-Q1-L2-G2
cttggaacgcctgcggtgaaacaccgcatgtgttaccggggacgccacatgattcatatatacgaaagatgtacgctcaaatccagcgcttggatgtggatcctactggaacaacgctcgggatcatgaaagctaagcctgagcatgctacaagatgtcatgcacttgtcgagccagcgaatgatgccctgacctgtcaatggctacagaaacgcaagatgatagtatctacctatggatgaacgtgcgaggctatgtacaccatctcactttacttagctgatgccaattacggtggcggtgccaacactgagcatggcagccatggcaatgcccagcatgctcaatttaaagttcgatcccgacttg

SEQ ID NO: 803 - DNA, 474 bp, Gossypium hirsutum
  Clone ID: LIB3083-015-Q1-L2-G3
atagtaaagaatcccttgtattctactttttacctttcaaatcaaaaccaaaaaaaaaaaaacctttaccaataaccctatgactggtgaatgtgcctcaacaaccaaaagaatgcaaaaacaatggtttctttgccctccttacaaactaaaaacgacaactcccaaacttcgaatacatatttccaaaacccaacagtaaatatgaacattttcaggtaggaggtaagtcaaggggattacaaaaaatagtcgggggttctgcgtgtggtctcaggctcaatctgacgtggagctgggtcaaactgaagaaaactttggtccatattctctccaatctcaagtattgcagccatatttccacagcgatagcagtagtttggggcactgaacacggttaccacattcttttcctgggaccaattatatccttccataacaagctggtgagctctagaaatcgggtcagcccat

SEQ ID NO: 804 - DNA, 557 bp, Gossypium hirsutum
  Clone ID: LIB3083-015-Q1-L2-G4
ctcaagtaagggagacaatggtttcatcagagagtgaagataatctgatcacctatgatgcagccaactttaagtttgaggcatgccagccatcttcctcgtcagtaacggatgattctgaacaacctcaaattgacagtgcaattaaatctgatctgaaagagacctctcccgagatgaactcacaaggtcaaacaatgcaaatcagtgcacattctcaaatagaggtccattgtctttctaacaagcctgaaactgggagtgaacaacccaaacattctatggaaagatttgcttctgaacatttggaaacagaggcaaaaaaatttgtatttggttcaaaaaggacaagtaatcctgcatttattgctgcacaaaccaaatttgaggagttgagttcaacagccaattcaagtagatcaattaattcatcctaccaagatgttagtgttgaatcaaacttggacactgtgccttctggggcagatatgataagcaagtcaaaagagccaagcatctcagaaaatccagtcctcaacaattggagggttcaacat

SEQ ID NO: 805 - DNA, 622 bp, Gossypium hirsutum
  Clone ID: LIB3083-015-Q1-L2-G5
ctaggccacttgattgagtaaaactagaaatgcatgaccatgctcgaataagttcatatgagatatcatacttatttgtttttcatagtctactcaggacatcaaaaaacattagatgggctatgcaagtgtgactattccatgacttgtgtccattctagatataaagaacaaaaggatttataatacatgaaaggttaatcacaaagaggttatgtcgaatcatgacttcttgtaacttaggtagaaatgatgcattgctagatgtcactcatagtttgtaatattagaatcgttctagtattactgctaacattataagaacctacaaggtcacaccctatggttgaaacgaactaaatccaaatatagttggtattgagtttagttatctcatgaattaaattgattatagaattaattcaattgggcagttaaatatcaaagaaattatatgtgtaagtatgttgtacacataacaaaaaatatggttaaattaatatacgaatttgattcatataaaatttaactaaaaataatttaccaaaattcttgttataattattggaattataatttaggatcaaatataatataattactataattgaattcttttggc

SEQ ID NO: 806 - DNA, 435 bp, Gossypium hirsutum
  Clone ID: LIB3083-015-Q1-L2-G6
ctcaaaacaggtagacattttcgccaccagagagagaagaggggccgatctcctatgatgcagccaactttaactccgaggcatgccagccatatgtctcgtcagcaacggataattctgaacaacctcaaactgacagtgcagttaattccaagcggaaagagacctctaaaaaacgaactgacaccgtaaccactctagcgatcattgcacatacgtaaatagagagccacatgtctttctaacaaggcctgaaactgggaaggaacaacccaaacttctatgaaagaatgcttctggacatttggaaacagaggccaaacaatgtgattcgggcagaacggactagtaatcctgcacgtattgctgctcaaaccaaatttgacgcgttcagtttaacagccaattcccgtagatgaacccattcatcctacc

SEQ ID NO: 807 - DNA, 516 bp, Gossypium hirsutum
  Clone ID: LIB3083-015-Q1-L2-G7
atttgattgaacctcacagatcctgatgagttataaaccagagaaaaatataggtgaagatttaaacatcatgtagcaatcaatcatgacatttcctttatatatccatgggaccgattactacatatgtatacagaagaaatgaaaagcaataaagctgacgacttgggatttagaagagaggatgaatgggtactcttatgataattcagcagatggttgcaataaaaagggagataatacggatgagagtaatatgagacattgcgaaagaagcatatttgacgaacgaattcgacgccttaccttcaggatgggctactcctacgctactgtcgagacgagatcacgcactgtcactttgggcaccatgtatctactggacaatccatcggctttgcaacacttaacagaggagcatgaggaaattgtaatgaacagagaatatgccaattctggactagtatggtaggaatacatatacatgacgttcactagatacgtgattaatgaaac

SEQ ID NO: 808 - DNA, 393 bp, Gossypium hirsutum
  Clone ID: LIB3083-015-Q1-L2-G8
agctttagtacggcttagcaatggtgacatgagaaaggctttgaacattttgcagtcaacacacatggcttctcagaagattacagaagaagccgtgtatctctgtactggaaatccgttgcctaaagacatcgagcaaatatcttactggcttctgaatgaatcatttgcagagagtttcaaacgagtatctgaaacaaagaccaggaaaggattagccctgatcgatattgtatgggaagtgacaatgtttgattttaagattaaaatgccctcagatgttcaagttcagttaatcaatgacttggcagacatagagtatcgattgagtttcaagtgcgacgatgagtcgcgactggaatctttcactgctataatcacaggagctagatc

SEQ ID NO: 809 - DNA, 145 bp, Gossypium hirsutum
  Clone ID: LIB3083-015-Q1-L2-G9
attccacggactagacgcgcacgcgtccgtctgcacttattttctacatcgccttcatacacatattatccatctgtcattaggccgggattaccaaggtcagcgttgtggatctagagtttaacatactcattatctaacatga

SEQ ID NO: 810 - DNA, 572 bp, Gossypium hirsutum
  unsure (1)..(572): unsure at all n locations; Clone ID: LIB3083-015-Q1-L2-H1
cttgattcttattctcaggtttgatattcaaatggcggatattagcaatggttccaaagggtttgcagtgaaacaaggagaaccaactagggtccttcctgcagaagagacaaagaagggtctttattacctgngaaaccttgaccaaaacattgcagtcataattcgaaccatttacttctttcagtcagagtctaaagggaatgaagatgctgccgaacaagttaaaaatggtttgtcaaagattcttgttcatcattatccacttgctgggcgactaaccatcagctccgaagggaagctcatagtggactgcaccggggagggggctgtttttgtggaggctgaagctaattgtgggattgaagagatgggggacataacaaagcctgaccctaacattcttggaaagttggtttatgaaatctctggtgctcagaacttgctagagatacctcttttggtgattcaggtgactaaatttaagtgtggaggattttctattgggatgagcatgaaccactgtatgcttgatgggattgctgctatggaaattgtgaatggatggggtg

SEQ ID NO: 811 - DNA, 423 bp, Gossypium hirsutum
  Clone ID: LIB3083-015-Q1-L2-H10
gctcctcttagtttccctttttgtcccttgtgtgtttgatactcccccctcatggctgccgctgatgtcgagttccggtgcttcgtcggagggctcgcatgggccaccgacgaccgggcccttgaagaagccttcagtgcgtttggtgaaatcgtcgaatcgaagatcattaatgatcgtgagactggaagatcccgaggctttggattcgttactttccgtgacgagaaagctatgagggacgcgatcgaaggaatgaacggtcaaaatcttgatggaaggaacataactgtcaacgaagcccaatcgcgcagaagtggaggcggtggcggaggatttggaggaggaaacggtggttacagccgcggtggaggctgcggcggatatggtggtcgccaaggaggatatggtggcggacgccgt

SEQ ID NO: 812 - DNA, 435 bp, Gossypium hirsutum
  Clone ID: LIB3083-015-Q1-L2-H11
ctgtggttttcccactcctaaaagattacagctagggggatctttggatggagcaagcaccagtggcaatgacaacaattacataagttacaaacaccaccaaacttcccagaagacaaaaagcttgtccaaaagcacccaccagattccaatgcttggttttgagaatatagctttagatagaactcctagcagacagaaaagtgacaaaaaagtatctaacattgttgaagttgtggacataaagtgtgggaaatatcctgatagagcatggtcaaaccctgtaacaaatcgactcaagaagcttgggttctctaaactttcccaaagcatttctagacctgcaacttgttcacatcagacttcaggttcctataactgagacctgaaatcccaagtgacctgttgtctgaaatttccaccatagaacatatg

SEQ ID NO: 813 - DNA, 391 bp, Gossypium hirsutum
  Clone ID: LIB3083-015-Q1-L2-H12
gttttaatgaggaaaaagagtgcgacgcttaaggttgggaagaaagatatagctgatctgcttgctaatggccttgatatcaatgcttatggcagagttgaaggatatatagctgaattagtgctttcgtcttgctatgattttatagacaagtgttgcgatttcgtgacgaatcatgtttcagtcatgcaaaaactgagtgattgcccagaagattgcagggaagctgtctcatctctaatgtttgcagctgctagattttctgatttgccggagttgcgtgagcttatgcatatattacatgaaagatatgaaaattcactggacgtattcgccaataaacagcttgttgagaattcagcttcaaatcctatcacaatggagcgtaaag

SEQ ID NO: 814 - DNA, 565 bp, Gossypium hirsutum
  Clone ID: LIB3083-015-Q1-L2-H2
gccgattctgctcggcttgcaggctttcagaggaaggtttttgatgtcttatacaaggttgctgacattcctttcttaagcaaatacaagcatcaaattctcgatcttattgagcatgctgagacacagccgaacctcaccattggtgtcttggtctctattgtggtgattattctcacgattttcttcaagctcatttttggtgggaagaaacagccaagagtagagaagaaaccagaggttgctaaaacatcaaatggtgaaggaagcagtggagaaaaagctgaagaggcggagaaggaagaagctgctgccgctcctcgccgaaggcgccgtgacaattgagcaaatcttaaaacaaaggtagctggtggcgactaacagtttgagtttgggctaatttttgcactgtagggggttttcgtagctgaaatattatttgcctttggcattttttagttttactttttaatatgattagattgtatggtttgaaggatgtaaacgagacaaatttctgcatcaaagcaaaaaccaagtagaaaggaatttgaagcttgcttgt

SEQ ID NO: 815 - DNA, 527 bp, Gossypium hirsutum
  Clone ID: LIB3083-015-Q1-L2-H3
atctgttgaaattttcctaagcaggcattgccctctatggtatggctttggaggtggtcgtcttaaatggcttcaaagactagcatatataaacaccattgtctatcctttcacatcccttccactcattgcctattgttcactaccagcaatctgtcttctcacaggaaaatttatcataccaacgctctcaaacctggcaagtgttctctttcttggccttttcctttccattatcgtgactgctgttctcgagctccgatggagtggtgtcagcattgaggacttatggcgtaacgagcagttttgggtcatcggtggcgtttcagcccatctctttgccgtcttccaaggtttccttaagatgcttgcgggcattgacaccaactttactgtcactgccaaagcagctgatgatgcagattttggtgagctctacattgtgaaatggactacacttctaatccctccaacaacactcctcatcgtcaacatggttggtgtcgttgccggattctccgatgccc

SEQ ID NO: 816 - DNA, 596 bp, Gossypium hirsutum
  unsure (1)..(596): unsure at all n locations; Clone ID: LIB3083-015-Q1-L2-H4
gtatattgaaattttctttctcgattttctctttagccaaaaaagatgcagatcttcgtcaagactctaaccggcaagacgatcactctcgaggtcgagagctccgacacgatcgacaacgtgaagaccaaaatccaagataaggaaggcatccctccagaccagcagcgtctgatcttcgccggaaaacagcttgaggacggccggaccttggccgattacaacatccaaaaggagtcaactctccacctcgtcctccgtttgcgcggtgggatgcaaatcttcgtgaaaaccttgaccggcaagacaatcactctcgaggtcgagagctccgacacgatcgacaacgttaaggcgaagatccaagacaaggaaggcatccncccagaccagcaacgtctcatcttcgccggaaaacaacttgaagacggccgtaccttggccgactacaacatccagaaggagtcaacgctccatcttgtccttcgtttgcgtggcgggatgcaaatcttcgntaagacgcttacgggaaagacgatcactcttgaggtcgaaagctctgacacgatcgacaacgtgaaagcccaaatccagac

SEQ ID NO: 817 - DNA, 231 bp, Gossypium hirsutum; identical to SEQ ID NO: 728
  Clone ID: LIB3083-015-Q1-L2-H5

SEQ ID NO: 818 - DNA, 568 bp, Gossypium hirsutum
  Clone ID: LIB3083-015-Q1-L2-H6
caagctttttccttacaagtttgtttttcttgtgattaatcgatatggctagctcaatgtcccttaagcttgcatgtgtggcggtgttgtgcatggtggtgggtgcacccctggctcaaggggccgtaacctgtggtcaagtcacaagctccctcgcaccctgcattggttacttgacagggaatggtgctggtggcgttcccccaggttgctgcggcggcataaaatctctcaactccgccgcccaaacaacaccagaccggcaagcagcttgcaaatgcatcaaaagtgcggccgccggcatttctggcatcaactatggtattgcaagcggactcccaggcaagtgcggtgtcaacatcccttacaagatcagccctagcactgactgcaacagcgtcaagtgaagttttggcatggaaagttcaccagctagtggaagccaaaataacgatagctacagaataaatatggatgttaaaattccagagttgtgggttgtgtactatgccgctttatgcgactacgtaatattaactttatctacaaattaatatcactcgtcttc

SEQ ID NO: 819 - DNA, 578 bp, Gossypium hirsutum
  Clone ID: LIB3083-015-Q1-L2-H7
ctgaattcccttcaacatgtattgaggaaggcagaagaatatcttggtacaccgccagctgagacaccgtacgctgaactcgaacacaagttccaggaaatcggtttagagagaggttggggtgataccgcggggcgtgtgctggagatgatccaactccttttggatcttctcgaggcccctgatccttgcacccttgagaagttcctcgggagagtccccatggtgttcaatgttgtcatccttactcctcacggatactttgctcaagacaacgttttggggtaccccgacaccggtggccaggttgtatacatcttggatcaagtccgtgccttggagaacgagatgctcctccgtatcaagcagcaaggactcaacattacccctcgaatcttaattattaccagacttctgcctgatgccgatggaacaacttgtggtcaacgagtcgagaaggtatacggaacggaatactcagacatcctccgagtaccctttagaacagagaagggaattgtacgtagatggatctcgagattcgaagtctggccctacttggaaacttacactgagga

SEQ ID NO: 820 - DNA, 394 bp, Gossypium hirsutum
  unsure (1)..(394): unsure at all n locations; Clone ID: LIB3083-015-Q1-L2-H8
cataattcgaatcatgcgcgacggataccatcaacacactcccagctacggtcacagctacccagcagctcagccttacactgccggtacatacacagctggagcaccgtcgacacctcaaccgaacggtactgcatacgccgctggaccatacggctcaacggatggtgcctactctgccgatacgagcgagaaaccacccgaggacaagcaccaagcgcatggcgtcagtggcgctcctacagatcacagcggaagctatactgccaaaggacgctatgcgagcccgatcgcatctctgacgccgttggcattgtcaccggggacagatcctaacgtcgatggctgctntcaaatggctgaccaagatgcaagtggccttatcgatgatcaa

SEQ ID NO: 821 - DNA, 326 bp, Gossypium hirsutum
  Clone ID: LIB3083-015-Q1-L2-H9
atcatggttgcttctcagaccaccatgaagggaggtcggggttacttagatgaagatttggtctcaaccgactttgtctgagacagtaggtcaagcattcttgatgctaaggcctgaatcgcattgaatgacaactttactaagcttgttgcgtggtatgataattgagttatgttatagctctcgagtgatcgacttggtacgacacatgtcttcttgctaagtgagtgcagtcatatcttctatcttctgctttggcatgctattatgaaactagaatagatattgctgtcttttgggagtgggtcatactcataataaaaatt

SEQ ID NO: 822 - DNA, 327 bp, Gossypium hirsutum
  unsure (1)..(327): unsure at all n locations; Clone ID: LIB3083-016-Q1-L1-A1
accatcttgtggaaaatgcttattgatgcattggccttgacaatgaagctctntattatatctgcttcagaactcttaagctcacanatcccatctttggtgacttgaaccatttgatttcaacaaccatgagtggagtcacatgctgccttcgcttccctggccaactcaattccgatcttcgaaaactagcagtaaactttatcccattcccacgcctccattttttcatggttggttttgcacctttaacatcccggtgttcacaacaataccgatctttaacgatccccgagctaactcaacaaatgtgggattccaaaaaca

SEQ ID NO: 823 - DNA, 347 bp, Gossypium hirsutum
  unsure (1)..(347): unsure at all n locations; Clone ID: LIB3083-016-Q1-L1-A2
aattngcacgagcttaaattcgtcaacttttctgtagattttaagcaaanacgcatttttggtcttgatctctgggttttcncccttcttttttcaatattgggactaatggcggttggtcgtagggacaaaacggcatcgtttcgtggatcccgaatcttcgtatccattgtgatcggcgttctcctcggctgtgtcatcgctttccttttcccttacggcctcttcaatcccgctgcctcagttcaaaatcgtcgaatcgggaaaacgaatttccagattggttcttcgtcatgtgaatcctcggagcggagtaagatgctgaaatctgaaatcgtatccctatc

SEQ ID NO: 824 - DNA, 152 bp, Gossypium hirsutum
  unsure (1)..(152): unsure at all n locations; Clone ID: LIB3083-016-Q1-L1-A3
agcnaactggtcctcacacattttaccaccaaccacataacgcccctttcagataagtcatggcgcattccattctctccatcaaaaaaaatgcattcatacaaaaaaatctgtagtcgactcatcccaattggactgcaaaccacattttt

SEQ ID NO: 825 - DNA, 314 bp, Gossypium hirsutum
  unsure (1)..(314): unsure at all n locations; Clone ID: LIB3083-016-Q1-L1-A7
tcttatttcatttcccataatccancctccagggccatttggagtgatatagagagtntttggatntttccccttgcatccaaatggcgaaccttttctcaagaaagctttgcatggtcgattttcatcattcttcttgcctgtctaatcatgacccttgtctactgggcttaccccggtggcccatcctgtggcaaatacatgttcgtgaaccgttcctctcttactgctgctaacaagaggagaattccagggcctataggtttgcctctaataagcagcatgaaactgatggccaactcctttgctcacca

SEQ ID NO: 826 - DNA, 323 bp, Gossypium hirsutum
  unsure (1)..(323): unsure at all n locations; Clone ID: LIB3083-016-Q1-L1-A8
ctgagatcttttgcttcggatcttccnatcgatcccctgtgtacgctcaatcgcctttcagtactacnattcctgtggaaaactgaaacggaacgaatggatttagcggtggaaacgacgatgttttcagttctgatttttctgtgcttcctcctcctactgagatggcgccagaggaaggcttccttcttcgcgagtggcggcgtcaaaatgccattcagcttgaagagaaggagaagaaggaaaaggaattgaggaaccaaattatagaaaaagctgaggagtacaagctagcattctattataagccgggaaaaaaacta

SEQ ID NO: 827 - DNA, 299 bp, Gossypium hirsutum
  unsure (1)..(299): unsure at all n locations; Clone ID: LIB3083-016-Q1-L1-A9
gtcattgtttattgcgcaaataaaagggcngatgttactcggagtganctaaacctaaaaaaattgaataaaaaattgatgaaacccattcaggaacaagaaaatgacatcggatttggattgaatcccaatgaaaaaaaaatagatcaatgaaaagtttgtgcgataagtttagcgaatttttcttattatagattataggaaaacgggccaaacttatctttctttaatttcattttattaaaaaatgaagaaaaaccccttcttagaaatagaattagaaaagcacactataaaaa

SEQ ID NO: 828 - DNA, 349 bp, Gossypium hirsutum
  unsure (1)..(349): unsure at all n locations; Clone ID: LIB3083-016-Q1-L1-B1
aacatttttaagaaacaaagaatcaaacaggtcnaatgaggtgagtgaagaaagggtgagcccaaaggactatgtggatcctccaccggcaccgctcatcgacgtggctgagatcaagctttggtctttttacagagctctcatcgccgaattcatcgctactctcctcttcctatacgtcaccatagccaccgtcatcggccacaagaaacaacacgatgcatgcgatggtgttggtcttttgggcattgcttgggcttttggtggcatgattttcattcttgtttactgcaccgccggtatctcaagtggtcacattaacccggcggtgacatttgggttgtttttg

SEQ ID NO: 829 - DNA, 366 bp, Gossypium hirsutum
  Clone ID: LIB3083-016-Q1-L1-B2
ctgcaagtacctacaagtatttgatcatatcgctctgcgggagaaaaggtgggaaggtagatgaagccgttaaaatcttccaagaaatgatccgttctggatacacccccgacaaagagttacttgaaatgtatcttggttgtttatgtgaagttggcaagctattggaagctagaaactgcacagaatctctcagcaagattggattctcagctccactaagttattcgctgtatattagggcactttgtcgagctgagagactcaaagaagcattggaagtattagatgatgtcaggacagaacaatcctcattggatcaacatgtttatggaagccttgtccatgcactactacgaaagggac

SEQ ID NO: 830 - DNA, 249 bp, Gossypium hirsutum
  Clone ID: LIB3083-017-Q1-L1-A1
gcaacctggttcagcacaaaatggtgaccaattaacccggttggcaccggaaggttttcggccttttaaggttgtgaaccatttgcattggcttattatcccaatttcttaagggacttccgtttcaattggtctggttaggaagtccaagaatgcactggtgtcaaacttcttatttctcgaaccaaatgtgtgggtttgccaaaccaggctttattataaccaaaaaactgcctaggttaattggcc

SEQ ID NO: 831 - DNA, 413 bp, Gossypium hirsutum
  Clone ID: LIB3083-017-Q1-L1-A2
gcatcctgtcacagctcacaatgttgacacatcaaccagcttggcgcggaaagttgtccgcctttttaagtttgtgaacgatttgcatggtcttattagcccagttcctcaaggaactccggttccacttgttctgctcggaaagtcacagaatgcactgttgtcaactatcttattactcgatcaaattgggtggcttgtcataacatgcatctatcacatcaaagcacgtgctgagttgattggactaatatccctattctggtggatgggatcatcaatatgtaccacattggttgagcttggggagctaggaaagctatctgcatgaatgaaaaacttggagaagagacttaaggatagtgacaagtacacgaatgaggagtatcgtgcgaagctccaaaattcaaatg

SEQ ID NO: 832 - DNA, 270 bp, Gossypium hirsutum
  Clone ID: LIB3083-017-Q1-L1-A3
ctcgtgccgtcatgtcttattattctttgttaatacattaacggctgtgagggtagttttcaactttggtaatagcaagtctggtatttcagtttacgtatagcctataggatcagaggtaaacaacacttgaaattaattacatgtataaatcaattatctaaactacaatgaacttccaatcttgtctcaaaattgtgtgatcatggactgggacatatgcttaatttaagccctgaaatgcagtgttcgatagatacagttattttt

SEQ ID NO: 833 - DNA, 314 bp, Gossypium hirsutum
  Clone ID: LIB3083-017-Q1-L1-A5
ctagtctcgagttttttttttttttttttcctgcaattgggatgcagatcttcgttaagaccctgaccggcaagaccatcaccctcgaagtcgagagttccgacacgatcgacaacgttaaggcgaaaatccaagacaaggaagggatcccaccagaccaacaacgtctcatcttcgccggaaaacagctcgaagatggccggaccttggccgattacaacatccagaaggagtccaccctccatctcgtcctccgtctacgtggtggcatgcagatcttcgtcaaaaccctgaccggcaagaccataactttg

SEQ ID NO: 834 - DNA, 221 bp, Gossypium hirsutum
  Clone ID: LIB3083-017-Q1-L1-A6
ctaagctctagttttttttttttttcaaacgggcaattgagatgcaaatcttcgttgagactctgaccgtctggaccatcacattcgaagtcactagttaccacacgttcaacaaccttaacgcgataatccaagactagtgaaggatccgaccatactaacaacgcatgatctaattctgataacagctctaatattgcccgaccttggccgattacaac

SEQ ID NO: 835 - DNA, 441 bp, Gossypium hirsutum
  Clone ID: LIB3083-017-Q1-L1-A7
aattgaagctcgaataggggtgatgttttacattcttgggaggtatgatgagtcaaggaactcttttgagagtgcagtaacaaagcttagagcaagtggggagaggaagtcagccttctttggggttgtcttgaaccagatgggcttggcttgtgtccaattattcaagattgacgaggctgccgagttgtttgaagaagcacgagcaatactcgaacaagaatgcggcccatgtcatcaagataccctgggagtatacagcaatcttgcagcaacttatgatgctatgggaagggtcgaagatgcaatcgagatattggagtatgtactaaaattacgagaagaaaaacttggaatagcaaatcctgattttgaagacgaaaagaataggctggctgagctcctgaaagaagcgggcaagccacgcaacagaaaagcaaa

SEQ ID NO: 836 - DNA, 356 bp, Gossypium hirsutum
  Clone ID: LIB3083-017-Q1-L1-A8
atttgccgttacaataagtgcaatcttttacagtgctgggaactattacctgtggtgctacactttccaaagtggcagaacgacaacttacaccgtaagataagacgaagttagaactctatgggatggtcactaaccacattgatttggctgctatacatttagtaaacatcaacaatgacgaatcgcctgatgcttatcaagatactaatacttcatcatgaactcagcctttattttcatcataagagtctattatatatccatagtacatcaaccaacgtttatcaaaggaatgatataaagcacaatatcgatattctacaacatactctaccaacgattcggattacttt

SEQ ID NO: 837 - DNA, 290 bp, Gossypium hirsutum
  Clone ID: LIB3083-017-Q1-L1-B1
tagctcctccttttctgtttcattattactcaagttaatacatgtgacaggggaaaatctaatttgtcactataatactttcaaatctcttcttacaaattccatatagactatgctatcaaatacacacatcacattaactcaacaacctgtatgcatcatctatctacactacaatataacatccactcttgtctcaaaattgcatgatcatagactgatacatatactcaaattaagccctgaattaaccagttccatacatacaattgttttttctcaaaataaaa

SEQ ID NO: 838 - DNA, 223 bp, Gossypium hirsutum
  Clone ID: LIB3083-017-Q1-L1-B2
ggatgttggtggtcaggacaagattcgacctttgtggaggcactatttccaaaacactcaggggctaatctttgttgttgatagcaatgaccgtgaccgtgtggttgaggccagggatgagcttcatcgtatgctaaatgaggacgagcttgaggatgctgtgcttcttgtgtttgcaaacaagcaagatctgccgaatgctatgaatgctgctgagattact

SEQ ID NO: 839 - DNA, 248 bp, Gossypium hirsutum
  Clone ID: LIB3083-017-Q1-L1-B3
atcaaatcgtgtacagcacatgatactacctaggaaagggcacgaggtggctttcaatggagatctaagctgctggattcatgaccgtatcctaagccgaaatggatgtagcctgtgattcgctcacacgaatgcttcactgtgatcgaacttagccatgctagtcaacctgtctctgctaacactcatgctctgaattccgctgataatgcttctataagaaccagagctcctgctctatactaact

SEQ ID NO: 840 - DNA, 349 bp, Gossypium hirsutum
  Clone ID: LIB3083-017-Q1-L1-B4
gaaactttggtttctactgcacaacagatattgcctgcggaagtgcttaaaagagttttacaagatgtactttctcacatatcagagaagaccgtcggggctttatttggagactcggtgaagaggtttaatgtaaatgctattatggggattgatgtggatattcggttgttagaatctcttgcggataacctatcacctgtgttttctgaaggggatacacatcaattgaaaaatgcacttgcagagtcaaggcagttggtcaatttgcttttgagcaatcatccagagaattttctgaacccagtaattagagagaagagttacaatgccctggactacaggaaag

SEQ ID NO: 841 - DNA, 267 bp, Gossypium hirsutum
  Clone ID: LIB3083-017-Q1-L1-B5
tatggtgggtgttaaagataaatcgaaaatggttttaagtggaagacccaattagtcaagaaaagagattaatggagatgaggaaaaatgctaaaatggagaaagcttctaaatccatatctgaaattagctttgaagttgataggcttgctggccaggtttcagcatatgaatcgattatttcaaaaggtgggaaaagtaatgagaaagatgtggttaatttgattgagcttgtgatgaaccagttgcttaaattagatgggatta

SEQ ID NO: 842 - DNA, 201 bp, Gossypium hirsutum
  Clone ID: LIB3083-017-Q1-L1-B6
tatctaaattgaaccatatgaaacaagttcagtgccccggtgacaaccaatccagaacctaatcgaaattatggcacctggtgaaacctcctaaatagcttaaagctgaaaacccctacctagtattaccttttcaaattttaagcatgattgccacgttttaacatctggatccattatttcaacagccggtgaattcaa

SEQ ID NO: 843 - DNA, 125 bp, Gossypium hirsutum
  Clone ID: LIB3083-017-Q1-L1-B7
ctttatcattgacaaatatcaaccgctaatgggaaccaggtaccatccaattagtcacgaatcttcattattgaccatcttgccatatgccgaaatggataaagctaataaattcatatctggaa

SEQ ID NO: 844 - DNA, 330 bp, Gossypium hirsutum
  Clone ID: LIB3083-017-Q1-L1-B8
gtttctttttttttcatattcattttttataggactgaggaaacaattatcatgtgatagataaagcttcaaatactggagaattagccgtacttatattattgcatcactaacatgaatgcgatagcatattaattcagtcagctacctatgaagaaacaaacctttaattcacacttcataacggcatttactgtaacacaacatatcaaaaccaaaatcatttgaaccaaccatgactgtcaatatgcaacctgcaatcttttccaccgaggccaccatccgaatccggtctacattcacctagacgcctatacagtattctatcac

SEQ ID NO: 845 - DNA, 323 bp, Gossypium hirsutum
  unsure (1)..(323): unsure at all n locations; Clone ID: LIB3083-017-Q1-L1-C1
ggttgcgtcttcggggtggtttgcaagttttggtgaaaacgctaccgggaaagactattacctgggaagttgagagttctgatacgattgacaatgtgaaagctaagatccaggacagggaaggtattccaccggatcaacagaggctgatttttgctggcaagcagctggaggatgggaggaccctngctgattataatattcagaaagagtcaacccttcacttggtgcttcgcctgcgtggtggaatgcagatatttgtgaaaactttgaccggtaaaaccatttacgttgaggtggagagctncgacacggttgataat

SEQ ID NO: 846 - DNA, 314 bp, Gossypium hirsutum
  Clone ID: LIB3083-017-Q1-L1-C2
gttttcttttcctccaatctccatcaccactccttagaggctccatttcgaagtgaatcatggcgaggaagatgttagttgatgaggaaatgaaccaaacgaatcaagaggaggctcattatgatttcgacttgtttgttatcggcgccgggagcggtggcgttcgtgctgccagattctccgctaactacggagctaaggttgggatttgtgagctcccatttcatccaatcagttcagaagtcattggaggaagttggtgggacatgtgttattcgtggctgtgttcccaaaaagatttggtctatggagcg

SEQ ID NO: 847 - DNA, 438 bp, Gossypium hirsutum
  Clone ID: LIB3083-017-Q1-L1-C3
ctggtcaccagaccaggattgaaaaccgaactagatttactgtttgaagtggagcctctactcttgggaaaagtgtcagtcaaaaggcttctacgtgagggtgtagatgcaaattaccgtgacaagcaaggattatctgtactgcatctggcgacattattcaatcgaaccgatatagtgtttgccctcatggactgtggagcaagcatggactacaagaatgcacaaggtaattgattggcattcctgattctaaaaatgtctatctaccaatcgaagtttctaattattaggtgtgtaatcgagtcgagcacaaatactggcaagcttgagcttgattaaaaacttggggctcgatactcaaatcaagctcaattgaatatcattttttaaagctcaagcttggctcaagatattatcgagctacatgagctcaat

SEQ ID NO: 848 - DNA, 331 bp, Gossypium hirsutum
  Clone ID: LIB3083-017-Q1-L1-C4
aaagatctttctcctgatcttcaaaagcttcgctgcaaggtggcatttcaagcattaagatttgctccgccgatcctggaactcggtaacaagctcgctcggagaatgcagagcaagggaccatattttgctcttcatcttcgaatcgagaaggatgtatgggtgagaactggttgtcttccaggcttgagtaaggaatatgatgagatagtccacaatgaaaggagaaggcaccctgaatttcttactgcaaaatcaaacctgagttaccatgaaagaaaacttgcaaggctatgccccttgaatgcttttgaaatgactaggctgctta

SEQ ID NO: 849 - DNA, 446 bp, Gossypium hirsutum
  Clone ID: LIB3083-017-Q1-L1-C5
ctacaactacgagaactacgtggatctgcaggactgcatgaactagctactcagcttaaccatgattgaaaaccgaactagaattggtgattgaagaaaatccactactcttgggaaaagtgtcactcaaaaggcttctacacgagggtttagatgcaaattaccgagacaagcaaagattatctgcactgcatctggcgacattattcaatcgaaccgatatagcgtttgccctcatggactgaggagcaagcatggactacaagaatgcacaaggtaattgattggcatatcctgattctaaaaatgtctatctaccaatcgaagtttctaattattaggtgtgtaatcgagtcgagcaccaatactggcaagctttgaacttaataaaaaactggggctcgatactcaaatcaagcctaattgaatatcattttttaaagctc

SEQ ID NO: 850 - DNA, 125 bp, Gossypium hirsutum
  Clone ID: LIB3083-017-Q1-L1-C6
attaatattttctccatcaccactccttagagggaccatttcaaagtgaatcatgtcgaggaagatattacttcatgaggaaattaaccaaacgtatcatgaggaggctcattacgattcttaca

SEQ ID NO: 851 - DNA, 400 bp, Gossypium hirsutum
  Clone ID: LIB3083-017-Q1-L1-C7
ctagaactagagaactacgtgcgatctgcaggacatgtcggcacgagctggtcaccagaccatgatagagaacctaactagatatggtgattgaagagtagcctctactctagggaaaagtgtcagacaaaaagcttttacgtgagggcgtagatgcaaattaccgcgacaagcaaggattatctgtactgcatctggcgacattattcaatctaaccgatatagcgtttgccctcatggactgtggagcaagcatggactacaagaatgcacatagtaatagattggcattcccgattctaaaaatgtgtatctaccaatctcaggttctaataattaggcgtgtaatccaatcgagcgcatatactggccagcttgagctcgattaaaaacttggggc

SEQ ID NO: 852 - DNA, 339 bp, Gossypium hirsutum
  Clone ID: LIB3083-017-Q1-L1-C8
attgagtgtgcgtatgatgtcttttattacctgttgctggcgtgttatgcaagcttctattctttgaagcttgttaaagacttgaaatggtttactgtatgttatgctttttcatgttttatttgtgtttgggttgaaacttgatatttttgttgtctgtattggaagtaaattgttaatggaacttgtaaatgcccaacatgtataatggattcatgtggttatttgaccctatgtgtggtccaatcaattgggcaattttaacggtttagtcttctaccaattatgcctgtttttgagatgaaaaattgattagctcagtttgtaactttgtacatt

SEQ ID NO: 853 - DNA, 293 bp, Gossypium hirsutum
  Clone ID: LIB3083-017-Q1-L1-D1
ctggtcaccataccatttttgaaaaccgaactagatttggtgttggaagtggagcctctactcttgggaaaagtgtcagtcaaaaggcttctacgtgagggtgtagatgcaaattaccgtgacaagcaaggattatctgtactgcatctggcgacattattcaatcgaaccgatatagtgtttgccctcatggactgtggagcaagcattgactacaagaatgcacaaggtaattgattggcattcctgattctaaaaatgtctatctaccaatcgaagtttctaattattat

SEQ ID NO: 854 - DNA, 269 bp, Gossypium hirsutum
  Clone ID: LIB3083-017-Q1-L1-D3
gtggattcttaacatttttaaatcaagtgtctgcgacagcccacggtaccttttgacggtgtcatcgacgtttatggggaactcgacgtctatacaagagatgtttctacatgtttctgaacagttcacagtgatgtttatgaggaaagcatttttgcattggtatacacgggaagggatggatgaaatggagtttactgatgctgaatgtaatatgaatgatttgatttctgaatattatcattattaagatgctgtagttgattaat

SEQ ID NO: 855 - DNA, 339 bp, Gossypium hirsutum
  Clone ID: LIB3083-017-Q1-L1-D5
ctacaacttttcgagacatcagcctagactgacctagaggacaatgtgccattagcagcaccctcttatgagcctggacaactcatataatggtcttattacaaagctgctatagccgaacttggagccacctcattgtatctttacatcaccgagtatactgtcatgactacttatcactctaaaaccacatgtacaaccgttagcattcaatgtattacttgctcttctggcttcatgatctatgctctcgtttactctactgaccgcattgcacgaggtcttactaaccatgctgttaccttatcatttttaatagcaaataaactttcacttaca

SEQ ID NO: 856 - DNA, 212 bp, Gossypium hirsutum
  Clone ID: LIB3083-017-Q1-L1-D6
ctataaatttctctctcgctatctcgcctaggacatgtctgcacttttcattgcgctaggattatcaacaacttcgagccttcaattaagctaaatctctgaactacaaactccacccccttaaaccccgttattgcaacaggcaaatctcatacacaaatcctacttgttaacaagctaactctattccatactcaccacttcaaactctc

SEQ ID NO: 857 - DNA, 390 bp, Gossypium hirsutum
  Clone ID: LIB3083-017-Q1-L1-D7
gggattatttgaggtgtgtttttctgggaacgtgtctgtggagttgaatgctaacaagaagagattgaagttagtctatttaagttgaatgctaacaagaagagattgaagttagtctatttaagtgaatgcttcaagttgaactccgcaaattgtgaaagaaagaggtttcttgagttcatccttttcatttgtaggttgtatcgtttaataatagagataagagatgggttgaaatgagtaagcccatagtggtgagaaataaaaggcaaagcccactccttgggttgtcgtctacttgggattcgaatcaatttgactaggaacggatcacagaaactgagaagtgagacacccacccaatcaaccttgtgaaaattgcgacacccc

SEQ ID NO: 858 - DNA, 372 bp, Gossypium hirsutum
  Clone ID: LIB3083-017-Q1-L1-D8
ctccctaaaatccacatgtaatacgacactctcccatggattatgagaaccagatatgacggtcgaataccgatcaggttttttttaacattgcactctccatctttctcatacacaaaaatatacatcacattttccctaaattaaatgttcatgcctctccatttccaacatgctatactcgtactatatatattatacacaaaccaatttccaggcaatcaaaataaatgtatgttgtttgtttgcatcgtgctcgaataaatggagtaatcgaactcaaaattacttctggatcattttttatctgttgttatgccaaccacgacgttgctaaccaattttccactctcatcgactgacatggggggg

SEQ ID NO: 859 - DNA, 182 bp, Gossypium hirsutum
  Clone ID: LIB3083-017-Q1-L1-E1
aaaagaaaagtcccattggctttaaaaaaaaaaactttaaggttattagcctaaaccaaggattaataataagctaaggaaccaaattaaataaagtcttagcaactactagagaccctataaataacccaaaaagaataaacggtgtaaaattcaaccgtacttaaagataggcccaattt

SEQ ID NO: 860 - DNA, 231 bp, Gossypium hirsutum
  unsure (1)..(231): unsure at all n locations; Clone ID: LIB3083-017-Q1-L1-E2
aaaaagagcttgaatctgtcagaaaacatcgaaagcaaggtagaaaccgccggttttctgttcccgttcctgtagtatctttggttgggtacacaaatgctggcaagagtacacttttaaatcaattgactggagctaatgttctttcagaggaccgactgtttgctacccttgatccaacaacaagaagggtcagatgaaaantggaagtgaattctttttactgacact

SEQ ID NO: 861 - DNA, 337 bp, Gossypium hirsutum
  Clone ID: LIB3083-017-Q1-L1-E3
gtaatgagcttgcatttgtcaaaaaacattttccgctggctttaagccggcgatcttcagttcccgtacccgaatccaattagtgtgggtacactaatgctcgcaagagtacactgtttaatcaactacttgcaactattttaatttcacaggaccaattgacgtgctcaaattgatccatcactatgaaatgatccacatgataatcagaagtgcttgcatacttactgacactaatcgctacatacgtacgttgactcaagccacaagggctgcattcagtgatacattaggacagatatacaactggattgttttactgcatgtgagcgtcatc

SEQ ID NO: 862 - DNA, 295 bp, Gossypium hirsutum
  Clone ID: LIB3083-017-Q1-L1-E5
ggttatacttttccactggtaattcatcctatgttcaggtagctactcatccgaaacttgccaagcatgctggtgctttctgtgaccacccacatcatggtgttcttagctttgctaatcagcttgccggggctcacgtgcttctgacccgattgagattgattttgagtcctgactatccatataatgaaatattgagttcgtttcataactaatccagcatacttatattctcattccgtccagttctcactagctctaatatgtccatcaggagtgctgattcatctaaacc

SEQ ID NO: 863 - DNA, 270 bp, Gossypium hirsutum
  Clone ID: LIB3083-017-Q1-L1-E6
attccacatttttctaactctgtcaagcttagctatgtgaagcttgtctaccaatatctcgccaatcatattcttacacttactctcatacctgtcatggctggcgctcttatagagattcttcggttacgccctgctttcatagaacctctttggaattcccttcattccgatctcagaaacatctcatgctcttgattcaacattatatcttgatcctctcactacttcatgtatacacctataatcacataccttgttgattattca

SEQ ID NO: 864 - DNA, 408 bp, Gossypium hirsutum
  Clone ID: LIB3083-017-Q1-L1-E7
aactggatgctacaaccttctatgtgcaggctttgtgcgaacaaatagtagaattgccattggggctgccatttctcctgtctcacaatatgatgctaatcaatatgatattaccatcctcatttggaaggatcctaagctaggaaattggtggatggggtttggtgataataacctggtaggttattggccagcagagctatttactcacctagcagaccatgccaccatggtggaatggggtggtgaagtagtgaactcaagggccaacggcaagcacacgtctacggaaatgggctccggtcactttgctgaagatgggtttggaaaatcgagctatttccggaacttggagcttgttgatgccgataatagcttgagttcggtccatgacatatcaaccctagc

SEQ ID NO: 865 - DNA, 297 bp, Gossypium hirsutum
  Clone ID: LIB3083-017-Q1-L1-F1
ctagccgctagacctatattctacatccttatatgtacacgctggccggggacaaatagttgaattgccattggatcgaacccgtgatcctgtgatacggtatgaaactaatcaatctagcttttgaattcgaacctggtaacatacatcgctatgtaattgaatcatgtcaagttcctctaacatgcattcaggataatggccaacacatcaatagactaatatagcagaacctgcaacaatagcaaccactggtagttgagaacttaacgctgggtacttttatcggaccactta

SEQ ID NO: 866 - DNA, 428 bp, Gossypium hirsutum
  Clone ID: LIB3083-017-Q1-L1-F3
tgcagggatggattccctaagcgatagagcgtcaatgatgagggaagctctccagaagagccaaaccattacggacaacgtcgtctccatcctcggctccttcgacagccgcctctccgccctcgaaaccgccatgcgacctactcagattagaactcatgctataaggaaagctcatgagaatatagacaagtctttgaagtctgcggaagttattttggcacaatttgatctatctcgtcaggcggaggctaaaatacttaagggtccccatgaggatctagaaggttatctgggagcaattgatcagctaagaagcaacattcgcttttttagcagcaacaagaactttaagaatagcgagggggtgattaaccattctaacactttacttgctaaagctatttcaaagctagaggatgagttta

SEQ ID NO: 867 - DNA, 347 bp, Gossypium hirsutum
  Clone ID: LIB3083-017-Q1-L1-F5
gtcaaagccatttttttcatcaaatttaggaagaaacgctgtcaatcatccttgctagacctattgtacttcatatggctttcaactagttgcccttcaacaagtgcttacatcacctacaaactcgcctgcaacctcattaccttctacactattctcattgagaatctcatttagctatcttgacatagtttgtctagtctgcttaaactattttggcacaatctgatctatcttgttacgcggatgcttaaactcttaacggttcccatctggatctataacgttatctctgagccatttatcatcttataatcatcatttgcttttttagcatcaactttaac

SEQ ID NO: 868 - DNA, 357 bp, Gossypium hirsutum
  Clone ID: LIB3083-017-Q1-L1-F7
gagctgttgtaggagaaggcaacaggcatgtacgagagggaggtgtacgttttgcctaagcacctcgatgagaaggtggctgctcttcaccttggaaagcttggggctaacctcaccaagctcaccaaggatcaagctgactacattagcgtccccattgagggtccttacaagccctcttactacaagtactgatgagagaatacgacagagggacagcgagttagatacagacagggagagagtttgacttgtaaaaggcaccattcaacgggatcgtttggttttactaaaatttattgatgatttgaggttagatggttagattttgattttggtaggagtttgtttgtggag

SEQ ID NO: 869 - DNA, 413 bp, Gossypium hirsutum
  Clone ID: LIB3083-017-Q1-L1-G1
tccaaagctttagcgttatcggaaaactcaccggaaatgcatcatgtgtacattggagaaacgcggcaacgtctttattttaacatttaccggcgaagaccagcaccggtttaatcccaatctcatcggctcccttctcagccttctctctcaggtcaaggctgaagccactcgtggctcagctcttattacccaagcccaaggtaagttcttctccaacggcttcgatctcgactgggctcaagccgccggatctgaacaaggagccgcggaacggttacaccacatggtggctttgtttaagcccgtcaccgctgctcttctgtccctcccgatgcccaccgtcgccgtcatcaccggtcacgccgcttccgctggatttctcctcgcgttgtctcaacgatacctgatca

SEQ ID NO: 870 - DNA, 411 bp, Gossypium hirsutum
  unsure (1)..(411): unsure at all n locations; Clone ID: LIB3083-017-Q1-L1-G3
aaaaaacatacacaaaaaaatgaagccttggggaaattgaggagttgtagaaaccatttatgaagatgaagtttatgatgatgatgatgatgatgataactcttccaactctccttcacttctctcatctcctccttcacctctccattcaagtgcacaagcttggtcatcggcaatggggtgtaaaactgacgtgttgatacatgtacagggaactgcttttcaccttcataaggatcctctgatatccagaagcacctatttaaggcggaaattaactgacaaatcagaattaacgttatccccgccgttaaacataaccgccgaaacattcgctctcgtagtcgatttctgttacgggactcacctnctcgtaacgccgttcaacgtagcgtcactcttggtggcagc

SEQ ID NO: 871 - DNA, 237 bp, Gossypium hirsutum
  Clone ID: LIB3083-017-Q1-L1-G5
gtcgtccgataatctgaccgacaagaataccggtttcagaaagctgaaagcaaaattagaaaacaagatgtgtttcgattgtaatgcgaagaatccaacatgggcgtcagtgacttacgggatctttctttgcatcgattgctcagcccttcatcggagtcatggtgtacacatcatctttgtcaggtctacatatatagattcttggtctactgaacaattgataatgatgatcta

SEQ ID NO: 872 - DNA, 265 bp, Gossypium hirsutum
  Clone ID: LIB3083-017-Q1-L1-G7
atgaagcctatacggaaacttgagagttgtagaaaccatttatgaagatgaactttatgatgatcatgatgatgatgataactcttccaactctccttcacttctctcatctcctccttcacctctccattcaagtgcacaagcttggtcatcggcaatggggtgtaaaactgacgtgttgatacatgtacagggaactgcttttcaccttcataaggatcctctgatatccagaagcacctatttaaggcggatattaactgac

SEQ ID NO: 873 - DNA, 433 bp, Gossypium hirsutum
  Clone ID: LIB3083-017-Q1-L1-H1
tctagtgcactagtaaaaggttttcatgaagcttttttattataattatttggagctatagaaaagccagttgtgtgttgaattttcctaaccaatgtgtacgtattgcctcggcacttccaactaacaagacatccataaccgctcaagtattaacaaatcgaacatacatggttcaaggaatgaattatagtctccgctgagagaaacggcaggagctttagctgtattaaaaacatgccatgtagtggctttagaacataacgtagtctctacaagtcgatgagtttttgcatagaagcattctgataccaaactactcattcttgtatctcttctctacttcctccaaactctgaatttccttgtgatactagcaaatccggtagatacaccagtaaaggaggcatgcagtcgtacacataattacatt

SEQ ID NO: 874 - DNA, 405 bp, Gossypium hirsutum
  unsure (1)..(405): unsure at all n locations; Clone ID: LIB3083-017-Q1-L1-H3
aagaagactacgttagtccgtcttgatgtaaaaccaactgaactggctgatgcacctaatgacgctaaatattttgcgatttatttggaaaatccattaaagtctggtgaaagcacaaccctagaagtattgtacctgttgacacactcccaagaaccctttccagctgagatagcccaatcagaatctcaattagtatattatcgtgatagtgcgttgatattgtcaccatatcatattaagcaacaaacgacttttattaagacaccaagtactaaagtggaatcgttcacaagggtggaacccagtaatcgtgcaggcactgaaataaagtatgggccatatgaagatcatcctccatactctntttctccaattcttatacattttgagaacaatagcccg

SEQ ID NO: 875 - DNA, 432 bp, Gossypium hirsutum
  Clone ID: LIB3083-017-Q1-L1-H5
ctcaactattggagtataggggtaagattgaagctgagggcagcatgatctgtgatgggattttgagccttcttgaatctcacctcattcctttggcctcatctgctgagtcgaaggtgttctaccttaagatgaagggtgattatcacaggtatcttgctgagtttaagactggtgctgacaggaaggaagctgccgagagcactttgttggcttacaagtctgctcatgatattgctcttgctgagcttgctcctactcacccaattaggctgggacttgctcttaacttctctgttttctactatgaaatcctcaactcacctgatcgtgcctgcaatcttgcaaaacatgcttttgatgatgctatttctgaatttgatactatgggtgacgaatcttacatagatagtacattgatcatgcaacttc

SEQ ID NO: 876 - DNA, 419 bp, Gossypium hirsutum
  Clone ID: LIB3083-017-Q1-L1-H7
ccggtattcaggtcggaaatgcttgctgggaactttactgtctcgagcatggcattcagcctgatggccaaatgccaagtgataagactgttggtggaggagacgatgctttcaacacctttttcagcgaaactggtgccgggaagcacgtccctcgcgccatctttgttgatctggagcctactgttatcgatgaagtgaggactggtacgtaccgccagttgttccaccctgagcaactcatcagtggcaaagaagatgctgccaacaatttcgctcgtggccattatacaattggcaaagagattggtgatctctgcttggatcgtatccgaaaacttgctgataactgtactgggctccaaggcttcttggtttttaatgctggtggtggtggtaccggttctggtcctggatct

SEQ ID NO: 877 - DNA, 336 bp, Gossypium hirsutum
  Clone ID: LIB3083-018-Q1-L1-A1
ccagcctttttctgcacaaaatgtcgacaaatcaaccatgtcgcctcggaaagttttccgggtttttaagtatgtgaacgatttgcatggtcttattagcccagttcctcaaggaactcccgtaccacttgttctgctaggaaagtcaaacaatgcactgttgtcaactttcttatttctcgatcaaattgtgtggcttgtcaaaacaggcatctataagaacaaagaacttgcttagttgattggacgaatattccttttctgttgtatgggatcatcaatatgtaccacattgtttgagcttgttgagcttgtaacgctttctgcatcaattaa

SEQ ID NO: 878 - DNA, 256 bp, Gossypium hirsutum
  Clone ID: LIB3083-018-Q1-L1-A3
tttgcatggtcttattagcctagtttctcaaggaactcctattccacttgttctgctaataaagtctaaaaatgcactgttgtcaactttcttatttctcgatcaaattgtgtgtctttgcataacatgcatctatcataacaaagaacttgcttatttgattggacgaatatcccttttctgttgtattggatcatcaatatgtaccacattgtttgatcttgttgagcttgtaaagctatctgcatcaattaaa

SEQ ID NO: 879 - DNA, 177 bp, Gossypium hirsutum
  Clone ID: LIB3083-018-Q1-L1-A5
attttaagttctaataggggtgatgttttacgggcttgggaagtattatgagtgaaggaactctttcgagagtgcactaacaaagcttagagcaagtgtggagaggaagtcagtacttcttaggggttgacttgaaccatattgtcttggctagtgttcaattattcaagattgact

SEQ ID NO: 880 - DNA, 342 bp, Gossypium hirsutum
  Clone ID: LIB3083-018-Q1-L1-A6
atttgaagttttaataggggtgatgttttacatgcttgggaggtatgatgagtgaaggaagtcttttgagagtgcagttacaaatcttagagcaagtgttgagaggaagtcagacttcttaggggttgtcttgatccatatgggctttgcttgtgtccaattattcaatattgactaggctgtctaattgttagaagaagcacgatttatactataacaataatgcagtcgatgttatcaagattctctgtgagtatacattaatcttgtaccaacttatgatgatatgttaacggtctaatattcaatttagatattgtagattgttctaaaattactaat

SEQ ID NO: 881 - DNA, 299 bp, Gossypium hirsutum
  Clone ID: LIB3083-018-Q1-L1-B1
gaaactttgttttctactgcacatcagatattgcctccggaacttgtgaaaatactcttacaagatgtactttctcacatattacagtagaccgtcaccgctttatttggacactcgattaacatgtataatgtcaatgctattatagctattgatgtgcatatttccttgtctgaatctctagcggatatacctattacctgatttatctgaacgtgatacactatcaattgaaaaatgtacttgcttagtcaaggcacatggttaattcactttactgcaatcatccacagaatttt

SEQ ID NO: 882 - DNA, 97 bp, Gossypium hirsutum
  Clone ID: LIB3083-018-Q1-L1-B5
acagtggatcccaattctgcgattaattcatcacaagccttttcgtttttaaatataaatctaaaatagtgcaaatgtaacattcaaaatgtcaata

SEQ ID NO: 883 - DNA, 387 bp, Gossypium hirsutum
  Clone ID: LIB3083-018-Q1-L1-C1
aaagatctttctcctgtatcttcaaaagcttcgctgcaaggtggcagttcaagcattaagatttgctccgccaatcctggaactcggtaacaagctcgctcggagaatgcatagcaagggaccatattttgctctacatctactaatcgagaaggatgtatgggtgagaactggttgacttccaggcttgagtaacgaatatgatgagatagtccacaatgaaaggagaaggcaccctgaatttcttactgcaaaatcaaacctgagctaccatgaaagaaaacttgcagggctatgccccttgaatgctttcgaagtgactaggctgcttaaagctctgggggcgcccaggagtgctagaatatactgggctggagggcaaccact

SEQ ID NO: 884 - DNA, 283 bp, Gossypium hirsutum
  Clone ID: LIB3083-018-Q1-L1-C4
tagattgagtgtttttatgatgtctattattacctgtgtcggggcgattatgcaagctgctatgctttgaatcttgttaaatactttaaatggtttactgtatgttatgcttattcatgttttatatgtgtttgtattgaaacttgatatttttgttgtctgtatatggaagtaaatttttaatgctactttttaattcccaacatttataatttattcatattttttatatactctttgtttttactatttaactgttctattataactgtttatttttttt

SEQ ID NO: 885 - DNA, 181 bp, Gossypium hirsutum
  Clone ID: LIB3083-018-Q1-L1-C5
atttagtgtttttatgatgtctattattacctggaactggacaattattcaagctgctaggctattaaactagataaacactcaaaatggattactgcatgtcatacttattcatgttaaatatgtgtatgcgtttaatcttgatatctatgtagattttatcttaattaaattattaatt

SEQ ID NO: 886 - DNA, 299 bp, Gossypium hirsutum
  Clone ID: LIB3083-018-Q1-L1-C6
gtctcacgagatagatatttttccatttcttcaaaagcttcactacaaggtgtcatgttaagcataaagatttgctgcgcctatcctggaactcggtaacaaacttgctcgtagaaatcaaagcaagggaccatattttgctctacatcttctaatcgataaggatgtatgggttagaactggttgtcttccaggctttactaactaatataattatatagtccacaatgaaacgagaaggcacccttaatattttactgcaaaatcaaaccttatttaccattatagaaaacttttat

SEQ ID NO: 887 - DNA, 288 bp, Gossypium hirsutum
  Clone ID: LIB3083-018-Q1-L1-D5
ataactgcgattctttctaaaatccacatttaattttacactctcccattaattataagaccatgtattactttaaaatacctatcgatttttatttaacattacactctccattattctatatacacaaaaatatacataacatttatcataaattaaatatttatacctttttcattttaacattctaaactcttactatatatattatacacaaaccatattttactcaatcataattaatattattttatataattttcatattactataaattatattattta

SEQ ID NO: 888 - DNA, 420 bp, Gossypium hirsutum
  Clone ID: LIB3083-018-Q1-L1-E1
tttctttgatttcgaattttaaaaaaaataataatcaccgtaatggtccattgcctcatcttcataatcttcatcattgtcatctgcaacagcatcttgatattgctgatactccgaaaccagatcattcatgttactttccgcttccgtaaactccatttcatccattccttcccctgtataccagtgcaaaaatgccttcctacggaacataacggtgaattgttcacaaacacgccggaacatctcttgaatcgacgtcgaattccccatgaatgttgatgacattgttaacccggtgggtgggatgtcacaaacacttgatttaacattgttgggaatccactctacgaaatacgatgagttcttgctctgcacatttatcatttgttcatcaacttctttagtgctcatcttgcc

SEQ ID NO: 889 - DNA, 407 bp, Gossypium hirsutum
  Clone ID: LIB3083-018-Q1-L1-E3
tctcaggttttcacacgatatacttgatttgttttttaaaaaaaatcataatcaccgtaattggtccattgtctcatcttcataatctctatcaatgtcatctgcaacaccatcttcatattgctgatactcctaaaccagatcattcatgttacttttccccttccgtaaactccatttcatccattccttcccctgtataccaattcaaaaattcctttctacttaacataactcttaattcttcacaaacactccttaacatctcttgaatctactttcaattccccattaattgtgataacttttttaacccttattattggatttcacaaacactttattttacattctatgaaatccactctactaatctcaataacttctttttcttaacatttatcatt

SEQ ID NO: 890 - DNA, 147 bp, Gossypium hirsutum
  Clone ID: LIB3083-018-Q1-L1-E5
aaatcatctttataccttctatacaccttctgggtacagttatctagttaaatggccatgtcaatctcaacctctacagtgctataaaataaaactactcaatttattttatcaatgctcattcttatagttcctaacctattatac

SEQ ID NO: 891 - DNA, 278 bp, Gossypium hirsutum
  Clone ID: LIB3083-018-Q1-L1-E6
tttaaaaaaaataataatcaccgtaattgtccaattcctaatgttcataaccttcatcattatcatctacaacaccatcttcatattactaatacttctaaaccaaatcattcatatcactatccacttccataaactccaattcatccattcattcacctatataccaattcaaaaattccttcctacttaacataacttataatttatcacaaacactccttaacatatctttaatccacttctaattccccattaatcttaatcacattaataac

SEQ ID NO: 892 - DNA, 370 bp, Gossypium hirsutum
  Clone ID: LIB3083-018-Q1-L1-F1
aggagacttttctgtgtcaatggctgaccaggggttaacggaaggggcttgtgccaaagaggagtctactgaaattctgaacaagcatatggagttttacatcggcggggatgactgccatttgattccagttgaattgatggattctactgctatgagaagccaaaaaatatacaagttcacagaggaagatgaagatgttgctggtacaggagatgttattcaggacttcgatttgcagcaacctgagacaccagtggagttggttgtggagaatggttgcagttcagcggagaaagtgacacccatttcaccccatgtgagtaaagaagaaaccattgatgtaacgtatgaaccaatggagcctaat

SEQ ID NO: 893 - DNA, 263 bp, Gossypium hirsutum
  Clone ID: LIB3083-018-Q1-L1-F4
tagaacagtggatccccctactgcgaggaattctcactaggattaaccttaacacacacccacacaaatccgacaggagaattccaatggcccaaacacctatattataaagcaaacaccctatatcaaataccactctactctaacctaaacaatctcacctaaactcaatcccacaacattatcttcaccaatcaacaacattactatctctattactactactacttactatataacactataaaattataataattatt

SEQ ID NO: 894 - DNA, 224 bp, Gossypium hirsutum
  Clone ID: LIB3083-018-Q1-L1-F5
catttaccttttacacacactacacacatatccgagaatgagatattccatatgcccaaacacctatattataaagtaaatcttttatatcatataccacactgctctaacctaaccaagctcaacactactcaatcccactacattatcttcacccatcaacatccttacaaaatctatcactacaactacttattatacaacactacatatttataaatatt

SEQ ID NO: 895 - DNA, 347 bp, Gossypium hirsutum
  Clone ID: LIB3083-018-Q1-L1-G1
ctaaaacatttatagatttcccaatcctcgtactaattgcggaatggtgtaatccatttatgaatatgaagtacatgatgattataattgatgattataactctaccaactctcattaacttctctcatcttcttcttcatctatacattaaattacacaaacttaatcatcttcaatttcatgtaatactgacttattgattcatttacatcgcactgtttcacaacttaataattatcctctgatatccacattcacctatttataacttaaattaacttacaaattataattaacgttattcctgacgttaatcattaccttctaaacattaattctcttattc

SEQ ID NO: 896 - DNA, 254 bp, Gossypium hirsutum
  Clone ID: LIB3083-018-Q1-L1-H1
tttacctcttttcctactagtctttgactctctccaactgaacccgtacatgcacatgaaggcacatctctcactctacttaatcgccaacatccataaccgtttacccattaatcatcttctatacttgcgatccttttccaacctttggctatcctttatcgactatccctatttcatcaatcttcaccttcgtcactccctcgactccctcactaaccacaccctcatactcaaaaacaccgatcttcaca

SEQ ID NO: 897 - DNA, 233 bp, Gossypium hirsutum
  Clone ID: LIB3083-018-Q1-L1-H4
cttttctctttaaacccaacactggcttctaggtctactgtctctttcaacttatttaacatgatctactacttccatactatcagattgaagagttataagacaatgctaataacacaccgtgaattacaacatgcaccttgaaaaaatttcttccagccaaaattgactaacttacacttacataaatcactgacattagcactaactattacacaacaatgatttactct

SEQ ID NO: 898 - DNA, 277 bp, Gossypium hirsutum
  Clone ID: LIB3083-018-Q1-L1-H5
ctttttctttaaacccaacactagcttctaaggctactgtgtctatcaacttgttcaacatgatcgactactccctcactataagactgaagatttataagacaattcatataacatacctttaattacaacatgcacttattaacactttctttcagccaaaattgactaacttacactctatttaatcatattcaatagcactaactcttacagaacatttttttcactcttatcatcttataaattccatcttcaaacccttcaccattttttt

SEQ ID NO: 899 - DNA, 326 bp, Gossypium hirsutum
  Clone ID: LIB3083-018-Q1-L1-H6
tttacctctattcctaccagtttttgactctatccaactgaaccggaacattcacataaaggcacatctttcactccacttaatcgccaacatcctcaaccgtctacccattaaacatcttctatactttcgatccttttccaacctttgtcaatctttgatcagcgatcccgatttcatcaatactcaccttcaccactccctcgacataccgcactaaccacaccctcattctcaaaaacaccaatcttcacaccttctatctcaccttcctcctacctttcaacaagctacaacacccttacattagctacaaccatgcactc

SEQ ID NO: 900 - DNA, 297 bp, Gossypium hirsutum
  Clone ID: LIB3083-020-Q1-L1-A1
gcatgaattctacacgaggattccctttttttttttttggcaagagcttctttaaatgcttaatttacaccggagatgggaaaaaaaagatcccctttatctgttccaagtttcatttccaactcttcccaaaaaattggtgcttggacgggatgggcaacttcactgcaaattatatggtggatagcaaatactagataatctattaaggtttcctggctgaattatggcttctgcaatcctaggaaatggtggaacacgtatttcaaggtctgtcaacaatttcaaaaattcttc

SEQ ID NO: 901 - DNA, 287 bp, Gossypium hirsutum
  unsure (1)..(287): unsure at all n locations; Clone ID: LIB3083-020-Q1-L1-A2
cacgagggatccttttctctgcttttgattccanactgggggaggcttaaaaaccggtgctgttcaaaaccattaaaatcaaaatcccaacttacatcacatttcatccaaatctgaaatgcccaaatcaaattcatccaattccttctactatgaggatgttaaagcacctaatatatttgaaagagcaaaggaagagattcgggctgtgattcatgttgggaaaatacatccttttggtaaggaaactcattggaagcgagatgatattaaaaaaaacaccccat

SEQ ID NO: 902 - DNA, 419 bp, Gossypium hirsutum
  unsure (1)..(419): unsure at all n locations; Clone ID: LIB3083-020-Q1-L1-A3
gaattcccaccagagaagaagcagaagaacacgaagtantttgcatgattcgtttctcatctaaaagtttagtgagattttgattaacatagaaaaaagctctctcctttttgtttcttcttttgttctctctctcatactttctgttttctttttctttttttctgtccttttcctacatttgcatgctaatttttcagcactgatgatggagaagctgagtttttagtggggtttcaaaaataaaaaagaatacatagaaagaagagaacccactagaaaaaaagagagggcaaaagaaaaaaaaaactgatcaccaccccacatttcataattcactagtctttttggtttcttgggtgggtttcctttccaattttgggggttttatgtgaaaagtcttttttcttttctttttt

SEQ ID NO: 903 - DNA, 333 bp, Gossypium hirsutum
  Clone ID: LIB3083-020-Q1-L1-A6
gcagtcttttgatctctgccccaaagcaaaaagttgtcgtcttttacaatcacaactactggttatttattttcatggctcaaggagattctaacttccagcaagacatggctaaagaggaagaagaacagaggctgaaatacttggagttcgtgcaagtagccgccgttcacgccgctttgtgcttcaccaacctttacctttacgctaaggaaagatcggtgccgttgaaacctagcgtcgagaccgttgagggaacggttaatagtgtggttggaccggtttatgataaataccatgatgtcccttgtgaattccttaaattcgttgatt

SEQ ID NO: 904 - DNA, 326 bp, Gossypium hirsutum
  Clone ID: LIB3083-020-Q1-L1-A7
gtttccgttttttttttttttgcaagagctgctttgaggtcgtaagtggacgccggagattggaagagaaagatgcgcttgatctgttccaagtttcatttccaactcttcccagaagattggtgcttggacgggatgggcagctgcactgcagagtatatggtggatagcaaatactagagaatctattaaggtttcctggctgaattatggcttctgcaagcctaggaaatggtggagcaggtagttcaaggtctgtcaacggtttcaaaagttcttctagttctgttgattggctggggagagaaatgcttgaaatgagattg

SEQ ID NO: 905 - DNA, 384 bp, Gossypium hirsutum
  unsure (1)..(384): unsure at all n locations; Clone ID: LIB3083-020-Q1-L1-A8
gcctcgttcacctttttgtgaagggaaatgcaaagggaggtgcaataaagcggcgggttgggatcggtgcttcaaatattgcggcatatgttgcgaggagtgtcaatgcgttccgtccggtacttacgggaacaaacacgagtgtccttgctacagagataaggtgaacaacaagggcaaacccaaatgcccttgaaaatgaaatatattcgagttcgggatttaatcaagcttaaagatcgaggacgaagaggccatatatatatatatatgcatgttgatgatgatgttattataaaaataaacttnngtttgtgctgttattttcctttggngtttttgggtggtaggggtgaataatattttccttatattttccctctc

SEQ ID NO: 906 - DNA, 371 bp, Gossypium hirsutum
  Clone ID: LIB3083-020-Q1-L1-B10
gatcagctcaccgatgatcagatctctgagttcaaggaggcctttagcctattcgacaaggacggcgatggctgcattactaccaaggagctcgggactgtgatgcgatcacttgggcagaaccctactgaggcagaacttcaagatatgattaatgaagttgatgctgatggaaatgggaccatcgattttcctgaattccttaacctgatggcgaggaagatgaaggatactgattctgaggaggaacttaaagaggctttcagggtttttgacaaggaccagaatggtttcatatcagctgctgagctgcgccatgtcatgacaaatctcggtgagaagcttacagatgaggaggttgatgaaatgat

SEQ ID NO: 907 - DNA, 409 bp, Gossypium hirsutum
  unsure (1)..(409): unsure at all n locations; Clone ID: LIB3083-020-Q1-L1-B11
ctcgtgcgcgttttttttttttttttggtcccatttgaacggtggtgggccctctgcttatggatgtcgtgatcctgcttgcagagatgcttctacagcangcttagtaaaagtatgtgccacttatccttttggtgtggatcctaagtggcatggtactcggagtgagctaccatttctcaactcactgaagatgaagatgtcaattttgcttggagtagctcagatgaatcttggaatcattttgagttacttcaatgcaaagttttcgggaaatgaactcaacattcggtaccaattccttccccaaatgatctttctgaacagtctgttcggatacttgtcactcctcatagttgtgaaatggtgcattggttctcaagctgatctttatcacgtgatgatatac

SEQ ID NO: 908 - DNA, 439 bp, Gossypium hirsutum
  Clone ID: LIB3083-020-Q1-L1-B12
aatttccaaaggatatagattttttgttttgaaggtttggtgagaatggacaagaatttgatggacaaagtttctgcctttggtgagctcctgaagacggaaggagccgaggtgggaagaaagatgagtgctggcatgagctcagttagctttaaagtgaaagagctcttccaaggcccgaaccctgctgataagcttgtcgacgatgccacctcagaggcccttgatgagcctgactgggccttgaatctcgatatctgtgacatgatcaaccatgaaaaaattagcagtgttgaactgattcgtggcataaaacgaaagataatgttgaagaaccctagggttcaatacttgtcattggtgttgcttgaaacttgtgtcaagaattgcgagaaggcattttccgaggtagcagctgagagagttcttgatgagatgg

SEQ ID NO: 909 - DNA, 432 bp, Gossypium hirsutum
  Clone ID: LIB3083-020-Q1-L1-B2
cagctggatgagattcttggaccagctgagtgcactatagtttcttgactatcaaactatcatttggactcctatgtcctttctgagtctagcctctttgtttatccatacaagatcatcatcaaaacctgcgggacaacaaagctacttctttcgatcccacccatcttgaagttggcgggtagcctttctcttaccgtaaaatctgttcggtacactcgtgggagttttatcttccctgctgctcagccatatcctcatcgttacttcactgaagaagttgttattcttgatagccattttggcaagcttggcgctggtagcaaagcttatgaaatgggtgggctggataaacagaaatggcatgtttactctgcttctgctgaatctgttaacaccaaagcccctacttacactttagagatgtgcatg

SEQ ID NO: 910 - DNA, 416 bp, Gossypium hirsutum
  Clone ID: LIB3083-020-Q1-L1-B3
gttgatctctgcttggatcgtatccgaaagcttggtgagaactgtactgggctccaaggcttcttggttttcaatgctgttggtggtggtactggttctggtcttggatctcttctcttggagcgtctctctgttgactatggaaagaagtcgaagcttggtttcaccgtctatccttcacctcaggtttctacatcagttgtagagccttacaacagtgtgctgtccactcattcactccttgagcacactgatgtcgctgttcttctggataacgaagcaatatatgacatctgcaggcgttctttggacattgaacgacccacttatacgaatcttaaccgccttgtctctcaggttatctcatctcttaccgcatctttgaggtttgatggagccctgaatgtggatgtgac

SEQ ID NO: 911 - DNA, 386 bp, Gossypium hirsutum
  Clone ID: LIB3083-020-Q1-L1-B4
ccaacaatgttaaatcaagtgtttgtgacatcccacccagcgggttaacaatgtcatcaacattcatggggaattcgacgtcgattcaagagatgttccggcgtgtttcggaacaattcaccgttatgttccgtaggaaggcgtttttgcactggtatacaggggaaggaatggatgaaatggagtttacagaagcgtaaagtaacatgaatgatctggtttcggagtatcagcaatatcaagatgctgttgcagatgacaatgatgaagattatgaagatgaggcaatggaaaattaaggtgatttttttaaaaaaattcaacttcaaaaaaaaaaaaaagccaatggtgtttttggggactacttggtgatttgtcaattgatg

SEQ ID NO: 912 - DNA, 354 bp, Gossypium hirsutum
  Clone ID: LIB3083-020-Q1-L1-B5
gcagaagcggctagccgctagcgtcctgaagtgcggtcgcggcaaggtctggctcgatcctaatgaaatcaacgaaatctccatggccaactccaggcagaacgttaggaaacttgtgaaggatgggttcatcatcaggaagcctactaagattcactcccgctctcgcgcacgtaggatgaaggaggccaagagaaagggaagacactctggatatggtaagaggaagggtaccagggaggcaaggttgccaacaaagattctttggatgaagagaatgcgggtactgaggcgattgcttcgtaagtacagggaatccaagaagattgacaagcacatttaccatgacatgta

SEQ ID NO: 913 - DNA, 375 bp, Gossypium hirsutum
  Clone ID: LIB3083-020-Q1-L1-B6
ctttgggattggattgttggtatttggcaagatgtgtgtagcaattaaggatgatgaggttgacattgtaataggagctcttcgttcggatctgacaacatttatgaatgaatggagaccaatgttctctcgatttcatctcataattgtcaaagaccctgatttgaaagaggaactcaaaatacctgaaggctttaaccttgatgtctacggaaagcctgacatagatcaagtggtgggttcttctacttctattctcttctctggctattcatgcaggtattttggatatcttgtttctcggaaaaagtacattatctctgtagacgatgactgtctcccagcccgagaccctaagggctttttggtggatgc

SEQ ID NO: 914 - DNA, 332 bp, Gossypium hirsutum
  unsure (1)..(332): unsure at all n locations; Clone ID: LIB3083-020-Q1-L1-B7
caccattatgtgatgatcatctggttggttggttggttgccgaaggaaggttattgcattgtcgatggantgacaaacttcatatttttcagatgatggtcttattttgttttttgctgagtttgtacacaatctataggagctttatgtgttccccactcattcatttttctagagaacatgtgtgtttgttcccaaacgcataaccaccattttgtgtgtaaaatttgactgctacattagggtttggcaatgagttgaatcctgagccgaatgcaactctgccctttacttatctgttccttctcattttatgaatggtagtaagcagc

SEQ ID NO: 915 - DNA, 419 bp, Gossypium hirsutum
  unsure (1)..(419): unsure at all n locations; Clone ID: LIB3083-020-Q1-L1-B8
gttcaaggaccacttcttcccttccattgtactttgttttagttgccataacgtcaccttccaatacaacccacaatgaggcaacaatatgtcttcactactctcacgttgctcatcctgttttccctcagttgttcaacaacattagcccaagctccggcactggctccagcaccttctggtccgacaaacgtcaccaagatcctcgaaaaagccggtcaattcaccctcttcattcgtcttctaaagtccactcaagtggccaaccagctgctcggtcagctcaacaattccaacaatggtatgaccgtttttgcaccaacggacaatgctttctccagccttaaatcgggcacattgaattcactcaccgatgaacaaaaagtggagctggtgcaattccacatcgtnccaacata

SEQ ID NO: 916 - DNA, 357 bp, Gossypium hirsutum
  unsure (1)..(357): unsure at all n locations; Clone ID: LIB3083-020-Q1-L1-B9
cgagtggtttttttttttttttaacataaaaaaaccttggtgggcgtttaaagctcagagtaatgtcaagaaatatgtgagattgatacaatcaggcaaacacatatgcatgctatatatatatatataaataaaagcggggcgcaaagcaatctcgctcctaaaaaaaagagaaaaaaaggataaacacattaaaaagcctnctaaatgtttttttttctttagaactcaaataaaacctgcaaatgccaggaaattaaggatatatataattaccacacaaactctagttttgatcactgatagtacattagttgctgggcagccgccacgttctggaatccaccgtcatatatg

SEQ ID NO: 917 - DNA, 375 bp, Gossypium hirsutum
  unsure (1)..(375): unsure at all n locations; Clone ID: LIB3083-020-Q1-L1-C1
gctgacattgttgtggttggtgttggtggaaggggttgtacagcactatttaaagggcaggttgaagaggagacgggcggaataaagactgatgcttttttcaaaacaagtgttcccacagtatatgctgtgggtgatgtggccactttccctctgaagttatacaatgagttgagaagggttgaacatgttgaccatgcccggaaatctgccgaacaggctgtaaaggccatcaaggggcttgagaaggggcaatcagtcgacgaatatgactacttaccgtacttctattcccgttcctttgacctagcatggcaattctatggcgacanatgtgggatactgtgctttttgagacaaacaccacatcaccga

SEQ ID NO: 918 - DNA, 294 bp, Gossypium hirsutum
  Clone ID: LIB3083-020-Q1-L1-C10
aacttcaaatgataattaagatgggtaataataaaaataatgaaacattacaaaaacataaccaacagatttccagtctatgatcaaaattaacctaaacaagaacccgcaaatgagactcaaacctgaaccagaattgcaattttgtcattaagccaagactagaacttgttggcaatgatcaacatggatgagcaaacaatgtaacagacaccattgtgggaccagaacatgaatgtttcaattcagctaaacaagatccacttcaccggctaaactaaactccccataatt

SEQ ID NO: 919 - DNA, 453 bp, Gossypium hirsutum
  unsure (1)..(453): unsure at all n locations; Clone ID: LIB3083-020-Q1-L1-C2
cctccaccaaccagaatcaaaacctctgccttgggtttgtttgggttgttgggtattccacttgcggtaacatttagcattccattcgcattggcatccatctattgctctgaagaaggtggcggtcaaggtctgtctttgggagtactaaacttgtctatagttatcccacagatgattatatcagtgattagtggaccgatagatgcagcatttggtggcggaaacttaccagcctttgtattggggtctattttggctgccattagtgctttattggcaatatttgcacttcccaatcccaaaacacaactctctctcaactcaaccggaatggctggagcccattgaccactgtcatggaagaaagtgagatactatatngnttcctttnttctttaattntctgggatctactctcttgtcagaatttcttaattactgactgatgta

SEQ ID NO: 920 - DNA, 502 bp, Gossypium hirsutum
  unsure (1)..(502): unsure at all n locations; Clone ID: LIB3083-020-Q1-L1-C4
tagaacgtggtggatcgccccgggactgacatgaattacggcaccgagctatatattatgtgttgaacccctggannaaaaagggaaaggggatggggcgcttgggcagggtggttcgtttgtctgaggggttgctttgagtaaaatcagatgccaggaggggagccggatgagctgnngtcgtcagtcagggcttcttanngggccttttattatatanctttgaanaatttctttaaaagcttaacccttaatctaaatctaaggctataggtaagggactgccgggtgctgggtgctatgaagagactgctcttgctttttgggcttgtgaatgagaatgcttgcataaatggcagccatagtcatgcatgcgctttggttggttaccagattgagactatagctatagtgagtcaactagcctcttcgggagccctcaatcagttttgaacactgattcgaaactctttcagctaccataccccataccagtcttttg

SEQ ID NO: 921 - DNA, 321 bp, Gossypium hirsutum
  Clone ID: LIB3083-020-Q1-L1-C6
ggcaatggctagaggggactcattcaatgacactggttaatcaattacaattgaagtgaagacaatgtgtctcaaaatttacacagcatccataattttttaagggtaatatggattaacacactgaatttctcaaataatctatatatatatatattatagtggcccttccattggcaatggagatatacgaggctaattaagaaatgaatcacccaatatcaaatccaaaaccagatcaagatgatgatgatgatgcagaagaaggaggtacagtgaaaggcttttgttcttcacatgtgagcacttcatggggtcctg

SEQ ID NO: 922 - DNA, 410 bp, Gossypium hirsutum
  Clone ID: LIB3083-020-Q1-L1-C7
gtggttggacttgtagacccttgataattgaaacctggggatgtggtttgtgtcaacaaagacagctacttgatattggatactttgccatctgagtacgactccagagtaaaggctatggaggttgatgagaagccaactgaggactacaatgatattggtggcttggagaagcagatccaagaactagttgaggccattgtgttgcccatgactcataaagaaaggtttcaaaagttaggcattcgtccacctaagggggtgctcttatatggacctcctggcactggaaaaaccttgatggcccgtgcttgtgcagcacaaacaaatgccacgtttctgaagctagcaggcccacagctggttcagatgtttattggagatggagcaaaacttgtccgtgatgcttt

SEQ ID NO: 923 - DNA, 413 bp, Gossypium hirsutum
  unsure (1)..(413): unsure at all n locations; Clone ID: LIB3083-020-Q1-L1-C8
gacacatgatgaggacctttatgatctaagttactctggaatgtcatttggagttcactggtgtccatttggaagcttancacgacttccttcattcgaggtaggagagttttcatcaacctcatatcatgagttactgggacagcaagccatctttgctgaacattcagcatctgctggtcatccatgtccgtatgtagcttactttggaccaacggttcatccctcatcctcaaattccggtggaagtgtttcagatagttctagtttcaacggtcactggaatggtccatcagtgcctagtgagatgcctacatcttatgcttttcctgcgatggatctccattatcatagttgggagcatcagtccactccattctccacatttagcagccgaattggtagttctgatc

SEQ ID NO: 924 - DNA, 384 bp, Gossypium hirsutum
  unsure (1)..(384): unsure at all n locations; Clone ID: LIB3083-020-Q1-L1-D1
atatgatgattgttccataaaaaatatancangaaacagcacctcttgtcctagaaacagtgctaaaatgctgccaagagatttcaattatcctacactcactgctttagtaccagcaggcaagccattcactgttaatttccatagaacagtaacaaatgttggtatagcaagatctacttacaatgcaacaatctctatcctgtcggaacccgaaatccaagtgggtcctcaagtcttgtcttctaaagctctaacaaaacagaagtcttaccatgttattgattctggcaaagctttgggtgagacatcaatggtatctgcaacattgatatggtcagatggtactcataatgttagaagttcgatcgttattcacacata

SEQ ID NO: 925 - DNA, 383 bp, Gossypium hirsutum
  unsure (1)..(383): unsure at all n locations; Clone ID: LIB3083-020-Q1-L1-D10
gctgctgaagatgccaatcaagctgttcggaatnttgggctgaatgccnangtagatgagaatgtggatacaaaagcctcagcaactgctgctaaagttgctgcacctgcacccccagtcggtgttgctagtggcgctgcggcaccagcagcgccagctgcagcagctcagccttctacagcagagcctacaacagaggccaaacatgaagaatacccaggctggtctctttcggatatggacaagatagctatcaatcctcttcaacttgctcggcttggtggaaggttagacgaggatgaagaagattatgatgaggaagggtgagtagctcgaaactggactcctagaaaaagtagcggttgagatcagattagcaaccc

SEQ ID NO: 926 - DNA, 441 bp, Gossypium hirsutum
  Clone ID: LIB3083-020-Q1-L1-D3
gcaggattttgaagagataaaatccttgtcccatgtgcggcaattagtttagggacttcacggaaaagaagaatcccattaggagaagatgagtcaaatgtcaagcgttgtgctttgttcaagacaaactcagccatgaattttaacaacggagtggtaacctctggtgtgtcagtccagtgagtaatgcctttcaagataagtggcatgtgcacagggtatagccaatcgaatagaagaccatatgttctacgactgtttgtggccattgcaattcctctaagatccctcattaatccaattaaagcatacttaaccgcatcagtacgaaataccgcatcgggtgttgactccaggctgacaaagacttgcagaagtggttccattgaagacttgaatttgatagggcttgccttcataaaaatcaaccacccaatggtg

SEQ ID NO: 927 - DNA, 398 bp, Gossypium hirsutum
  Clone ID: LIB3083-020-Q1-L1-D4
gatcattgctgctattaattaagctgggaatgtcaagagatttttggcgtgggaatttggaatggacgtggacaagaacaatgcggttgagccagcaaaatcgacattcgcaatcaaggctcaaatccgtcatgctgttgaggctgaagggatcccttacacttatgtgcctgctaactgctttgcaggctattttcttcctacattgtcgcagccaggagccacctctcccccaagagacaaggtggttattctaggtgatggaaatcctgaagctgttttcaaccatgaagctgacatcggaacctacaccatcaaagctgttgatgaccccagaacagcgaacaagactctattcatcaggcctcccaagaacacctactcatttaacgagctca

SEQ ID NO: 928 - DNA, 324 bp, Gossypium hirsutum
  Clone ID: LIB3083-020-Q1-L1-D5
gggatgtgaagattgcttgtaagtgttttattgtggcagccaatgcaggtcgaccaaaggcgttttatcagttggctaagatgtttcgtactggtgttgggcttaaaaagaatcttcctatggctactgcattatacaagctagttgccgaacggggaccatggagttccctctctagatgggcacttgaatcatacctaaaaggtgacatgggcaaagcattcctcttgtattctaggatggctgagctaggttacgagatagcacagagtaatgctgcatggatccttgacaagtatggtgagcgcaacatgtgcatgggtg

SEQ ID NO: 929 - DNA, 388 bp, Gossypium hirsutum
  Clone ID: LIB3083-020-Q1-L1-D6
atacccgatgctcctgcggcctcttcctcgccaggggtgaaggcgagaactgtgatgatcccctcccccaatgagcccgggaagaagatcgagatgtattcgcctcagttctacgctgcttgtacctttggcggtatccttagctgtggtctcactcacatggccgttactcctcttgacctcgtcaagtgtaatatgcagattgaccctgcaaagtacaagagtatttcatctggttttggagttctactaaaggagcaaggagtgagaagcttcttccgtggttgggttcctacccttcttggttacagcgcacagggtgcttgcaagtttggattctatgagttcttcaagaagtactattctgaccttgctggacctgaatact

SEQ ID NO: 930 - DNA, 355 bp, Gossypium hirsutum
  Clone ID: LIB3083-020-Q1-L1-D7
gtcagccaagacaaatacttatattgccactgctgtttgcttgtgggatgcaggagagtatgtccaaaatttatcatgatattcatgtgaatctagcaacacttggggtgactgtagctaggcatagtaagaaaccccgagtctatatcggctgcgtgaggtcggatcctgtgctcgctcgaaagggagcgaaataccaagaacctgagtactggaaaatgggtgaggttgggaacaaatatttgcgacatgctactggacaactgtatgctatatccaaagattcggctacttacatatccatagatcagcatgtactgcatcaatatgctaaagaagaggtttatttgcgagc

SEQ ID NO: 931 - DNA, 299 bp, Gossypium hirsutum
  unsure (1)..(299): unsure at all n locations; Clone ID: LIB3083-020-Q1-L1-D8
gagnnnnngtttttttttttttccaaccgtgtacaatgtgacacattcggttaccaatcacatctagactatcatgaaatagttaaatcaacatttattctgtatcactttcatacatattatgacaaactaatttaacacaaaacattacagatgaactcaaactaaacttccagttccccatactctttatatttataaccatgattgattttacaatgtttattacatgtgatttgtgttgcttctttgaatttatgatatcgagcagttcacatgaacattacattctttctcta

SEQ ID NO: 932 - DNA, 442 bp, Gossypium hirsutum
  Clone ID: LIB3083-020-Q1-L1-D9
tttagcttcagtttggtccattggacttgattatgttgcgggattcattcccttcgtttggctatggtgctttcttgaacccgaaaacaaggtaatctctgaaaactacctaaatcccaaggcttcattatgttgtcattgccactgttgttgttgctattccatttgcttcctcaagtcgatgttgacattttagcttcgatttggtccactggattttattatgttcgctatatttggtgcttgcttgaatccaaaatcagggtaatctctgaaagtacctaaatcccgaggcctcatttgttgtcatcgttctcattgttgctgctatttgcttcctcaagtcgatgttgaccattttgcttcaatttggtccggtggccggattaaattttttgccatatgatgtttgaagctgaggtctgagggctacccaataatg

SEQ ID NO: 933 - DNA, 276 bp, Gossypium hirsutum
  unsure (1)..(276): unsure at all n locations; Clone ID: LIB3083-020-Q1-L1-E1
gccagtgacacctgacgaattggagtatgattagatccgcttcctatggaacggctccctgctattttttattgtgttgcttcagaacattttcatgtttttgcagagatgggatatcagagagctttaggtatgccaaacatgtggacaagaaaatgttcttagtaatgaacacatttaatgttttcagtgtggttgtgacctttatctttcattgtaccttgtatttgtataactctnggattatgnctttatacaatgttatccttctttaaa

SEQ ID NO: 934 - DNA, 274 bp, Gossypium hirsutum
  Clone ID: LIB3083-020-Q1-L1-E10
tggaggggaaacacaggctgagccatttgtatatatgcaatcatagaaccaattgctagtattctaacattgttaaatatataatcacatttacatctatgacaatcaagagttttatcagggagaaaaaaaaaagacctttttaaatgttcaccatctgcgcgaattgcgtaatgatctcgacgatcctccgaaaagatccaagagcaaattttccacgtgttcgacggtatgcttgacacatttgtcgtcggtataagcaaggtttctcccg

SEQ ID NO: 935 - DNA, 371 bp, Gossypium hirsutum
  unsure (1)..(371): unsure at all n locations; Clone ID: LIB3083-020-Q1-L1-E11
gtgactcttaccactcccacatttggtacctatantcgccggattatgggaaaccgcctcgtgctgtattcaagcctcccaaggtgaaaccaccaccatatgaacctaagccaccagtgtatgaaccaccaaaaaaggagaagcctgaacctaagccaccggtttatgcacctccaaagaaagagaagcatggacccaaaccaccaatgtatgaacctncaaagaaggagaagcctgagccaaagccaccagtttatacacctccaaagaaagaggagcctaaacctaaaccaccagtatatgaacctccaaagaaggagaaacctgagccaaaaccaccgatttatacacctncaaagaaagagaaacct

SEQ ID NO: 936 - DNA, 331 bp, Gossypium hirsutum
  Clone ID: LIB3083-020-Q1-L1-E12
cggttgcatcgtattatatatagttttcaatggagtactccagctggtcatatacactaaggaaaagaatgcaattctctttacttatcctcctgctggatccgtcaccagcactggtttggtggtctcgtcaaagttaccaagattctctgatctttatacacttacgatagcaagtgcagatcccaagtcgatatctgcaaggaaaccggttgagttgaccaaaagtgttactcaatggttcactaaggacggagtattggttgagggcctattctggaaaagatgttgaacactaataaatgattatgcgacagaaccaaagaaaaag

SEQ ID NO: 937 - DNA, 438 bp, Gossypium hirsutum
  Clone ID: LIB3083-020-Q1-L1-E3
ctgtttcttcgagagggccggatcgcctgggacgcggggtcttgctatccggcggggactagcatgtttccaaggtacgactgggtcgttacgccgtctgaatcgaagtgaagaagcgatccccctggtacgactgcttgctacacaccctgtattttgaagctccggcgatcggcgagctattctttcggtgcccggggtggccccctttcaataacagtcaaaccggaagaaagcagcgctcgccgcaaagcgcatctctctggatgtagatggagccgttctctacctatgtatagccctggtaagaggggaaactatacatctttttcctttcgcgcgagaaagaaggacttttgggatcgtggttcggatgtccaatcaccagaaatgggaagatgggccgaagacgaaacttaaaagaactgtctcatagca

SEQ ID NO: 938 - DNA, 382 bp, Gossypium hirsutum
  unsure (1)..(382): unsure at all n locations; Clone ID: LIB3083-020-Q1-L1-E4
cgaggcaccgtctccgtaagcanaaccacaaanggaaagctgtggagagagactccaaaaacagatgtctaaggggaagttagtgaagaaggaccagggtcgtaagggactatttgtggaccctccaaaccggcacctctgattgacatnggctgaactcaagtcatggtctttttacagagccctcatagctgagttcatagccactctcctcttcctctatgtcactgttgctactgtaattggtcacaagaaacaacaagatgcatgtgatggtgttggtctttttggtattgcatgggctttcggtggcatgatctttatcctttgttactgcactgccggtatctcaagtggacacattaaccctgcggtgactttt

SEQ ID NO: 939 - DNA, 335 bp, Gossypium hirsutum
  Clone ID: LIB3083-020-Q1-L1-E5
ctatttttctctgcgagaagagaaatacgatggagggtggcatatcccatataacctggaactgaagcgatggaagggattgagcagtggaaggatcaattagagcagttgaagattcaattggagccatggaagattcaactggagcagtggttgcatcaagcaattgaatatttggatcaaatacccccaattcaactctatgctgctattgctgacttgttcatatctaccctcttgcttttctccatccgctcgttcaagcgcactaaatcaaataccatagtactcacaggccttattgggagcggtaaaacagttcttttctatgtgct

SEQ ID NO: 940 - DNA, 273 bp, Gossypium hirsutum
  Clone ID: LIB3083-020-Q1-L1-E6
gtcaaaccaacaattatattgttctatttccacggcaaagcgagcatataaaacaatctaactggagtcgttcggatttacatagttacaaaagcatattcccctgtgaatcataactgctctgggcatatgccaaaatcatcaaaccaagcttttgcaaattgcaaagacacaatatatttgttttacgaccattaaatatagactcaatctgggttcctcaatttactgtccaaactctattctgtctccattcccacttcatgcataata

SEQ ID NO: 941 - DNA, 282 bp, Gossypium hirsutum
  unsure (1)..(282): unsure at all n locations; Clone ID: LIB3083-020-Q1-L1-E7
cctgcccctaaacaaactttccacaaaaatcatctttcgtattgtctttttcttcctgttgtatacctaaaagggccctgcattacaagctgcgaaaaataaataaaaaaggaaaccctatttcggcatggccagactgacaagagcaatcggacttcataacataccgngcatcaaactgtgcattgaaagctgggacatggtggtatctcaatgcactgtaatcacatttcacgaggagatgaaacacccaggtaacgtcaactgtgttcctgtgatgac

SEQ ID NO: 942 - DNA, 427 bp, Gossypium hirsutum
  unsure (1)..(427): unsure at all n locations; Clone ID: LIB3083-020-Q1-L1-E8
tccaagcaagcattttccttaccaggttggttttcttggggatgatcnatatgggctggctaatggcccttaagcttgcatgtgtggcggtgttgtgcatggtggtgggtgcacccctggctcaaggggccgtaacctgtggtcaagtcacaagctccctcgcaccctgcattggttacttgacagggaatggtgctggtggcgttcccccaggttgctgcggcggcataaaatctctcaactccgccgcccaaacaacaccagaccggcaagcagcttgcaaatgcatcaaaagtgcggccgccggcatttctggcatcaactatggtattgcaagcggactcccaagcaagtgcggtgtcaacatcccttacaagatcagccctagcactgactgcaacagcgtcaaagtgagttttggcatgga

SEQ ID NO: 943 - DNA, 370 bp, Gossypium hirsutum
  Clone ID: LIB3083-020-Q1-L1-F10
atcatatttaacgaaacacccttcgagttgcaacacgccacgcgtagagtcaaggcaaagagtgccgagttgactgacggctttcgccacacagcggccacaatcaccgctgttgaggttaccacggcactggaataggccgtagacagtgtcctgattgctggctcctggaagggtaaagttactgtaagaggtgtacatggctgagttgaccagggaagtgagtatggagttgacgttggactcataaggtgagccagacgtgtatttaagctgcgaacagccaccgaaaacgaaggaatcggtggctgaatctgatggtgttatgaagaaacaccatacagcgagaagaagaagaaacagcgcggca

SEQ ID NO: 944 - DNA, 235 bp, Gossypium hirsutum
  unsure (1)..(235): unsure at all n locations; Clone ID: LIB3083-020-Q1-L1-F11
ctttggcattccatatgaatctgctgcttanaaaaggagactgaatttgagcaatgaaagtacaaagtataaatacaaattttataataataaaaaaaggtctttgaaactgcagggaagtggtttcctttgagacagaaggcaaaagaaaaaaaggaagacagagtgggatttttagtttggttttgagatggcgttctgctctatgatttgttgtgggaaaagcttctatcgg

SEQ ID NO: 945 - DNA, 347 bp, Gossypium hirsutum
  unsure (1)..(347): unsure at all n locations; Clone ID: LIB3083-020-Q1-L1-F12
ggtttatttattcctacttatttccaacagtaccgacccgagtcaattgggatgctgccaagttattttgttccgtatgcagctgcatcagatggaccagtccacaccattaatgaacaacttgatttttctataaatgcactcttgtctatgagcatggtggttacactcttggtagcatttgtactcgacaacacagttccaggcagccgggacgaacgaggggtgtacatttggtcatgtgctgaagatgtcgcaactgatccatccttgcaattggattactctctgccaggaaaattttcctcactttgttgtcgntctagctgtttgcgggcataatactc

SEQ ID NO: 946 - DNA, 379 bp, Gossypium hirsutum
  Clone ID: LIB3083-020-Q1-L1-F2
ttcttcttcaacctgagttttctttttcctccatggactcaaagaaagcccctgagccagcaccaaagaaaagttcgagtggatcacatgatagagatgttgctcttgcggatcttgaaaaggaaaaaaaattgtcattcattaaggcatgggaagatagtgaaaaaaccaaagctgagaacaaggcccagaaaaagctctctgctattgtagcatgggagaacagcaagaaagcagctcttgaagcaaaactcaaaaaaattgaggaacaattggaaaagaagaaagccgagtacgccgagacaatgaagaacaaggtagcttcaattcacaaggaagcagaagaaaagagagcaatggtcgaagccaaacgtggaga

SEQ ID NO: 947 - DNA, 365 bp, Gossypium hirsutum
  Clone ID: LIB3083-020-Q1-L1-F3
agaaaaaaagaagattatatttggtaaaattgcagggataggtcttaaggccacctgaatttaatttaagtataagcgttgaatatgagtttgaattaaccgaaaacatttcagtaaaccgagattagatcctgttttctaacaaagaagacatctcaaaaacagacaataaaaaaacatatcattagatggatccgccattaacaactgtctcagaagagcaaaagcttgtagaattcgattgatggacaggtattctaaaaacccagagtttccctttagcagagacaaagttttgttcgcagaagaattcccaagaaaaccatttttcaatcgtccgatgaacatcgtgaactacaacgtca

SEQ ID NO: 948 - DNA, 354 bp, Gossypium hirsutum
  Clone ID: LIB3083-020-Q1-L1-F4
ccccgggtcctcctcggggctgctataactatgtgcctgcctcattacgcgggacgaccgccaccaaaaaaagcagtgcaggtcctggagtcacccccaccgatgatgacgatgacgccatctcagctaccggcgctttataagcagcgctcgttgtcgccagacattttccgcgacgaggcatggcttagaaggaaagggaacagcaagaacagagggagcaagagcgtgacggacgaagaccttgatgaactcaaggcttgtattgagttggggttcgggttcgagtttgactcacccgaggtggatcaacgtttgtccgacactttgcctgctcttggcctctactatgct

SEQ ID NO: 949 - DNA, 353 bp, Gossypium hirsutum
  unsure (1)..(353): unsure at all n locations; Clone ID: LIB3083-020-Q1-L1-F5
tttttgtttttttttttttgnngataaaaaaaacaccggacacattattcttgatttgtaggaacctcatacagcacaatacatagtaaagaaaaaaggtcgtttatgtctctcaaattagaagtcgaaatttcaaataatttagggggtcacaaaatgattcaactgatttacctttgttgagtgaaactgtgaccgcaagattggctgagccgagctcctctgttttccgggggtagtcattttcatcctaacattaatcaaagccgaatagattgcgaaagatacagcgagttcaatacacaaatgagtctacaagcaggattcgaaaacgaacataaattgcatcatac

SEQ ID NO: 950 - DNA, 390 bp, Gossypium hirsutum
  unsure (1)..(390): unsure at all n locations; Clone ID: LIB3083-020-Q1-L1-F6
tgggggagtacatgaaggctattaaggatttatcagtgggatggagcatagaggagtcggatattgagtgcttgtacttacgagcttcatgctatcatgctattggagaatatgcagatgcggtcaaggactatgatgctgccctagatgttgaacttgactcgatggaaaagtttgtgcttcaatgtttggccttctatcagaaagagattgctttatatacagcttccaaagtcaacagtgagttttcttggtttgatattgatggagatatagatccactgttcaaggagtactggtgcaaaagatcgcaccccaagaatgtatgtgagaaggttttcagacagcctccattgcgtgattctctgaagaagggaaaagctanaaaac

SEQ ID NO: 951 - DNA, 434 bp, Gossypium hirsutum
  unsure (1)..(434): unsure at all n locations; Clone ID: LIB3083-020-Q1-L1-G1
ttcacccccttataaaaaaagttaaagttggtgctcagcacataaacgtaaggccagttcgaaaccgtctctgacaccagctttcgtctttcagcaatggccgccaccactacaaccacttnctttaaagccgcactcctttctacaccgtcgatatcttcatcgaccaaatcaaccgtcctcaaaacacgctttacatcatcatcgtcctcacgttattcgccgattccaaaatcactgatagctcatcatgtctctacaaggaccaacgccatcgtcgccaagatggggacagtcccttcggcagtgtctgagacgacatcgcttgacttccatacctccgttttccagaaagaaaagatctctcttgctgatcacgaagagtacattgtgagaagaagacggcatttgtccctttattggatgatgctttt

SEQ ID NO: 952 - DNA, 315 bp, Gossypium hirsutum
  Clone ID: LIB3083-020-Q1-L1-G12
aaaaatcttatacgaaaatagccctttaaatacacacagaaatttccaatttggtcaatgttctagtttctagctcttcattatcctaatggctttgtttgtaatttccttcaattttaaggctccttttatttatgtattgattctcacgtcaatcgtcaccctctaacctgtctaccacctttttccactatctctcaacggcaactcaaaattttcaacgaccggaaacaaacccggaaaatccggttcagttaagaaatcgaatcggttttctcgtgagagagaagaaacttttttgaaattcaaaggaaa

SEQ ID NO: 953 - DNA, 428 bp, Gossypium hirsutum
  Clone ID: LIB3083-020-Q1-L1-G2
tcatcgccttcgcctaactttttctccttcaattgctcagggttcggcgggttaatctatcttgttggggtgaagatgtgggctgcttcatgccttgcatcgtgctgtgcggcgtgcgcctgcgatgcgtgccgcacggtggtttcggggataagccggaggtctgcaaggatagcctattgtggactatttgccctttctctgtttgtttcgtggatcctacgtgaggttgccgcccctctcatggagcagctgccttggatcaatcaatttcacaaaacacccaacagggaatggtttgaaacagatgcggtgctgagggtcagcttgggaaattttctctttttcactatcctatcatttttaatgattggtgttaaaaatcagagagatcctcgtgatggtttgcaccatggtggatggatgat

SEQ ID NO: 954 - DNA, 335 bp, Gossypium hirsutum
  unsure (1)..(335): unsure at all n locations; Clone ID: LIB3083-020-Q1-L1-G3
cagcaccatgcttttacaagtctgcaccaccaccaaaacacggtgataatccaccggcatcggcaaatctactccaccaccatcnccatctcctccaccaccatactattacaagtccccaccaccaccagttcattccccaccaccaccatactactacaagtctccaccaccaccttcttcctcaccaccttcaccatactattacaagtccccaccaccaccaaaacacttatagcagccctcatacatctacaaatctcctccaccaccatcttcatctactccaccaccatactattacaagtccccaccaccatactactacaaatctc

SEQ ID NO: 955 - DNA, 420 bp, Gossypium hirsutum
  Clone ID: LIB3083-020-Q1-L1-G7
tggcaaatgatgaaaataagattaaataaggataataagtttgagcatctgcctgtgagttagtatatgcacccggcacaccctgcattcatggccatggatcacgaggtatgagcaattcggacaactaatcatggacttcttagttaagaagtaaggaagaaaatatggttttttgttgtatgtcctgtcaagtttgttgaaaccgtatgttagttctgtggtggctaatggaatgagtttccgtccatcgttctcacttgcatacgatatcagagcttgaatatgactcgacgtttcttggagtcaagtctggtaaacactgaatcaattgtcagattcaagccattcatatgtttccaactcttcgaaagtgtcaatatctattaaaaccctggccttgaaatgtatgaatgatta

SEQ ID NO: 956 - DNA, 373 bp, Gossypium hirsutum
  Clone ID: LIB3083-020-Q1-L1-G8
gcttaacggaaccaatggcgaaactttcacccagggtcgagatggccttgcacagcgatgccagaagtactatgaagctggtgcccgctttgctaaatggcgtgctgtccttaagattagtgctaatgagccaaccgagcttgcaatccaagaaaatgccaacgggctagctatgtatgctgccatctgccagcaatgtggccttgtccccattgttgagcctgaaattcttgttgacggatcacatgacattaaaaagtgtgctgcggtgacagagcgtgttcttgctgcttgctacaaggctttgaatgatcaccatgtcatgctagaaggtactcttttgaagcctaacatggtgacccctggttccgac

SEQ ID NO: 957 - DNA, 260 bp, Gossypium hirsutum
  Clone ID: LIB3083-020-Q1-L1-H1
ttcactagttagcacctttcctaaagcgaaccatccacaaaaggttgttaatacatcaatgtgcgaagctcaacaaaataaattttaatcaccatgctcgcttgactttatctgcatctaaaatgcacttttttttgaactgccctaactaacataatgcactttctacaaaccaataataacacagttcatctttattttgatacaatatcatatgacactatcaaatgccctatatcacacaatgcacaacaaaaatc

SEQ ID NO: 958 - DNA, 371 bp, Gossypium hirsutum
  Clone ID: LIB3083-020-Q1-L1-H10
tttaagaccaaatcacgagcgactcactctcagactcagctgagttagaatcgctaaagcgatatggctttgcagctatgggaaacgttgaaggaggcgacaacggcgtatacgggtctatctccggccacttttttacggttctagctctgttatgggctgtttactatgtagcaaagggtctatttgggtcatccgatgatcatatccatcaacggtctacggctttcgaggagcagatggagccgctaccgccaccggttcagctcggcgagattaccgaggaggaacttaagcagtatgatgggtcggattcaaagaaatcactccttatggccatcaagggccagatctatgatgtttctcaaagc

SEQ ID NO: 959 - DNA, 322 bp, Gossypium hirsutum
  Clone ID: LIB3083-020-Q1-L1-H11
tgcagttcaactagtagatgaaaaacactgggaagatcgcttcatcattattgctgtggtaagttcacggcagaaggaaacaagtagcacctctggaatgcgtgagagtgttgaaacaagttcgcttttacagcatagggcaaaggaagttgttccgaaacgcacaatacagatggaagaagccatacaaaaccgtgattttgcatcttttgcaaaattagcctgtgctgatagtaaccaattccatgcagtctgcttggatacgttgccacccatattctacatgaatgatacatctcacaggataatcagctatgttgag

SEQ ID NO: 960 - DNA, 359 bp, Gossypium hirsutum
  unsure (1)..(359): unsure at all n locations; Clone ID: LIB3083-020-Q1-L1-H3
ctccttgatgatagaaattttctttcagtttctcacctgccaaacttgcccagcaactgtgaatctctgacacaactctgcaaaaaaactctgtacaggaagaacttttcttagtcctcttcaaaagatatttgtcccttttctcccaaaagttcctcacctttcgaatctattctcctttctctctctcttaatcgatcatgcttcaaagcttagttcctcaatctccaatcagttccaacactactagctctaatcctagctcctccatgaagtcaaagcgcgtcgaaagagacgtctccgcagctaccggcgaagattccactgctgatgatccttccaacaagcgtnctaactac

SEQ ID NO: 961 - DNA, 365 bp, Gossypium hirsutum
  Clone ID: LIB3083-020-Q1-L1-H4
ttttagagaaaccataatcacaacatatgcattaaagtagagaaacaactgcaatgaaacttgaaacattcaagtacttgggtaataaaactgaaacaacccttcttcacacaaaaatatgctccgtacaattcgtttattctctcataacatctcttctaaattaaaattgctaaagcttggatacacaaagcacaatcactcactcacttaagccttagacatgtgtcggatcaagtcgataacacgggaactgtaaccccattcgttgtcataccaagtcacaagcttaacaaagttgtcattcaaagcaattccagccttggcatcaaaaatgcttgacctgttgtctccgatgaagtcag

SEQ ID NO: 962 - DNA, 341 bp, Gossypium hirsutum
  Clone ID: LIB3083-020-Q1-L1-H5
gtcggtttagcctttcggaggttcatcagaaatggacgggtctgaccttttcatcactttttcttcgttttgttcttatctagaggcgttgacttgaagtcgtcgtttgtttttttgaatctttgttccattccctaagcaagttttttgaaagattcaatcaattgttttgaatcgaaagtagtgtgtagtacaaatttcgggtaatcaagtagagaggcagctttattcttgtaatctagtttgatggtgaaaagaaagcagcagcctcctccagaaatggagggtactggcggcgctgaagcggcggtggaggctgagaccggaatccaaccccaacg

SEQ ID NO: 963 - DNA, 75 bp, Gossypium hirsutum
  Clone ID: LIB3083-020-Q1-L1-H7
aaccaaattatagatcaaccattccaattaggggaaaataacaggctgattaataattaattatgcctttaaaaa

SEQ ID NO: 964 - DNA, 437 bp, Gossypium hirsutum
  unsure (1)..(437): unsure at all n locations; Clone ID: LIB3083-020-Q1-L1-H8
tttcacgaganaacnncnaaaaacatgaaactcacctcatgttcaatcgttatcatcaaccttttggcattacaatacttgcctgttctttgtctctcacaagattttgatttcttctactttgttctacagtggcctggatcatactgcgacacgaaacaaagatgttgttacccgaagacgggaaagccttccgcggattttgggatccatggactttggcctaattacaacgatggtggctacccttccaactgtgaccccaacagtcgtttcgacaaatctgagatttcaagcctgattgggagtctggaaaaggaatggcccactctttcatgtcctagcaacgatggagttaagttctggactcatgaatggctaaaacatgggacttgctcagaatctgaaacttgccaacgtgaatactttgaagctgc

SEQ ID NO: 965 - DNA, 329 bp, Gossypium hirsutum
  Clone ID: LIB3083-021-Q1-L1-A1
agaaaaagcttgagccaaaagaaaatggccgatcagcggaccggcgatcatatctctgaattcaaggaggcctttagcctgttcgacaaggacggagatggttgcattactaccaaggagttgggaactgtgatgcgatcacttgggcagaaccccactgaggcagaactgcaagatatgattaatgaagtcgatgctgatggaaatgggaccattgattttcctgaattccttaacctgatggcaagaaaaatgaacgatacagactctgaggaggagcttaaagaggcattcatggtgtttgacaaggatcagaatgggttcatatc

SEQ ID NO: 966 - DNA, 388 bp, Gossypium hirsutum
  Clone ID: LIB3083-021-Q1-L1-A10
cagcagtcctacaaagtaagtgaatcttttcccttgagggggataaacaagaagtggaaagaggggtttcatgtaacatcaatgacaactgctgcgagtcgctggggtgtagtgatgtcgaggaacgccggattctctgaccaggttgtggagcttgattttttgtatccaagcgaaggaatacatcggcgatgggaaagtggttaccggataacatctatggctgcgaccgtagatcaagctgccttcatactgagcattccaaaacgaaaaacgatggatgaaactcaggaaactcttcgcacatctgcctttccaagcacccatgtaaaggaaaaatgggcaaaaaatctctacattgcatcgatttgttacgggcggacggtct

SEQ ID NO: 967 - DNA, 385 bp, Gossypium hirsutum
  Clone ID: LIB3083-021-Q1-L1-A11
aggttattgaacaaggatttcggggaacattattgacggcttatatttcatgtgaagttgtttagatgaagtgtgctttatgttttttgcctacaagatctaaatttttgtagatattgatggtgcaagaaggaatcgtggaatgttttgatttgcatgttagtagatagtacgaaatgttgctgctccgatgaattatattacgtgatgtgatgtctcatccccagcccagttttgtgccttgtaatccacaaaaccttacgacctatacaaccatggcagtgtggtgaccgcctaaacagtgatagaagaaagcaagaaagtttaaacttttattattatataaactaagttgagatggatatatatgaattgtgagtttgat

SEQ ID NO: 968 - DNA, 377 bp, Gossypium hirsutum
  Clone ID: LIB3083-021-Q1-L1-A12
aatgaaattctatgtcataatccatataggttagagttttagaacatcaaaaagttagaacattgtaatgacataccatcccaaatattacaaacaaaaaaagttacgaaaataccatcaacaaaaccatgatttttaatggtcagcaagaaatcttctgacccattccaaccgcacatcagaaggtaaactaaagaaaacaagcatttgagttagatgatctggaattttactcaatgctcgaaaccgctcatccactgttaaaccttctatttcacataaggttggatataagtttgtagctttttcttggatgatctggaattcttctgacttttgttgaactaccacatcggaggcaatattcctactgattt

SEQ ID NO: 969 - DNA, 399 bp, Gossypium hirsutum
  Clone ID: LIB3083-021-Q1-L1-A2
ctacaatgaaactgatgtgattttgaatgtttatgatcgcactgctctcaataattactcttattgggttggtttcgggattttccactccggtattgaagttcatgggaaagagtatgggtttggggcccatgattttcctgttagtggagtttttgaagtggaaccaaagagctgccctggttttatctatcgatcttccatcttgttggggcgcataaacatgccttattctgaattcagagaatttatcgagaatgtagcttccgagtatcatggagatacctaccacctaatctccaagaactgtaaccattttacagatgacatggcacagagattgataggcagacatatccctgggtgggtgaaccggatggctcgactaggctctttatg

SEQ ID NO: 970 - DNA, 365 bp, Gossypium hirsutum
  Clone ID: LIB3083-021-Q1-L1-A3
gaaacaggagctgatggttcaatttttcatcttcaatggagaataaaatctagggttagggttagcgaaagagggtaaacccgaaaaatggaaggctgggacccgaatacgaagtcgacgctgacccagatcccgctattgacgacgaaggcgggccccagagacggaacggcatggactcagaggcttaaagaggaatacagagctctaatagcctacacccagatgaacaagtccaacgataacgattggttccgtatatcggcagccaatcccgagggtacccgttggacaggcaagtgttggtacgtccataatctccttaagtacgagtttgatctccagtttgatatccccgttactta

SEQ ID NO: 971 - DNA, 423 bp, Gossypium hirsutum
  Clone ID: LIB3083-021-Q1-L1-A4
gaaatgtttgagggatgctaagatggacaagagcactggccatgatgttgttcttgttggtggttccactagaattccaaaggtccaacaacttttacaagatttcttcaatgggaaggagctttgcaagagcatcaaccctgatgaggccgttgcatacggtgctgcagtccaagctgctatattgagtggtgaaggtaatgagaaagtgcaagatctcttgctcttggatgtcaccccattgtctctcggtttggaaaccgctggtggtgttatgaccgttttgattccaaggaacaccaccattccaaccaaaaaagaacaagtcttctcaacctactccaaccaaaaaagaacaagtcttctcaacctactccgacaaccaacctggagtgttgatccaagtctacgaatgtgaaagaa

SEQ ID NO: 972 - DNA, 419 bp, Gossypium hirsutum
  Clone ID: LIB3083-021-Q1-L1-A5
cgggaatggggttggaactaggattgcagttagtcagggcgcatctgatacaggagctctacaaagactagtgcaaaagatatacaaggatgttgatttgaaacccttgatcatagcacccggtgggttctacgagtcaaaatggttcaaagaattcatcgataaaacaaccacatccttagatgtggtcactcaccacatatacaatcttggaccaggagtcgatacccaccttattgaaaagattcttaacccttctgttcttgatggcatctctggaacattcagcggccttcataacgtcatcaagagttctgcaactaaagcaattgcctgggtgggaaaggcaggaggagcttacaatagcggccgtaatcttgttacaaatgcatttgtgttcagtttctggtatttagatc

SEQ ID NO: 973 - DNA, 382 bp, Gossypium hirsutum
  unsure (1)..(382): unsure at all n locations; Clone ID: LIB3083-021-Q1-L1-A6
caaggatccaaatcatggatctgatgatgatggggaaagcttanttcaaaggcttcggctttataaaccaacaccagtttctgatgaaacagagttttacgttaaaagagcagctgttcttgtctgtatttttcaaggcaacaatggtgatcttcgtgtcatcctcaccaaacgttcctcttctctgtcctctcactcaggtgaagttgcattgcctggtgggaaacaagaggaaactgatattgatgatatacagactgcattgagagaagccaaagaagagattggcttagaaccttcacttgtcaatgttgtcactgtccttgaaccggttttcaccaagcatcgtatgatcgtcgtccctgtagtgggtatattatca

SEQ ID NO: 974 - DNA, 307 bp, Gossypium hirsutum
  Clone ID: LIB3083-021-Q1-L1-A7
aagaaactttcatctgccgtatcgaatatcggggcttgggcttttaacgtcggcagctccgttggccttattatggcttacaaacagctcatgttccccgcccgttattccttcgttttcgcgacaacctttacacaggttccacttttgtattacactcatatactcattatagtgacaaacgccagtgttcaccacccaaaaaaaggttccattatgggaactcctctgggtctccattgtcgccaatactccaaatactctgatgaactctagccccatactctatactacaggatattatcat

SEQ ID NO: 975 - DNA, 432 bp, Gossypium hirsutum
  Clone ID: LIB3083-021-Q1-L1-A8
gagagaataagtaaacaaaaagctaaaacctggggacggcaacactcgcaagagagagatctgtttgaacaaagagaaaaaaaaatgatgtccggaggttatacaagcattgataatcagaaagtttctggatctgttcctgcggtttcagatcccagtcatgtcgccgttaaatttacagattcgaaccttcaaacgtttcctccatcgggtgcacaagggaagatctctggtggaactcaacctcctcatgatgctgatgatacattttcaaaacctgctggtggatctcaacctggatctggtgaaccacaagggagtggctggtttcgtacattcaccattgctgcatacaagccatactttgatgttgacacttctgacatcattgatagacttaaggagtcactctttccatttagaggaacattt

SEQ ID NO: 976 - DNA, 394 bp, Gossypium hirsutum
  Clone ID: LIB3083-021-Q1-L1-A9
ctgtttcctcttttatactcttatctttgtcttgggtagtctcaaggtgctagagcaacaaaaatacgaccatatatcaaagggaaaaaaaaagagattcaagggataatacgatgaccaagttaccttctttgtttctggttttgactttggtttctgtttttgtttgtgggtttggaaaaaggataccaattctgtcatttgatgaagggtatagtcagttgtttggagatgataatctagttctccatagagatggtaaagctgttcacttgtctttgaatgagagaacagggtctggatttgtgtctcaagacctttacttgcatggttacttcagtgcctcaataaagttacctgctgattatactgctggagttgtggttgctttttt

SEQ ID NO: 977 - DNA, 394 bp, Gossypium hirsutum
  Clone ID: LIB3083-021-Q1-L1-B10
tctcgagttttcattgtttttgatttttatcaaacgctgtgtgaaaattaaatggcgagcttaacttcgtaattaataatatcaagccattccgagtaatatatgccccttttccctagtctttaagaaacaaagccatgatacaaagcataaataaagatagatatggattcactgaagtagacggatatcgaacaaaaatcctagatgttcctcttcaaaatgtttttgtttttggagcctttttcttgtgttgtctcctaggcatcgagttcttcatgccaatatagaagaataaggcccctaacagagccaagttctgtgtgaattttgtgaaaagtataccgaattccttcttttccgtgtcatagttgtagaagtcgtacaatatggg

SEQ ID NO: 978 - DNA, 387 bp, Gossypium hirsutum
  Clone ID: LIB3083-021-Q1-L1-B11
caattgtttgagctagctagctcttactcaaatggcaagcaaaacgatgatgttgcaaatattttcacttttcttctttttgttcagtatctgcaactccattttccttggtgctaatggagatgacaatggtggttggcaaactgcccatgccaccttctacggtggtgctgatgctaccggcacaatggggggagcttgtggttatggaaacctgtacagtcaagggtatggaacgagcacagcagctttgagcactgcacttttcaacaatggcttgagctgcggtgcctgctacgagctccggtgcaacaatgatcctcaatggtgcattagtcgaaccataaccgtgacagccaccaacttttgtccccctaactatgcttt

SEQ ID NO: 979 - DNA, 387 bp, Gossypium hirsutum
  Clone ID: LIB3083-021-Q1-L1-B12
tttttggtttagaactgaacaaacaattatcatgtgatgtataaagcttcaaatactggagagtttgcagtttttatattattacatcactaacatgaatgcgagagcaaataaatacagagagcaacatatgaagaaacaaaccttcatttcacacttcatagtggcattttctgaaacacaacatataaaaaccaaaatcattttcaccagccatgactgccaataggcaacctccaatcttctccaccgtggccaccagcggtatccgggctacatccacctagacgcctagacggtatgcgagcaccgttactcttttggccagggctccttggtgcctggtagactgttgttcctccacctgaacttgatgaatcacaacct

SEQ ID NO: 980 - DNA, 439 bp, Gossypium hirsutum
  Clone ID: LIB3083-021-Q1-L1-B2
gttttgttttttttttttgtttttttatgaagaagattgaggatttaaacgtataagaaagcagttactgcattaagatgacatattataggtcattattactcccagcagtatatgtacaataagtagagccgaaatgtattatgtctttttcagacagtgtacgcttgctgaattgtgtctatgtcaagacccttcagtctaactactgattcgacgtgcccttttagtgtagtcagttccctcaaccttgcaatttcagctcgtctctttgcctcttcagccatttgattaagttcattgtaactagttcggtcgccaaacatcttggtgtccggtggctgcaatccatggagtgtcctctgagcatgcgcccatttcagttcacgttcttctttcccgaaatcttttcttccttgtgaaaagcgatccctttttt

SEQ ID NO: 981 - DNA, 450 bp, Gossypium hirsutum
  unsure (1)..(450): unsure at all n locations; Clone ID: LIB3083-021-Q1-L1-B3
aaaatcgaatctctccggtactaaccataccttttaccttaccagatatgatagttgacgccaaaagaaaagaagaaaaagagagaagaaggctttattaacagcgcgaaagtatgtatttccctttttcattttgagtgatttaattaaacggttgaggagccgagaatctgcaaaagcttcctctcatacgcaacaacaggacgcctttttccacttggatcgaacggccgtgtcgtttattttaattgagtggttatggcggagccatcttcgtctttatcgtcttccaaggacgagctgtttcagctcatcaagcgtcttggaacttatctcgccctcaagatgtcaaatcttttctcgatctctctccaaaaactggatccgcgatctgttggggctattgcagggcttgctgttgcaattatncttacctataggttgatgaga

SEQ ID NO: 982 - DNA, 392 bp, Gossypium hirsutum
  Clone ID: LIB3083-021-Q1-L1-B4
aaacaaggaaccagatttaagcgacttataaaagatcggaatgtgcactccgaccttgaggagggtatcagacggttggtactttgttccggaaaggtgtactatgagcttgatgattagcgaaagaagaacaatgctacctacattgctatctgtcgtgtggaacagctttgcccattcccttatgacctaatccaacgagagcttaagcgatatccaaacgcagagattgtttggtgccaggaagaaccgatgaacatgggtgcatacaactacatcgtccctcgtcttgccactgcaatgactgctttgggtagaggaacctttgatgatgtcagatatgttggccgtgctccatctgctttcactgctaccggcttctatttcatgca

SEQ ID NO: 983 - DNA, 433 bp, Gossypium hirsutum
  Clone ID: LIB3083-021-Q1-L1-B5
gaaaaacccgagttccccaaacgggaaaagcctgaagggcacgataaacacgaagtcgaatattcggaaatacccgagtacaaggaaaaggaagataagagtaagaaacataaagatgaagagtgccaggagtcacacgaatcgaaagagcacgaatagtacgagaaagaaaaacccgatttccccaaatgggaaaagcctaaagggcacgagaaacataaagccgaatatccgaaaatacctgagtgcaaggaaaaactagatgaggataaggaacataaacatgagttcccaaagcatgaaaaagaagaggagaagaaacctgagaaaggcatagtaccctgagtgggttaaaatgcctgaatggccgaagtccatgtttactcagtctggctcgagcactaagccttaagccatatgacactggtgcatg

SEQ ID NO: 984 - DNA, 433 bp, Gossypium hirsutum
  Clone ID: LIB3083-021-Q1-L1-B7
cacactttgagtgggcacacaaaaggtgtttcagctagtcggttcttccccgaatatgggcacttaattctctctgcagggatggatactaaagtgaagatatgggatgtgtttaattcaggaaagtgtatgaggacatacatgggtcattctaaggcagtaagagatatttcattttgtaatgatggcactaaatttttgactgctggatatgacaagaacatcaagtactgggatactgaaaccgggcaggttatttctactttctcaactgggaaggttccgtatgtagttaagcttaaccctgatgaagataagcagaatattcttttagcgggtatgagtgataagaagattgttcagtgggatattaataccggacatattacacaagagtatgatcagcatttgtgggcagtgaataccattacat

SEQ ID NO: 985 - DNA, 414 bp, Gossypium hirsutum
  Clone ID: LIB3083-021-Q1-L1-B8
cggagagttactcaacatttcaaattttcatgtcaatggtctttgttaatccctttggaatgaggttcttccatcaaagattaaagaatttttataaagattattgtgagattttgggtgtgtttgtttggttgtatttcattttccagtgtttggtagcctgaaaaccttttccatttggaaaatattttccaaaccatgcgtaaaatcccttacattttgggaaaatgtcttaccgtttcaatttctgtaagacattttcccgtgcttctccttcatccaggcatttttctcttcctgcataaagcttttttttcgggtcttggcttaagattcaccttcttgttgctgttcgtcaagattctgttgttgtttcagccaacaaagaacctgaaacgtcagcatcgaaagaaa

SEQ ID NO: 986 - DNA, 387 bp, Gossypium hirsutum
  Clone ID: LIB3083-021-Q1-L1-B9
aagaaagcggccatggagaaggaaagagagcatcgagtgtacttggcaaggggtgctgagcaagctgaaagatacgatgagatggttgaggccatgaagagtgttgctaagttggatgttgagctgactgtggaggagaggaatctgttatctgtgggatataagaatgtgattggagcaagaagggcatcctggcggatactgtcttcaattgaacagaaggaggaggccaaaggtaacgaacaaaatgtgaagaggataaaggattataggcaaagggtcgaagatgaactctcaaagatatgcaatgacatactctcagtcattgataagcacctcattccatcttccttcaccggggaatcaactgttttctactataagatg

SEQ ID NO: 987 - DNA, 391 bp, Gossypium hirsutum
  Clone ID: LIB3083-021-Q1-L1-C10
gcaacaattcccccagcttgatctctcgtgagaagttgggagaggtggcaacctgggtcagcgccactgtggtctccgcctttttctcctctctcgagcgcttctcctgcgttaacctctccaccaacgaccctgacgatgacgacaatcccgacgaggccaaggaccgccctctcacctactcctgaatatctctctcggtacttgccacgtcatagactctcttgctttctcttgatttagggtctttgtatacagaaccaagaaaaaagtattaaggaaactttaaatgctctctatatgtgttggtcctcctgattgaaaagggaactcttgtgtaataaaggcctttttttttttggatatttaatcatctaagtctgttggtgct

SEQ ID NO: 988 - DNA, 381 bp, Gossypium hirsutum
  Clone ID: LIB3083-021-Q1-L1-C12
ataggcattatcattacaatgagaaatatccaaaattatggtcatcatcattgcataattatcataacttcaaacctttttctttcttccatccagaaaatgaaaatgtattttaggggataagcacacaatacttcgtaggtgaatgcagtatgcatgacagtacttcagtatatagcagaaacatattcataactatgtaatatactataaagacggaatgctatgaacaactaccgccttaagctctccacaatgtagtccgcgtataaattcatggaatgctggattgcctcataagcagttgaggcgggcaggaagtcattgacagcaacttccttgttctcattcttcttatagtcctcaaagaagcggcgaatc

SEQ ID NO: 989 - DNA, 394 bp, Gossypium hirsutum
  Clone ID: LIB3083-021-Q1-L1-C2
gttttgtttttgttttttgtatttatctaaataagtaggatttgtcgtattaaaatttggaaatatatatatttgtgagaataacataacacaaatagatgtaaaccacaatcgcaccatttttttcctatgccaaatttgtacatgaatttacttgttatgaacataaacactctcgtgttatgaacataaatttattagaagccaaaattcatttgaacaaaaatgtggcactgcactaggcccattcccctttattgtgtatccgcaaaatctcatgaaatggaaactctgagtatgcaattctatttcttttcttgtatacccaatttgatccgatttcagcccaattcatgagcaactttcatgagctaatgtttaaagggtcatatac

SEQ ID NO: 990 - DNA, 432 bp, Gossypium hirsutum
  Clone ID: LIB3083-021-Q1-L1-C3
gtaattatctgacgatcatcgcacagttttctccgtcgcaatggaaccaccgccaccgcaatcccctcgagactagcaccctcatactcactctcattcatccacctccatccccaccactggtacttgctgcaagtgcggtggtgccacgacccacgccccaccgtcccaatccccaacttcctggcctgacctttcctctcccccggcataccgaccgattcgagcccccgctttaaacctccctccaaacaacacccaagccataatcctaactcctgtccctcaatcccaagaagtccccaccattactcctcctttccatttccaaatcccatccaaaaaaatcacttcccctgatgatatccgcaagttccacgactcccctacttctaaaaacttcctgggtttcatcgtcgccttgtccgaatc

SEQ ID NO: 991 - DNA, 404 bp, Gossypium hirsutum
  Clone ID: LIB3083-021-Q1-L1-C4
tttcggtttccatttacttctttatttctacgtttttggattggtagtaagcgaaaatgagagagtgcatttcagttcacatcggtcaggctggtatccaagtcggaaatgcctgctgggagctttactgccttgaacatggaatccagcctgatggccagatgccaagtgacaagactgtcggaggaggtgatgatgcttttaacacctttttcagtgaaactggtgctggaaagcacgtccctcgtgctgtctttgtggatcttgagcctactgttattgatgaagtgaggactggtacttaccgtcagcttttccaccctgagcaactcatcagcggcaaggaagacgctgccaacaacttcgtccgtggccactacacttttggcaagagatcgttgact

SEQ ID NO: 992 - DNA, 354 bp, Gossypium hirsutum
  Clone ID: LIB3083-021-Q1-L1-C5
cctcaatgtcctccattgcttcatcatcatcatgatcgtcatcatcatcttgttcttttaccttcaccgcttccttcccattcctctctcgtcccaaacttggtacccattccttccctcctgctctcttgtcaatccctcatttgaccccaataaaaacacccaacttatccctatctctcaccactgctgcggcgacctccaagtccggctgcgaaaatgcggtcccctcgaaaaacccaatagagaccaatatagcagtacttgaagacgatgaactggaggtgcattgatgaactgccctggattcaagagaaggcatttgaccttgtttagttcactggttcttttact

SEQ ID NO: 993 - DNA, 416 bp, Gossypium hirsutum
  Clone ID: LIB3083-021-Q1-L1-C6
ctcttgcagaaagcaatgaagttgttggaagacaaacgcggtcagcaaagcacaattgcaggaattgaagctcgaataggggtgatgttttacattcttgggaggtatgatgagtcaaggaactctttcgagagtgcagtaacaaagcttagagcaagtggggagaggaaatcggccttctttggggttctcttgaaccagatgggcttggcttgtgtccaattattcaagattgacgaggctgccgagttgtttgaagaagcacgagcaatactcgagcaagaatgcggcccatgtcatcaggataccctgggaatatacagcaatcttgcagcaacttatgatgctatgggaagggttgaagatgcaatcgagatattggagtatgtactaaaattacgagaagaaaaacttgg

SEQ ID NO: 994 - DNA, 432 bp, Gossypium hirsutum
  Clone ID: LIB3083-021-Q1-L1-C7
ctccaattgatgaagtggacccttttgttttcggtgtggatacagtcaaagttttgcaagtatcggatcctatgaggttccagaaccttacacagacactggattttcattatcaagctcttgcgaacggtgttgctcagcatgctgaacagaggagagcagagattggaaaggagaaaatggagaaggcatctgctgccactgttgcatcatgagttgagttttggattaaaatttgagtttcattcatttagaagtggtttgatgaaagtctcatttcatttacagcattcattggttcatatggtcgtagagttgattgaacctcataaggttgaggttcaagtgcacatagtttgtgattatggtttggtgagactggcagattcttgggcagaagatgcccgtctcaaccactttcttgttcatttc

SEQ ID NO: 995 - DNA, 313 bp, Gossypium hirsutum
  Clone ID: LIB3083-021-Q1-L1-C8
atatcaaccttatcgtaaccctctacctctattgttttccgctcgcctacttcgaactgtagtcaggcgtattacaattcaatgtccctcaacctacaacatactctctatgaaaaccctcacgctacccaactcaatctccttgcacctcatccacatatcaccagctagcattaatatcgaacagatccacaccgatcttacttcccaatcattactctgacttaatatcttaaattcaaattctaagctcacatatttagataaaattcgcttaaaatactatttcaatcacatcattcattaactcata

SEQ ID NO: 996 - DNA, 390 bp, Gossypium hirsutum
  Clone ID: LIB3083-021-Q1-L1-C9
tagcgaactgcttctaaggctgtctatcaacataaatgtaaagctcccacttcctgcaccaacgaccaccaccaccaccaccacaaaaagaagatcaagatgtcttcttcatcgcccgccaatcaagtgagggcctctcacatcctcatcaagcaccaaggctccctccgtaaggcctcttggaaggatcctgaaggtcgcgtaatctccaacactacccgagatgccgccgtctcacagctcaaagccctccgtgacgacatcgcttctggcaacgctaagttcggtgaggttgcctctcgccactccgattgcagttccgctaaactctgctgggatctcggtccttttggtcgaagccagattcaaaaaccattttaagattcaaca

SEQ ID NO: 997 - DNA, 388 bp, Gossypium hirsutum
  unsure (1)..(388): unsure at all n locations; Clone ID: LIB3083-021-Q1-L1-D1
cttcttctctgttttcacaaaaccatctcagaaaattggattgttactatcacttcaaatcaaccaataatcctcactcttgaattgtaatttacaagttgatcaaataggagatactcattagagctgtgatagaaaggatcaataaagatcgttttgggaatggcttgtcgaggatgcttagagtgcttgttgaagctcttgaactttttgatgactcttgctggtctggcaatggttggatacgggatctatttgtttgttgagtacaaaaatgctgccgatactgcaatgcntttgtcacctgttggtagtgatcgagatttgatacagtttggtcgccccatgctcatggctgtgtctctttcgtctagtatttttgataatc

SEQ ID NO: 998 - DNA, 79 bp, Gossypium hirsutum
  Clone ID: LIB3083-021-Q1-L1-D10
acttcaatcttatcgattccgtctacctctacgggagccccggtgcgtaattcaccctatactgagtcttattacaatt

SEQ ID NO: 999 - DNA, 389 bp, Gossypium hirsutum
  Clone ID: LIB3083-021-Q1-L1-D12
tggtcattctgagaggagacttattttgaaggagtcaagtgagttcgttgcggataaggttgcttatgcacttgctcaaggcttgaaggtgatagcttgtattggggaaacacttgagcaacgtgaagcaggatctactgtggcggttgttgctgaacaaactaaagcaattgcagcaaaaatatcaaactggactgatgtcgttttggcatatgagcctgtgtgggctattggaaccgggaaggttgctactccagctcaagctcaggaagtacattgtgagttgaggaaatggcttcaggctaatgttagtcccgaagttgctgcatcaacccggattatttatggagggtccgtcactgctgcaaactgcaaggaactagcagctc

SEQ ID NO: 1000 - DNA, 359 bp, Gossypium hirsutum
  Clone ID: LIB3083-021-Q1-L1-D2
aataaacataaaatgttattctcatatgccatttcaaggttcgggcatcgaaatgacaccggctgatatgaaaaataaaaacaaaattcaattagcaagagggttcttaacaatcagaaacttgaaaacaacattggagaggagatcaggaaagtggaatagctttatttaaattcaagcttttctgggtatgtgcatccagacctttggatgataacgttggatgcatatcaaccagcccttacgcaatactcaatggactttccttgaaccaattgtgaaagaaagcctgcaacaaacgcatcacctgcaccatttgtatcaacaagcttttccttgggtaacaaaataacagggaa

SEQ ID NO: 1001 - DNA, 433 bp, Gossypium hirsutum
  Clone ID: LIB3083-021-Q1-L1-D3
gatggattcggtcttgatccgtaccaagatgtttcgtgcgtggggaaagtgaaataccgaaattcctttgttgaagctgcttggccgctaggcagtgccatcgaagctgtgtcagcaatgaagtaaaaattccaggtcagcatcatcaactttaaattagtcactgaaaaattgcatgacttgggttaatattggcatttgctaatcgaatacactgtaatttgcagaacgactcagaaattggattttttggtgcggaataatcggaagagaaaacagtttgatttaatcttcttcattggtaatttacaattttccccccctgatttttataatttttgtgagagttaattgaattagttcatttagtttgtaaactgattatgttatgttaccaatgtgtttgagttccctaattaccttttgttaggtt

SEQ ID NO: 1002 - DNA, 409 bp, Gossypium hirsutum
  Clone ID: LIB3083-021-Q1-L1-E1
cgcaaacctgcaatcttttcagcgtcctatggcataaggcaagctccattgccatggattggtactcttggttgtcaaaaactgcccttgagccctcactaatctatgactatggccttgccttctcccgtaatgagcttcaaaaagaggatttagcctacttcaatcatgagtttcttcagagcatgggcatatcagttgccaagcataggcttgagattctcaagcttgctaggaaggaagttggagaaacccctaatagcctgtccaagataattttggcaatcaacaaaaccagaaagagctttaacaagtatgttaacaagttggttcaccatgagaataactcgattaagctgctgccggagccgggtcgttatcgagatcagtggagaggaggattgacaag

SEQ ID NO: 1003 - DNA, 394 bp, Gossypium hirsutum
  Clone ID: LIB3083-021-Q1-L1-E10
gtcaaaatatcctcaacccacaaagacaccccagcgatgactttttcatcaggttgcttaaactccaaaacaattcccttctctccaacatcacactctctaaacacactctcctatccaacatccacatcatttaagtagtaacataaagaaagcaagctccacacactactattttcctgttcccacaccaaaacaaaacactttcttctttcttttttttctcctccccaccatgactgacagagtttacccttcatccaaacaacccacaaatggcaccgcccccaccaccacctccgccgtcgctgccgccaacccttcgtttcccgccactaaatctcaactctatggagcctctcgccctctataccgtccgcaaaccaagcgccac

SEQ ID NO: 1004 - DNA, 388 bp, Gossypium hirsutum
  Clone ID: LIB3083-021-Q1-L1-E12
tttttggttttttctatttatatatattattatagatggcttgtaattctgcagtatcagtcaaaacaacaatatcatgaattacagaatattttgctaccaattctcacttcaaacattcaatggcagagcagaaatctgtagaactattaactatacacaacatacaagacattgcgtacctgctcttttgcttgtgtcagtgattccttgcgtttgaagcaaaagatataataaaccgtctgaagtaagagattgtaaagagtcatcgaaatcagccactccatcattgctcgaaggtagtcattgtccacgcaaggggtgacaatggctgaacagctgctgcttcatcagttgcattagtttcaatttccagcaccttcctagc

SEQ ID NO: 1005 - DNA, 348 bp, Gossypium hirsutum
  unsure (1)..(348): unsure at all n locations; Clone ID: LIB3083-021-Q1-L1-E2
ctagaactgtggagtccgcctnctgcatgaattctgctcgagctttggctttgtttcaaccaaatctccagccaatcctggtacgccacctttgtctaggaggttgtgaaccttctcaaaagctgtttcagaatctcccatctgactttgtactgcactcagcatcgccggaccaattctttctcggacaatcctaccacttataacgctttcaatgacatcaatcaaatacaacaagcatccgatcccggattcatctgattgccaaagaacatgataagattctaaaacttccattgataaaacatcttcagatatagccccaactgctgcgcctcgaaccaaccc

SEQ ID NO: 1006 - DNA, 402 bp, Gossypium hirsutum
  Clone ID: LIB3083-021-Q1-L1-E3
ggaatgtcatatatgattgatgatactgtgaacacaatgtgtcacatacatgcttgagtggccacatagaattgttgttccaattggtggtataccagttgatacaagtgaattagagctgaaaccggagggaaagctgtcagttacagtagtcaaagctaatgatttgaagaacatggaaatgattggaaagtctgatccttatgtggttgtatacattcgacctttgttcaaggttaaaacaaaagtcatcgactacaacctgaatcctgtttggaatcaaacttttgagttgattgcagaagatatagagacacagtcactcactgtataggtttttgaccatgacattgttcaagacatgagattacgaattgcataattacgtttgattgaattgga

SEQ ID NO: 1007 - DNA, 310 bp, Gossypium hirsutum
  Clone ID: LIB3083-021-Q1-L1-E4
tagattgggtttgataattttggttcgagaacatatactggattcggttatatttttgacgggcacggtccttactgtcatttggtagcaaagacggtgagagaccatcttccgttaaagctgagtgctcattgggaagctaatgtatccagtgaggatgtttttagagacttcagtttatgaagcattacctctgaaaatatgtctcttttattgttagacaaggaatctatgccttacatatattttctggaatcagaaaagcacccttatatcttctatactcttaaagagtctttccttaaggctt

SEQ ID NO: 1008 - DNA, 397 bp, Gossypium hirsutum
  Clone ID: LIB3083-021-Q1-L1-E5
ggaatttcagatatgattgatgatactgtgaagacaggtgtcacagacatgcttgagtggccacatagaattgttgttccaattggtggtataccagttgatacaagtgaattagagctgaaaccggagggaaagctgacagttacagtagtcaaagctaatgatttgaagaacatggaaatgattggaaagtctgatccttatgtggttgtatacattcgacctttgttcaaggttaaaacataagtcatcgactacaacctgaatcctgtttggaatcaaacttttgagttgattgcagaagatagagagacacatgcactcactgtagaggtttctgaccaggacattgtgcaagacatgagattaggaattgcataattacgtttgattgaat

SEQ ID NO: 1009 - DNA, 432 bp, Gossypium hirsutum
  Clone ID: LIB3083-021-Q1-L1-E6
ctcaagtggagctttatctgaagaacaagcaggtgcggaacatggttgatcttttgaaggaagccaaaggagacgctgcaaaagaatccatggagctgaatattgaagaatttaaatcagctctttctgaagtcgattctcagatgaagaatcttccagcaacagcacaggttgcaaatcagcaaggcgcctatcttgctaagtgcttcaaccgtatggaggagtgcgaaaagaaccctgaaggtccccctaggttcaggggaacaggtcgtcatcgattccatcccttcaggtacaggcacttgggacaatttgctcctttgggaggggaacaaacagctgcacaacttccaggtgattgggtgtctatcggacacagtgagcaatggctctggtattctgtctacgcaagcaagcaagtcaattggcgca

SEQ ID NO: 1010 - DNA, 425 bp, Gossypium hirsutum
  unsure (1)..(425): unsure at all n locations; Clone ID: LIB3083-021-Q1-L1-E7
tttttgtttttttaaaaaattattttgtaatcttttgaatagtaaaactagctatccaactcagctgaattgtttgatacatgaatttaatagccaataaacgagtctaatcaaacaaacatgagcagttcattttcttttttaaatcgcgaatcgattttgagcttcgaaaacgaaaattgatcgagcgtgagccaaactcaagtctcaaactttgaatgaaaagctcatagtttcatacagtttgaatacagttcggctcaaccccagataacatccttaatactaaaaactaacgtgcatattttggcatttcaataaattctaagatagttgcctctagaagattacgttcaacanataagacagcaaccagtttaggaagttctntagagctgacaaaccttgcattgtgtgtaaagata

SEQ ID NO: 1011 - DNA, 331 bp, Gossypium hirsutum
  Clone ID: LIB3083-021-Q1-L1-E8
tccaactttctgcattaattctacactagctttggtttttctaaatcgtaataacaaactggttccgatcattttacaaggtagccagcccacctaaattgactcatacataaaatccattgcccataaactagtctaatcaaacacacatcatcattaaatctactcttattataaacaaaatctatcatcaactcataaaaccaatattcatcgatcctaatccacacacaactctcaaacttttaattaaatcctaataaaaccatacatattccaatacaattcaatctcaacacccactataacatactttaatacctaaaaacta

SEQ ID NO: 1012 - DNA, 351 bp, Gossypium hirsutum
  Clone ID: LIB3083-021-Q1-L1-F1
ccaggtctcatggttggtactgctaaacctgactatgcgtccggtgttaagagctctactgatgcttcaatcaaagaaatgatcccacctggtgcccttgttatgctcacaccccttgttgttgggatcttttttggcgtggaaactctctctggtgtcctcgctggatctcttgtctctggtgtccagattgctatctctgcatccaacacatgaggtgcttgggataatgccaagaagtatattgaggctggtgcttctgaacatgcaaaaactcttggtcccaaaggttcatatccacataaagcttccgttattggtgacaccattggtgaccctttaaaggataca

SEQ ID NO: 1013 - DNA, 390 bp, Gossypium hirsutum
  Clone ID: LIB3083-021-Q1-L1-F10
gttttgtttttttttttttaactaaataagcatagctagattaaggcactgagaatttacagtaaaaaatatattggcactgaatttaactgggattctatacatggattttttgcagtaatctttgtttctgtatatttctcttgtacttgtatcaatctttgtatgttactgcaaaaccaattgacatcggtttaaattctcttcctgtttctcaagctgtcacccattttatcgcaacatgtattactccattcttcgaatcgatcaggtggtatttctggttgattcgtccgttatggacgacgtcagtaagattaatatcgacatttcccagatgttcctttgatcggaagctaaagcctgttcgcttgctcatgacttcgatat

SEQ ID NO: 1014 - DNA, 352 bp, Gossypium hirsutum
  Clone ID: LIB3083-021-Q1-L1-F11
ttagttgtctcttcctccaattaagatgcagatcgtcggtagaccctgaccggcaagaccatcaccctcgaagtcgagagttccgacacgatcgacaacgttaaggcgaaaatccaagacaaggaagggatcccaccagaccaacaacgtctcatcttcgccggaaaacagctcgaagatggccggaccttggccgattacaacatccagaaggagtccaccctccatctcgtcctccgtctacgtggtggcatgcagatcttcgtcaaaaccctgaccggcaagaccataactttggaagtcgaaagctctgacaccattgacaacgtcaaggccaagatccaagacaagg

SEQ ID NO: 1015 - DNA, 352 bp, Gossypium hirsutum
  Clone ID: LIB3083-021-Q1-L1-F12
tttttggtttttttcttcaaggtatatcaatttagctgggtcaattatgctcgtgaaaaccactactctaatatcatctaggagtccatcaagcacatacttctgcacatctttgataacatcatctttctcaataaacccaaacatgctgttattccaacccaagtaccacatacaatatacatctccttccttgatgtcgacatcaacctcaagcattttctgcatgtagtcttcaaactactaatcttctttcacatcctttccatatcacttaaacttatcaaaatccttgcacatttgtttaactaactcatcctaggaatctgctttgccaaaattcatgactacc

SEQ ID NO: 1016 - DNA, 434 bp, Gossypium hirsutum
  Clone ID: LIB3083-021-Q1-L1-F2
acaacctttccaaaagaatggcatatgaagggattctggtggggattggtaatcctgtgcttgacatttcgttagtcgtggacgaagagttcttgaaaaaatatgatatcaagttgaacaatgcaattttagctgaggagaaacaccttcccatgtatcaagaaatggcatccaatcccaatgtatagtatattgctggacgtgctactcaaaattcaatcaaagttgcacagtggatgcttcaaattcctggtgcaactggttacattggctgcattgggaaggacaagtttggggaggaaatgaagaagaactcaaaagctgctggtgttaatgttcaatatcttgaggatgaaactgcaccaacaggaacctgtgctgtttgtgttgatggtggtgaaaggtcactcattgcaaatctatcaactgctaac

SEQ ID NO: 1017 - DNA, 392 bp, Gossypium hirsutum
  Clone ID: LIB3083-021-Q1-L1-F3
ctcagattttcgatatgctcttagtattataccacaatgacctgttcttttttcaggagctgttggattaaaccttgatccattcaatgagcacaatgatgctgacctttgggaggctttataaagggcgcatttgaaggatgtaatcaggaggaactcttttggtctggatgctgaggtcttagagagtggggagaatttcagtgttgggcagaggcaattattgtgtcttgctcgagcattttttcgaaggtcaaagattattgttcttgatgaagcatcagcagcagttgatgttaatactgatgctttaatccagaaaaccattctcgaagaatttaaatcttgcactatgctagttattgctcacagactaaataccatcattgact

SEQ ID NO: 1018 - DNA, 309 bp, Gossypium hirsutum
  unsure (1)..(309): unsure at all n locations; Clone ID: LIB3083-021-Q1-L1-F4
ccgggtttcaaaaccctttctctttaaaatatatagagaagagggtccaaagtgaaaagcgaaatatagatttgattttcaatctgcattttcagggtgtggaacaatgggtgcaggtggcagaatgtcggttcctccaagtcaaaggaaacaagaatcgggctcaatgaaaagagtccctatatctaaaccaccatntactctcagtgaaataaaaaaagccattctaccacactgtttccaacgctcacttatccgttcattttcctatctcgtttacgacttcattttagtctctatcttttacta

SEQ ID NO: 1019 - DNA, 419 bp, Gossypium hirsutum
  Clone ID: LIB3083-021-Q1-L1-F5
gtttgttttttttttttaagataacttggtttgtcaaattctcattcaagactgccaatctgatcaaattctttgtgtaccacaaactcatctgtcagctattgttcccttcaatcggaatctattcattatttggataaaacaaattcattgatcaaatttcgttatcatctgtttcattctattcgaacctttgatccattcaatagtcaacttgtgatgcttctttttcttggattgacacattcaaacttacccatatcttccaatcaaatatatattcacttactacttggctcaacactatccactgccgcacaaatcatgaattctctctcattgccccatgtaggaattgctaattgttcaaattctacatcctggttcttaaacaagcaaagaaaaaagctttcttatca

SEQ ID NO: 1020 - DNA, 425 bp, Gossypium hirsutum
  Clone ID: LIB3083-021-Q1-L1-F6
cttccccgcttcccctttcacatcaaccctaaccctgcctgaccaatcaggatacaacatgaagggaggtaaatccaagtcagatactaagagctccaggctcgccgtgaacaagaaatctagcgccaaagctggaaagaaatcggggaaggcggctaaggatccaaacaagccaaagaggcctgctagtgccttcttcgttttcatggaggagttccgtgagcaatacaagaaggaacacccaaaaaacaaatctgtcgctgctgtgggcaaagctggtggagaaaaatggaagagcttgtctgatgctgaaaaagcaccttatatagcaaaggcagagaagcgaaaggtcgagtatgaaaagaacatgaaggcctacactaagagacaggctgaggctcccaaagaagaagagtcggagtctg

SEQ ID NO: 1021 - DNA, 329 bp, Gossypium hirsutum
  unsure (1)..(329): unsure at all n locations; Clone ID: LIB3083-021-Q1-L1-F7
tgagaaatggaaagtcaggcatgaaaaaagaggtttggtaagcaacgataagtgcggaaatgatcctcctgaagaagatgattatctcttggctgaagctcgccagcctctatggcgaaaagtgccaatttcgtnaagtctgataagcccttaccggataggcagacttggctaaattggcgcttttcctgcctgttcgtgtcttaacaccggcctacgacgcttacccgatctggctaatatgtgtcatctgctaagcatgtttcgccttcttctggacactggatcagttgaccaattggttacctatgactatgctaacttacctc

SEQ ID NO: 1022 - DNA, 430 bp, Gossypium hirsutum
  Clone ID: LIB3083-021-Q1-L1-F8
tcttaaccggcttcaaaatgcactgccgaggagggaggtcgatttactgcatgcccttaaggccagcattcaaaggatctgcacccatcaatctgtctgatcggttgcaccaggttcttcgatgggctcttggatctgttgaaattttcctaagcaggcattgccctctatggtatggctttggaggtggtcgtcttaaatggcttcaaagactagcatatataaacaccattgtctatcctttcacatcccttccactcattgcctattgttcactaccagcaatctgtcttctcacaggaaaatttatcataccaacgctctcaaacctggcaagtgttctctttcttggccttttcctttccattatcgtgaccgctgttctcgagctccgatggagtggtgtcagcatcgaggacttatggcgtaa

SEQ ID NO: 1023 - DNA, 384 bp, Gossypium hirsutum
  Clone ID: LIB3083-021-Q1-L1-F9
tgttggccttgatggtggtttccgccgctactgtgtttgcttcttctgacgggagtgggttagcgaatgagtgcagcaaagatttccagagcgtgatgacttgcttaagctttgctcaaggaaaagcagcgtctccgtctaaggagtgctgtaattcagtggcggggattaaagagaataaacccaaatgtttgtgttatattttgcaacaaacacaaacctctggtgctcaaaatctcaaaagcttaagtgttcaagaagataagctgtttcaattaccatcggcttgtcaattgaagaacgctagcgtcagtgattgcccaaagcttcttgggttatctccgagctcaccatacgccttcatctttaacaactcctcctcta

SEQ ID NO: 1024 - DNA, 380 bp, Gossypium hirsutum
  Clone ID: LIB3083-021-Q1-L1-G1
atccgaacttctgcatgaattcttcactagcaatcacttccggttttggattcagatatatctatctggacacgttatactaggaatccagctaggacacctgaaagagattccactccgaaaaagataccaacaactaggggtgtgagcattacaagatcacccggtgggatcatttctttgatggaatcatcagtagagatcttaacacaggtagcgtaatctgacttagtggtgccctccatgagaccaatgattgtgttgaactgtctgctcactttctcgaccatcttcaaagctgcactttccacactcttcattgtcatttcatataaccaataatgaatcattgccccaacaagcaaacctattaaaacttt

SEQ ID NO: 1025 - DNA, 393 bp, Gossypium hirsutum
  Clone ID: LIB3083-021-Q1-L1-G10
gagtaaagtggaggagttgacacgcagagaataagctcgcaagaagactttgcatgagaaggagtcccaattaaatttgcttgaaggtgtcggagatgtgggtcaggcagctggtttgatctccgaaatcgtggaggttgaacctgtgtgtttgtgtagataaacaagcgggcaatagcagggacctctacagcatcccaagttcgtagtttgcgtaaagtcaatactgatcaagttgctattcctattgatgcggatgatggcaacaatagtaggttagaagatgaagatgaagataaagttcatggtttcaaatcacttaccacatcaagagttgttccaaggtttacgagaccaataaccgatatgatagatggcttatgggtttcttgt

SEQ ID NO: 1026 - DNA, 391 bp, Gossypium hirsutum
  Clone ID: LIB3083-021-Q1-L1-G11
gttttactttgacaccaatccttatttcaagaatggtgggctgactaagacggatctcatgattgatgaagatgaacctattcttgagaaagcaattgggactgaaattgaatggtatcctggaaaatgcttaacgcaaaagcttcttaaaaagaatcctaagaagggttcaaagaatgccaagccaatcactaaaacagaggagtgtgaaagtttcttcaacttcttcaatcctcctcaagttcctgaggatgatgaagacattgatgaagatactgctgaggagctacaaaatcaaatggaacaagattatgacatctgatcaacatttcgagacaagattattccacatgctgtgtcatggtttacaggagaagctatccagggagat

SEQ ID NO: 1027 - DNA, 391 bp, Gossypium hirsutum
  Clone ID: LIB3083-021-Q1-L1-G12
gaaaaccataaggcaattgtggagttctgtaaacgggaaggtcttgttctgctggcagatgaggtttatcaggaaaatgtctatgtacctgaaaagaaattccattcttttaagaaggtttcccggtccatgggttatggtgagaaggatatagccttagtatcttttcagtcagtctccaaaggttactacggatagtgtggaaaaaggggaggttatatggaagtaactgggtttggagctgatgtcagggagcaaatatacaaagtggcatctgtgaatctgtgttccaacatctcgggtcaaattcttgccagtcttgtcatgagtccaccaaaggttggagatgaatcctatgaatcatacagtgctgaaagagatggaatcctct

SEQ ID NO: 1028 - DNA, 300 bp, Gossypium hirsutum
  Clone ID: LIB3083-021-Q1-L1-G2
tactattttgctaaccatggctcataactaccgtcatggttgggtccttttccaactgtgactcattactggctaactaatgatcggtggccacaccatggtagtcagctgctcgacatacattccacacacaaacaacctgatcagagctgtcacaattcgcttcaaaattctattcgcgcggagagtctgaatacatacagtcaacatatcatgaatagtacccaatacatgacaagcctgctatgtgcaacgtggacaatctcataccctgctatcatcatgaacagtaccactagt

SEQ ID NO: 1029 - DNA, 279 bp, Gossypium hirsutum
  Clone ID: LIB3083-021-Q1-L1-G3
gtctgaattagaattatgaggggaagcttaatattcatgatgagctctattcgaagggtgggaaactggatctgaatttaaaggattgtggacttttgatcaagactggtgtacttggttaagctactttgcctgtatctttagttggtttgtcatctgaatcagatactgctacacactgccatctaaaggaattgctttcacgtcttcatattgttcacttgtaagcaaatcacaaagctgttgacagcctttttgagattaataatgaagattaaa

SEQ ID NO: 1030 - DNA, 376 bp, Gossypium hirsutum
  Clone ID: LIB3083-021-Q1-L1-G4
gagaagttgtcccgcttgcagtatctgcttaacataagtgaggcagtggcggcagctgcgaaagagatgggacatggatcagtatcagtcggagcagaggaagaaaagtttgtgttttgaatgtttgcttgaaattgtggtgtagagagccttttgtttaggaagctctgttttgaaggcttttctttttttatatgttactaagttgaaaaggagaatagtaggatcgaggtaggatggcgataatgataaaggtgtttgatcttaattgctgctttcttcttgctccatccgtgttttccttgcacttattatttttgctcaatggtattttccaaaacatgatattctctctttatatataataataacaacg

SEQ ID NO: 1031 - DNA, 389 bp, Gossypium hirsutum
  Clone ID: LIB3083-021-Q1-L1-G5
caccagctcagggtctgcctccaactccggctcgtccgctcttgctccctcggctcacggctccttctcttccaaaaccacccgttccggctccctctccctagccgacctccgcttctccatccgcctcggctccggcgatataggctccgtctacttagccgaactcaagtctcaacccccgccttccgacaccaatgccgccaatgctaacaacaacaacaacaaaagcagtaaaagcggtgtcgtttttgcagccaaagtgatggacaagaaagagctagcgtcgaggagtaaagaagggagagctaggaccgaaatggaaatactcgaattgttagacccatccattttaccttcgctttacgccgttatcgattcccctaaat

SEQ ID NO: 1032 - DNA, 435 bp, Gossypium hirsutum
  unsure (1)..(435): unsure at all n locations; Clone ID: LIB3083-021-Q1-L1-G6
ctccaatctagcattttccttacaagtttgtttgtcgggtgattaatcgatgtggctagctcaatgtcccttaagcttgcatgtgtggcggtgttgtgcatggtggtgggtgcacccctggctcaaggggccgtaacctgtggtcaagtcacaagctccctcgcaccctgcattggttacttgacagggaatggtgctggtggcgttcccccaggttgctgcggcggcataaaatctctcaactccgccgtccaaacaacaccagaccggcaagcagcttgcaaatgcatcaaaagtgcggccgccggcatttctggcatcaactatggtattgcaagcggactcccangcaagtgcggtgtcaacatcccttacaagatcagccctagcactgactgcaacagcgtcaagtgaagttttggcatggaaagttca

SEQ ID NO: 1033 - DNA, 411 bp, Gossypium hirsutum
  Clone ID: LIB3083-021-Q1-L1-G7
gtccattctattactgctactcaaaagactgttgatgggccatcaatgaaggactggagaggtggtagagctgcttcgttcaatatcattcctagcagcactggagctgccaaggctgttggcaaagtgttgccatcattgaatggcaagctgactggaatggcattccgtgttcccacagttgatgtctctgtggttgacctcacggttaggcttgagaagaaggcttcttatgaagatatcaagggcgctatcaaggctgaatctgaaactaatttgaaaggaattcttggctacgtagatgaagacttggtatcgactgactttgttggggacagcatgtcaagcatctttgatgccaaagctggcattgcattaaatgacaattttgttaagcttgtcacgtggtac

SEQ ID NO: 1034 - DNA, 358 bp, Gossypium hirsutum
  Clone ID: LIB3083-021-Q1-L1-G8
ctagcatccattttccttacaagtttgtttttcggggggttaatccatatggctggctgaatgtcccttaatcttgcatgtctgttggtgttgtgcatggtgatgggtgcaccccttgctcaaggggccataacccgttctgatggcttagtcagcctaccacgctgccttccttttttgtcaggtaatggtgatggtgctgatgccacaggttgctgtgccatcgtcatgaatgccttgagatcgctctgtggtgatacataataaccgatctatcttgaaatcttcttcggattttggtggaattccaaattggtgtgttatggaatcccaacttaatctgtttaacgttggtatc

SEQ ID NO: 1035 - DNA, 396 bp, Gossypium hirsutum
  Clone ID: LIB3083-021-Q1-L1-G9
atgggggtcagtttgttggcaaacatgatggtgaggttgctgagttgtcaatgtgccaatggttgactacccgtttagcttcagcttcagtagatggcacggtgaaaatttgggaagatcgtaagcccataccacttgcagtgttgaggccacatgatggacatcctgtttactcggcaacattcttgactgccccacatcgccctgatcatattgttcttatcacaggaggcccactaaactgtgaagtgaagatatgggcctcttcaggtgaagagggctggttgttgcccagtgatggtgaatcatggcagtgtatgcagacattggaattgaggtgttctgctgagtctgaggttgacaatgcattctttaatcaagttttggcactttggc

SEQ ID NO: 1036 - DNA, 418 bp, Gossypium hirsutum
  Clone ID: LIB3083-021-Q1-L1-H1
caaaaatctaagccatagctgtcggtaacgaagtgttgggcgagccggccaacacgaccaaatacctcgtaccggcgatgaagaacatccacgcttcgttagttaaatccaagcttgattccgccattaaaatctcttctccgatagctttcagtgctttaaaaacctcgtatccttcatcggccggttcgtttaagccggaattgattgaaccggtgattaaacccatgttggattttttgaaacaaaccgggtcttacttaatggttaatgcgtacccgttttttgcttattcggctaattcggatcagatctcacttgattatgctttgtttaaggataacccgggtgtagtagattcgggtaacgggttgaaatattctagccttttggaagctcaaatcgacgccgtttttgc

SEQ ID NO: 1037 - DNA, 391 bp, Gossypium hirsutum
  Clone ID: LIB3083-021-Q1-L1-H10
cgagtgtctttgatttgtttctaaggatttaatggctagaccttcttcccatttcttcattacattgttcaagaacaaacaaaaaaaaaaagaagcaaaaaaacatggccaaagttctgttgttcattgctctatgtgtgcttccagctttggttagtgctacacgcattctgaataaccaattggtggttgaaggctatgtgtactgtgatacttgccgtgctggttttgaaacccctaagactagaaggctagctgatgccatggttaagctggtatgctccgacaggaagaccggcggagttgttttcgagaaggagggatataccgacaaaaccggaaaataccagattcgtgtatccgaggatcacttggatcagatctgtgatgc

SEQ ID NO: 1038 - DNA, 385 bp, Gossypium hirsutum
  unsure (1)..(385): unsure at all n locations; Clone ID: LIB3083-021-Q1-L1-H11
gaaagccattgagatatatgaagagatagcgcgggaatgacttaccaataacttgctgaagtatggagttaaaggtcatcttcttaatgctggcatttgtcaactctgcaaaggtgatgttgtagcaatcaccaatgcgttagagcgatatcaggatctggatccaactttttctggaacgcgagagtataaattattggctgacattgcttctgctattgacgaggaagatgtctcaaagtttacggaagttgtcaaggaatttgatagcatgaccccattggattcttggaagacaacccttttacttcgagtgaaagaaaagctgaaagctaaagagctggaagaagatgatcttacctaanagagctttgcgtcgtgagag

SEQ ID NO: 1039 - DNA, 396 bp, Gossypium hirsutum
  Clone ID: LIB3083-021-Q1-L1-H12
ggctgttggagaaagcccttgctacttctgctgggatgggttcggaactagaacaaaagaagcagaaaaagaaagaagagcagcagaggcttgatgaggaaggcgctgcaattgccgaggctgttgctttacatgtcctagttggcgaagactctgatgattcgtgtacggtcatgctaaacaaagaagaggggtttaacccttgggattatgccaacaatctcaatctatttatggatgtaggtagaggtagaggttgctttcttcagcaaggtcaagcaaactggggagggcaggtctctgattcatataaagatggatgggagtgggcgatgttggaaaacagtaattggtccttaccatatggagcttatggaggtgatcttcaagcatcgg

SEQ ID NO: 1040 - DNA, 409 bp, Gossypium hirsutum
  Clone ID: LIB3083-021-Q1-L1-H3
aaaatgtacggtaaagctgcaatctgtttatcattcgtgattcgcttcctgatttcatgttcaatctatgtcggtaccgttgatctcagatcatacttcttccccttacttcagtcaccccaggttccacgctcactctgtgcttccggcccccctctccgcgtttacatgtacgatctccctaggaaattccacgtcggcatgatggatcgtcggagcttctagggaccggctcccgttacggcggataatttccctccctggcccttcaactccgggataaagaagcagcacagtgtggagtattggctgatggcatcgcttctttttggcggcaacggcaatgaagacagggaagcggttagggttcggatcccgaatccgcggaggcccttttttgtgccctttt

SEQ ID NO: 1041 - DNA, 365 bp, Gossypium hirsutum
  Clone ID: LIB3083-021-Q1-L1-H4
gaaaaccacgaataataccagctagttctttccgatcagtagtgaaaaacctttagagccctaaaaaataggaaagtgaaacggtactggaagaccccaaaagagattcaacagaaccttctcccttttaccactgcctaaaacaggaaacttaacactggttgagccattcagtctggtccttctccactagcttgaaaactaggtcaggagccttctcaacccaaaagcaaggagcgggtctactacgcctatacatcgccagagcgtgcgcctgcctattaacagctcttgggacaaaaagattgagctttttgaaacctatatccaatgcaaatcgaagagctctttcacacgctcaagct

SEQ ID NO: 1042 - DNA, 207 bp, Gossypium hirsutum
  Clone ID: LIB3083-021-Q1-L1-H5
aaattttgggtgatctgtgttgaaaaagaaatagaatagggcgacattccaaggaactcaacaaaaatgcaatgcatgcaacaagactgtttatctggtggataatttgacggctgataatagggtttttcataaggcttgcttccgttgccaccattgcaagggtaccctcaagcttaacaactacaactcatttgaaagggtgct

SEQ ID NO: 1043 - DNA, 410 bp, Gossypium hirsutum
  Clone ID: LIB3083-021-Q1-L1-H6
cggaagtcagtcagtcggtcaaacaatcaaatgcctcgtcagctttagcttccacttccacctaacatttccatcttcccaatctttcctcctccatcggcccgtggtctttgacttctccggctacgccgtttacaaagagctacattcagcaatatttgtaacagatggcttcttccttccgagcattcctaaacagtccagttggcccaaaaacaactcacttttgggggcctgttgcaaattggggttttgttctcgctggattggtggacatgaataagcccccagaaatgatttctggcaacatgacatcagcgatgtgtgtctattctgcattattcatgaggtttgcatggatggtacaaccacgaaactatctactgttggcgtgccatgcttcaaatgag

SEQ ID NO: 1044 - DNA, 338 bp, Gossypium hirsutum
  Clone ID: LIB3083-021-Q1-L1-H7
gaaaagagctaggttttgatcatcggatgaactggataggtgggaaagttcattgtggaagccagtgcaaaagagggtcatcccactttcgtttttgtaagggagtccaccgtctccgaccctgttaagggaaaacttgtcgactacttcaagaacttatgggtccatttgttgttaggggatatgtactaccatgagagtttggtcaaggcaataaagcaagttgatgtggtgatttctgttgtgggtcaaatgcagttagcagatcaagttaagatcattgctgctattaaagaagctgggaatgtcaagagatttttcccatctgaatatggaat

SEQ ID NO: 1045 - DNA, 400 bp, Gossypium hirsutum
  Clone ID: LIB3083-021-Q1-L1-H8
aaatagttgaagaggccaaagttgcccctcgagtatcggtgtctatcggaggctttggctggggtggagaagaagatggggatgcaaaggaagaagatgcagaagaagaagtagaagaagacgatgaagaagatgagtacgagaaaacggtaaaagaggtacatgccagtggagaaattcacgtctcttaaggaaaaaagagagtaatatatggtttccaaatggagttttggtgtcttttagtgcttacatatgttcttataaatatgatgtcagttttttgctataggacttgggtgttgaataaacaacctgtaaattagtgtgttttggacaagaagtttgtgcagtctctaatatgattttgtagggtgtattggtactgattaagtaggtggaa

SEQ ID NO: 1046 - DNA, 430 bp, Gossypium hirsutum
  Clone ID: LIB3083-022-Q1-L1-A1
ctcgagtttttttttttttttttacgaaaaagggagcagtttatttgactgcgagaattcaatgatacaacattctaattacaggacataaattagataaacgggaaactagcaaacacccttcacaaaggagccctcagctaacctcacctcacctctctctctctctctctaattagatccatctagccgacatggacaagacaaatccaggctcaagacaatccataatgaactgccccggcattcctgtgcgctgctacagcgacggctgcagcaccaactgcaccgaactgggactgtgcctggagaagtttagcatctatgggtaatctttgctcggtcttggtctgagttctgtaataggggttgctgttcatatcgaatgcagttcctggggacggttttgccaccatgcttaaactggtgt

SEQ ID NO: 1047 - DNA, 51 bp, Gossypium hirsutum
  Clone ID: LIB3083-022-Q1-L1-A10
atttaactagcaataaggtcgatttctgatctaacacattcataacgggcg

SEQ ID NO: 1048 - DNA, 414 bp, Gossypium hirsutum
  Clone ID: LIB3083-022-Q1-L1-A11
cattctttgtttaacgcttaagattcctttaacaacagtggctgcctcaatgtctactctaatggttgttctcgtcgctgtatgcgctctcatgggttccgccattgccgccgacgctccggctccgagccccacctctggtgccggctctatctctccttcatttgtctctgtttccgtcgccgccgccgctgtggctctgcttttcggatctagacttcggatctgaatgatgctatctctggtgttcagatgatgctctgtttttcttttatatatgtatgcctttctttttgatttgattttgaatttggtttggaattttagtagctgtggtagtggatctagggagtgattatattatatatataaatatataaatttatgagagagagagatgtaagtattttaatt

SEQ ID NO: 1049 - DNA, 383 bp, Gossypium hirsutum
  Clone ID: LIB3083-022-Q1-L1-A12
ctttctttttttttgaacaataatacaatccctttcgcggcatgttgaaactggccattaccatgaaactccatacacatcaaaataactaatttctttcgcaataattaattaaaaaaaacagaaactggaaattatatttaataagttcaaatattaattatctcattcatattcaacttcttcttcttcaatcttctcttcttcaataaactttgcattttgattctggtgatacttttataccaaatcattcatattactctcttgttcggtaaattccatttcattcattccttcccctttataccaattcaagaaagccttccttccaaacataactgtaaattggtcccttacgcccctaaacatctcttggattg

SEQ ID NO: 1050 - DNA, 420 bp, Gossypium hirsutum
  Clone ID: LIB3083-022-Q1-L1-A2
tttttgtttttttttttttgtttttttttttttttatagaaagcagtgtcatggaccaggttttactgcaagaaatcaacaattatatgcaaatgttcatatttcccaactttcataaatatgctagataaacatgtatgaactcatcaccatcaaacaagatatatgtcaaccaatagcattttactctaaaagtttcctaaatcaaggaaaaggccagaccaacacggtgaacctaaaaaagggaagaagatgtagatggcagtggtgattggtttcttgttaccatagtctcgaaaaggttatcttcttatatgcctatcaccacgtcctcgaactctgctgccgctggatggctgcaccgagcttgtatattgtggtctatgaatgactttcccattaacaaacaaattccctcca

SEQ ID NO: 1051 - DNA, 381 bp, Gossypium hirsutum
  Clone ID: LIB3083-022-Q1-L1-A3
atagtccacgtttttttttttttgcttaagtgaatcacacagggtgctggtgcattgccaacagaatcattagatattttctacaaacaacataaatcccttttacaatcacagcaaattaacatatactggcaaaaaggaaatataaaattataacaaaggtttgttaaacaccatttaacactccacgccacattgtttaagaactgtacctgtctgtttgggcaacaatggatcgatccgtacccaaacaagtcagaaaatcgattccaaaagtatggaccaaagcactacaatagttgacgttctgttttgtcttcccatcaaacctttgaggaatggggaaagatgaagaatgacccataatgctaataacaattt

SEQ ID NO: 1052 - DNA, 413 bp, Gossypium hirsutum
  Clone ID: LIB3083-022-Q1-L1-A4
tgatcttgtttgcaaggtggaaaggaacattcctgagggtgaccggagaaacccagctgggattgctgataatgtctgagataatgttggtgatatatctggaatgggatctgatctttttgggtcctatgctgaatcatcttgtgctgcacttgttgttgcttccatctcttcttttggcatcaatcatgaattgactccaatgttatatcctctcatcatcagttccgttggtatcattgcttgtttaatcacaaccttatttgcaactgatttctttgagatcaatgctgttaatgaaatcgatccatcattgaagcggcaactcataattttaactgttctcatgactattggaaatctgattgttagttggatagcttcttcatcttcctttaccatttttaattttt

SEQ ID NO: 1053 - DNA, 422 bp, Gossypium hirsutum
  Clone ID: LIB3083-022-Q1-L1-A5
gctgcttgagaactttagtgccgcatccatgtcaacaggtgaagtgccaaaaatgccttgcgcacaagaccttcatgatcaagaagaagctggccaagaagatgaggcaaaacaggcccattccttactggatccgaatgctcaccgacaacaccattaggtacaatgctaagcgtaggcactggcgccgtaccaagctagggttctaagttcgatgggcttatttgtttccagtattttctttaagttttctaagtttattttcggacttattttatttgggatttaatattgggaaccatcgagaatctttgtattagggatattgatgagattgttagtggcttcggtatagtttgatcttatattatctcatcttaatgtgagtgcatggtattgaacttttctttggtaattgcttt

SEQ ID NO: 1054 - DNA, 420 bp, Gossypium hirsutum
  Clone ID: LIB3083-022-Q1-L1-A9
ctaaaatcttgctctcttcactcctcctattttaaccagttctgccttgtcctcgccccttccctagcaagctacatttccatggccccccctgaattggttcaacccagtgataaaacaaacgttttcgctaaacaagtcagtttgcgtaatcgtgcatatgttacgttcttggccggaaatggggactacgtgaaaggcgttgtaaggttagccaaagggttaaggaaagtgaaatcggcgtaccctttagtggttgccgttttacccgacgtgcctgaggagcataggcggatcctggagaaccagggttgtatcgtccgagagatcgaaccagtttacccgcctgaaaaccagacccagttcgccatggcctattacgtcatcaattactccaagcttcgtatttgggagttcgtg

SEQ ID NO: 1055 - DNA, 428 bp, Gossypium hirsutum
  unsure (1)..(428): unsure at all n locations; Clone ID: LIB3083-022-Q1-L1-B1
gttgcatcccagtgctatggttctcgtggagcaaggttgcttantcgcagttgctatcttaggtatgagttatatgcattttatgaaggtgccaatgaaacctcagcttccccgaaaactcaacccacgacaagaagtggtggaagtggaaggaaaatatgggtgattatagttcttacaattggatcagcatttttggtggtagtgctaatggcttcctttgtatactgtggtgcaatgaagaaaggaactcgaaaagggaaggacgaaatcctgagaaatcatgttcaactacacaatagtggggactctgagaacccagatttccaggattttgaaggcttagatgagttaaaagcaaatgattcttatattgatttggcaaccatacactcagctactaaataactctctgattcaaacatgct

SEQ ID NO: 1056 - DNA, 385 bp, Gossypium hirsutum
  Clone ID: LIB3083-022-Q1-L1-B10
ctcgcgcatatcattttgcttccctgaagttaagcgcggtctggcttcatctgtcagatctgagaggcctagacgctgcttcctgtttcaaagcgcgagatggcgacatcatgctcagctacattctcgatcggatcgactgtctcctttggaaaaagggggaatgccactgcttctacaaaaccttctgcttcaaagggcccctaacataattcacttgccagtttcaatggccttaaagcaacaacatccctgaaccgggattctgagtcctccttccttggcaaataaagcatggcaactattaagggctctttcgcacgggaagcacatgatgccaaccagagttcttaccatggcttacaagttcaagcatcttacaaag

SEQ ID NO: 1057 - DNA, 414 bp, Gossypium hirsutum
  unsure (1)..(414): unsure at all n locations; Clone ID: LIB3083-022-Q1-L1-B11
gttgctggtgctgataaagaaataaccgcagggtttttgctgaagaaaagtgctgaaactaatggatggagtcggcgatggtttgttttgaatgagaagactggaaagcttggctacaccaaaaagcaagaggaaaagcattttcgaggtgtcatcgtgttagaggaatgcagcattgaagagataccagatgaggaagaacctgccccaaaaaattcgaaggataaaaaggctaatggctcagataagcaaccgagtcttgtgttcaagataactagcaaggttccttataaaactgtcttgaaagctcacagtgctgntgtgttgaaggctgaaagtatggctgataagactgaatggttaaacaaattgtcaaaagttattcaaccttctacagggccagtgaaaggtgga

SEQ ID NO: 1058 - DNA, 330 bp, Gossypium hirsutum
  Clone ID: LIB3083-022-Q1-L1-B12
ccgagatagaatcgttgaaacgagaactcgagaaagcagagatctacaaggagaagttgatggaaaaggaagctgtcattgaacaacttaatgttgagttacaagctgcgagaatggctgaatcttatgcgcgcaatgtattagaggaatgcaaaaatagggtccaagaattagaaattccaattgaggaaaccaaaaaatttgaaccatcaagattcgaattttttgaattcggtattaaaccacttgaagaccaccaccattcacttgattaatcttaatcttaaattgcttcttttaaaaaaaaaggttgattattggaaattacca

SEQ ID NO: 1059 - DNA, 348 bp, Gossypium hirsutum
  unsure (1)..(348): unsure at all n locations; Clone ID: LIB3083-022-Q1-L1-B2
gaaaaatatgacaaaagcttcgaagaagaaacaatggggcggtggtggagtaagtgtgtggtggcgttcatggcgttgaccctcttctctatctccgccacagcgaggccctgcaagaccttcctcatttcctcgtattccatctctttccataaccctaatgacccttcctccgctgtctcctgccgatttgtcaccgtcttcactgagatcggtcaattgaaccccttatccatgcccgccgataccaagccctcctacgtcttcagctacctccgtgatcgtactaaggacattctcagncgtgacgtcgctctcctcttcggcgtcgactgcggctctctcact

SEQ ID NO: 1060 - DNA, 419 bp, Gossypium hirsutum
  Clone ID: LIB3083-022-Q1-L1-B3
gttttgtctttccagaaaattcacgccaaaaaagaaggtcatgagtatattgttggagctgaagatttgagttgatggcgaggatcataccacaagctttgctacaacaaagcaaaaagaagaaagggccagctcgaatcagtgttataacaattatactctatagtttgattgttgctgtgactgagttttttctctatgctacgtacagacattggtctcaaaggtcaagaactcaaattgagtacaggcaatcagtttttaagggtgacactgacaactctttcgtggatttgaagaaatctgatctccctgaatatgctattttagatactgcaaaatgctctataactgtggagctcttcaaggacaattttcctgatgttgttgatcaattcctagattatgtcacaaaggca

SEQ ID NO: 1061 - DNA, 411 bp, Gossypium hirsutum
  Clone ID: LIB3083-022-Q1-L1-B4
tcgagttttttttttttttttttttgtagaaaatatttgactcagattcactgagaaaatcaaaggggatgacaaagggtaatttccagacaaattatacaacccacagaaacccaactgtccataacatagcgagtttgcgctttcagctacctcgtaaaagctacatgcaccgtgggaaataggtttgccccacatacccaccatacatagcccttttcacatttgattcaaacatcttcggattatccctcaacactgcagcagcatcatgattgaggggatcctcataatttggctccgtgaaaagatggtataatccgtagattacagtgtttatatttagcactggtttccagtcttcacgcatgatgtttaagcaaacatttccttccaagtcaatatttggat

SEQ ID NO: 1062 - DNA, 391 bp, Gossypium hirsutum
  Clone ID: LIB3083-022-Q1-L1-B5
atactgcatagcaacgtggatgggagttctgtgccaaggactaccatgatccaccacctgctccattgattgatgctgaagagttaaccaaatggtcgttttacagggcagtgattgccgagttcattgctacacttatattcctgtatgtcactgtgttgaccgtgattggttacaaggtccaaaccgaccctgctaagaacactgtttaccccgattgcagtggcattcgtattcttggtattgcttgggctttcagtggcatgatctttattcttgtttactgcaccgctggtatctctggagggcatatcaacccagctgtgacattcagtttgtttgtgcgacgcaaggtgtcactcatccgatccctgatgtacatagtggctca

SEQ ID NO: 1063 - DNA, 121 bp, Gossypium hirsutum
  Clone ID: LIB3083-022-Q1-L1-B6
ttacaaaatacccactattctgacatcactgggccatggacaacgatgatctaccttacactcgcttcactaatgctaccaaccaacccacattaaccacttaaaccctatttcaatataa

SEQ ID NO: 1064 - DNA, 419 bp, Gossypium hirsutum
  Clone ID: LIB3083-022-Q1-L1-B7
ctcaaggctagcagctcctgtttgatgcacgtgaaatggttgataatgtccgttcgacagatcatgatccatctgccaatctaaatgcattacttatgctatttaactgtgcacacgatcgatccattaattaccttttgacccatgttgacagggtttccaaatggggtgaattgcttcagatggttgtgttggatctgatccgtaaggtttgcacaacaaatcgtgttgagaaagggaagtatattaagattattatatctttattaaatgccccctcaactgcagttatttatgaatgtgctggcacccttgtttctctgtcatctgctcctactgctattacagctgctgcaaacacttattgtcagcttcttttttctcaaagctattacaatgttaagcttattgtgctatat

SEQ ID NO: 1065 - DNA, 393 bp, Gossypium hirsutum
  Clone ID: LIB3083-022-Q1-L1-B8
atcacaatggtgtcgggttcgttggaatgcgctgttaggtggcaaatgctgtcatcggtggttcccgccaaagcaaccggcggaaacaaggatttggagctaacaaacatggatttagcaatgaaactccattatatcaaaggcgtgtatttcttccaacctgaagcggctcaaggtttgtcgattcatgatttgaaagagcccatgtttcagtgtctggaactttactacgctgcctcatggaggattcggagatcggaaagtggccggccgtttatcaaatgcaacgactgtggcgtccgaatcgttgaagctcagtgtgataatagtgttgatgaatggctggctatggccagaaacaatgatcatatgctccggcatgatcaaagtctt

SEQ ID NO: 1066 - DNA, 412 bp, Gossypium hirsutum
  Clone ID: LIB3083-022-Q1-L1-B9
cagccgcggctagaaaagggttattgaagtaagaaattgagcaatgtctcctgctaaagttgacagcaagaaaaaggccgatccgaaggctcaagcagtgaaggctgctaaggctgtaaaattgggcgtggcatttaagaagaagtccaagaagatcaggacaaaggttacctttcatcggccaaggactttgaagaaggaccgtaaccctaagtatcctcgcatcagtgcaccaccaagaaataagttggatcaatatcaaattctcaagtatcctttaactactgagtctgcaatgaagaaaatcgaggacaacaacaccttggttttcattgttgacatccgtgctgacaagaggaagattaaagatgctgtgaagaagatgtatgacattcagacaaagaaagtgaat

SEQ ID NO: 1067 - DNA, 385 bp, Gossypium hirsutum
  Clone ID: LIB3083-022-Q1-L1-C1
gttgtgtcaaatcttttgaattttgaattcttcgcgtgggttaatgggatctaaatctcggaagcgtcacgtgaagaatggggctgtctttcacaaagctgttcagccggctttttgccaagaaggagatgcgtatattgatggttggacttgatgctgctggtaaaaccaccattctttacaagctcaagttgggagagattgtcaccacaattccaaccattggtttcaatgtggaaactgtggaatacaagaacatcagctttactgtctgggatgttggtggccaggacaagattcgtccattgtggaggcattacttccaaaacacacaaggactcatttttgtggttgatagcaatgatcgtgatcgtgtggtcgaagc

SEQ ID NO: 1068 - DNA, 416 bp, Gossypium hirsutum
  Clone ID: LIB3083-022-Q1-L1-C10
cttgcaggtatgtcatcatgcgataagccagaattaggtgaaagggatgttgaggacaaggtggatgacacagaagacaacagtggatttatagacaaggtcaagggtttcattcatgacattggtgagaagatcgatgaaacaatcggctttggcaagcctactgcagatgtaactgggattcaccttccttgtatcaatctagataaagcataaattgtcgctgatgatctcattaagaacccaaaccctttttcaatacccctaatagacattgactacctgattgaaagttattgtcgaaaactcctttcaggcttgattccagattcttgaaccattcatgctcattgtgaagaaacttgtaaaattccaggtactttgatatatgatgatatcaaaagtacatattatga

SEQ ID NO: 1069 - DNA, 299 bp, Gossypium hirsutum
  unsure (1)..(299): unsure at all n locations; Clone ID: LIB3083-022-Q1-L1-C11
gaacttttcagatacgagtgtagtgaagaacagaaaggggaatggangaaaagaggagaaaaagaaagtgagaagctcaaaactgagcaaaggggaggaacagtactattacaagagaaatggagaaggaagttatgcattggctcaaaagatgaaagagctggagatgatggatgttggtgatatggaacatgtattggatgttgaagaagcactccattattattctcgactaaaaagtccggtctatctttcaatcgtcgacaaattcttcatggatatgtactcagaattctctc

SEQ ID NO: 1070 - DNA, 404 bp, Gossypium hirsutum
  Clone ID: LIB3083-022-Q1-L1-C12
gttctggttttattttattgtttttttatgaaaatatagattcattcctttagatgtatggatcaaagtatcagattaaaattgatcgtttccaaacttaaaaataccaaaatcaaaatgacttacaaaactttaaaacctgaagtgacataaacgtcaacccaaaatcaacgaacgacccaaacttgaaccttaaggtttaaaattccaaaattagccaaaagggaaaagaaacttggaacttcccaaaacctaaaacaatttgaattccaagcaatccaaacttaaaacaacttaaacttgaatgaccagaacccaaaattacccaaacttaaaatagcttttaagcccaatttgacatgatccacgtttacccaaaatcaacttgacatacttaatggaca

SEQ ID NO: 1071 - DNA, 394 bp, Gossypium hirsutum
  Clone ID: LIB3083-022-Q1-L1-C2
acgacacaagaagaaaatgatgtttggcattatgttgaaggatagtaaccagaaatttatgacacacacacatacgtacacacagaatcctcaagtcctctgcacaaatctctcagtgacagtttttacattattactggtatcagtttaataacaatgatctgatttgatttctagctttctcaaacaaaatgactgaagccttcttccacagtggtgtatttcacttcacggtagagctcataagcttcgtatcctaatgatggatcgatctcgaagttggtgcagtcaccattgacaaagattgagtgactgatggccaacacaatattgattgggattggaaactcttggatctgtttgaaaagttggtccttaagaacatatgttttct

SEQ ID NO: 1072 - DNA, 406 bp, Gossypium hirsutum
  Clone ID: LIB3083-022-Q1-L1-C3
gggaactgatgacgaataagaagaaaaacaaactactggtgaagaagggaaaaaggaagagataaaggagaaaatgaacagtgggggaagtgggataatgagcactgagtcatttgagtccttaggattgtctgagccaacttttaaagctattaaagagatgggttttcagtatatgactcagattcaagcaagagctattccaccacttatgattggcaaagatgttcttggggctgcaagaacgggttctgggaaaacccttgctttcttggtacctgctgttgagttgctatataatgttcgattcacttctcgtaatggaacaggtgttatcgttatctgtcccacatgagagcttgccattcagactcatgcggtagcaaaggatcttcttaaataccac

SEQ ID NO: 1073 - DNA, 392 bp, Gossypium hirsutum
  Clone ID: LIB3083-022-Q1-L1-C4
cagagttctaccgccatggggagaagacctgcaaggtggtatcgtcagataaaaaacaaaccttacccaaagtcacgttattgtcgtggtgttcctgatcccaagattaggatttatgatgtgggaatgaaaaagaagggtgtggatgagttccctttctgtgttcacttggtctcttgggagaaggaaaatgtctctagtgaagctctggaagctgctcgtattgcttgcaacaagtatatggccaagtatgctgggaaggatgccttccacctgcgagtccgtgttcacccattccatgtcttgcgtatcaacaaaatgctttcatgtgctggagctgataggctccaaactggtatgcgaggtgcttttggcaagcctcaaggaacatg

SEQ ID NO: 1074 - DNA, 418 bp, Gossypium hirsutum
  Clone ID: LIB3083-022-Q1-L1-C5
gtttggtttttttttttttaacccaaattcggataatcgtcattaaaaagaagccttcaactcatttggccttcaaatctgtatacttcatctgtaggctgtctcctcctttgtacaatgtatatgtatataatgcaaagcaaattttcaggtaaatagattaatttgtcactgaatgaccctaaattcattcaggtgtcaacgcttaacaaaatacagcgtcacagcacaaacctaccatagctccattaacctggcaataaagggctaaatcttcagaagcaacctaagttccatacagtaccagtgaacatctctaccttaatgtttgatgtggaccaaagccatcattctcaagcagttacatctaatttgatctattgcttactaagtcaatgtttaaaaacacacacgcaca

SEQ ID NO: 1075 - DNA, 106 bp, Gossypium hirsutum
  Clone ID: LIB3083-022-Q1-L1-C6
ctattaattaagagcttgacttttaaagcgggatcatggcctaatttatacaaggtacctcctttaaaatttttactaaagaatataccatctacacgttcaatat

SEQ ID NO: 1076 - DNA, 427 bp, Gossypium hirsutum
  Clone ID: LIB3083-022-Q1-L1-C7
gataagaatgttgacatatatgaagtttgtgatgaaagggaaaatccttggtacttgaaacaggattcatcggaagtggaccaacagcctttttctccattatcatctccatcagactcatcagtcatgaaaaaggttgaatgtttggagagtgttactgatataccagagcgatcaagccccgtatctgttcttgagccaatatttgcagatgatcttatcagccctgcaagcatcagatcttattccggtgaaacatccattcaaccgctaagaattcgattcgaagaacatgactctttggccacaaatcagagcaatcgaattaaaacttgtatgaatgataaggaatcaatatttgagcacataaaggcagtgctgcaagcctcgagtttcagctgggacgaagtctacatccggtcacttt

SEQ ID NO: 1077 - DNA, 386 bp, Gossypium hirsutum
  Clone ID: LIB3083-022-Q1-L1-C8
tatcaacttttggacataacctacaatttggaataatcacataattcacaaaccttaccgcaagatacatcataatcttaccatccctcatcccaacaataataatcatcatcatactaatcaaaacataataatattaataatttcccttactattaccacttatacctctttctatcaatcaaaattttctctatctaaacctctataatctcctattattttattacaacatgcatatattccaattttatctcctaaaaatcctctatcaccttcgattcccattttcacccattccatatcacttcttatcaacaaaatcctatcattttctttaactcatatactacaaactattattcaatattctttttcaaaacctc

SEQ ID NO: 1078 - DNA, 422 bp, Gossypium hirsutum
  unsure (1)..(422): unsure at all n locations; Clone ID: LIB3083-022-Q1-L1-C9
gtggcggtaaaattttattgtttgtggaaagaacaaaggttcgaagatgagtgagcttcagagtgatgcgcttagagaagctatttcaaccattgtagctcagtcaaaggagaaacagcgcanatttactgagaccattgaactccagattggtctgaaaaactatgatcctcaaaaagacaagcgattcagtggatctgtgaagctgcctcatattcctcgccccaagatgaagatttgcatgcttggagatgctcaacacgttgaagaggcagagaagataggtttggattatatggacgtggaagcattgaagaaactgaacaagaataagaagttggtgaagaagcttgcgaagaagtatcatgcctttttggcttctgaatctgtcatcaagcaaatnccacgtcttctgggtcctg

SEQ ID NO: 1079 - DNA, 407 bp, Gossypium hirsutum
  Clone ID: LIB3083-022-Q1-L1-D1
cttctaacgactgctacgagcaacggtcaaaacaagaggctccaggctgtcctgagtctgatgatccaaatgcggcatggaatgtgcccctgcaaacttgcatgcacaaagtgccagtagatgcttcagaacgtgggtctcagtggcctgatcgatggccagaaaggttggaaaaagcaccttattggttgagttcccaagttggagtttatggcaaagcagcactagaggattttgctgcagacaatgagcactggaaacgggtggtaactaagtcatacctaaatgggatgggaataagctggtcatctgtcagaaatgtcatggacatgaatgctgtttatggaagatttgctgctgcactaaaagatttgagtttatgggtcatgaatgtggtcccaattgac

SEQ ID NO: 1080 - DNA, 385 bp, Gossypium hirsutum
  Clone ID: LIB3083-022-Q1-L1-D10
aactagcttcaacatccagcccattccatcttacagtatgttgggaccattatgaaaaacgtgcttctgcccttctttcttcttagaggattgtgatttacggttttctcaaaaaaagaaaagaggataaaaagctgagagtatcaaattaagaaatgcacatctgcggtgtagcaactgatgtattgatagccatcccttcaacctgagccctcaatatcagacaccttcatcccaatcatttcttacttctttcttctttctttaaaaaaaggtcctaggtattcaattcaaaacttggaattggcccccaataataccgatgaagaagattcttaacctttaaaaccttgggggaatcaagtgataattcatcaaccattgc

SEQ ID NO: 1081 - DNA, 404 bp, Gossypium hirsutum
  Clone ID: LIB3083-022-Q1-L1-D11
gaaaaatgccgccaccaggatggggaccgcctccagggggaccgccggggcctcccggtttatgtggctgctttgattttatttgcggtggtatttgccgtcttctttcttcttgtttttatgttctctgctgctgctgcatatttgaaagctgctgtgggccaatgttcggcgggccgcctgggccacctgggccaagacctttttaattatagtgctcatctctttttcccttttactctgtttttgatttgtgttttaggctgttgtgaactgtgatgtgaaacaaaaatctagttctgcccctttctgttctttcttgccagcatggaacatggttccagtccacgcttttatttgttctaaaataaaaaaaattagttaaaatatgctttaaatttcta

SEQ ID NO: 1082 - DNA, 333 bp, Gossypium hirsutum
  Clone ID: LIB3083-022-Q1-L1-D12
tgctcgtaccgcgttcgtgaattctccgggtcgacccacgcgtgcaggaactcgtcacctggcaggagcctggcaaccctaccaagacggctaaagctaggtaccgtatcatggcgatcaatacaagagcacaagggacataaagagtacgctaaagcagagtaaattatttacacataaatccctgcttgaatgggaggagctatatagtctcaaagcccaaaaccacatttatttgcttgaaaaagaaaaagaagctgatgcttttatctttcatctaaatttacattattgcctgtcttttgaagtttggaccaatccatcaacttaaac

SEQ ID NO: 1083 - DNA, 410 bp, Gossypium hirsutum
  Clone ID: LIB3083-022-Q1-L1-D2
cacacacccatataattgtctaagttatggcggaggaagtggggaagcgggcttaatctgaaacgactgcggctccaccgccggcagtggaggttccaaaagctgaatctgaggaaaaaactgtatctccaccgccagcagaggataaaccttaatagtccaaagctcttgttgtagttgagaaggctccagatcctgaaccaaataaaatctcaggaggatcacatgatagagatattgcccttgcaaaggttgaaaaggcaaaaaggttgtcattcatcaatgcatgggaagaaagtgaaaagaccaaagcagagaataagtcccagaaaaagctctctgctattgtagcatgggagaacagcatgaaagcatctctggaagcaaaactgaagaaaattgatgaacaa

SEQ ID NO: 1084 - DNA, 424 bp, Gossypium hirsutum
  Clone ID: LIB3083-022-Q1-L1-D3
ggaaccaatcggcgagtgattttagaggagggagttatgataatgggggtagaacgggaggtgctccggtgaggtcgaagtccacggaggatatgtacacgagatctcaattggaagcctcggcggccaataaggagagcttttttgcgaggaaaatggcggagaacgaatccaggcctgaaggtttaccaccttctcaaggagggaaatatgttgggtttggatcgactcccatgcctacccaaaggattaataataattctcagggtgacgtgttctctgttgtttctcaggggattgggaggttatctctggtagctgcatccgctgcaaatgttgtccaagcagggacgaaggagttcacctccaaggttaaggagggtggctatgatgccaaggttaatgaaacggttggtgttgtcac

SEQ ID NO: 1085 - DNA, 328 bp, Gossypium hirsutum
  Clone ID: LIB3083-022-Q1-L1-D4
ggtaagcaaggcccaacaactccactcccggatcttgtgaccatggaccctcccaaggaggatgaagttatcaaggtggaagcacctgtgccgaccgagattgaacttccgccagtggcttaaagccaatgataactgttatgatagtcatctatttgatatttggagcatgttaagtgtcttagattttgtagtttttaagtttggcacctaaaatgaacttatgctggatgcttttttctgaattttccttttgtgtttctcaaattttgttatacttaaaacttattacttgataattttattcaaggattttttattccttttt

SEQ ID NO: 1086 - DNA, 206 bp, Gossypium hirsutum
  Clone ID: LIB3083-022-Q1-L1-D5
cttatgtattaacgcatattatctctttcgtgtaaaggggatctattatccggtcaacacgttactacaattaattctatatctacaaccattttaatctacttttttcactacactcattaaacaatcttgtttaaaatataataaaaaaaatcatacactattagcacttcttcacaggttattctttccaaaactgcattatc

SEQ ID NO: 1087 - DNA, 424 bp, Gossypium hirsutum
  unsure (1)..(424): unsure at all n locations; Clone ID: LIB3083-022-Q1-L1-D6
tgataatgaggctttacgctcttcttctccgattatcggtcgcttcgctgcggctcctgtgcttcgccgctgatgttgactaggtgttctatgattcatttgaagagtcatttgatggacgatggatcgtttctgataaagatgattataaaggcgtgtggaagcattccaagagcgaggggcatgatgactatggtcttctcgtgagtgagatggcaaagaagtatgcaatagtgaaagagcttgatgaggctgtgaatctcaaagaaggtaccactgtgcttcagtttgagactcgcctacagagtggactggaatgtggtggtgcatatttgaaatatcttcgtcctcaagatgctggatggaagcctaatgagtttgacaatgaatccncttactctatcatgtttggacccgacatatg

SEQ ID NO: 1088 - DNA, 440 bp, Gossypium hirsutum
  Clone ID: LIB3083-022-Q1-L1-D7
ttttcttctccatttaaagtatccacacattcatttcatgtgaggaaaacggttacaatacaaatattcacattggaatccgcatccagcaaattagaaatttatcatttcaaagactaaaaaaaaattcaaaagaaaataaataaatcttacaagcacaaggagaaacagcaccatgttgagagagaataagggatgctctctactctgtatataacaaggtcttgtaaattgggatggaatcagtcaaacatcatcacatcagctgttaagaacacgacgtaaaagaaatgcttcaccctgttccccatttgccgaccttctctccaaacagcaagctgttagctgcctcagtaatctctcaagatactactgtaagcacccttacatatcttgcgtgttcggatttgttgacaatatcatcgcattaactgtgtctg

SEQ ID NO: 1089 - DNA, 429 bp, Gossypium hirsutum
  Clone ID: LIB3083-022-Q1-L1-D8
gttctacaatcgtaattaggaatatatattgcataaggaagaagaagatgcatggccgaggagtgccatctagaaatttatatataataaatcacaaagtaaatcaaagggattcaaccaagaaaccaagtcatggaatcaaagtgcattcctagaaatgactgagttgctcaagcttacgagaatggaagaacttacatctccctttaccacttgattctatttcttcaattttccgcttcgccaccttgccgaaaccaacattacttaatttcaattgcttctgactgctgccataaccaacatcttcatccaccttatcagattcccataacacttcaaccatatccttgtaatatgaagtgcatgtaccccaactgaagcggactagtgttgggaatccaaagattgagtgtttatgatgtgcca

SEQ ID NO: 1090 - DNA, 364 bp, Gossypium hirsutum
  Clone ID: LIB3083-022-Q1-L1-D9
cacccatggcatgatcttgagattggacctggagctcgaatggttttcaactgtgtgattgaaatcccaaaaggtagcaaggtgaaatatgaacttgacaagaaaactggtctgatcatggttgatcgagtgctttactcatcagttgtgtatcctcacaactacggattcatccctcgtactctttgtgaagacaatgatcccatggatgtcttgatcattatgcaggaaccagttattccaggatgctttcttcgcgctaaagctataggtctgatgcctatgattgatcagggtgagaaagatgacaagattattgctgtctgtgctgatgatcctgagtatcgtcactacaatgatatca

SEQ ID NO: 1091 - DNA, 392 bp, Gossypium hirsutum
  Clone ID: LIB3083-022-Q1-L1-E1
tagcttgcttctttttgtgatcaagatctaaaaatctctgagttgcaagctcagatccggaggatgaaagttgatcttgaagagttcagaacacaatcaatgcacttaaaaaatcagcaggcaacgataagaagacttgaatagcggaatagacaattagagcagcagatcgaggaaaaagtgaaagatattgtggagatgaagcatcgcagtttagcagaagaaaaccagaacactctacaagtcttaaaagacagggagcaatctttgcaagatcaattactgcaagctaaagaaagtgtatcaaacatgcataaactgcatgaacttgcacagagccagttgtttgaacttcgcgctcattcaaatgaagaatgggcatcaaagcaatc

SEQ ID NO: 1092 - DNA, 412 bp, Gossypium hirsutum
  Clone ID: LIB3083-022-Q1-L1-E10
tttatgtctaattaaatgtgtctccaataaataaacatgacatttatattgagctactggtcgcccctaaaaccttccaacttcaggaaattcgacgatcaaatcaaacagtcatggctggagttgcacctgatggatcacaatatgatgctcgtcaatacgacagtaaaatgaatgaattgattgctggataatggaatgacttctttactacctaccattagggtctccaaaactttgataaaaagggtttgcaaggaaaccttttaagaagcatttattcttatgggtttgagaagccgttagccattcaaccaaagggaatcgtgcccttttggaaaagtttagatgtaatccaacaagcacaatcaggttccggtaaaaccgcgactttcttgtctgggatcttaca

SEQ ID NO: 1093 - DNA, 198 bp, Gossypium hirsutum
  Clone ID: LIB3083-022-Q1-L1-E12
cagtctaggggtcatatactggctagagagtaagcttcatttctctgtttgaaacgtgacagacgccaacgaatgtataacagctgcctggacagcgacaaatgcaatttatgtgccagcagcgcatcaaggcaatctcgatatgcaaagcggtatcctgaatgcagatgatactgattacaaaactgcttatagcta

SEQ ID NO: 1094 - DNA, 345 bp, Gossypium hirsutum
  Clone ID: LIB3083-022-Q1-L1-E2
caaccacaaaaatgttgttaatcttcttggatattgtggggaagaggatcctttcactaggatgttggtttttgaatatgctccaaatggcactctctttgagcatttacacattaaagaatctgagcatttggactgggctatgaggttgagaattataatgggcatggcttactgcctcgagcacatgcaccagctaaacccacccgtaccccataacaacctgtcgtcctcagctgtcagtctaacagaagattatgctgccaaaatctcagattcatgtttctggaatgagttgactgcatcagacagggaagcagacggaataaacctttcggataccac

SEQ ID NO: 1095 - DNA, 414 bp, Gossypium hirsutum
  unsure (1)..(414): unsure at all n locations; Clone ID: LIB3083-022-Q1-L1-E3
gttgtaccccatgattttggagcatgctttcattatcaggaagagagagcaattgagaggggaatccttccaatcctgcagcgtgctaccttggttcagacatttggacaacggaaccatgtgtgcttgaacgagggttcaatcacaattcctccttatgctccccctcaaaagatgcaggcccgccagattccactagatactccacggtctatttttgtctacttccgtggattgttttatgatgtgaataatgaccctgaaggtggctactacgcaagaggtgcaagggcagctgtttgggagaacttcaagaacaatccacttttcgacatctncactgaacatccaactacttactacgaggacatgcaacgagctatattctgcttgtgcccactatggtgggcaccc

SEQ ID NO: 1096 - DNA, 435 bp, Gossypium hirsutum
  unsure (1)..(435): unsure at all n locations; Clone ID: LIB3083-022-Q1-L1-E4
ctgtatatcacattagaaaatcggataaactaagggtgggtataagattattccaataaaaacttgtagggtttaaattgatccgaccggaaataggattaggttctgtattctgatgtgcagagagagaaagagagagtcaaaatcgagaaataagaagaaattagatgtttactttattacaagaaaaatgatgagtgagggaagatcacaatgatgataggaggaagatcatcgtcgtcttcatcaacagcgacagcagcaggtggaacttgggtttcaacaacctcggtgtcggcttcagggaggaggatacaaagggagatgtctgagctcaacgccgacccttctnctcattgctctgctgcccccaagggtgacaatctcttccattgggtcgccaccatcattggtccttctggaacaccataccaa

SEQ ID NO: 1097 - DNA, 419 bp, Gossypium hirsutum
  Clone ID: LIB3083-022-Q1-L1-E5
gaaaaaaacaattatggcaagcaatgaacgggaacacgggcacagataagaggaagaagctcctgccgccgaggatgaagacactggagctcaagtcgcccctattgtcaagttagaggaagtcactgtcagtacaggcgaggaaaatgaagatccgatcctcgatctgaagtcgtagctgcatcgatttgataaagaagggaatcaatggaaagagagaggttctggtactgtgaagctgttgaagcacacagagacatgaaaagttcgccttgctatgaggcaatctaagactcataagatctgctccaatcatctagtgttgccgacaatgacggtgcaggagcacgctgggaatgataaatcgtgcttatggcacgcctttgactatgcaaatggtgaattgaaagatgaacttt

SEQ ID NO: 1098 - DNA, 414 bp, Gossypium hirsutum
  Clone ID: LIB3083-022-Q1-L1-E6
caatagtttggctctgtctccatggagagtgataatcgtgatcgcaagtccggaatggactatgaacttatagaacagattgcaagaggagctttcggagctgcttatcttgttcttcataaacttgagaaaaagaagtatgtgttgaagaatattctcctggccaaacaaacatagaagttcaaacgaacagctcaccaatatatggaattgattgcaaaactaaataatccgtatattgttgagtacaaagatgcttgagttgataagggaaacatcatttgcattgtaaccagctactgctaatgatgtgacatggcttagcttattaagacggcccgaggtatgcacttccctgacgagaaaatctgctaatggatgactcaattactgttagccgtggactacctacac

SEQ ID NO: 1099 - DNA, 397 bp, Gossypium hirsutum
  Clone ID: LIB3083-022-Q1-L1-E7
tcagtatcagcctcatggttttggtaccaccggcggtgggctgcagagcatgaaggaagtggcagcttttcttggacatgtcggcagcaaaacttcatgtggttatggagtggcaactgggggaccattggcttggggtctatgctacaacaaggaaatgagtcctagcaaattgtattgtgatgattactacaaatacacctacccttgcactcctggagtttcttaccatggccgtggtgccttgcctatctattggaactacaactatggagaaacaggcgacgcattgaaggtggacttattgaaccaccctgaatacatagaaaacaatgcaaccttagctttccaggcagcactctggagatggatgacaccggtgaagaaacaccaaccg

SEQ ID NO: 1100 - DNA, 427 bp, Gossypium hirsutum
  Clone ID: LIB3083-022-Q1-L1-E8
gtttgagctagctagctcttactcaaatggggaccaagacgatgatgttgcggatattgtcacttttcttctttttgttcagtatctgcaactccattttccttggtgctaatggagatgacaatggtggttggcaaactgcccatgccaccttctacggtggtgctgatgctaccggcacaatggggggagcttgtggttatggaaacctgtacagtcaagggtatggaacgagcacagcagctttgagcactgcacttttcaacaatggcttgagctgcggtgcctgctacgagctccggtgcaacaatgatcctcaatggtgcattagtcgaaccataaccgtgacagccaccaacttttgtccccctaactatgctttatctagtgacaatggcgggtggtgcaatccctcacgagaacactt

SEQ ID NO: 1101 - DNA, 240 bp, Gossypium hirsutum
  Clone ID: LIB3083-022-Q1-L1-E9
ggaacatggggtttcaacaggaacatgatgggtcgttggatgatattgtgggtcgagatatggagaaagatgcttggatgttccttcaaggtgaagatgactttgtggcacttgagcttcaagagttggttttcgatgggcttttagatgaacttctttgtgactgattgaggagaatatgaattcgagctcctcttagtttctaatatatatataagctttgtttatagatattttctt

SEQ ID NO: 1102 - DNA, 403 bp, Gossypium hirsutum
  Clone ID: LIB3083-022-Q1-L1-F1
ttcttgtctttctatttggttaaccatggctcataactggcgtcagcctttgttcctttgccaacttttactcattactgtctcactaatgatcggtagccacaccgtctcgtcagcggctcgacatttattccacacacaaacaacctcatcagagctgccacaattggcttcaaaatacgaaaagcacgaagagtctgaatacaaacagccaaaatatcatgaagagtacccaaaacatgagaagcctgaaatgtacaaggaggaaaaacaaaaaccctgcaaacatcatgaagagtaccacgagtcacgcgaatcgaaggagcacgaagagtacgataaagaaaaacccgatttccccaaatgggaaaagcctaaagagcacgagaaacacgaagtcgaa

SEQ ID NO: 1103 - DNA, 229 bp, Gossypium hirsutum
  Clone ID: LIB3083-022-Q1-L1-F10
caagcatggctttcgttctcgcggcattccttcttcttcttgtcaccttctaattggtcatcggcgtctactacttctttttaaaaactacccctttaattttttcttaatatttataaaccctttttctttaaacccaaaaaacaaaccactttaaacctctccaatactactcttgaaaccatttaccattttaaactacctatcttcaacttttctcttttcctct

SEQ ID NO: 1104 - DNA, 281 bp, Gossypium hirsutum
  Clone ID: LIB3083-022-Q1-L1-F11
agacagtgttaaagctgctagcctttgcctttcttttcgtcttcttttgggagaaaacattagctcaaatagctccggcgccgccgataaaggtggacaacatcacttccatcctcgaaaaaggtggccaattcaccactttcatcaagctattgaaagccacacaggtggctgatcaactaaacaaccagctaagcacaccggaccctaacgacgggttaacggtgtttgcgccgagtgacagcgcgttctccggactcaaacccgggacgttaaactca

SEQ ID NO: 1105 - DNA, 166 bp, Gossypium hirsutum
  Clone ID: LIB3083-022-Q1-L1-F12
atcactagacacagtttttcattccctacatttcgccatacataatgacacatctaaatagaaaaatttcaatcatcatcatcacccactaaacactaatctaaataaatctactctcaatcacaagaaactaataactaactacactccaatatccatcataact

SEQ ID NO: 1106 - DNA, 416 bp, Gossypium hirsutum
  unsure (1)..(416): unsure at all n locations; Clone ID: LIB3083-022-Q1-L1-F2
catttgcccccttaatccttcaacggccaaaagatgaggcacttggttcccctacctcggaatatacgagaatccacagtttttaaatctctttctcaaagagtatgtaagcactgatgtatgaatcatcgttcttgtttgcttgttgtttctttatcaccataagtgaatcgccttcgatcaccacatcttgaaaccccaaatcaatgcccaattggattacttggagacatgcaatagcttccgcagcaaaccttgtttgaatgtgattattaataattgttgttgaccccagaacaaccccttttgatttcaaggaatgagcttgaaaagccccatcaaaacttacctttatgaaagcgttctctgaaggcctncatcttacaatctcaactctcgtaacatgtaacagtttg

SEQ ID NO: 1107 - DNA, 356 bp, Gossypium hirsutum
  unsure (1)..(356): unsure at all n locations; Clone ID: LIB3083-022-Q1-L1-F3
gtctctgaggctgttagctgttatggctgccatccgggtggacgagaaaccagataaaatcgaaaacatactactttcttccctaatggaaggaaccgtgacttctccagaccctcttgcctctagcacatgggaggaggttcctcctgagaataccctgattacaccagtacaatgtaagtcactatggagacagttcaaatcagagactgaatatacagttactcaactatttcagcacaggaggcatacaagcgaagtaacaactggttacctnctccatgggcaattgtggcaatggttgtccttggatttaatgaatttatgcttcttctaaggaatcctctctatctcat

SEQ ID NO: 1108 - DNA, 265 bp, Gossypium hirsutum
  Clone ID: LIB3083-022-Q1-L1-F4
ctcttgcctcatgttttctgctatcattgtcactactgggaccctgcaactagccattaggagtgccctaacactatcttccttaacttacactaccccaactactacaaacactcttgcactctaaacatcaccaccacctacatcctgacaatacccttattcaacaaccacattcacctacaactatagcaacatctcctttaacagcctcaacttccacttactccactattaccgcaccagctgaatcaactgcaacaac

SEQ ID NO: 1109 - DNA, 290 bp, Gossypium hirsutum
  Clone ID: LIB3083-022-Q1-L1-F5
aaacaatggatttcagagtcatgggtttcgagtcaccagtgttccatacccggcaccacatgatggacctcaacgaagactgcgatcacatgaacaaccccaacgccgcgtcaaggacctacgtacgatacgccaaagccatggcggttacaccgtcagacatcaaagaggactcgaagtcgtacatgttcgttgtcgacatgccatggctaaaaccgggggacataaaggtgcaagttgacgtagaaaatgtgctgttgataagcacagaactgaatcgagaggaagag

SEQ ID NO: 1110 - DNA, 421 bp, Gossypium hirsutum
  Clone ID: LIB3083-022-Q1-L1-F6
tacgttgacccccagacatatatcatatcgctcctgagacatggttccatgttacaacgtggtgttgccggcatcggtaaccactgccacctcttacgagaagataaataagcaaaggaaaacaataatatatatatgcatatcaaatatacaaattttgacatctaatacttaaattcgtccttggaattagccatcttaaggacttccgtgctcagtctccttcaccggattaggaatccttctcttccttaattgtgtctgagctctcctcggaagctaatatctcatcattacaaacagcagactgcgggttcttgaacagatcactattttctagttcacttaatttctctttggactctcctttgagcagcttgacaacttcaaggatggtacgtcttttctcgggctgagcgtc

SEQ ID NO: 1111 - DNA, 370 bp, Gossypium hirsutum
  Clone ID: LIB3083-022-Q1-L1-F7
cttcagccagatttgtctgcacttgtacgtggtgctcagactttcatgtgtcggaaccttgggattactagctgggttaggctaccaatccatgatgcagatttcgggtggggcaggcccatatttatgggccctggtggaattccttatgaagggttatctttcgtaataccaagtccaaacaatgatgggagcttatcagttgccatctgcttgcaaaccgaacacatgaaagtgtttgagaagctcttttatgacatttaaaggaagaagaaaccttgtatacagtccatgtagtctttaaacgttcctttttcccaatttttgtaatacttggttatgttataaagtctcacatttcacttgaaat

SEQ ID NO: 1112 - DNA, 392 bp, Gossypium hirsutum
  Clone ID: LIB3083-022-Q1-L1-F8
ctatgaacttcttttcttctattgataagccttagaaaagtggataccatcatccacgattatattacattcatatataaaatttagagcttgttcaaacaaagaccacacggattacataaataatttttttttaattgtagtaaagttcgagacccataccgtcgtggatttcgtaatctttgagggtaatatgatccttgtaaaccgtgtaccacttttggataccgatcttggctgctcgaattccaatttgggcccctaccaacttcttaaagtctccgatcgtgtcgtcgtccttgcacttcaagcgcactttctttcctaaccgatcgttcaacaccacctcgatcatcttcgattttttttcaaaaagactatttgcagggggg

SEQ ID NO: 1113 - DNA, 345 bp, Gossypium hirsutum
  Clone ID: LIB3083-022-Q1-L1-F9
taatggccttctgcaagccgtattctaggttggtcctagcactggccatggcattggtggcagctacggtgcctgtttatgggcagagaactatcaacactccatgcaccccatcggcacttaacatcttcactccttgtatgaacttgcttaccaatagcagtgccaatggtacttcgcccactgcagattgttgcaactcgcttaaaacgctcacatcgagcggcatggactgtttgtgcctcattgtcaccgggagtgtcccgttccgtttacctatcaatagaactctagctatttctcttccccgagcttgtagcatgcctggtgtcccccttcaatgca

SEQ ID NO: 1114 - DNA, 424 bp, Gossypium hirsutum
  unsure (1)..(424): unsure at all n locations; Clone ID: LIB3083-022-Q1-L1-G1
ctccatctattctctctgctaatttcgcaaagttgggggagcaggtgaaagcagtagaagttgcaggctgtgattggatccatgttgatgtaatggatggccgatttgttccaaacattacaattgggcctcttgtggttgatgctttacgacctgtgacggatcttccgctggatgtgcatttgatgattgtggaacctgagcaacgagttccagatttcatcaaggctggagcagatatagtcagtgttcactgtgaacaatcttcaaccatccatttgcatcggacgcttaatcaaataaaaggtctgggtgctaaagctggagtagtcctaaatccggcaaccccacttactacaatagaatatgtactagatgtggttgatctagtctngattatgtcggtcaaccctggctttggtgg

SEQ ID NO: 1115 - DNA, 202 bp, Gossypium hirsutum
  Clone ID: LIB3083-022-Q1-L1-G10
gcgaacaacaactacaacagcaaaagaaaggttctctagttgtgaactactgtttccctgtgcaacagctgatttaccctttttcaagcattcgggggggttttgtacatgctttgttttgcattgccttgacttatatttctagctcattcggatgctaaagtttaagggttcagtttcatgtttgcttctttgaatgctc

SEQ ID NO: 1116 - DNA, 412 bp, Gossypium hirsutum
  Clone ID: LIB3083-022-Q1-L1-G11
tcgtggttttcgattaacgctggctagattttgatgcggggacagtgtggtggcttagatatggagacagagaatccggtgaattacaagtatatggggaggagctttaatgatttgagtatcaacgacgattctacagctttcagtgattgtaacagcgatagatcgggggagttcccatcggcatcgtctcagaaccggcgattactactcgcctgtgctaattccgagaattcggatgatttgatacggcagctcgtatcggatctcgattcctgttcaattgacaagcaaaagcaaccggttttgaacttaagctttttgccaaaaacaaggcggagaattcaattaagaacgcttaaacttgcgccaataagcctttgatttcggtaatttcatcctttgatcccta

SEQ ID NO: 1117 - DNA, 207 bp, Gossypium hirsutum
  Clone ID: LIB3083-022-Q1-L1-G12
ctaacagtatcgctgaatagcggaccgtcactaaccttgtgactacgattcttctccgtatcaacaaccgcacaaatagcttcataattcaactctaaatctccatgcactttgaaatatagcctaaatcttcactcaacttatcgcaaaaggcggttaagtctaccacttggcatttttaaaattcgctaattaaataaagattta

SEQ ID NO: 1118 - DNA, 412 bp, Gossypium hirsutum
  Clone ID: LIB3083-022-Q1-L1-G2
gagttgcggcttatacactttccaatttcttgtctgcggttccggggctagttacgatggcacttatcacaggaaccataacattttacctggtgaaatttcgatccggattttcgcattatgccttcttttgtctcaatatcttcttcagcatcgctgcgattgagagcctcatgatggtggtagcttcaatggttcctaattaccttatgggaatcgtaaccggtgccggaattatcgggattctaatgatgacatcaggcttcttcaggttgctgtctgatcttcctaagatattctggcgttaccccatttcgtatatcaattttagctcatgggcacttcagggggcgtacaagaacgatttcataggcctggaattcgacccattactaccaagggatcggaaact

SEQ ID NO: 1119 - DNA, 364 bp, Gossypium hirsutum
  Clone ID: LIB3083-022-Q1-L1-G3
agaagattcttagaagctgaagaagatggcggcggctagctacgattacaagaacgacggaaggtgggcatactattgttccaatgtattgattcctactcacatggcatctagctccgatgtggttgatcatttcaagcgcaagttctaccaacgctatatcgatcctgaccttgtggtataggctatgtcatcatcaacaccatctgcttcataatcaacatcatcatcatcagcgaatgaaagcattcgatcacgcaatgcaagctcaaccactataagtacaagggcatcagcagctgccacttcaaatacaacttctatgcgctgggatcagcaaacaatacaatgttctgtcaatgct

SEQ ID NO: 1120 - DNA, 414 bp, Gossypium hirsutum
  Clone ID: LIB3083-022-Q1-L1-G4
aagatatccatggcagagacagcaatcaactctaaacggaaaaaggcaagatggtttctgaatggaatgactgcccttgtcaccggtggcactcgaggaattgggcatgctatagtggaagaacttgcagggcttggggcttctgtttacacatgttcaaggaatggagatgagttgaataagtgtttgaaagaatgggaaagcaaagggtttttggttaatgggtcagtttgtgatgcctcgtctaaagaccaaaggctgaaactgatagacaacgttgcctctgttttcaatgggaagcttaacattcttgtcaataatgtgggaacaaacatcaggaagccaacagttgagtacaccgcggaagaatattcaaagctgatgtcaacaaacttcgaatcttcataccatttc

SEQ ID NO: 1121 - DNA, 281 bp, Gossypium hirsutum
  Clone ID: LIB3083-022-Q1-L1-G5
aagatcgattctaatggaaactcatggaacggaactgggtgaacttgtgtaggcgtcaaggattatggtgagcaacatgatgctaactaatttgaccagcatctcacggatataacatatcataacatggatatcctaggtatccttcactatatatgtaattttacaaagttttcatagtaaacaacatatcgatctataaccagaacaacatcttgctataatatcgatctgttaacagattgattcatattcctacactctgatggcatttaaatcat

SEQ ID NO: 1122 - DNA, 446 bp, Gossypium hirsutum
  unsure (1)..(446): unsure at all n locations; Clone ID: LIB3083-022-Q1-L1-G6
tcgagatttatgttttcttcagctgctaagcgacaacagacaatgggcgtgacttcaagtaagagccactgcgtttgtattctcactagtggcatttgctttgctgaatctcagctttaatcggttgatgcctgatggtgatgtatgataagtaagattcgagtcagtgaaacataangggtgagaagccagtgtatacaaggatggcgaatgttcctacctggtcgaaatattgttgcaacaaaacggtttcagatgtcttccaggtttatcaatttgaggacctgtttgctaaaaggaattcgccggtggctcatgctgttggattttgggattaccattcttttattttggctgcttccatttatgagcctttgggttttgggactactggtggtaagcgtatgcaaatgaaggaagtcgcggcttttcttgcacatgtcggc

SEQ ID NO: 1123 - DNA, 413 bp, Gossypium hirsutum
  unsure (1)..(413): unsure at all n locations; Clone ID: LIB3083-022-Q1-L1-G7
gcattatcccatggctggtgcagcacaactggtgcccggtttgccgtcaagagttgccaccacaaggatcaggtagcagccagagttataaccccaggggtcaaagtaggagcagcaattttggaagtagttccagtggaagggagagccaaagcagcagacgtaatccattttcatatttctggccattccgttcatcaaattcaagctctagccataatggagccgcgggaagtagttccccacggcatgtgcatgagaacaatcagtcgatggggtataatggatggccttttgactgangtctgtagttgtgtgtacctgtagtgtttgggcaaaaattaattgcactgaatgtggatngagggatctaaaaagagtctgtctctgtaaaagtgaatgangtcaatttc

SEQ ID NO: 1124 - DNA, 410 bp, Gossypium hirsutum
  Clone ID: LIB3083-022-Q1-L1-G8
aacagagcaaagcaattccgcactcttccagaatctggcttagccaacttgggctctaatctttttgatggcatgcaagcacagccgtgatcaagccatggatttccagggctttttaaatgacttgcaggactgggaactttcgctcaaggacaaaggcaaaaacaagaaaatgacatctcaggcttctggtaaagaacaattgaatatcactgagaaaggaaggccaacagggaagaggtccctgaataattcttcgtcaactactagttccgagcaatatgattatttgaagaattatgataaacggagcaatttgtcaactagctttgtgactgaagagaatatgcctgatgctgcttctgagaaagaactgggaaatgaatattttaagcagaagaaatttaaag

SEQ ID NO: 1125 - DNA, 248 bp, Gossypium hirsutum
  unsure (1)..(248): unsure at all n locations; Clone ID: LIB3083-022-Q1-L1-G9
cttgacgaatgaagctctttatgatatctgcttcagaacgcttaagctcacaaatcccagctttggtgacttgaaccatttgatttcaacaaccatgagtggagtcacatgctgccttcgcttccctggccaactcaattccgatcttcgaaaactagcagtaaacttgatcccattcccacgcctccattttttcatggttggttttgcacctttaacatcccggngttcacaacaataccgagctt

SEQ ID NO: 1126 - DNA, 330 bp, Gossypium hirsutum
  Clone ID: LIB3083-022-Q1-L1-H1
atgttcaacttgttggtccatgaatcgaatcgaattaccatcaaaagcttcaaatctcaaatccgtaaatcaatggcaagtgaaaattttaaaccaccagatccaggttcttcaataaagaagacacaaagaaagcaaagcaaaattgttcaactaaagtgaagactataagtaatagctaaggaattattatcttcatctgagataaccagggatcttgatgcgaacaaagagcgtagtcatgacataggcaataacaacggaggagattcctgcaatggcgtatgaaaccttgacactccttgccctgtttttatcaagggcaagatc

SEQ ID NO: 1127 - DNA, 405 bp, Gossypium hirsutum
  Clone ID: LIB3083-022-Q1-L1-H11
ccacagcatattcatcacatatccaagctggattacgagctaaacttggtggttctgatggatctgctaaaattgggcttcctgaaaaggatagtttgcttggtgtcagtaatcctttgaaactccataatttcatggctggtggtgtaaaatcagagctatcgccctcccaagagacaccaattgatgcttctgagaaagctaacagcttttaaagcccgttttcaagaataaaaaacctttgtaagaaggaaagaaattccaatttttctttcccgtccctattactttaaggaaccagatattccattacataaccaaaacgtccaaacatcttcttcttaacttaatccctaattgaatcatggaagtcctttggttcattcgttagattctcatcattct

SEQ ID NO: 1128 - DNA, 409 bp, Gossypium hirsutum
  Clone ID: LIB3083-022-Q1-L1-H2
agttcgcggaaatgtttgcaactggaatcattcttggtggttactgagccatggtgactgttatttggtttagggcagcatacaagacagacttcttgcctagaacatttggggttaaaagccttcataaaaccgaccgcaatgacataaaaatgcttgcttgggcagtatacctgcaagtgagcattatcagtcaagctctcatatttgttacacgagcaaggagttgatctttactcgagcgtaccggtcttttactggttttggctttcgtcgaatctcacctgattgctacattaatagcattatatgcaaactgaagttttgctgcaattgaacgaattttatggcgttgtgcacgtgtgatatggctctacaaccttatcttttacatttcactcgattttat

SEQ ID NO: 1129 - DNA, 412 bp, Gossypium hirsutum
  Clone ID: LIB3083-022-Q1-L1-H3
ttatttttcttcagctctaagcgacaagaacaatggctgacttcaagaaaggcactgggttgattctcacaggggctttgcttgtgaatctcgctttaatggttgatgctgatggtgatgatgataagaagattcgagtcaggaaacataagggtgagaaggagtgtatacaagggtgggaatgttcctactggtcgaaatattgttgcaaccaaacgatttcagatgtcttccaggtttatcaatttgaggacctgtttgctaaaaggaattcgccggtggctcatgctgttggattttgggattaccattcttttattttggctgcttccatttatgagcctttgggttttgggactactggtggtaagcatatgcaaatgacagaagtcgcggcttttcttgctcatgt

SEQ ID NO: 1130 - DNA, 412 bp, Gossypium hirsutum
  Clone ID: LIB3083-022-Q1-L1-H4
taagcaaccattgactttcattttattcggttcgaccacccgacacaattcccgatacaatgtgcccaacatggcaaatccccaactaagttagttgcattccttcaaatcgatgagatgtattagccccaccttaagtgtacaagatttcgatatttattgagcattcaaaaatccctgattaaccttaggatgaatgctcaggcgtattgttgtttttcaaggacagtcacgttctcttcaagctgattgaaataagcttgcaatcatttgatgtctatctggctacctttatacttgtttggcacctttctttataaatagtgagtaagctaatttcgtcccaatcgaatacggatactggccttgtaacgattggcccatcgacccataaacttagtttaaagccatg

SEQ ID NO: 1131 - DNA, 412 bp, Gossypium hirsutum
  unsure (1)..(412): unsure at all n locations; Clone ID: LIB3083-022-Q1-L1-H5
aagaaatggcaggaagattgagcaacgtagcgtcacgtgtaatgggcggaactggcgtcgtatcgcgctccgtcgcctcttcttttcgactccgttccggtatgggtctccctgtcggcaaacatatcgttcccgacaagccccttcctgtaaatgacgagctaatttgggacaatggaactgcatttccagaaccttgtattgatcgaatcgctgataccgtcggaaagtatgaggcattagcttggatgtgtggaggcttgagcttctttgcatcgttgggatttttggcttggtggaatgataaggcctncaagattccattcgcaccataagtatatccatattacaacctgcgagtggagcttggtggagaaccgtangtagatccatatgcaaagttctatacatc

SEQ ID NO: 1132 - DNA, 348 bp, Gossypium hirsutum
  Clone ID: LIB3083-022-Q1-L1-H6
gcaaatcggttctctaatccttctttcgggtgtaacgtggtttatacgttagggtgttgttgaagaactgctactaccatggctacaaagaacagcgttggggacttgaaggaagctgattcgaagggaaagaaagtgtttgttagagtcgatctgaacgttccattggatgataacttcaacataactgatgacacaaggatccgtgccgctgttcccaccatcaagtatttgatgggtcatggctctaaagtcatcctctctagtcatttgggacgcccaaagggtgtcactgccaagtacaatttgaagccctttgtgccaatggtatctgaacttcttggaatt

SEQ ID NO: 1133 - DNA, 363 bp, Gossypium hirsutum
  Clone ID: LIB3083-022-Q1-L1-H7
gaacccaaactagcattagggcatatactgatgaaagagctatttacagaagagctgaaatctctccggagaagaaaccaatctccatgtatatatatgatatgatatgatcctatatcaaaggcctcagtatacaggcttcaacttattacaaagacttttcactaagaaacaaaagaagaccaaaacccagtatacaatattaaaattttctgtgtgtataatgtgtaaaagcagctacctctataatttcctatcagttgaagcgatgatcttgataacaaggccggggaaaacatcgtcagggtcatggatatgcgggttccgctcgacgataaacggatcgccacacttgtcgctgat

SEQ ID NO: 1134 - DNA, 420 bp, Gossypium hirsutum
  Clone ID: LIB3083-022-Q1-L1-H8
ttttcatctaaatctctgatccgaaacaaaagactcgggtcgttgggaatagcaatgggttttgagaagatcaaggtcgtcaatcccatcgttgagatggacggagatgaaatgaccagagttatttggaaatcaattaaggataagctcattcttccctttgtggagttggacataaagtactttgaccttggtcttccacatcgtgatgctaccgatgataaagttacaattgaaagtgcataagctactcttaagtacaatgtcgccatcaagtgtgctactattactccagatgaagctcgtgttaaggagtttgacttgaagcagatgtggaagagtcctaatgggactattacgaatattttgaacggcactgtctttagagaaccaattatttgcaaaaatgtccctcaactt

SEQ ID NO: 1135 - DNA, 367 bp, Gossypium hirsutum
  Clone ID: LIB3083-022-Q1-L1-H9
catccgttgaaggaatggcttcagatcctaaagtgcacgctttctaggaggttgccaaccacaacaaaaccaaagattgttggctgattatttctgggaaggtttatgatgtaactccgttcatggatgatcatcccggaggtgatgaagttttgctgtcagctactgggaaggatgccaccaatgattttgaagatgtgggtcacagtgattcagcaagagaaatgatggaaaaatactacattggtgagattgatccaaaaactgtccagcaaacccactaccttccaacaacaccaaacccttaacatccccattagaacccttaatttggcaataaaaatctaccatttcttggtcccctttt

SEQ ID NO: 1136 - DNA, 357 bp, Gossypium hirsutum
  Clone ID: LIB3083-023-Q1-L1-A1
acgaatcacaagtatgacgaagctgctgtggacaataggattcgggaggctgatatagaagcattaagagcaaaggtaaaaatggctgaagaaacagttaagcgggtgactgggattaactttaactctggacatctatctaggcacaatgtagctagtgttagcatgccttttgttagcagcccattggaaacatcttcaactgctcctgttccattgcagccaaacactaatcagttttttcaccaaccagttcccttgcatcatcagagaatggagaacgttttcatggggaacaccatggttcctcctatcgtgaattcacgaaccgaaggagtgaaacatgaaaatgaaaca

SEQ ID NO: 1137 - DNA, 262 bp, Gossypium hirsutum
  Clone ID: LIB3083-023-Q1-L1-A10
tttttaattttttgatcaaaaacacctaatttccaacaggcaaggttcaaacatggaccggctgaaaccatgtttcctgtttataacacaataacacacacaaaaaatatatgatgaaatactctcttataagattttaactatctacaacaacattcttgttcagcttatgactttaacaaataataccaaacattatcttcataattactttactatttataacaataattatacccttactatattttatacataattc

SEQ ID NO: 1138 - DNA, 393 bp, Gossypium hirsutum
  Clone ID: LIB3083-023-Q1-L1-A3
tgaatctgttgacaagttggcagagaaaacggaggcaggatcaggttctgaagggcttgactttagcaatctgaaaaagaagaagaagaaaccagtagaggccaatacattcactgacgaaagtggggatgcaggagatgattttgatggtcatattgatggggatgaagaaggtgaaggcattgtcttgcaacaacggtacccttgggatggaactgaccgtgattatatatatgatgagctactcggtcgggtgttcaacattctccgggagaacaaccctgagcttgctggagacagacgtagaactgttatgaggcctccacaagttcttcgtgagggcaccaagaaaactgtttttgtaaatttcatggatctatgcaagacaatgca

SEQ ID NO: 1139 - DNA, 122 bp, Gossypium hirsutum
  Clone ID: LIB3083-023-Q1-L1-A4
ttcttgtctttatcatttaaattattcgtgttgtaatggaaaggtagaaaagaaagacactgatgaactaatttgcctcacaactcttctctagatgtatgggggtgcttatttgattcacc

SEQ ID NO: 1140 - DNA, 418 bp, Gossypium hirsutum
  Clone ID: LIB3083-023-Q1-L1-A6
attacttgctccatccgaaaatgttgatcagttgcttagggagcatgaccgtaagatccaagaatttgctcgaagagcaagacttgacaagataaaagctgggaaactgcaagctcaagcaaagcaagtgacagaaaattcattgtttgtcaccgctcgcagagctgaatagacatcattttatggtttttcaatctttgtggtaaagctgggaaaatcaggtaatctaaataccaagagataattagtttacaggatttaccatgtatagtgaacaagaaaaagtagatgttatttgttatatagagtatttgagcaaaagcactcatttatcttctttgatttggtaagctataaatatggcttttataggatacaattctctggctttgtaggtgattactacttgtggtttttt

SEQ ID NO: 1141 - DNA, 358 bp, Gossypium hirsutum
  unsure (1)..(358): unsure at all n locations; Clone ID: LIB3083-023-Q1-L1-A7
atcagttatcgaaaggagaagaattcgtgaagaaagcggggaaaaagctaaatggttggggcttgtttagttctaaatacgaagactccgccgatttatttgataaagctgctaattgcttcaagcttgccaaatcatgggacaaagctggatcaacttatgtaaagttggcgaattgccatttgaaatcagacagcaagcatgaaacagctcaagcttatgttgatgctgctcattgttataagaaaacagctacaaatgaggctatatcttgcnttcagcaagcagtgaacttgttttgtgatattttatggctaagcatggcttcaaggtattataattaaattgctgaattata

SEQ ID NO: 1142 - DNA, 380 bp, Gossypium hirsutum
  Clone ID: LIB3083-023-Q1-L1-B1
aactagtggatgctggcttctgcatgaattctgtacgagctcgaattgaaaatactaatgctacaacaagcaatagcggctaggaccattaagggatcagcaatggttgcaatgctttttataatcgcaacaaatttatggacaggatctatggcacaatcaatttgcaccaatgttctcatcagcatgtctccctgcctgtattacatacaagggaactcttctaaaccctcttcttcgtgctgctcgcagcttgctaatgttgtgaggtcaaacccttagtgcctctgccaggtactgaacggttgtgcttcatcacttggtgtcagtgttaatcatactcaagcaatggctttcccaacagcttgcaatgttgaaac

SEQ ID NO: 1143 - DNA, 392 bp, Gossypium hirsutum
  Clone ID: LIB3083-023-Q1-L1-B10
ccaaatcatttgacacagcttgttcaacttacgtaaagggagcagattgaaactaggaacgttgaaagcacacattaagctgctcaagcttatgttgatgctgttcatcgctattagactacaaatgtaaaggacgctctatactgcctgaaagacgcactgtacatcttttgcgatatcataatggctcatcacctctgacaagtattataacgaaatagctcaattataatgagtcaaacagaacactgaacagaccattgatcattatgaacaggcaactgattgcttacaaaatcaagatctatcaacctctgccaaccaatgtaagcagaaagttccacaattagctgctaatatactacaataccataaagcttttgtcatctatt

SEQ ID NO: 1144 - DNA, 395 bp, Gossypium hirsutum
  Clone ID: LIB3083-023-Q1-L1-B11
gtttatcttttgactttgctgatactaatttgtagatggagaggatattacgtaggcgcgtaaagcggcatagtacacaacgcataactctggaattttaacatccatatttattctgtagctatcgttattttggcttccactagctggtgaactttccatgccaaaacttcacttgacgctgttgcagtcagtgctagggctgatcttgtaagggatgttgacacctgacttgcctgggagtacgcttgcaaggccaaagttgatgccagtaatgccggcggccgcacttttgatgcatctgcaagctgcttgccggtctggtgttcgttgggcggccgagttgatagatttgatgccgcttgcacaacctcggggaacggcaccaacaccac

SEQ ID NO: 1145 - DNA, 93 bp, Gossypium hirsutum
  Clone ID: LIB3083-023-Q1-L1-B12
tcaaggtatctgaataaactccttctatttacctactaggtccggttacttatctagggctactaagctgaattttctctgatctaaaatata

SEQ ID NO: 1146 - DNA, 272 bp, Gossypium hirsutum
  unsure (1)..(272): unsure at all n locations; Clone ID: LIB3083-023-Q1-L1-B2
cgctctagaactagtggagcttgtattctgcantaattttgcacgagtttcaatgcatggatcatgatttggctggtcttgtagcaatccgcgtagttaagattacggagccacattttaaatgttatatacatcaactactctttggacttgagcactgtcacatctctattagtgctatactgagatattaattggtctaatctttttattgatgatgaaggtctacttaatattgcctatttctgactggctacattctttgatcctaa

SEQ ID NO: 1147 - DNA, 366 bp, Gossypium hirsutum
  Clone ID: LIB3083-023-Q1-L1-B3
ggagaaggtgcttcttacagtgaagccacagtatggtgggggtgagaaggggaagccagccactggtgctgaaggtgcagtgcctccaaatgccacactcttgattactttagagttggtttcatggaaaactgtgactgaagtaactgatgacaagaaggatataaagaagatcttgaaggaaggagagggatatgagcgcccaaatgagggggctgttgtccaagtgaaattgattgtgcaactgcaagatggtaccacattcttgaagaagggccacaatgaaggagaagaattgtttgagttcaagacagatgaagaacaagtcattgaaggtcttgatagatctgtgttgaaattgaaaaa

SEQ ID NO: 1148 - DNA, 362 bp, Gossypium hirsutum
  Clone ID: LIB3083-023-Q1-L1-B4
tgaagtctctggatgaaaatcagcggttcataattgaggattcagttcttattgcactgcttgggcaactgaaactagaggcagaaactcttgctgctgagaagaactcagtacggcaggagttgaaggttcagtctgtgcagttttcggagctgctgatcagagctgaaaaacttgcggatatgaatgaagtactgagatcaaaagtggtagaggtaaaccaaagagaagacgctttgcagactgaattgataagtgttcgtggacaactgttagccttgcaaaggcaatatcagacttcactggaagacaactgcaaggtgctagatgagaaaagatcttagatgaaggaagttttggac

SEQ ID NO: 1149 - DNA, 361 bp, Gossypium hirsutum
  Clone ID: LIB3083-023-Q1-L1-B5
ctgaaggacgtctgatgaacttgggatgtgccggtgggcacccaagttttgtcatgtcgtgctcgttcactaaccaggtgattgcccagctcgagctatggaaggagaaggcaactggaaaatatgagaagaaggtttacgtattgccaaagcacctagacgagaaagttgctgcacttcacctcggcaagctcggagctaagctcactaagctcactaaagatcaatctgattacattagtgtgcctgttgaaggtccttacaagcctcctcattacaggtactgagggggacagttaatgagtttttatcgagaaagaaaaagcatccggatggtttgattgtttcttgtattactgaa

SEQ ID NO: 1150 - DNA, 360 bp, Gossypium hirsutum
  Clone ID: LIB3083-023-Q1-L1-B6
ttatacatttttttaagaacaatcattccaacaacaatgggttaataaaaagaaagaagcatatttgttctctacaacatcaataatttgattataacactaaaaatgataatgaatatgaaaaatgatatatatatatcttcaacttataataatttaatcttcaaatcaacacacaatgtaaacatgtaaaaaaaataaaaaataaatcatacttataataatcactaattatgacctctctttctctctactgtcttccttagatgaaaattatatggctttctgggaagaataagaagaataaacagtgtccaccttaagcacataaacaggatagtcatcaatatcatcaatcca

SEQ ID NO: 1151 - DNA, 224 bp, Gossypium hirsutum
  Clone ID: LIB3083-023-Q1-L1-B7
aaaaaggctcagcaatggcagatccagttaagaagaacgtgttgtaagaagaaatcattgcttacgcttacctcattctctacatcgctctttccagcggtcaaatcttcttcaacaaatttgttttgtcatccaatgaaatcaattttccctatcccctttggtttactcttgttcacatggacctctcttctggtttatgtttcttactcacttaaatcttt

SEQ ID NO: 1152 - DNA, 255 bp, Gossypium hirsutum
  Clone ID: LIB3083-023-Q1-L1-B9
tcatatcttttgattttgctctgtattcttaggctatggttaaaaattaagagcaggtgttttgaggtagtcatttacataaacaaaatgatgatctggcgcattggagctatttatattcatatgcctacaatggctgtgatcgcccttaaatgtcccgatacttaagtggctatcgctgatatctcattacctatgatcagtatctggaacaatgaccatattcttatctattagcctggtctctatggagtt

SEQ ID NO: 1153 - DNA, 299 bp, Gossypium hirsutum
  unsure (1)..(299): unsure at all n locations; Clone ID: LIB3083-023-Q1-L1-C1
gaagcanttagtgaggtattgaatggagatcgactcgtgagtgcggcttataaactgaagtttagagaggaaaatgattcttccgttgtttgttagaagaaactttctaaggatgaagttgtcttattcctgaaggcggttgaaaaagattattatttccacatgtactatgatgatttgcctatctggtgttttattggttaaggttgataaggaaggaaaagctgatcccaatgagttcaagtattacctttacaagcgtatgcatgttgatgtactctataacatggaccgtgtta

SEQ ID NO: 1154 - DNA, 411 bp, Gossypium hirsutum
  Clone ID: LIB3083-023-Q1-L1-C10
ttaagaaggaagaagaagcaaaaccagctgaagtggaggggaaagttgaaacagaagctgatccagcagagaagactgagtaaataataaagcttttgtgatgaaaatgcgggtgtcaatggaagtgtgtttcaaatggctacagtttgataagtttgcatgtcaagtcaactagttttcttctatgtaggtcaataaggatgtagtaatgtggctgatggaggcccaccgatagtagtcctgcaatgtggctaggttaacatgcatttgcatatgtcaaagagtgacatacttcaagttccattgtgggggaatttttatgggtcatctgttatctgtaaagggatgggtttcttgggtcccaaaccacctttctttgcttatgtttattgttttgcttgtatggttatt

SEQ ID NO: 1155 - DNA, 202 bp, Gossypium hirsutum
  Clone ID: LIB3083-023-Q1-L1-C12
ctatatcctagaaacttgctttggcatttaatattaatgggatgagctaaatcaaggggggactatgatactctacatgatgacctatatcttttcattgattacatatgcatcactctctgattgagactacattgcttcatctgaccattgtttttttctttagtctcttactatacacaactccatctaaatttactta

SEQ ID NO: 1156 - DNA, 407 bp, Gossypium hirsutum
  Clone ID: LIB3083-023-Q1-L1-C2
gtaaacaacctggatcaagtccgagctttggagaatgagatgctcctccgtataaagcaacaaggactcaacatcacccctcgaatcctcattattactagacttcttcctgatgctgtcggaacaacatgcggtcaacgacttgagaaagtatacggaacagagcactcggatattcttcgagtacccttcagaacagaaaagggaattgttcgtaaatggatctcaagatttgaagtctggccatacttggaaacctacacagaggatgttgctcatgaaatctccaaagagttgcaaggcaagccagatctgatcatcggaaactacagcgacggcaatatcgtcgccttcttgctcgcacaataaataggtgtcacacagtgcaccatctgccatgctttgga

SEQ ID NO: 1157 - DNA, 397 bp, Gossypium hirsutum
  Clone ID: LIB3083-023-Q1-L1-C3
cgctctacaactagtggatctcggtattctgcatcatattctgcacgaggaactcggcgatgcataaaatccgatctaactcaatataagccgggcttaacaaatctgagctcccacacagcattctccacaaccttaacttgcttatatatagttaccataatcaccaacattacacatcattacgtatcccaattaccttattaacctcaacagtatactactcaatgcatgacccaccttattgcaccgcaggcgacatatatattgcacccgcctaaccaacctgactctttatagccatactatcaccaccatcaaatacacgtgctgtactacctggttaactctcctgctaaaaaacctccccaatattcatcttcacttgcgaaaaact

SEQ ID NO: 1158 - DNA, 414 bp, Gossypium hirsutum
  Clone ID: LIB3083-023-Q1-L1-C4
tgatcttggggatgctatgtggtgttgtaagtgtagtggtcgcgcgcttagtttcttggtgtcacagcagcatttgagtatatcaaggagaaattaggactacctactgtaatctgtcctgctttaggtggtttaagagctggaataatagctcttaggtatcctggaattctatactggggctttacaaatgtcaatgaaatcctacatactgggaagtccgcatctgctcccggaatctggttgctaacccaactggcagcagccaaagttgttgccactgctttgtgtaaggggtctgggcttgtaagtggcctttatgcacctagtttgatgattggtgctgccgtcagtgctgtatttggatggctcagctgctgaacttattaattcagctatttcaggcaatgcttc

SEQ ID NO: 1159 - DNA, 440 bp, Gossypium hirsutum
  unsure (1)..(440): unsure at all n locations; Clone ID: LIB3083-023-Q1-L1-C5
gctattcagtaataatagaagccgcttgattaggctagagtacggagtagtgatgtatggttattaaccagctatgtttaatttgggtttggatttctcaaacaaagtggtcatcttctacgtgtcataaagataagcttcatttcaagtgatttgctgtgcttcttgttgtgattgctgtatatcacttttcattggctgctgcttataatctancttcaacttatttgctgttcttcattctcagcttcttacaataggaactctcgctgcatatcttacgcattatctggcttggcttcgttatatttntggatcagtgcagtagtgtatcgcatgtgtttgctgggaaaacctagctggctttggagccattcattgttggtattaaaccggagaagagaactttacaattgctcaagtggtgcaataaatatact

SEQ ID NO: 1160 - DNA, 438 bp, Gossypium hirsutum
  Clone ID: LIB3083-023-Q1-L1-C6
gtcgaaaccacgaaaccaacaagttcaattcaggcgctgatcacttaccctaacaccccgtacgattttgactacaaatccacaagaggagagcccgtacttcacgatttgccgctgccaaaatagaaatataaggctccaaccgggaatttggaaaacaaaactacagaagcgttagaacccaacttaccgaacaatcgaaagaaaatagaacaacataatacgaagctttattgatggatcgaagcaaaatagaggagtatcaaaaaaaggtgaggaataaaagaacagaggaaagcaaaagaaaatctgaggtcaattttcctggaaagagagaggaattttgaaaaaaataaaatcaaataaaaagagagataaaaagaattgaaatgtgggacttgaacccaagaccttatacatacacccagaacatttaac

SEQ ID NO: 1161 - DNA, 425 bp, Gossypium hirsutum
  Clone ID: LIB3083-023-Q1-L1-C7
gcaaaacctgaagaaaattctaaagtagaagaagagccgcatgaaccatccccaacaacaaaagatgatgcaccacaaccaaaacttgatgatgatgatgatcatcatcatcaacaatcatctgcaaacgaaccgcgatcatcttcatcatcggaggaagatactaagcaatggggtacccacgtcatgggaccgccggcgatccctattgtccacccggataaccagaaggccgctttatgggtcgccggcgaccaccagcaaattcacgagctgccttacctcgtttacactcctgctgaaaaaccgacccaaaattcatttgaacttgtgattaacgttttcaatacttggagtaggaaggccgagatcgtcgcacgcagcgtctggcacaacctgagaagtggatcgtcggtatcggatgc

SEQ ID NO: 1162 - DNA, 361 bp, Gossypium hirsutum
  Clone ID: LIB3083-023-Q1-L1-C8
ttgaaacattaaggaagcgatttaaggtgtttctagaggctagtcttactgtaattgagtactataaaggaaagggcaaggttcgagagattgatgctgcaaagccggttgaagaggtatttaatgatgttaaagatattttcaacccaaaagtcccaaaagttccaaaagacgaaaatgtttaggggagatgcatgtgtagtgctattctgtaagtgcccctttaacttgaaatcaaaactagtattgagatttcagtgcatttatagaaataataatgtagactatgaggtgtatgtataattatcttgagtaactgtattgaccgatttgtgctattcaatgaatcgccattgtattt

SEQ ID NO: 1163 - DNA, 426 bp, Gossypium hirsutum
  Clone ID: LIB3083-023-Q1-L1-D1
ggtcaattcaccctcttcattcgtcttctaaagtccacgcaaggggccaaccagctgctcggtcagctcaacaattccaacaatggtatgaccgtttttgcaccaacggacaatgctttctccagccttaaatcgggcacattgaattcactcaccgatgaacaaaaagtgcagctggtgcaattccacatcgtcccaacatacctcacctcgtctcagttccaaaccattagcaaccctttgagaacccaagctggtgatagtggcgatggcaagttccctctcaatgtcaccacttcggggaactctgtgaatataacaacagggttgacaaacaccagtgtttccggcactatttacactgatggtcagcttgcttgttatcaaatcgatcaagttcttcaaccattgcaaatatttgcacct

SEQ ID NO: 1164 - DNA, 420 bp, Gossypium hirsutum
  Clone ID: LIB3083-023-Q1-L1-D10
caagcaaccattttccttacaagtttgtttttcttgtgagtaatccatatggctagctcaatgtcccttaagcttgcatgtctgttggtgttgtgcatggtgatgggtgcacccctggctcaaggggccataacccgtgctgatggcttagtcggcctcccacgctgccttccttttttgtcagggaatggtgatggtgctgatgccacaggttgctgtgccatcgtcatgaatgccttgggatcgctctgtggtgatacataggaaccgatctagcttgaaatcgggttcggatttgggtggaatttcaaattggtgtgttatggaatcccaacttaatcgtgtttaagggtgggatccaattgtgtgatacattacagagcattggtgtggattgttttctcatatgttttgattgac

SEQ ID NO: 1165 - DNA, 411 bp, Gossypium hirsutum
  Clone ID: LIB3083-023-Q1-L1-D11
gctggtcgttctttaaagtctgtagttcaagggatctggggaactagtgaagctgagaagctacattccatgaacttgctgctgtatatggctcctatggcagcaatgattttgttacctcatactctatatattgaaggaaatgttgcaagaatcacacttgacaaagccaagactgattctttcattgtttacttgttggatgggaatgctactgtggcttatttggtgaacttaacaaattctttggttaccaaacatacgagtgcccttactttgcaagttttgggcaatgccaaagccaatttagcagcgatcgtttctgttatgatcttcaagaatccggtgaccgtgataggcattgctggattcgcttttacaataatgggagttgttctctactgctaagca

SEQ ID NO: 1166 - DNA, 254 bp, Gossypium hirsutum
  Clone ID: LIB3083-023-Q1-L1-D12
ctcgtgccttgcaatcacctcagccttgcttccagcagggtgatcttattggggatccaggtaacttggagtggatgatggaagctaattgtcctgatgttgctgatatcacacattcactgcaacagccagcttgaagaaagttggatagtggtggtgttaccagtggtggtttccgtgaactcataccatgcattgcatgaactgcaatcgctgttggagaggactgtgtattcatcgaggtccattattat

SEQ ID NO: 1167 - DNA, 316 bp, Gossypium hirsutum
  unsure (1)..(316): unsure at all n locations; Clone ID: LIB3083-023-Q1-L1-D2
agaagagttgatgagtttttatcaagaaagaaaaaacaggcgggtggtttgattgtttcttgttttactgaaatttcatgatggttaggtttttgttttatttttagagttttttttgtgtttgggtgatgggaaagtgcctgggggtgggaaaatgatgtgggatttggtatcttcttgtatgaatatgaccaaatgggtttgaaataaaaatgttagggatgtgtggaagattatatagtatttgccattaatgcagtcttgttttgctgcattgcttttttttaaaaacaaataanataaaattattatttat

SEQ ID NO: 1168 - DNA, 370 bp, Gossypium hirsutum
  Clone ID: LIB3083-023-Q1-L1-D3
caccacgggactcgaagatcccgatttgtgtaccgaaggccttgaggcccatggttgggaccttgaactcgccatctcttccttcacctcttccactcaaccctccgcttcttccactgtctctgattccgaccctcccgattcacgggcccggactgattccgcctcggcctctgcctccgcctccgcctccgcctccgcctccggtcctattaccgctcccgcaccgggcttagcctggagactcgttacattaccgatttccgtgatatccggaagtttagggttgatctctggcgctgttgggctgggtctatgggccgcgggtggagttctttcgtattcccttgggatgatcgggctaagctct

SEQ ID NO: 1169 - DNA, 338 bp, Gossypium hirsutum
  Clone ID: LIB3083-023-Q1-L1-D4
aatatataaaaaaagtatagctttaaatattttgaatacagaaaagccaacttttttacattttttctcaccaatgttcaataatccattcttgataattgttcaaacttcaaagccaagcatattagaacaacgaaagggcaagggaaagggaaaagagagacaaaaaataataatagccgcaataaaaaaaggggacatttttaactcattactaggttgaccattatcaacatcatcaaagttattttgtcaacccttttaccaagggaaaatttttcaatgccgatttaacctttctaaagagaatatggtaactcaaaatgttctacagattc

SEQ ID NO: 1170 - DNA, 423 bp, Gossypium hirsutum
  Clone ID: LIB3083-023-Q1-L1-D5
ttgtatatcttggatttatggtttttggaatagttgtgcttcgttttctctatcggttcatagacaacaatggccttcctcgaaactggccatttgttgggatgattcccacgttacttctcaacatccatcgccctcatgacaaagttgcccaagtcctcagacgaagcaatggtaccttcttttatagaggactttggtttactaacaccagcttcttagccacctacgatcctgagaatgtgcgttatatattgagttccaacagttctgtttatttgaaaggtcctgaatggctgaaacagtttgatatcttcggcgaagcacttttcaattccgactgtgaggcttggaaatgttaccgtagagttttccatgacttcttgaatcaccctcagtaccggcaatcactttcaaaggttc

SEQ ID NO: 1171 - DNA, 418 bp, Gossypium hirsutum
  unsure (1)..(418): unsure at all n locations; Clone ID: LIB3083-023-Q1-L1-D6
gaaaaatggagaaagcaatcaacagacaacaagttttggttaatcatttacaaccctctgctcaatctcatcaatcatctgctgctattctgtttccttcaaactgcgcggcgggggatagcgctgcctatcaccggacggctgcttttggggatgatgttgtgattgttgcggcatgtcgcactgcaatttgcaaagcaaagcgtggaggcttcaaagattcacttgcagatgatttgcttgcccctgttttaaaggctgtgattgatagaacaaagctgaacccaagtgaagtgggggatatagttgttggtacagtgttggcacctggttcacanagagcaatggaatgtaggatggcatcattctatgctggtttccctgatacggtgcctattagaactgtcaacaggcaatg

SEQ ID NO: 1172 - DNA, 299 bp, Gossypium hirsutum
  Clone ID: LIB3083-023-Q1-L1-D7
gccatgttgtaaccaagaaggagttggctccaggtccgtgtaatctgaaaggaaaaactagcaaaagagtccattttgtgaggaacttgattagggaagttgctggtttagcaccatatgataagaggattactgaactactgaaagttgctgatgacaaacgagcgctcaaggttgctaaaagatagttgtgaacttacaaaactgctaacaataagcgtgaggagatatctagtgtactccgtacgattcgggctcaccctatatgcggaaaattgaagatgatcatctgtcctgtt

SEQ ID NO: 1173 - DNA, 358 bp, Gossypium hirsutum
  Clone ID: LIB3083-023-Q1-L1-D8
ggaaactcatgacgaggcacaagaagaaacggggtgtgaacttgttcacggggatgtctgtaggcccccaatcaattatggtttactctgtgtttatgttggcacaggtgtccagattttcgcaatgtcgcttgtgacgatgatatttgcgttgctgggctttttgtctccttccaatcgtggagggcttatgacagctatggttcttttgtgggttttcatgggaatattttccggttactcttcatcacgtctatataagatgttcaagggcacatagtggaagagaaatacttttaaaaactgcatttatgtttccgggtatcttattcgccatgttctttgtactgaatgcact

SEQ ID NO: 1174 - DNA, 363 bp, Gossypium hirsutum
  Clone ID: LIB3083-023-Q1-L1-D9
ctgacaattgtgatacttacgtgaaacaagatgatggggggcaggggtttaccctagatgtgcggacacttccacttgcatgacctattgggccttggcatgtctacagaagaacgcacgtttcactgtgcctttaccaaagcataatctacatatgggtctgaacaactgcactgcttctaaggcgcatcttctttatgatctttgtacaactacttgcacttctataggcttgacttctttttcttctccttaaccaatccacaaactatgctatctacttgacacatttggccccgttgatgttggacttaaagaggaaagttcagattagaatccatgagctgtgttttagggactaaa

SEQ ID NO: 1175 - DNA, 363 bp, Gossypium hirsutum
  Clone ID: LIB3083-023-Q1-L1-E1
atcaacccgtgcagagagtttccaatctggacctttgtgtgacgggaaagatggaatgctagtattgaggaacaagtcaccgaggtggcatgaacaactccagtgctggtgtctgaacttcaatggacgggtaacagttgcatcagtcaaaaattttcagctggttgcatctcctgaaaatgcagctgctggtcaggagcatgagaatgtcattctccaattcggtaaagtggggaatgatgtattcactatggattatcagtatccaatctcagcttttcaggcatttgctatatgccttagtagcttcgatactaagatcgcttgtgagtgatatgcaaacaggttgtgcgaaatgcaatg

SEQ ID NO: 1176 - DNA, 255 bp, Gossypium hirsutum
  Clone ID: LIB3083-023-Q1-L1-E10
attttccgtccactactcttccaaatcctcatcatgtggagcggatatccgtgtggagggcccctgtagataaactccactgattctgccactgacgacgacagtatcatgaatctgcaagacctgtatagggctgcactctctcgccccttggacgagactcatcaaagctggctgcttggcccctgtgagcaaaagaagaagaagaagtactttgatctctgatgtatcattgtgagctccaagatctttgta

SEQ ID NO: 1177 - DNA, 418 bp, Gossypium hirsutum
  Clone ID: LIB3083-023-Q1-L1-E11
ctcaaaacactttgctttctttgggattcgtgattttcggaaagctgaattggccggaactcttaccaaaatacctcaggtacaagtgatcaaagagaatgggaagaggaaaaatagagataaagaggatcgaaaacacaacaaatcgtcaggttaccttttgcaaacgcaggaatggcctgctgaagaaagcttacgaactgtcagtcctctgtgatgctgaagttgctctcattgtcttctccagtcgaggccgtctgtatgagtactccaacaacaacataagatcaacaatagacaggtacaagaaggcttgctcagatacttctaacacaaacactgttactgaaatcaatgctcagtattatcaacaagaatcagccaagttgagacagcagattcaaatgttacagaattc

SEQ ID NO: 1178 - DNA, 399 bp, Gossypium hirsutum
  Clone ID: LIB3083-023-Q1-L1-E12
aaactcttatctatgtctatcctctatctttttgccctgttgtgcatgcaaatccatgctggagagtacttcacctaattcccaagagttaacaccaatgagaaagagacaacatccagatagcaagagcacgagaccttcgttccccagaccacccaaaagccagacgagcaagagccaaggttcatacctgaaacccaaaatggttatggcctttacggtcactagtcatgctcaggctcatgctcaagctcaagccggcccagtttcaccaccaaagaaacctattaaccctatttcaaccctgttagatttcaccctgatgaaccctataacaacattcctccatccttcaacaataaagacacttactactacatcaagaatgcctacaagttc

SEQ ID NO: 1179 - DNA, 337 bp, Gossypium hirsutum
  Clone ID: LIB3083-023-Q1-L1-E2
attgggattatagtgtgcggtcaaaggaacaaattgaggcaaggttgtttagcaaacatgaggctgccatgagaagagaaaggaccatggcgtactcatttactcatcagcaaacctggaagaatgcttagagatctatgaatccattattcatggatccaagcaatccctcatggggatggagctagatggaacggcggatgacagcgcggccatgggaggttcgtggtggcatgatacatatagaacatctcttataccaatcatcactaaagagtgcacgaagcaacttcagtggagaaatcatcaaagcttatgctcgttatcaactcaattt

SEQ ID NO: 1180 - DNA, 300 bp, Gossypium hirsutum
  Clone ID: LIB3083-023-Q1-L1-E3
ctttgccttcgctgggtttttgattctaatggaagatggagagtgtgttttggtgctggagcccgcaaagaaagacttttggaaccccacctgcatggaccttgccgacacttccaaaccgtttaaagttactaacagtggacctgccaagcactggaccgacgcaatttccatctgaaatggtcgtcttggcgccatggtgtatggcggcattgcatcggaaactcttcagctcaatgatgacacattttggacttgtgtttcaggggattacactaatcctgaagctccaatctccct

SEQ ID NO: 1181 - DNA, 431 bp, Gossypium hirsutum
  Clone ID: LIB3083-023-Q1-L1-E4
atcacatgccacctcatcaatcctggggtccacctcaaggtgtgcctccaaatgctagtggaggttctggttatggtcataatcctctgtacatgccaccttctcggcaaatggacaattactaccctcctgctgatatgccacctcatatggaaaaacagccccatcagggtatttctgcctatggaagagaggtgccaatgggtgcccatggatcatcaaatccccagaatgcaccatcaatgatcacacaggtcactcagcaaatgcaaattccactatcttatgctgatgctgttattgggacagctggtgcaagtattagctatattcgacgtgctagtggggcaactgtcaccattcaagatactccgtgtgtccctagtgaaatgacagtcgaaataagtggaactgcttcacaagttttaact

SEQ ID NO: 1182 - DNA, 344 bp, Gossypium hirsutum
  Clone ID: LIB3083-023-Q1-L1-E5
tgcttgacttgggggagaagcagtcaggggaaaaggttggagatgtgggcctggctccttgggctaaaggcagtgctagggagttcatcaggaagcatagagaggccctagaatctgattttgtctcagaaaatctgcaccattggatagacctcatttttggatataaacaaaggggaaaggcggctgaagaagctgttaatgttttctaccattacacatatgaaggaagtgtagacatagactcagatacagatccttcaattaaagccttcattctagctcatatcaatcattttggacagacacctaatcaactattcctcaaaccccatgtgaaaagg

SEQ ID NO: 1183 - DNA, 220 bp, Gossypium hirsutum
  Clone ID: LIB3083-023-Q1-L1-E6
attaaccatctatggtaattgtcccaaacagggatacggctaatactgctgatggcggtgctaatggatcacctattcctccaccgacgtctttaccgtctcaatcattcttagagaatagcaaagacagcaaaatctaaacactttttctccctctacaactatctttctccttattaacaacttcaccttatcaacgatatccataatttggatcttt

SEQ ID NO: 1184 - DNA, 409 bp, Gossypium hirsutum
  unsure (1)..(409): unsure at all n locations; Clone ID: LIB3083-023-Q1-L1-E7
ggacagagggtctttgatagattgggccaaggactatgtggaactaccggaagtgatgtctcatattgtggaccctgaactaaagcatttcacatacgatgacctcaaactcatctgtgaaatcataagcctttgcattcatccagacatttcgagacggccatccatgcaggaaataagcctcatgctcgagagcagaattgacacgtcggtatctattgagctcgagtcatcttctttggcatgggctgaacttgctctttcatcatgattaattgaagctgctaaccacactattagatcaaaatacatacagttttatcctttnttttcccttcctttcaatctttgtaaatgctgttcgccaaaagaaacatttggggttcatctaattactgaaaaattccac

SEQ ID NO: 1185 - DNA, 438 bp, Gossypium hirsutum
  Clone ID: LIB3083-023-Q1-L1-E8
aagaaaaaacccagtattctgtcatcactatggaggcgaaatggctgctattttgtacaatggcagcactaatggcagtggcaaacggccaggaatcagtgaagccattggtgaagatagttaaaggcaagaaactttgtgataaagggtgggaatgtaaagggtggtcacagttttgttgtaaccaaaccatttctgattacttccaaacttatcaatttgagaaccttttcgctaaacgtaatacaccggtggcacatgcggttgggttctgggattaccattctttcattacggcggcggctcagtatcagcctcatggttttggtaccaccggcggtaagctgcagagcatgaaggaaatagcagcttttcttggacatgtcggcagcaaaacttcatgtggttatggaatggcaactgggggaccattggctt

SEQ ID NO: 1186 - DNA, 340 bp, Gossypium hirsutum
  Clone ID: LIB3083-023-Q1-L1-E9
gagtatggacaaaatcataaggtcgtatagcataaaaaaacaaaaaacaaaaaacacagtgattcaagtggaaataacttaaattatacttagtatagcaacaggtattgtaataccaattgaaactaatgaaatatacttccaaattctttgataatcaatcaaactgaacctttgataataataaaaaaaaaaatcaaactgaaccttgtgaacctttatttcccactttaatctcgccgtccgcaccggcgctgcctctcatttcaccgctaaccggcacaccaacgcctttatactgaggcggcaccataacaccccctggggcagtataataaac

SEQ ID NO: 1187 - DNA, 241 bp, Gossypium hirsutum
  unsure (1)..(241): unsure at all n locations; Clone ID: LIB3083-023-Q1-L1-F1
atcaatatgcttgcagaggctccagatgcaatgttcactcacattcgtgggggggcatnatccttcatctggttcaattcattgtttacgatgttgtcctgctgaatatgccctatctccccacagtcttctgtcaattgcaatttactactcttacaattgaaaagacatggatattattaataactcttaccctaaaatccatcattccaaatgcactattttcaatggtaaaactgga

SEQ ID NO: 1188 - DNA, 217 bp, Gossypium hirsutum
  Clone ID: LIB3083-023-Q1-L1-F11
ttcactaattctacactaggtcaaaattatcattttcactcacttcaatatctataggaaacggctttattctaaggcggatatttaaaataaaatataaactgttcaatattcacatgtctaatcctctacacaacaaattcttatctattatataaataatccttaaatattacactacacttacttaaaacaaaattacctaaaatatccttat

SEQ ID NO: 1189 - DNA, 204 bp, Gossypium hirsutum
  Clone ID: LIB3083-023-Q1-L1-F2
gagagaactagtctcgagtgcgaaaagaaaaagaagagggagaagaagaagcatgaagatggccatgaaagcagcagcagcagcgacagtgattagatcttccatcatcgtcttagtattcctctcccttatggtatcgggtgcatggaatgaatgtgaaggcttgtcaaaatatttgtatcatctttatttttatatgcggag

SEQ ID NO: 1190 - DNA, 402 bp, Gossypium hirsutum
  unsure (1)..(402): unsure at all n locations; Clone ID: LIB3083-023-Q1-L1-F3
gcggagtaagtggccggagaaggcacggaagcaggcgagatcaggctccgccaccacatgcacctgctccagctcagcctcaacctgaaatctccgccaaccgttacgtctttgccgccgcaacgccttacccgccacaatacccgaataccaacccaccccagtactaccagtacccaaggtactacccccaccagccgcctgtgccgttgccgcttgaggcgccttacgatcatcatcaccatcatcgaggtggaccccacatagagcccgccaattggagtagatatgcttgtggaccgatgattactccaccgncgncgtatatagagcatcaaaaggcggttactataaaaaatgacgtaaatttgaagaaggaaactntgaaattcgaagctgatg

SEQ ID NO: 1191 - DNA, 433 bp, Gossypium hirsutum
  Clone ID: LIB3083-023-Q1-L1-F4
atttaaattcatttcttcaatattatatggaacagaaaggatggcaaataaaactgatgggtatgtggagttcgaacatcatacatttcacaaatccaattctggaatgcagcattccattccattatcgccactgatacacaaataataccaatcaaaactgctaataatatcataacgcatttccctccactctttgaacctacaacagttaatgaaacatccaacataacatgactactgttgctgtgccgcctgtgcaacatataagtcacctttaccaccaccattttccattgctggaacacttttcattactaatttttcatctccgacgaatgaatgtaacatcttgaagattttatgcatgcatgtacttgttcgtatttcatacaagggctttaggacctacaccatcactcaacataccact

SEQ ID NO: 1192 - DNA, 218 bp, Gossypium hirsutum
  Clone ID: LIB3083-023-Q1-L1-F5
ggaatttcagatatgattgatgatactgtgaacacaattgtcacagacatgcttcagtggccacatagaattgttgttccaattggtggtataccagttgatacaagtgaattagagctgaaaccggagggaaagctgacagttacagtagtcaaagctaatgatttgaagaacatggaaatgattggaaagtctgatccttatgtggttgtatacat

SEQ ID NO: 1193 - DNA, 416 bp, Gossypium hirsutum
  Clone ID: LIB3083-023-Q1-L1-F6
attatttggctctgtctccatggagagtgatagtcgggatggcaagtccaaaatggactgtgaagttatagaacagattggaagaggagctttcggagctgcttatcttgttcttcataaacttgagaaaaagaagtatgtgttgaagaagattcgcctggccaaacaaacagagaagttcaaacgtacagctcaccaagagatggaattgattgcaaaactaaataatccgtatattgttcagtacaaagatgcttggattgataagggaaacagcatttgcattgtaaccagctactgtgaaggaggggacatggctgagcttattaagaaggcccaaggtatgcactttcccgaggataaaatctgcaaatggatgactcaattactcttagccgtggactacctacacttcg

SEQ ID NO: 1194 - DNA, 438 bp, Gossypium hirsutum
  Clone ID: LIB3083-023-Q1-L1-F7
aagaacatgatggcagtactgtttgtatatctgggattgatggtttttggaataatttctcttcgttttctctatcgtttcatagacaacaatggcctccctcgaaactggctatttgttgggatgattcccacgttacttctcaacatccgtcgccctcatgataaagttgcccaaatcctcagacgaagcaatggtaccttcttttatagaggactttggtttactaacaccagcttcttagccacctccgatcctgaaaatgtgcgtcatgtattgagctccagttctgtttatttgaaaggtcctgaatggctgaaacagtttgatatcttcggcgaagcacttttcaattccgactgtaaggcatggaaatgtcacctcagagttttccatgcctacttgaataacccttaggttccgcaatcactttcaaag

SEQ ID NO: 1195 - DNA, 359 bp, Gossypium hirsutum
  unsure (1)..(359): unsure at all n locations; Clone ID: LIB3083-023-Q1-L1-F8
ctcgtgccgatacgatcctcgttgccgtcatcgtcgtggctgctttttacggcggcgcggtgacatctgcgcaggcaccggcagctggtccagcgatggccatgtcgccgtccgccatggcacctacgcctgactgtatgacgaacttgttcaacttatcggattgtttgacgtacgtggaggccggaagcaacttgacgaatccggacaagccttgctgtccggaattggctgggctagtggaaagtagccctcaatgcttgtgttatttgctggataagaacgcgacggcgaactatgggttcaacattgacatggatagagctcttaagcttccatatgttngccatgttaaaact

SEQ ID NO: 1196 - DNA, 366 bp, Gossypium hirsutum
  Clone ID: LIB3083-023-Q1-L1-G1
tactattccagagcaattattggagaacgtaactgttagtgtggatgcttcagaggctgaggaatttgctgaagtagcttcaaagcctttaagacaacttccatatgattcacccggacagaccttcgtggcatttgaaaagccagagggggtctcagctgttggaaagttttcaaatatgctgaggttcattgtaaaagaggttgacccaagtactggcgaggctgaggatgacggagtagaggacgagtaccaactggaggaccttgaacttgttgcagccgattacatgttgaaggtgggtgtctctaatttcaggaatgcatgggaaagcatgggtgtggactttgaacgtgtagatgaata

SEQ ID NO: 1197 - DNA, 385 bp, Gossypium hirsutum
  Clone ID: LIB3083-023-Q1-L1-G10
aaaaacccttgctgccgaaagacagaatagatgagttagcaacgtttatggacaaggtggagacttggttggatgagaaggaggcagagcaaaagaagacgtctggatatagcacacctgttttcacatctgaagaagtatacgagaaggtgttcaatttgcaagacaaggctgcaagtatcaagagaattcccaagccaaaacctaaagtcgagaagcccgtaaagaatgaaactgagaccaaatcagagaacacaaccagttctgagaaggatacctctgaaaatgacaaacccgcgggggactcagatagcttgaccaatgaaaaaataaaaggaggatccgagccccacgacgaagtattatctgtttttaacacaacaag

SEQ ID NO: 1198 - DNA, 423 bp, Gossypium hirsutum
  Clone ID: LIB3083-023-Q1-L1-G11
atttggccaaaaacgctatccaattaaccaaatccaaagcctgacttatctcaaatgaagtaactcaaaatacccaaaagtttaaaccccaaaataacaaaaagaagtaacttaaaacaccctaactcggatggattcaatccaaacccaatctgtgctgcgaatgaaagattccaaacaaaagagatctaagaacaaatcatccaaagcttcctatatatcagtgcaatcatctgagtgggatgggattcataaaattaccttggctctcatggtgatgtgatgacgaaaagcttacagtcgcgggaaaaagctaaagctggtagaagatgctgcttcatcgggtttacaccattatatagataaaccctagggcttatttatgatccagctataccttctaaatgatgggctaaaatttgg

SEQ ID NO: 1199 - DNA, 359 bp, Gossypium hirsutum
  Clone ID: LIB3083-023-Q1-L1-G12
gttaggtagttgtcagcatacttgttttgagtttagtggttggggataaagaaaaaatggctgaggagcataccaaggttggtggtgaggaagcagtggagagcaaggagcgagggatgtttgatttcttggggaagaaagaagatgagaagcctcaacctcaagaggaggtggtcgccacccagtttgagaaagtcaagatagaagaggaacataaggaagatgagaagaaacacagtctcctggacaagcttcacctatccaatagcagctccagctcttctagtgacgaggaagaaggtgaaggcggagagaagaagaagaagaagaaaaaggagaagggaaagaaagaacaagac

SEQ ID NO: 1200 - DNA, 404 bp, Gossypium hirsutum
  Clone ID: LIB3083-023-Q1-L1-G2
ggtttttcttgtttggttcttgtctttgttgtccaacagttgtttggtcaaagttgtgcatatttgttgattcatggtgagcctaccaactacgtttctgccgttgtggacccaggaatgacgaacccaaacgtcagagttgctttggaagcttggaatttctgcaacgaagttggctttgaagttcctaacgtgggaagcccccgctgggctgattgtactgatctttactgctcttctgacttcgtttatctgggtggcggccttgttaataatggcagtcagtgcagagtacttcacaaagtgaatgaaactgacaacaggttaggagctggtgataaatgtcctataatgggctttgagtcttatgctgaccctgacctgtttgcaaaggagaaagaact

SEQ ID NO: 1201 - DNA, 296 bp, Gossypium hirsutum
  Clone ID: LIB3083-023-Q1-L1-G3
cgacaatgtaacctctaagatccacgacaaggaacggagttcaccagatcatgagaggttgactgatgctctcaaacagctactagaggtgggacaccttgcaattatcatgttcagagggagctatccctgcattcggagttacccattcgtgggggcattcacatttctgggaaaactctcactgtaaggactattactttgtacgttataagttctgacaccatcgactatggttaagctaccaaccatgacatggatcggaatccaccatatcagcagatgtagattattgc

SEQ ID NO: 1202 - DNA, 325 bp, Gossypium hirsutum
  Clone ID: LIB3083-023-Q1-L1-G4
cagagctgttttaatggaccttgaaccaggaaccatgggtagcgtgcgtactggtccgcggggacaactttttagacctgataacttcatttttggccaaaatggagctgggaataactgggctaatggtcattacactgaatgagctgaattgattgattcggttcttgatgttgttcgaaaagaatctgagaattgtgcttgcttacaaggcttccagatttgtcattctttgggaggtgtaactggttcagggatggagacactgttgatatcaaagatcaaggaagaataccctgatcggatgatgctgactttctcggtt

SEQ ID NO: 1203 - DNA, 376 bp, Gossypium hirsutum
  Clone ID: LIB3083-023-Q1-L1-G5
gcaatttgcaccaagcaatcagtggttcatccggaccgtgaatagagtttttgagcatgcgggagatctggtcaatattaaggtagcacatagtttgatgcggttgattgctgagggattcggagaggatgatgataatgcagatagtaaattgagatcatctgctgtggagtcatatttgcgcattcttggtgagccaaagttgccatctgttttccttcaggtaatctgttgggtattgggggaatatggaacagctgacggaatgttctctgcttctgacattactgggaagctgtgtgatgtggcagaggcttattctaatgatgagactgttaaggcatatgcaactacagctctcatgaaaatatatgcg

SEQ ID NO: 1204 - DNA, 403 bp, Gossypium hirsutum
  Clone ID: LIB3083-023-Q1-L1-G6
ctgccttcgcttccctggtcagcttaactcggatctcggcaaacttgccgtaaacgcttattccattcccccgactacatttcttcatggtgggatttgcacctctcacctcacgcggttcccaacagtacagagccctcactgtccctgaacttacacagcaaatgtgggatgccaagaacatgatgtgtgcagctgatcctcgacacggccgatacctcacagcatcagcggtcttccgtgggaagatgagcacgaaagaggttgatgagcagatgatcaatgtgcaaaacaagaactcatcttactttgttgaatggatcccgaacaatgtgaagtccactgtttgtgacatccctccaatcggcttaaaggatgcatccacatttattgggaactctac

SEQ ID NO: 1205 - DNA, 400 bp, Gossypium hirsutum
  Clone ID: LIB3083-023-Q1-L1-G7
atcagtttcaaggtgtgttcttgaggaggctagggaatgctattcggctggttcctcaaccattgttgtggatcgtcgtggaagggcaatcgtattcgaacgagctatccgaaatacttaggaaaacaggcattatgtataggcatttggtgttcaaggagaatttcacagatcctgaagcagagctaaatcatcaacgaaatgttgcattgaagcacattgagcaacacaagctgagtgggatagttcatttcgctggacttaccaatgtttacgatcttgatttcttcaaagaacttagacaaattgaggtgtttggcacttggccaatggccctgctatcagcaaactagagacttgttgttattgaaggacctgtttgtgattcattacaagttat

SEQ ID NO: 1206 - DNA, 354 bp, Gossypium hirsutum
  Clone ID: LIB3083-023-Q1-L1-G8
ccagcatccacagctagtatggaagacaacctggtcaggaagagggtagatcctggtagctgtgctgttgaaatgttgaactctattagtgattccaaagaaatgtccactgattctgaagtaagtgttagcaatgtcgacaaacaggctgagtctaacagcattcctcaaaaggatgctcatgtggtgtcaacttcagagatggcatttgattctcatcatgatgaccaagaagagcccacttctgagcccagtcgaaaactaccagaagctgatatgatgactgtaagtaaaaaagatgcggagacactttgtgacatgcaagttcttgaagctgcaaaagatgttctggat

SEQ ID NO: 1207 - DNA, 334 bp, Gossypium hirsutum
  Clone ID: LIB3083-023-Q1-L1-G9
tataactacatgaatccttgaattccatcaacatcaaaaaccttatggggacggttcactcgaataaagtgacaaccctaaacataaactatatacaacgacatgcctacactaagcatcttcatacaccttactttttcttccaaaaaaactaacctaactaaaccctttaactactttatgaaggctctactcatctttccattacttactcctatgcatctattccttatccattccattatattcatatggaattcatcaactcaatttcactaatactatgctactaatactactaattcacagcacccatatataccttattcacatt

SEQ ID NO: 1208 - DNA, 362 bp, Gossypium hirsutum
  Clone ID: LIB3083-023-Q1-L1-H1
gtggatccaaatatatatccagagctggctcttgccctgagggggtccatggaagaggagagagcaaggcaagaagctgctgccaagaaggctgccgaggaatcttctaatccagaaaaagaagaggaagtgcaaccacagtccgattcgcagcatgcaactgaacacgttactgatcccatggatgaggatgatgctttgctaaagcatgcccttgcattgtcgatgaatatcccaggatctgattcttctgccggtgatgctgagatgtctgaggctaccaatgatcaggaattggccatggcacttcagatgtcgatgcaggacagtttaaaagatccatcatcagaatcagatgtgag

SEQ ID NO: 1209 - DNA, 399 bp, Gossypium hirsutum
  Clone ID: LIB3083-023-Q1-L1-H11
gtaacaccatggaacccgttgaaaaagttcttcgtgacgccaagattgacaagggctgtggtcacgacattgtcctcgctggcggttctactcgtatccccaaggttcaaaagatggtctctgacttcttcaacggtaaggaacccaacatgtccatcaaccctgatgaagctgtcgcctacggagctgctgatcaagctgtcattctctctggtgatacctctgaaaagactcaagatctccttctcttggatgatgctcctctctccttgggtatccgaaccgttcgtggtgtcatgactgccttgattaagcgtaacacaactgtccctaccaagaagtctgaagttatcttcacttacgctgattaccaacctggtgtcttgattcaagtctttg

SEQ ID NO: 1210 - DNA, 276 bp, Gossypium hirsutum
  Clone ID: LIB3083-023-Q1-L1-H12
gtcttaataaacgccttctatataccttccatatccatgtactgctctatttctacgtgggcgaatttttagtgatcgacaatcatagagtgcatttcaatccacatcgctcaagctcatattcaattccgaaatgcctgctgggaactttactgccttgaacatcgaatccagcctcattgccaaataccaagtgacaagactttccaaacaggtgacgattctattaacacctttatcagtgaaactggatctcgaaagcacttccctcgttct

SEQ ID NO: 1211 - DNA, 382 bp, Gossypium hirsutum
  Clone ID: LIB3083-023-Q1-L1-H2
taggacttgacaatgctggcaagaccactcttcttcacgtgttggaagatgagagattagggcaacatcaaccaacccagcacccaacatctgaggaattgagtataggcaaaatcaagttcaaagcttttgatttgggtggtcaccaaatcgctcgccgtgtctggaaggattactatgctaaggttgatgcagtggtatatttggtggatgcatacgacaaggaaagatttgcagagtcgaagagggaattagatgcgctgctttcagatgaagcattggccaatgttccttttctaattctaggcaataagattgacattccgtacgcagcttcagaagatgagcttcgttatcatcttgggctgaccaatttcacgac

SEQ ID NO: 1212 - DNA, 364 bp, Gossypium hirsutum
  Clone ID: LIB3083-023-Q1-L1-H3
tgagaattccaattctctctctctttcccgccctttttgtgactgtctttctcactgcacactcacccccttcttcaatatacgaccacttgaaacacaacggcctccctataggtctcctccctaaggggatttctgatttctcaattgaccccaacaccaaccgtttccacgtcaacctaacccaaccctgcaactccgaattcgagattcagctccattacgatttcaacatctacggtgtcttgtctttcggcaagatcgctaatttgtctggtgtctcccaacaagaactcttcttatggtttcctgtcattaacattcgcgtcgatgatccaacctacggtttgatcaacttcgatgt

SEQ ID NO: 1213 - DNA, 256 bp, Gossypium hirsutum
  Clone ID: LIB3083-023-Q1-L1-H4
ggctgccctctagaactgtggattctacatcaattcttactaggcaacctcttctattaacacccaatacacttctatcgagtcaggtcatctactaaccaatggataaaatctcacacaacattcatcactatactactctcatactcacctttaaatcattatctaaatcagatcaataacttctaaaatgaacccccctctccaaaaaatcaactatacatcccatatcaccatacatacactttactcataa

SEQ ID NO: 1214 - DNA, 350 bp, Gossypium hirsutum
  Clone ID: LIB3083-023-Q1-L1-H5
cccattcccatgcagccaggtgttggaccgagagctttggctagacctccattctttggtccagctcctgggttcatgattggtccaggttaccctggagctttgtgctatgtgcctatcgctcctccaggctccattaggggaccgcattctccacgctttgttccataccctataaatccagagactactgtgctccctccggagatggtaactttgagggctaatataatgaaacaaatcgagtattatttcagtgatgaaaatcttcaaaatgaccattacctgatttccttgatggatgatcaaggatgggttccagtctccacaattgcagactttaaaaagag

SEQ ID NO: 1215 - DNA, 361 bp, Gossypium hirsutum
  Clone ID: LIB3083-023-Q1-L1-H6
tagggtttcattcaactcaccgtcgacgaaccgatatggcgcctagtggccgacggcgtgcgattaacgaccagatctttgccaacgaaggccgtaactatggaaatctggtcagcttttctcagcgccgacgcaggtaggcacggcatggcgaagccgcttatgagcttgtcgatgtggggcgtgaagcgttagggctactgatggcgtttgcggccctggctgttggctagggttggccgaaagtttggtttggattttgagcctaaggtattttgggtttaggtttattaggttaggtatattgatgggttaataaatgtaaatgactggactttaatttagtacggttttattatta

SEQ ID NO: 1216 - DNA, 198 bp, Gossypium hirsutum
  Clone ID: LIB3083-023-Q1-L1-H7
gtttttgtttttatatattaatgtatatgaactgatttgatcttatttgaatagagtgagtaaaatacaatcaaatctttaatataggggtctcatacttttatcggtacaaatatattatgtagtaaccctaatccttagggaaaggatgaaagtagaaagaacattaaatggaaaaggtaccatacaatgattacc

SEQ ID NO: 1217 - DNA, 357 bp, Gossypium hirsutum
  unsure (1)..(357): unsure at all n locations; Clone ID: LIB3083-023-Q1-L1-H8
atggaaaagatctggcatcatacattctacaatgaactgcgtgttgctcctgaggagcaccctgtgcttctcacggaggcacctctcaaccccaaggccaatagagaaaagatgactcagatcatgtttgagaccttcaatgtacctgctatgtatgttgccatccaagctgtcctctctttgtatgccagtggtcgtacaacaagtattgtgctggattccggtgatggtgtttctcacaccgtgccaatctatgaaagatatgcccttccacatgccatcctncgtcttgaccttgcaggtcgtgatctaaccgatgccttgatgaagattcttaccgagagaggttacatgttc

SEQ ID NO: 1218 - DNA, 402 bp, Gossypium hirsutum
  Clone ID: LIB3083-024-Q1-L1-A1
cttctgcagtcaactccaccatattcctaagtttctctgtgaagctctttgcaatcccaaaaggagaaataaaaatcttcttgggtttgtcttttattgccttccatttttcttttattttcagaagaaaatggaaggacatggcagccgaggaggctcttgacttgtcaactttgcagtctcagctaagtgaaactcatgaaatgtggaaccaggagatggaaaaacaccaatgccaggtagattttttacaagacaaaattatggaggtaaaggcttgcttacaaggtccggaggaggaatcaaaagaggtagatgttctttggcgtatggtaaaaactacttgaactttgttggcttacttgaaatcaaaagcaagagtgatggctgttcctgatttag

SEQ ID NO: 1219 - DNA, 427 bp, Gossypium hirsutum
  Clone ID: LIB3083-024-Q1-L1-A10
cacagtcatcattgctggaagaggtgcagcaccacaacgccacttgttcacgggattctttaggttgggtatagttgccatataaccatttagaccagctgcaagaatatgatagcagatatgtccaagaacataggcatagtcacaatcaaattttgatggtaaggatccacgagcttgatagccaaagaagtggcaaatagcattaaatttcttccccttgtaagtgcctgctttcaggcgcttattaatttcattctctacaaggtgcgccagtagtttctccgtctcaatctgtgatagctgtgcagaatcgtctgacttatgttggagaagaagctgtttccttatgaaatgtggcaaaaattcatacaaagcagatgcccaaggtgataactgggaagaaatttatcagcagatacatttt

SEQ ID NO: 1220 - DNA, 350 bp, Gossypium hirsutum
  Clone ID: LIB3083-024-Q1-L1-A11
ctttgctgcaaattctcccaaatttttcagagggtctaggacaagggaaaagagtgagagagatccttcatgttcaaggtggacaatgtgggaaccaaatcggttccaagttttgggaggttgtttgcgatgagcacggcatagatccaatggaaggtacattggttcctcggatctgcagttggagcgtgttaatgtttactataacgaggcttcatgtggtcgctttgttccttgtgctgtgctcatggacttggagcctgttacgatggacagtgtccgaactggtccttactgccagattttcatgccagacaactttgtttttggacaatcctgtgctggaaaca

SEQ ID NO: 1221 - DNA, 383 bp, Gossypium hirsutum
  Clone ID: LIB3083-024-Q1-L1-A12
gttttctctccctccaattaagatgcagatctgggttgggaccctgaccggcaagaccatcaccctcgaagtcgagagttccgacacgatcgacaacgttaaggcgaaaatccaagacaaggaagggatcccaccataccaacaacgtctcatctttgccggaaaacagctcgaagatggccggaccttggccgattacaacatccagaaggagtccaccctccatctcgtcctacgtctacgtggtggcatgcagatcttcgtcaaaaccctgaccggctagaccataactttggaagtcgaaagctctgacaccattgacaacgtcaaggcaaatatccaagacaaggaatgcatcccaccagaccatcaaaggctcatat

SEQ ID NO: 1222 - DNA, 419 bp, Gossypium hirsutum
  Clone ID: LIB3083-024-Q1-L1-A2
cataatgatttgctcattccttccagttatcagtaactgtaatagaacaaaaggaggttggattcagttaaaccatggaaggcctcagccactgcaatacgtagtcaatgcatccttcttagccgccctatatagtgattatcttgatgctgctgatacacctggatggtattgtggtcccaatttctattcaactgatgtcctgcgtgaatttgccaaaacccagattgattatatccttggcaaaaatcctcgaaaaatgagctatgttgtgggctttggtaaccattatccaaagcatgttcaccatagaggggcatctatccctaataattagatcaaatataactgtaaagggggatggaaatggacggatacgtcaaaaccaaaccccaacacacttgtgggagccatggtag

SEQ ID NO: 1223 - DNA, 274 bp, Gossypium hirsutum
  Clone ID: LIB3083-024-Q1-L1-A3
ttctgatctatatacaatattattagaagattcatttcggaagcgggctcatataattgtgttattgggcttttgttttacgtttggattggttcttattttcttatatatacctcgggatttttcatttgtatttaatctggtgaattagctgtgtcattctgtagtaatttcaagtatcaaaattgaaaaaattgtttcttgaaaattaattataatacttggggggcctaggtcccaattagccctatattgagtctttttacaatttact

SEQ ID NO: 1224 - DNA, 434 bp, Gossypium hirsutum
  Clone ID: LIB3083-024-Q1-L1-A4
gaaacaggcgacgcattgaaggtggacttatggaaccagcctgaatacatagaaaacaatgcaaccttagctttccaggcagcactctggagatggatgacaccggtgaagaaacaccaaccgtcggcccacgacgtgtttgtcggcagctggaaaccgaccaagaacgacacgttggccaagcgggtcccggggtttggagccaccatgaatgtgctctatggagatcaagtttgtgggcgaggtgatgttgacaccatgaacaacatcatctctcattacctttcttaccttgacctaatgggagttgggagagaagaagcaggaccccatgaagtgctcacatgtgaagaacaaaagcctttcactgtatctccttcttctgcatcatcatcatcatcatcttgatctggttttggatttgatattgggtg

SEQ ID NO: 1225 - DNA, 446 bp, Gossypium hirsutum
  Clone ID: LIB3083-024-Q1-L1-A6
gctaatatgagtgattaacgcagccttgaactagaggaggtgttgcagacatctcatgggaaattggagggtactgacaaaaaggtcaatgagttggagttgttacttgaagcagagaagtacaggattcaggaactcgaggaacagataagcaatttagaaaagaaatgtggagatgcagaaggcgagtctgttatgtactctgataaggtatccaaactctcttctgaacttgaggcattccaagctagaacatcgagccttgaaattgcactacaaatggccaatgagaaggaaaaggaattgacagagtgcttaaatttggcaacagatgagaagaaaaagctagaagagacatcgcaaagctccaatgaaaagcttgcggaagctgaaaatctggtggaaatcttgagaagtgatttaaatctgacacaacagaaactggg

SEQ ID NO: 1226 - DNA, 391 bp, Gossypium hirsutum
  Clone ID: LIB3083-024-Q1-L1-A8
gttgatgggggccctaatatctcgattaatcttcctgggtctcagagattatggtataacggcacgacagtttactttaatcgtgccctttatttatcctgaatatgttactccgactgtaaagaaaatatcgactaaagaaaagatacatttgattgtgaactcctgtatcgtaactggcatcttgtgcaaggctactagccatacttttaaggaaacataacggcatgctgtgaagttatcgtttttgtatgaatctgaagttctgacttggtctaaaacggactttactttcacatatagcgtctcttccagtaacaagttcttagagtgtccttttacagtctgcacctttatatgatcatgaccaaaaggatatgttctgtgtgta

SEQ ID NO: 1227 - DNA, 409 bp, Gossypium hirsutum
  Clone ID: LIB3083-024-Q1-L1-A9
agcaacgcatagccatggctgcctcaccaaaactcttgtgtatgtctatcctggggctttgtgccctcttctccatgcaaatccatgctagagagtacttcagcaaattcccaagagttaacatcaatgagaaagagacaacaaccagagagcaaaagcacgagaccttcgttccccagaccacccaaaagccagaagaacaagagccaaggttcattcctgaaacccaaaatggttatggcctttacggccacgagtcaggctcaggctcaagctcaggctcaggctcaagccggcccagtttcaccaccaaagaaacctatgaaccctatgtcacccctgttagatttcaccctgatgagccctataacagcattccccgaatcctccaacattaaagacacttact

SEQ ID NO: 1228 - DNA, 412 bp, Gossypium hirsutum
  Clone ID: LIB3083-024-Q1-L1-B1
tttttgtgaaaaatccaaactcaaccctacgggaaccagtgctccaaatctacacttgaaaaaacaaacagtttttacattctatgctcaagtaacaacatttggggggaaagatgaaccccgcaattatcaacaaatcttacactttgaaagcaaacggtttttacatttctatgcaagcaagctaaattacagatgccaccagaaccagacactaccatcacaaatttttataatctaattccgaatccttatatctcagcttctctcatgtctgcttcttttcaactgagtatctaatgttgataggatctgaagcattgacattcccccagatataacaatttcaattcctttacggactgacagattcaatctgattacatccttggtgttgatgaggaatatatca

SEQ ID NO: 1229 - DNA, 418 bp, Gossypium hirsutum
  Clone ID: LIB3083-024-Q1-L1-B10
gcacattgagcaacacaagctgagtgggatagtggatggcgctggacttaccgatgtttacgatcttgatttcttcaaagaacttagacaaattgaggtgtttggcacttggccaatggccctgctatcagcaaacgagagacgggttgtgattgaaggacctgtttgtgattcatcacaagttataggatggcacctaaggaagatgaataaccagacagatgcagaaacagatgctgatacgaaacctcctattcatatatcaagttttgcatttaacagttcaatcctttgggaccctgagagatggggacgtctcacatcggtccaaggcacttcacagaactcactgaaatttgtgaaacatattgtaatggaagatgagggcaagttaaagggtatcccaccggaagagtgc

SEQ ID NO: 1230 - DNA, 397 bp, Gossypium hirsutum
  Clone ID: LIB3083-024-Q1-L1-B11
ggaaaagcctaaagagcacgagaaacacgaaggggaagggcctgaaataccggaggacaagaaaaagcatgatgagggtaacgaacataaacatgagttcccaaagcatgaaaaagaagaggagaagaaacctgagaaaaaggcagagtaccttgagtgggctaaaatgcctgaatggtcgaagtccatgtttactcagcctggctcggccactaagccttgaatcatatgacactggtgcatgtgccatcatcatgcaataattacatggtatatcgtaatatatagataataaaaaagatggtgattgggaaatgtgtgtgtgcattcctacatgcactaatggtgaatctctttgcatacatagaaattctaaatggttatagtttatgttata

SEQ ID NO: 1231 - DNA, 410 bp, Gossypium hirsutum
  Clone ID: LIB3083-024-Q1-L1-B12
tatgctttctattctgttaaccatggttcataacataggccaccctttcttgcttctccaacttttacttatttgtgtctcaccaatgattggtagccacaccgtctcatcagcaactcgacgtttattcgcgacacagacaacctcatcgacaactgccacaattatcttcaaaatacgacaaagcacgaatagtctgaatatgaaaagctacaatacacacagccaaagtatcatgaatagtacccaacacatgacaagcctgaaatgcactatgaaaaacacaaaccctgcacacaacaataacagtatgagacagaagaactcgcattactgaaaccggaaaagcctaaatagcacgagaaacacgaatttgaatatacgatcataccctaatacaaggaaaagca

SEQ ID NO: 1232 - DNA, 418 bp, Gossypium hirsutum
  Clone ID: LIB3083-024-Q1-L1-B2
aactaattcagattagcatgtgacatagtagggtcttagggaggattagttggggttggaggttgttgaacagccagattagttctaatgtattgattgaaacaatcattcatcatttgataaaaggcttgtctagcctctccatcatggctactcgtagctggtctagagtcggatggtgctgtcccttacatgggagcaagcacattactctcgacatcgtcagctatgggtcattcaggatccatttgctatataaaaacacattatcattgtcaggattcatcacactattgttatttataaatatggcatgtatagctagactcacatatacaatgttagtcttagaatcgactaaatcgtagctctgataccaactaaatgtaacacccctaactcgtatccatcgcttaat

SEQ ID NO: 1233 - DNA, 433 bp, Gossypium hirsutum
  Clone ID: LIB3083-024-Q1-L1-B3
aaatggccaccattgatgttcctgagcaggtttcggttcttgcagatgcagaagctcttagaaaggcttgtaaaggatgggggacagatgagaaggcaataatttcagtgttgggtcacagaaatgcagttcaaaggaagcaaatcaggcttgcttatgaagacctttaccaggaagatctcatcaagcgtcttgaatcagagctttctggtgatttcgagaaagcagtgtatcgttggatattggatccagcagaccgagatgccgtgttagctaatgttgccataaagaaattaagccctgatcaccatgtgatcgttgaaatttcatgcaccaaatcccctgaagagctcttggctgtgaagagagcttatcaggctcgatacaagcattccctggaagaagatgtggctgctcataccaagggagacac

SEQ ID NO: 1234 - DNA, 432 bp, Gossypium hirsutum
  Clone ID: LIB3083-024-Q1-L1-B4
cacatgctgtgcatcaacgctttggcattgagtgggaggtcattaacgatttgaggattgacatggctaggatgcagcaaaggatggataatatgcagaggatgctggaggcttgtatggatatgcaacttgagatacagcggtcaataagacaagaagtttctgctgcccttaaccgttcagctggttcacaaggggtgattgacgacaacttgccgaaggatgcttctaactgggacaatgtcaggaaaggcatctgttgtatatgctgtgaaggcaacattgattcattgctgtacagatgtgggcacatgtgcacgtgctcaaaatgtgccaatgagctggtccatgttggaggaaaatgtccaatgtgtcgggcaccggtagttgaggtcattcgtgcctactcaatcctttaatatgaagagtatt

SEQ ID NO: 1235 - DNA, 410 bp, Gossypium hirsutum
  Clone ID: LIB3083-024-Q1-L1-B5
gaaatatcccattgagcatgggatcgtcagcaactggggtgatatggaaaagatctggcatcatacattctacaatgagctccgtgttgctcctgaggagcaccctgttcttctcacggaagcacctctcaaccccaaggccaacagagaaaagatgactcagatcatgtttgagaccttcaatgtacctgccatgtatgttgccatccaggcagttctttctttgtatgccagtggtcgtacaacaggtattgtgctggattccggtgatggtgtttctcacactgtgccaatctatgaagggtatgcccttcctcatgccatccttcgtctagaccttgctggtcgtgatctcactgattctctgatgaaaattcttactgagagaagttatatgttcaccaccactg

SEQ ID NO: 1236 - DNA, 439 bp, Gossypium hirsutum
  Clone ID: LIB3083-024-Q1-L1-B6
gcagagttttccatgctttcttgaatcaccctcagtaggggcaatcactttcaaaggttctccatcaacgtatagaggaagcgcttgttaaagttcttgaatatgtttctggacgagagatggtggtgaacttgcaagatttgttggtagggcatgcgtttgacattggatgcataacgggcgtgggcttcaaccctggcctactctccattgaattccctgagaatcggttccaaaaagccatgagtgatactctggaggcagctttttacagatatgtagtgcctgacagtctttggaagttgcagagttggcttcagattgggaaagagaagaaacggagtgatgcttggaaggctcttgatgatcttttaacacaatttatatcgacccaacgccacaaatccaccaaatcagtggcatcctcaggctcaaatga

SEQ ID NO: 1237 - DNA, 286 bp, Gossypium hirsutum
  Clone ID: LIB3083-024-Q1-L1-B7
aactagtggattctggatcctccatcttcataattctcactagttctctgtattccaaaggatataacaagtggtgtcaagtggattaataaggggactttgcaccattttttgtctgttttcatcttcattttatacacatttattgattttttccatattgttaatatcttatctgaattcccatcttaaaaagctttcctccttatcttatgaatatccacttttattgtatcattttttaacgtttcagacatttaataatgctccactttctccttatatt

SEQ ID NO: 1238 - DNA, 419 bp, Gossypium hirsutum
  Clone ID: LIB3083-024-Q1-L1-B8
tagttcaaagccactgatcaaaaatatcacttttcaacccaggcacaggtcaaacataaaacagcgtaacatacagttaaccatttcaagtctttaacaagcttcaaagaatataatcttgcataacacggtatcaacatgtaatataaagacatcgttagcacactcaatcacacgtacttcttactactcatcatcttcaccctcatcaccctcagctgactcagcaccaacttcttcataattcttatacaatgcagcaagatccttactagcctttcagaatactccttattccataccctcaccaacataccagtgaactaaagcacgtttggcgtacataagatcaaacttatggtcaatgccagagatgactttatcaacactgcttcaattagaaatcatgcaaacagctc

SEQ ID NO: 1239 - DNA, 183 bp, Gossypium hirsutum
  Clone ID: LIB3083-024-Q1-L1-B9
gcaagtttttacccattgctttttcatctaaggggtagggctcaaattaactgatatcatctacttaaattacataagctactttttcgtctcatgatactacccataaccactcaactatacttttcatagtgggaccaaccttcctgatacatgttacaacctacattcacctttacaaat

SEQ ID NO: 1240 - DNA, 424 bp, Gossypium hirsutum
  Clone ID: LIB3083-024-Q1-L1-C1
gtcgctgaaatgccaagggatggaacaagtaggttcagggggatgaatggggagactttgcaccatttcttgtctgtttccagcttcagtgagtacacagtggttgatgtggtccatgttgtgaagatctcatcggaattcccagctgagaaagcttgcctccttagctgtggagtatccagtggtattggagcagcatggaaggtggcagacattgaagaaggctccactgtcgccatatttggcctgggagctgttggacttgcggttgcagaaggggcaaggttgcgtggagcttcgaagatcataggtgtagatttaaaccaagaaaagtttgagataaggaaaaagtttggagtcagtgaattcatcaaccccgcaacatgtggagagaaaaaagtcaatgaggtgattaaaggaaata

SEQ ID NO: 1241 - DNA, 415 bp, Gossypium hirsutum
  Clone ID: LIB3083-024-Q1-L1-C10
gcgtcatgcagttaaagcaaagaacgcggcgtatgatcggatgacccttctgcaatcttacacttactttctttgtctcctcctcttgtttctctcttacaatctcaccttctttctttctttttcttcctatttttggccttctcttggccactgtgtcttcttttaacaacaatcaacatatataaccatattatatacatacatacacaagttctttccttctaaggaagccatgactggcaaagaaatcctccacaagatgaaggagaaagttcaagaaaaagttggcttaaacccttctagtaatgctgaatctggaaaagggaagagtaagatgtcgaagaatataacgcatggttatcatttagtgaatgggaaagcgaatcatccaatggaagactatgttttcgcg

SEQ ID NO: 1242 - DNA, 319 bp, Gossypium hirsutum
  Clone ID: LIB3083-024-Q1-L1-C11
gtctgccacagactacaccaatgacgctcaatgtgaagggctcacccttcggtaatctaacactaactatctcatgttccttctcaacttactctctaacaaaatcacctcctttctatcttcttaatcctattcacaaactcctctaatccactatgctttattctaacatcactcaacatatatcaccatattataatacatacatacactaaatctttccttctaaagaagccattactgacaaatacatcttacacaagactaatctgcaagttaaagaaatagtttacttaaacccttctaataatgctcaatc

SEQ ID NO: 1243 - DNA, 344 bp, Gossypium hirsutum
  Clone ID: LIB3083-024-Q1-L1-C12
tggagtcttaggagttggttttggtggcctaacgggtggtaccaaaacaccggcttcaccacttccttcttcacgatcctttcctttccgtgttcaaatctctgttcctgttgaagataataagaggaattatacccttcaaatttcacaatatgctttcaatgctgccctgcatttgatgcctgtaggtgtaaattcttccttctcgtgcttttaaatctcctggtgagacaacctatttccatggattcagttaacgcttctcacatgttatacatatactgtaatgagtttatctactattttagctctgggtgacctgctataattactcattctaatta

SEQ ID NO: 1244 - DNA, 437 bp, Gossypium hirsutum
  Clone ID: LIB3083-024-Q1-L1-C2
gttttggttttttttttttttgctaaaaatgtgaaaatgttgtaaattatgggtcaatcatattaacacaaacttcaggttcatggcacattacaaccagaatggaaccaaaacaaatcacatcgaacaattgaggcattaaataaagaaattcatgaaagcgtactgaaattaaaagaaaaaggattgaaaccaaaccatcatccatcagtttgtatttatatgatatcgatataaacacttgatgacggtgagttttaacatcattttcttcttcattgttgatttcccatcgacactaatgtccaccctcactgtaagactactacgaaagcacccattacaaccatttgccaacttcaaaatccaaaaagacaaaacagcaaactgactaagagaaaccgtcctgcataaactggaaaagcggcacgaggggg

SEQ ID NO: 1245 - DNA, 434 bp, Gossypium hirsutum
  Clone ID: LIB3083-024-Q1-L1-C3
tttctgcccatgagttcgtgaatgcctatgcggcccaggtcaagcgctccggcgagattgagcttcctccatggactgatattgtcaagggtggtaaactaaaggagcttactccatacgaccctgattggtactatattagagctgcttcgatggcgaagaaaatctacttgagaggaggtcttggtgttggtgccttcaggaggatatatggaggtgccaagagaaatggcagtcgtccacgtcatttctgcaagagcagtggctctattgctcgtcatattttccagcaattgcaaaacgtgaacatcattgatcttgataccaaaggtggctccaaaatcacatcaaacggccaactggatcttgatcatgttgctggaatgattgcggttgccccttgaaaaattacagtaataattttctatggctag

SEQ ID NO: 1246 - DNA, 437 bp, Gossypium hirsutum
  Clone ID: LIB3083-024-Q1-L1-C4
gttttgtttttttttttttatataaagaaatagcctttgattttattgaactgaaatctaaaatacatgcccttatagtttgcaacatttaagtcaaaatttagcagcaacatgatcttacaaacattaagaaaccagcatgtttaagaactatttcaaacctgcaatttattggaattaaaaccttttctttttctttctggaagtacccattgacaaactttgtttcatgtcctttttgcttctaaaatcttaaatcacagcttatgaatggtttccatgtcacttacttccttcagggtccctttctcgacatgatcccaccacttgaacaagaaattatccacgacgagtctgaaccatggtgacagtttcaaaccatcttcaccagcatcagctttacgcagtaactccttcagttggtcacggttcacgta

SEQ ID NO: 1247 - DNA, 434 bp, Gossypium hirsutum
  Clone ID: LIB3083-024-Q1-L1-C5
tatcaatcaaggcttggccttctggttacgggtaagctggattacggtacgctctctcaaattttagctccgagatgtggtatccccgacggagaatcatcatctcccacattgcatgtaaataaaaactacgtgttctttcccgggaaacctcgatgggcgcgtcccgttccaatgactctaacgtatggaatctcccccgacaatttgatccattacttgagcttatcggatataagaaaaacctttaaacgagctttctcgagatgggcatcagttattccggtcagtttcgtagaaacaaatgattatgggttcgctgatatcaaaatagggttctacaccggtgatcatggagatggggagccgtttgatggggtgttgggaatcctggcccactcgttttcacctgaaagcgggaggtttcatctcga

SEQ ID NO: 1248 - DNA, 428 bp, Gossypium hirsutum
  Clone ID: LIB3083-024-Q1-L1-C6
taggctctcaggtccctatataacatttttcagtgctgggttttgaacagcccgtttggtgcaatagaggttggttaataagattctcaaatctacaaacacatcaatgcaatggtaacgaaatcatcacacaaacacatacaaaaagaaactataaatcgaattttcttttctttttccagatttcacttcaagtcctcaacaaccaaacagaactttaagtaaattttgcagaactagaaggaaacatttagaaattcggttccaacaaaagaattacagctcctttcagttcgttctatcgagccattgtcacaatcacccgtacattgacattttcagaaattaattaacgctaagcaaccaaatccaagtaattaaaaaaaaacgcaatcgaaaacgaaaggatttaaactcacgtggaaaaa

SEQ ID NO: 1249 - DNA, 150 bp, Gossypium hirsutum
  Clone ID: LIB3083-024-Q1-L1-C7
tagcaacacgatatgaccttataaacatgttcaccttccatggctacggttactctgaaagggccgacgaaaatttactacttaatcatttatgtctccactctcattcaagatcttaacttcaactctttccacatcaacttatctaca

SEQ ID NO: 1250 - DNA, 438 bp, Gossypium hirsutum
  Clone ID: LIB3083-024-Q1-L1-C8
gtcgaatgcatttttctctaggtgctggctgcagtgctgctgcaggacctgtggggagagtgctggaagcagatcttcgagccggggatagtgggtccggcatgtgctacagttatagttgtagcaaaggggcgtttgttggtgtgtcattggaagggaacattgttgcaacaagaatggataccaacctacggttctatggtgatccgtatctcaccactgccgacatattactggggaccgtggacagaccaaaagctgctgagcccttgtatgctgcactacataacctgtactccagcctacgcttttagttccggcactatttggcgaagcagcttgtgaaacaagcaacagcttgagtgcatggtgcatttcttgccctggatgatttgtgactctatggtttatagtttatatgcatgtggatgatggatt

SEQ ID NO: 1251 - DNA, 226 bp, Gossypium hirsutum
  Clone ID: LIB3083-024-Q1-L1-C9
caacgatgtcctactactcgaagaatacctaagatgaggtttactaggatgaagaacatcacctcacccacttacacatcattgatacaatcgtcgctctatacctaacagtcggatttttgatctctgcattaagactagctactcttacgattcatcttccgatggccactttgattactcacataatgataactctatcagttacactctctaagcttatgcc

SEQ ID NO: 1252 - DNA, 435 bp, Gossypium hirsutum
  unsure (1)..(435): unsure at all n locations; Clone ID: LIB3083-024-Q1-L1-D1
gttggatgagatcatggactttggctacccacaaaatgggtctcctgaaattgtaaagctttacattactcaggaaggagttcggtccccattttcatccaagccttcagataagcctgttccaaatgcaactttacaagtcactggtgctgttggctggcgaagagagggacttgtttataaaaagaatgaggtgtttctggacattgtggaaagtgtaaacctactaatgtcttcaaaaggcagtgttttgcgttgtgatgttacgggaaagattcttatgaagtgcttcctttctggaatgcctgatctgaaattgggcttgaatgataaaattgggcttgagaaagaatcacaacttaaatcccgtcctnctaaaagtggcangacaattgagcttgacgatgttactttccatcagtgggtaaatcttac

SEQ ID NO: 1253 - DNA, 409 bp, Gossypium hirsutum
  unsure (1)..(409): unsure at all n locations; Clone ID: LIB3083-024-Q1-L1-D10
cagagagctgtttgcatgatttctaactccaccggtggggctgaagtcttctgtggcattgaccataagtttgatcttatgtatgccaaacgtgccttcattcactggtatgttggtgagggtatggaagaaggagaattctcagaggctcgtgaggatcttgctgcattggagaaggattatgaagaagttggtgctgagtcggctgagggtgatgagggtgaagatgatgagtactaagaagtacctgtgattgagtgtgcgtatgatgtcttttattacctgttgcttccgtgttatgcaagcttctattctttgaaacttgttaaagacttgaaatggtttactgtatgttatgctttttcatgttttaattgtgtttgggttgaaacttgatatttntggtgtc

SEQ ID NO: 1254 - DNA, 397 bp, Gossypium hirsutum
  Clone ID: LIB3083-024-Q1-L1-D12
ctctattcacaccccattatataacttggtactggcctgaggctttcaccatgaggaaacagtgcaaatctcaatgcattaaccatggaaggtattgtgcacctgatcccgaacaagattttagctccggttatgaggggaaagatgtcgtgattgaaaacttaaggcagctatgcgttttcaaagtggcaaatgagagcaataagtcctggttgtggtgggactatgtgacagattttcaaataagatgccccatgaaggagaaaaaatataacaaggaatgcgccgatgctgttatcaaatctcttgggcttgacagttaaaagattgaaaagtgtttgggagaccctaatgttgatgcagataatcctgttctaaaagaaaaacaagatgccca

SEQ ID NO: 1255 - DNA, 373 bp, Gossypium hirsutum
  Clone ID: LIB3083-024-Q1-L1-D2
aatgttttgttttataatttcgttttgctaaacatggaataggttacttttaaaagtgagaaggttacatatctaaaccaaatttataatcctaattgtcaatcctacataaaataatccattaataaaacacaccttacattacaaaaatcctaatataatactaacaaattaattccattctaacaattatactattattctgcacattttacaaattcctaacttacctaattcttctaaaaccaataaccatccattaaaacatacccataacaactatattaaatgaattctttctacaattcatccactaaaactattcttaaatcaaaaaatttctacttaaaaaaactttcatctacaattcatt

SEQ ID NO: 1256 - DNA, 413 bp, Gossypium hirsutum
  Clone ID: LIB3083-024-Q1-L1-D3
agaatttataatgccaactaaagttgtttctgaagatagcatagcaccagatggatttggtaaagatattcctgagacaacggtccatcctgtgccgccagtgcctagcaagacggtaagattttcgactgtaaatatcgaagagatgggtgcaacgaatgagaaatatcagtcgcctaggattcctgaaatagagatctcaactccaccttcaaataatggaatggacaaggaaccaatgcatagcacgaagaaatggaacaacgaggagagccctcctaaagcagccaaagggtttagaaagcttcttttctttggaagaaaaagcaaaaactatgctactgcttagtgtatgcttgtctttccatattgcttatgtttcgggttttcagttgtttcgggtggaacgtacc

SEQ ID NO: 1257 - DNA, 436 bp, Gossypium hirsutum
  unsure (1)..(436): unsure at all n locations; Clone ID: LIB3083-024-Q1-L1-D4
gttttgtttttttttttttattcaaaattacagatttggcactgaataattaagtttctaactgacggttgatgtaggtataggtaaatttgcaatttagtcattcaactagtaataagtttacaagttgaatacccaatttcaaaaatttataaattggtcacagaactattaataagtttacaaatttacactttgatcactcaatctttacaccattactccctaatctaataatccaaacaatattgataataactcaaccccaaaccttaaagtcagtgtaaaccccatgcctcaatttaaactcaaccaactcgataatccttcattcttaactcactcaccatttcttcttcgaccaaaaccataattcaagaaaatccaccatcaagctattctcaaacaaaacanataaaaagcgaataaagaaaaa

SEQ ID NO: 1258 - DNA, 446 bp, Gossypium hirsutum
  Clone ID: LIB3083-024-Q1-L1-D6
gcatcctacatgatttcagaactaggaccaatctttagtttttttttttcgattcaaaattactgaattagtacacattaaataagattctaactaacaactcatccatatatatgtaaatacacaatctaatcattatatactaatcatttttattattaaacaacaatttaaataaataaataccatctaaaccactctataattcatcattcaaattcacactttctacattataattgtacttcatttcaaactcttatactaatctaatcttccaatcttttactttatccctctacacttatcctatttaaactatctattctctaactttatctccatcacatcattatctcttccttcaaaccacattcattatatcaccttcaaataacacccttattaatatttaccaccatcaatctaatcttaaacataactta

SEQ ID NO: 1259 - DNA, 305 bp, Gossypium hirsutum
  Clone ID: LIB3083-024-Q1-L1-D7
ctcctgccttgataatcagagtatgtatgctaaggaaggggatgggagttaataaggctgtattgagtcagataatcctagttggattgatcccaatccggagactcagtttaggaggaataattcatgtgattttaggtccgattcggatattgatcggtcagatgatcgtaaattaagtgatttctctttgaaaaaagacttgtagtccgcttataatgaagtttgtttacaagggattagttaaactgaagctagggctgactaattgtgtacatttaagccttatggtgccaaacttactg

SEQ ID NO: 1260 - DNA, 434 bp, Gossypium hirsutum
  unsure (1)..(434): unsure at all n locations; Clone ID: LIB3083-024-Q1-L1-D8
ttaacgcctttttcttctgtttgctgagctctctccccgaacatgaccatggcagatagggtataccccaaacaagcgacaaatggcaccgccgccacatccaacccttcttttccggccactaaagcacaacaatacggagccacccgccctgtctaccgtccacaacccgaacgccaccgctaccgccgctcttgctgttcttgctgcctttggaccaccatagctatcctcgttctcatcctcatagccgccgtagcttctgctatattgtacgttctttaccgncctcaccgtcctactttcactgtttcctccctcaaaatctcggcacttaacgtaacctcagcttccaagctgatcaccaacatcaacctaaacgtcacagccaanaacccaaacaagaaagtcgtctacagttacaacccaatcac

SEQ ID NO: 1261 - DNA, 346 bp, Gossypium hirsutum
  Clone ID: LIB3083-024-Q1-L1-D9
ggttcgcaagctccaacaactccactccatactggtacgaccatccaccctgccagggaggatcaacatatcaaggcagaatcaactagtaaccaccgagattgtacttacaacaaaggcttaaagccaatgataactgacatcataatcatttatttcatatttgaaccatgtcaagtctcttagattactctacttctcaagcagtgtcacctataacgtacttatactatatgcttgattctcaaaataccttttgtatttctcaaaattccttatactcaaaacttattacttaataatctaattcatcgattgaatattcctttttaaaaaaaataataca

SEQ ID NO: 1262 - DNA, 353 bp, Gossypium hirsutum
  Clone ID: LIB3083-024-Q1-L1-E1
attttatttaatcttttcttcaagttcccattgtccccgttgaccagtgttgaggttcaatcagctgcaacaacattgccagagaacgagacaacaccataggtaaccaatgttgtggaaacgccaaaagaggagccagctgccgcacctgtagaagctgagccggagacaacatcagatgctccggctgcggatgaaaccgaagtttccatagccgaagctccagctgaagtcgataccaaagaagtggtagaagaagaagcgaatgctgctgatgaatctgagaaagcaaatgatgatgtaaaggattagaccccggaggtgcatacagaaacagttacagaagatgccaa

SEQ ID NO: 1263 - DNA, 415 bp, Gossypium hirsutum
  Clone ID: LIB3083-024-Q1-L1-E10
ctttgcacttggagctatgattgctaggtacatgagaggctctgactcgacggagccagcttggttttatcttcatgttttctgtctaacatcagctgatgccatatgagttgctggctgcagaactggtcttaagcttgaaagtgaatcctgtgttatcacatatccgggtcatagatacattggcattgcccttttcgtcctcgctactgtccagatctttgctacgttcataaggcctaaaatggaccactagctctgattctactgggacatttaccaccacagttgtggatactcgatacttgtcctcggcttcatcaatgtgttcaatggcttcaatatcttgaagcctgagcataattcgaaatcggcatatattattgtgatcattgctatgggcgatattttgctg

SEQ ID NO: 1264 - DNA, 402 bp, Gossypium hirsutum
  Clone ID: LIB3083-024-Q1-L1-E11
ggttagggttcctatggcagagtttattatgcagattgggacaatggaaaagctgtggctgtgaaaaagctagatacttccgctgagcctgactctactgtagagtttttgacccaggtttccatggtttcaagattgaagaatgaaaatgttgtcgagttgcaaggttactgtgttgaaagaaatctccgcatccttgcatatgagtttgcaactatgggatcactacatgacatattgcacggaaggaagggggttcaaggggcacaagcaggtccagtgctagactggatgcagcgggtaagaatagctattgatgccgcaaggtgcttggaatacttacatgagaaggctcaacctgctattatacacagagatattagatctagcaatgtgcttctc

SEQ ID NO: 1265 - DNA, 381 bp, Gossypium hirsutum
  Clone ID: LIB3083-024-Q1-L1-E12
gagaactaaaggttgaaaattaataaattacatcttttgaagaaagcttttattggcacaaaacagaatgcaccaaatacagacaaataggaattgactttttacttcacaattatatgcaatgcacacttatttttccctttacaattaaaacccaatttttgcatggctctattatttgtataaagggaggtacatatgtacgtaaaataggacacgaaacgtcacttgggtttggattttcagatgatggacatgcactccggtggggtaaccgggtaacgggacttgtcggtgcagtaatcgtatatcacgtggttcatacgaacccacctatatcttttagcttccatggcattaatggcttgataagcagtgccc

SEQ ID NO: 1266 - DNA, 437 bp, Gossypium hirsutum
  Clone ID: LIB3083-024-Q1-L1-E2
cttcgtatgaaactcgacctcgatccaggaagtgttcgggcgagttagtgaacaatttaccgctatgttcaggaggaaagctttcttgcattggtacaccggtgaaggtatggacgagatggagttcaccgaggctgagagcaacatgaacgatctcgtgtctgaatatcaacaataccaggacgctaccgctgacgaggaaggcgaatatgaggatgaggaagatttggatgaagaacacatgtgatgaaagcgaaaaccaaacgaagttgtcggtaatgcagcatatacaggtatgtgattcgagctttgtgtttggatttgtatgtaatgagtaatgaaagtgtcttttccctatttttccctttcacgactttgctttttttggtttctatttgagagagtaatgtataatatattcgaaaatagtaatgtaa

SEQ ID NO: 1267 - DNA, 420 bp, Gossypium hirsutum
  Clone ID: LIB3083-024-Q1-L1-E3
ggcatgtcttcctcagaagacccgtcaaacaggaatgaagttcaacattgcaaatccgactactggttgccaaaaaaagctggaaattgatgatgaccagaaacttcgagccttttttgacaagaggatctcacaggaagtcagtggtgatgccctcggtgaggagtttaagggctatgtattcaagatcatgggaggctgtgataaacagggttttccaatgaagcaaggagttctcactcctggacgtgttcgtcttttgcttcacagaggtactccctgcttccgtgggtatggtaggagaaatggagagcgcaggaggaagtcagttcgtggatgcattgttagtcaggatctttcagttttgaacttggttattgtgaaaaagggtgaaaatgatcttcctggactgactgacac

SEQ ID NO: 1268 - DNA, 437 bp, Gossypium hirsutum
  Clone ID: LIB3083-024-Q1-L1-E4
gttttgtttttttttttttcatctcaaaaccggggcaggttggtagaagaattaaccgttgaaattgcccaattgattggtccacacctagggtcaaataaccacatgaatccattatacctgttgggcatttacaagttcccttaacaatttacttccaatacagacaacaaaaatatcaagtttcaacccaaacacaaataaaacatgaaaaagcataacatacagtaaaccatttcaagtctttaacaagcttcaaagaatagaagcttgcataacacggaagcaacaggtaataaaagacatcatacgcacactcaatcacaggtacttcttagtactcatcatcttcaccctcatcaccctcagccgactcagcaccaacttcttcataatccttctccaatgcagcaagatcctcacgagcctctgagaat

SEQ ID NO: 1269 - DNA, 391 bp, Gossypium hirsutum
  Clone ID: LIB3083-024-Q1-L1-E5
cacaatgctctctctaattgtgctgatggtcttgttgaggctgtcatgggctcaactgccattaccatctccaacaaccacatgacccaccacaatgaggtgatgttgctagggcacagtgactcctacacaagggacaagcaaatgcaagtgaccattgcctacaaccatttcggagagggacttatccagagaatgccaaggtgtaggcatggatatttccatgtggtgaacaatgactacactcactgggaaatgtatgctattggtggaagtgcaaaccccaccatcaacagccagggtaacagatatgcagctccaacaaacccatttgcaaaggaggttaccaagagagtagatacagcttgaaggcagtggaagagctggaatt

SEQ ID NO: 1270 - DNA, 421 bp, Gossypium hirsutum
  Clone ID: LIB3083-024-Q1-L1-E6
gatcacaaagttgagctgttttcaattgaatgacaaaacttatagttggtacaatgaatatataactacacaaaactttcactctaattttattctgtcttgtgcatctccattcttgtttgttcatacatcacataccataatctaaaagaaccacgcaagatgatttttttcaacagttaatgccacacattgtaatgtctggtcctttggttttcatcacaaatggatcaattcggacccaaagcaaggagaagattgaagccaatagcactgaccatataacaacaatggttggtgtcctgttttgtctccccattaaacctttaaggaatggatttagatggacaatcacccagaaagagaagaagagcttcccaaaaagaggtccccatgattggtatccattgtttatggcatc

SEQ ID NO: 1271 - DNA, 435 bp, Gossypium hirsutum
  Clone ID: LIB3083-024-Q1-L1-E7
caagaatcccttctcagtttagaaaagagtaatgttgagtctgtggattccattgttaggggaggaatggaagccaatcagatcctccgagatcaattttcttgtgctgtatccactgctcttgaagatgtagacactgcaaacaacagttgcctaacatccattgattattcattacaacttgatcgtgatgcatgtgggaacatgaattcgatgattattccttgttgtgaggaattgagggaactgaaaggtggtcactaccacaagattgtagaaatcacagacaatgcagggaaatgtctggaggaggaatacatggtggacaagccatcgtgttcaacaccaacgaagagggcattcaacctaccaagcatgtcatcaatagaggaactgaaaacgccttcattcgaggaactattaaaagttgtttgg

SEQ ID NO: 1272 - DNA, 412 bp, Gossypium hirsutum
  Clone ID: LIB3083-024-Q1-L1-E8
taaactgtctactacccagtataagccatgaatcttcgggctgaggtgaaatgggcacaaagaaccgataaggttctaattactgctatataacctgattcaaagaatgcaaaagataaccttgagcctgaaggagtgattaatttctctgctactgctggaactgacaataacacatatgaattgaagttccatctatatgataacgtcaacttggaggaaagcagaattaattttggagttaggagcatattctgcatcttggaaaaagcctcaaaagtgtgcccgaaaaaattattgcgctatgatggcaaagccccccattacctcaaagtggactgacacaaatgggtctatgaaaatcaagacattggtcatcgtgatcttgacttatgacgaacggacttctcca

SEQ ID NO: 1273 - DNA, 395 bp, Gossypium hirsutum
  Clone ID: LIB3083-024-Q1-L1-E9
gtttccacttggagctatgattgctaggtacataagaagctttgagtcagcagatccagcttggttctatcttcatgttttctgtcaaatatcagcttatgccataggagttgctggctggggaactggtcttaagcttggaagtgaatcctctggtatcacatattcgggtcatagatacattgggattgcccttttcgtcctcgctactgtccagatctttgctttgtttataaggcctaaaaaggaccacaagctccgattctactgggacatttaccaccacagttttggatacgcgatacttgtgctcggcatcatcaatgtgttcaagggcttcaatatcttgaagcctgagcataagtggaaatcggcatatatgattgtgatcattg

SEQ ID NO: 1274 - DNA, 282 bp, Gossypium hirsutum
  Clone ID: LIB3083-024-Q1-L1-F1
tgttgttcttgagcaaatcaagaagaatccaggtctcattttacttgacaagacggaaaaatattggccagaattcaacgacgaaaataatggtattgagcactatttacatgcttacaagaagagttacacccagtctatcaataaggtttctttctttcatcatactgatcatcttgaatttgatacatatagagacacaaagcttgctctacatgctaggaggaaaccataaatgcaacatgacccttgattctacacattcattacttgctttacatt

SEQ ID NO: 1275 - DNA, 312 bp, Gossypium hirsutum
  Clone ID: LIB3083-024-Q1-L1-F10
ctattatctactttctatgttaataactctgatgagcgggaaacttaaagggtaggctcaatgtaccaaaaccctaacctggctccatatttgataccaatgtatatcaaagattgcgctaacatctatctgagagtccaaggctacttccttgctaataaccttgccacgcctttcatagcagcctatgcatcaaaatcctctctatggtccatcttctcatacattaaacaaatctgcagcactaaattaactcaaggtaacacctgtctaccaatgatgtacgctcatcactttcatctacttacatgc

SEQ ID NO: 1276 - DNA, 408 bp, Gossypium hirsutum
  unsure (1)..(408): unsure at all n locations; Clone ID: LIB3083-024-Q1-L1-F11
gttttggttttttttttttaaagttgaaaagggcatatgataaaatcagccacagactcagagagcaaccatatcagccatctaaacgaatcaagtcatactagattcaacatgtagccaatttacaatggcaaagcatcacattgcctctctgctaacacactcagaaaccaaacacctaatctgaatctgattcagatttatgatcatccgcatttgctntctcttttccttcagcttccttaacagccttcccaaaggcatcaacgggaatcgatggtagatacccaaccacaggataacctttttcactcttctnctttaaccaactgttgtatttctcacacanattagctgctttgggaacaaccttttctgtcactgagttgaaagtcgaattgcggttca

SEQ ID NO: 1277 - DNA, 321 bp, Gossypium hirsutum
  Clone ID: LIB3083-024-Q1-L1-F12
gtttttgtttttctgttgtaaaggtgtaaatggcgtaggttataatcagccgggggactcatagagctaccatattagccatctaaactaatcaactcatactagattcactatgtaccctatccacaatggcaaatcttcacatacactatctgctaacacactcacaaaccatacacctaatctgaatctgattcagattcatgatcattcggattcgctttctctcttccttcatcttccttaacaccctttccaaaagcttcaactggaatcaatcgtatatacccaactacaggataaccttttccactcttcttc

SEQ ID NO: 1278 - DNA, 431 bp, Gossypium hirsutum
  Clone ID: LIB3083-024-Q1-L1-F2
aaggtagaacatgtaatttttattcggataatgtcattagataagatggaacatagataaaatagtttaggtttatttatgaggccttaacagggccagacatcacaatcattcacataaaatccagaaacctcattttcataggagagcttacaaaccaccacgaagactcaagacaaggtggagagtggattccttctcaatattgtaatcagccaaagtccttccatcttccaactgtttcccagcgaaaatcaacctttgctgatctggtggaatcccttctttgtcctgaatcttcgccttaacattgtcgatcgtatcggaactctccacctccaaagttatggttttcccagtcaacgtcttgacgaaaatctgcatcccaccacgaagcctcaataccaaatggagggtcgactccttctgga

SEQ ID NO: 1279 - DNA, 424 bp, Gossypium hirsutum
  unsure (1)..(424): unsure at all n locations; Clone ID: LIB3083-024-Q1-L1-F3
gttttaatggaccttgaaccaggaaccatggatagctggcgtactggtccggacggacaactttttagacctgataacttcatttttggccaaaatggagctgggaataactgggctaagggtcattacactgaaggagctgaattgattgattcggttcttgatgttgttcgaaaagaagctgagaattgtgcttgcttacaaggcttccagatttgtcattctttgggaggtggaactggttcagggatggggacactgttgatatcaaagatcaaggaagaataccctgatcggatgatgctgactntctcggtttttccgtcgcctaaagtgtctgatacggtggttgagccctataatgcgactctatcagtgcaccagcttgtggaaaatggtgatgaatgcatggtgcttgataatg

SEQ ID NO: 1280 - DNA, 347 bp, Gossypium hirsutum
  Clone ID: LIB3083-024-Q1-L1-F4
ctcgtgctttcctcttctgcatgcaaatccgggctagggagtacttgatcaagttcccaagagttaacaccaatgagaaagatacaacaaccagatatcaagagcacgataccttcattccccagaccacccaaaagccataagagcaagaaccaaggttcatacctgaaacccaaaatcgttatggactttactgacaccagtcaagatcacgctcacgctcatgcataagccagctcacttctaccaccaaagaaacctatgaaccctatgtcacccctgtcagattccaccctgattaaccctataacaacattcctgaattctccaaccatgaaaacacttac

SEQ ID NO: 1281 - DNA, 442 bp, Gossypium hirsutum
  Clone ID: LIB3083-024-Q1-L1-F5
gcatgctaagaatattcttgtcatgtcaaaggttgaaagtcaagaatgggtagcaaattttgatgacatccttacaaattcagatgcatttatggtggcacgaggtgaccttggaatggagattcccattgaaaagatatttctagcacagaaggtgatgatttacaagtgtaacatccaaggaaaacctgttgtcactgcaacacagatgttggaatccatgataaagtctccccggccaaccagggctgaggccactgatgttgccaatgcagttcttgatggcacagactgtgtgatgttaagtggtgaaaccgcagctggagcttacccggaacttgctgttcagaccatggccaaaatatgtgtagaagcagaaaagcactcttgattatggagatgtcttcaaaaggattatggaacactcggcagtgccaatgag

SEQ ID NO: 1282 - DNA, 421 bp, Gossypium hirsutum
  Clone ID: LIB3083-024-Q1-L1-F6
attattacaaaattcaactgcttcacagatagcccgagagcacctgttcaacgtcccacatatgggaatttgattactcttcttagcattgatggagggggtatcagagggcttattcctggaactctacttgcttttttagagtctcagcttcagaagctggacggtgagcaagcgagattggctgattattttgatattatttctgggacgagcactggtggcctcgtcactgccatgctaactaccccagatcccaaaaaagagaatcgccctctttttgctgccaaagatatcaatgagttctaccttgaacactgccctaaaatctttccccaagatagttctccttttgcaccagctgcaaatgtggtcaaatcactaatgggaccaaaatatgacgggtaatatcttcatgata

SEQ ID NO: 1283 - DNA, 377 bp, Gossypium hirsutum
  Clone ID: LIB3083-024-Q1-L1-F7
taggttctagcttttgttttttcaacattaaacagctatcagtatcttgcttaatattacggttgcataaacctcaaaaaatcttctcggtatgatggtcttccacaattcaagagtataaaacatccaactcgaatattaaatgaaacacatccatgtaaatcgcatacatatcttgatcttaaaagataatggatggaaacctgaaactgaaagatcccatccatacatcctttctaatatacacacttcttaattaaaactacctctttctttaccaaaagattatcaatagatttccttttcagagatcactgcatattataaaaccccttattcaatattaaaatgttcatatcttcactcaccattatttc

SEQ ID NO: 1284 - DNA, 438 bp, Gossypium hirsutum
  Clone ID: LIB3083-024-Q1-L1-F8
gtcaggaccatcttcttcttctgtctctaaaccacgaggatttcgttctatcacgtaagcaccaaaaaccattgcccctggcatagctgatcttattgtgcttatcacgtcctctctttcacgctctcgttcaagccttctccatttctgttcaagagtaggatccacttcgcgtggcttggcacacggatgattggctttcatgtgtttccttagttccttaaaagtcccaacaaaggtacagtcatcctgcatgcagcttctctttttagcatttaaatattcccttgcaggttccaccacagtccatcctttcacttgacccctgcaaagtggacatgcaagttccgtcacttcacacttctcaacacttgacgctagaaccagattatcaatggaaccatgcaaagattcttcgtgactggatgagactacttt

SEQ ID NO: 1285 - DNA, 411 bp, Gossypium hirsutum
  Clone ID: LIB3083-024-Q1-L1-F9
tcattatctcctttctatgtataaaacactgatgagcggtggacttcatggggtgttccaatgttcgtggtggctaatgttgctgttttttttgtcgtgatgtatatcaatgattgccctaacaacaatctgggatttgaaggcagctgcgtggctaagttccttggcaagctttcttttcagactttgaaagaaaatcctctctttggtccttcttctcatacattggacaaattgggagcactaaattggagcaaggtagcgcatggcaagcaaggatggaggctcatcacttgcatctggctacatgctggcgttattcatcttattgcttacatgttgagcttggtcttcattggaattcgccttgaacagcaatctggattcctgcgtattgcgcttatctatcta

SEQ ID NO: 1286 - DNA, 430 bp, Gossypium hirsutum
  Clone ID: LIB3083-024-Q1-L1-G1
gttttgtttttttttttttgcatcaaaacatcggttttgccttcaaaccaagcgtgatacctttagattttccaaattaaaactcttacaattccatgcagacaaaacaaacaaaccctcccatccacaggttccaacataatttgatttttttgcaaatattaataaaactacgtaacctgagtgggaatatatttatataattctctccttaaaccactaaatattaatttttttataataaacttactcgagtatattgttgctttctctttcaagtctatgcttttgaagcagcctcatccttcttatcttcctctgtttttgcttcatctttgacggcttccttggtgtcggaagcaacgaccgtatcttcttctttaccgtcacttttactttctccaacactcaacttgtcgaggagatcagc

SEQ ID NO: 1287 - DNA, 383 bp, Gossypium hirsutum
  Clone ID: LIB3083-024-Q1-L1-G10
ttgaatccttggacaactggaatttttggctgtgctgaagatacggggaggggctggacaggactattgtgtccatgtgttctatttgggcgtaatattgagagcttgagagatgatacgccttggactacaccatgcatttgtcatgctatttgtgttgaaggtggcgttgcattggcagttgcaacagcttttgtccatggtattgagccgaagacaacatttctcatttacgagggtttgttgtttgcttggtggatgtgtggaatatatactggcctttctcggcaatccttacagaaaaagtatcatctcaagaattcaccctgtgatccttgcatggtgcattgctgcatgcactggtgtgctttatgccatgagca

SEQ ID NO: 1288 - DNA, 387 bp, Gossypium hirsutum
  Clone ID: LIB3083-024-Q1-L1-G11
ggagagttccttactgcaaactcatgtcaaaaaacttggagaacagttggtgacggttgaagctcaattgaaagaagaggttgaaagtgttaagacagccgcctctgtaagagaagctgaattaacttcgaaattagaggatcatgcacaaaagattagtgatagagatgttatcaatgaacaagtggttcaacttcaacgagaattacaacttgctgaaacaacgatcactcaacagaaggatgcatattctcagaaagagatggatcaagaagcagctttaaaacattccatcgaagagctcgaagccaaaaacaaagaagcattacacctcaagaaacaagtcaaagagttggaagattaattgcaagaagctgaagctaaaat

SEQ ID NO: 1289 - DNA, 253 bp, Gossypium hirsutum
  Clone ID: LIB3083-024-Q1-L1-G12
catatagtttcttactctaaactcatgtcacagagcttggttaacaattagtgacggttcacatctcaatcattttaacatgtttaaagtgtacatactacctactacgtaatagactctaaattaacttcaaaattatattatcatacacaatatattagtaataacaatcttatcaatttacaattctttcaacttcaactattactatctactctcattaaacaacaatcactctacacaatgattcata

SEQ ID NO: 1290 - DNA, 435 bp, Gossypium hirsutum
  Clone ID: LIB3083-024-Q1-L1-G2
tttttgtctgagcaatttgatatcacgatctgattggggtgggagaaaatggagaaggtgatgaatatgataaagccaaaaccgaatccacaacagctattaagagattggcagcgtctccttcgccaggaatgccgaaacatcgagcgccaaatcagagatattcaaagagaagagaaaaatgtacaaaaagctattaaagatgctgccaagagaaatgacatggtttctgctaagtcactcgccatggaaattgtgagatccagaagaacagtcaatcgtctctatgaaaataaggcacaattgaattcaatatcaatgcaccttggggaaagtgtagcaattgcccgtacagttgggcatttgtccaagagtgctgaagttatgaagcttgtcaataaccttatgaaggctccagaagtggctgtcacaatg

SEQ ID NO: 1291 - DNA, 242 bp, Gossypium hirsutum
  Clone ID: LIB3083-024-Q1-L1-G3
cactctcataaacaactccactccaaccctccttcacctcataatccacctacttatttttcaactcaacccttcctttctcctaatatctacaattaaacctccattcctttctctctcaaacatcaccctctttcttattctaatcatattcataccatttcttataattttttaatttattaattatcaacatccatcatactctatataatcatttatccttcaaataattcttcttt

SEQ ID NO: 1292 - DNA, 374 bp, Gossypium hirsutum
  unsure (1)..(374): unsure at all n locations; Clone ID: LIB3083-024-Q1-L1-G4
atcgagtcaattgcttcttcaaagctgcagtgacaggagtgtccctcctcatgatcagatacagtagaggataagtccgatggggaatcatcggttctcgagttttctttgttcttattgaaaaccttttcaagctgccctgcaatagtcttcactatccctttggtgattttcagacatggagctttggcattaaatatgtcttgagatagtttgcaggtgcttttaaattggttgcagtcctcgtggtaaatgtcagattgtgaataaagaagatggttggttgaattctcatgcccttttccatgcaaagaaagggttagaagaatntttcctgcatttattgagaaaaatatactgtaaattcattattg

SEQ ID NO: 1293 - DNA, 411 bp, Gossypium hirsutum
  Clone ID: LIB3083-024-Q1-L1-G5
taaatgagtctcgagcttcatttgtgggaactttcgaggcatgcgtggattcagcccagattgtggcagaaacaaggtcagcgattagaaagaaaagcaagtttaggaaaaggatggagcagcttgattcctcggactgtagtgatcaaagtcagattgataagcatcctgaggaagttggccttactaacactgatcaaacgaatactgtttcaggtccaactctatcggatgaagggaatagtgaagaaaagattgattcatttgatgcaaatgaaacaagtgatgtatctcttgctattgttaaacctcctgttagtcaatcgaggaaaaagctgcttgttcttgatttgaatgggttacttgccgatataatctataatcctccaattgattacactccagatgcac

SEQ ID NO: 1294 - DNA, 376 bp, Gossypium hirsutum
  Clone ID: LIB3083-024-Q1-L1-G6
agaaaagcggcagtcatgctaatgttaataaaacatttgagaatgtgtttcactttcccgaggacatatccgtgcaggaggaaacatcattatcatggcccctttggtttcacgctgctgttcctggaagtattcctttgtacattacaatatattacgaaatggaaggtgtatcaagcatcatgaaatatcgcactctacgcatgcattataatttgcaggttttaccttcattggatgtatcgtttcaacttagtactcgcccatcaagatcgcaagagttcctcttgcgcatggatgttgtcaacaagacgacttccgaatgtttccaagttcatcagttgtcgtctgttgggcaacaatgggaaatctcatt

SEQ ID NO: 1295 - DNA, 435 bp, Gossypium hirsutum
  unsure (1)..(435): unsure at all n locations; Clone ID: LIB3083-024-Q1-L1-G7
gtangagaatcctcgaaagaggatctgatcgtttggctgttattgcgggtcagctccaaaacctgcctactcctcctcactctcatgaacaactccacgccaaccctcctccgccgcaagatccacctactgatttttcgactcaacccgccgtttctcctgatgtcgacgatgaagcctccggtcctttgtcgctcaaacatcaccctgtttctgatgctgatcagggtcagaccagtgcttataatggtggaattgatgaaggatcagcatccagcggacgggatagaagcattgagccttcaaatggttctgcttttgatacaagtggtgaaccgaattcatttctggtttcatcaaatgatcgaagttcaccaatttccacgtcagggacagtacagggttcagaaacatcttgctcgaaacataacttct

SEQ ID NO: 1296 - DNA, 451 bp, Gossypium hirsutum
  Clone ID: LIB3083-024-Q1-L1-G8
gttttggtttttgtttttttttagtaaacgaattatatgagtctgattaccattggttgtgatgtcccccaaaggcccaatttctctccagcaaaaaagttacccacaggacataagtaaaagaaaaacaacaacaaaaatgaacttccacttctaccccaaaaaagacctctgcaatagcatcagccccaatttattacacccaaaatttatagtaaaaagaaagaaaccataaaacatttctggtaaaaccttttacctttcttcaattttccaacagaagaccacttgtaaaacttgaacctcttcaaaaaatatatagtcatgacctactaatctctgttcatatctcattaataaatattcccttatcttttcttcttctcctaggttgccgacctttgttttggaatgtactttgttttagcacccctttcaagcttcttttttt

SEQ ID NO: 1297 - DNA, 411 bp, Gossypium hirsutum
  unsure (1)..(411): unsure at all n locations; Clone ID: LIB3083-024-Q1-L1-G9
tttttattttcaaataaccacatgaatccattgtgccggttgggcatttacaagttcccttaacaatttacttccaatacagacaacaaaaatatcaagtttcaacccaaacacatataatacatgaaaaagcataacatacagtaaaccatttcaagtctttaacaagcttcaaagaatagaagcttgcataacacggaagcaacaggtaataaaagacatcatacgcacactcaatcacaggtacttcttagtactcatcatcttgaccctcatcaccctcagccgactcagcaccaacttcttcataatccttctccaatgcagcaagatccttacgagcctctgagaattctncttcttccataccctgaccaacataccagtgaatgaacgcacgtttggcataca

SEQ ID NO: 1298 - DNA, 346 bp, Gossypium hirsutum
  Clone ID: LIB3083-024-Q1-L1-H1
cagatgaacaatggggttggtaccagcctccggagcaaggaagttcaacatggaaatacaaataatatttactgctctaccaaaaataacggtaataaagtgtgctgagagccaatttgtttttgagtatgtatgtttgtacgtatgtaatcccgtcccgttgcaggtatgtctatggttttcagtttcacgtttatatgtatgtttgcatgtacgtaatccctttgggggctatgtcaatggcattgagtctcgtttatatgtatattctatattacattttggctgacctgtttggaatgtaagttgcgaatgcatgttacctaaaaaaaaaaaaaaaacggca

SEQ ID NO: 1299 - DNA, 196 bp, Gossypium hirsutum
  Clone ID: LIB3083-024-Q1-L1-H10
gcacaatggggttggaactggctcgagcattggatgtcgtctcaaccgtacgaggctcgtcaactatgccatcaagaagggtcttacatgacactgccgaccaccaccgcaaccactaccgttaccgataacatgtctgagaaaactgttgaaatggatgttgtgacagcaatggattcaagctcatactcaaccc

SEQ ID NO: 1300 - DNA, 254 bp, Gossypium hirsutum
  Clone ID: LIB3083-024-Q1-L1-H12
gtaacacgcaaaatggctccaccgaaagcagggaaaaggtttccatcgatcgcggaatgcgatcgattgaatgacgaatcgatcgacgcctatctggatggcacgcttttaatctcacagaagctctttcccctacttcatgcttattagccgtcaagcagaaagcctccttcgaagacttatacttcttctttctctacctgtggtcatgatatcttatctcttcatttccgaagctattggtattcaaattc

SEQ ID NO: 1301 - DNA, 206 bp, Gossypium hirsutum
  Clone ID: LIB3083-024-Q1-L1-H2
gatccatgtatataacatatatctagtatccgttctaggtataactgcttccattggagaccaccattcatgtgtcaatcatcactataaccctttctaaaatataattaaatacttcctctgttgggtaccatcccccattaccagcttatcatgttaaatcatccacagaattctatcattaatgatatggctcacctaattac

SEQ ID NO: 1302 - DNA, 407 bp, Gossypium hirsutum
  Clone ID: LIB3083-024-Q1-L1-H3
aacccgttcaacaatggcgattacgaagcaacgtttggtgccgctgttcgctagctcatttctcttgttttcccagctccattgctcaacaacttcagcccaagctccggctcagtctcccgcaccacctggtccaccagacgtcgccaaaatcctgcaaaaagccggccaatactccgtcttcgttcgtcttctcaaatccacccaagtctccgaccgtctcattggcgagctcaaagatacagatgatgggaagaccatttttgcccccactgataaggctttctccggcctcaaatctggtgccttgaattcactcaacgatgaacaaagggttcagctggtgctatttcacgtcgtcccagattatatcccatttttccaattccaaacagttagcaacccta

SEQ ID NO: 1303 - DNA, 288 bp, Gossypium hirsutum
  Clone ID: LIB3083-024-Q1-L1-H4
aaaacacaccctaaagagacaatgagaaagcggctagggtttgcctttcttggcttcttcttttgggataaaacattagctcaaatagctccggcgccgccgttaaaggtggacaacatcacttccatcctcgaaaaaggtggccaattcaccactttcatcaagctattgaaagccacacaggtggctgatcaactaaacaaccagctaagcacaccggaccctaacgacgggataacggtgtttgcaccgagtgacaacgcgttctccggactcaaacccgggacg

SEQ ID NO: 1304 - DNA, 424 bp, Gossypium hirsutum
  Clone ID: LIB3083-024-Q1-L1-H5
gaaaaatccaaaatatatattgaaaaagaaagaaaaacgtatacattacatttttctatatcctatacaatcaaatcacccaatttgcaaacatattacctccctagaaaaataacgacacaactttaaaatataaaaagaaaaaaacaataacaaaaggtaataaaataaaataaacaacgaacctttttcttctccattgtttctctttctcaaaatattctcgtcgatcagaaagtccatttccagatcttgagtctcaaattaaccttacattttgcattagaagttgaagctgtggttgctgattttgccttcggggcagtaactttaatcccttcacaaacaacccttatcccaacctttggtgtcttcaatgctcccatttttgcttccactttagtatcgagctttatctttaatg

SEQ ID NO: 1305 - DNA, 374 bp, Gossypium hirsutum
  Clone ID: LIB3083-024-Q1-L1-H6
gtttttgttttttttttttacacacaaattagcagtctgtgcatgcccataggacagagagaatcatacatacatggcaaatgttatttgtcaggcagatcagagagagggtgtccaggtttaggaaacatcaaaactgctgcccaagaaggcaatagggaaacaagtggacagatcctaccatgagacctgtttaattgtacacttgctatccacacctaactccagtggcagatcagatgtattcctctgcactttgtaacttacaataacagagctcgattcagtttttatcaaatatatatatataaggaatcctatatgcttagctttactcaacatgaactggaacttttggttggatatctcttgac

SEQ ID NO: 1306 - DNA, 434 bp, Gossypium hirsutum
  Clone ID: LIB3083-024-Q1-L1-H7
acgatgagtgcatcgtcccctgcgatatgaatctcatcgctgatgatgattgcagagagttggtggataaagtcccaaaaggtagccgcatttcaatcgtatcagattcatgccacagtgggggattgattgatgaggccaaagagcaaataggtgatagctctaagccccaagattcagaatcagaatcaggttcaggtgggtttaggagcttcttgcatcacactgtacaagatgcatttgaatctcgtggaattcatgttccttctagattacgccaccgcgaccaccaccatgataaggaagaggtggatgacaggggagtgaatgaagactatgatgacagtggctacgtcaaaagcagatctcttgccctctaactctaatgaaatgctcaagcagaaaactggcaaagatgatatttgatgtgggaa

SEQ ID NO: 1307 - DNA, 297 bp, Gossypium hirsutum
  Clone ID: LIB3083-024-Q1-L1-H8
attgcgtggagtgaggatgccagaattgcgaagtggaggccggagatcgaaacgccttggtgatcttgagcctccgtctcagcctgttgttcaagcagagaattgggtactgcctgctcaaaacagatccaggaggagagttggtggaagaggaaggggtaatgctgtaggtgtagccaaaggaccctcaccagcggtacccacaaggccaagagctgctggtagaggccggtgcattaggttgacagattttgaccctgagctttgtcaagttcttcctgaggctgcacctttggc

SEQ ID NO: 1308 - DNA, 412 bp, Gossypium hirsutum
  Clone ID: LIB3083-024-Q1-L1-H9
atccattctattcaagaaactgatttttcctttgactcgtttaccaaaagcgggaatcttccgatctgggtagggtcgatggcagaattggacagtagctgcaccagctcatcatcggggtccacgttcttcaatcgctccttcacgatgcactcaaatacagctgaacccgatgccctcaaagtccatcttcttctcaacaacccatcgtgtcttaatcgagcaactgtcatttccaaaatttacaattcaatcgattcagtcaaaggttaagtcaaaaagctgtgcaatttattccagttcgggaaatcttcatcaaccagtgcagaactttcccctaaagttgttttaagacccgcgaaatcaatcgggtattcatgttcgatttcttcgaatttaataacccattgat

SEQ ID NO: 1309 - DNA, 428 bp, Gossypium hirsutum
  Clone ID: LIB3083-027-Q1-L1-A1
aaaccttcttaacatggggacaaactacagatgaagctgtagtgcaaggcataccgcaataaggccgacagcaccaagacagttatatccgaggtagaagagtgagtggctcagctggaatatcagaacttgcctgtagatatcttgttaacaacgtagtagtactaaaattaaagccttcaacaggttcactttttgtacgtgatccattaagctgttttcggacttgagtagctagtgacttacccaactcaactccccactggtcaaaagaattgatgccccaaacaaaaccttcaacagcaactctatgttcatagcttgccaagagctgcccaatattgtaagcgttaagagatggtagcaaaagactgagagaaggccgattcccagagaacgtcttatgagggataagatgctgcgaaaca

SEQ ID NO: 1310 - DNA, 441 bp, Gossypium hirsutum
  Clone ID: LIB3083-027-Q1-L1-A10
gctcagatcagcgggctttttggttcgtaggaaacctggtttgaattaacgccgattccgaaaccggaaagccgacccgtacctagtttttacggaaggaagccgacgctatcggcgacggtgagaaaataaccccactcatacaccctctcgatactctattgcaatcaacccgggtacgctcccgaggaagcggtcccccatactacctgcctgagcctcagataaagctacacgactgtccgaaacgactgaaagagttacgtaacctgcctcgcaaacaggtacacacccagaccccacgccagggaaccaacgggaatcgaagccctcaacggcaatcgaagccctcaacggcaaccacaatccccagccctcaagtacaacacccgccaccgtaagacttcgccacacacacacgcgcgcgcgcgcgcccacctc

SEQ ID NO: 1311 - DNA, 416 bp, Gossypium hirsutum
  unsure (1)..(416): unsure at all n locations; Clone ID: LIB3083-027-Q1-L1-A11
gctcaatcagcggatttttggtcgtaggaactgtatgagataaatatccttctgccactcttaaccctaaaactaaagctaaaactanaactaaaacttaaagactcaaactcaaacttgctcttctcttccctctcccccccaattccataaccaaggaaagaagacgaagagagctcctggtgccaagaaagataaggaatttttgttcctcacttaagacgtcattgactggactagcaaaagaggggacatggccgacgagaagccgaagaagtcagacgtcgagccgagcaggcacaaagagtagacaaaaaagataaggttcggtttcgtctaagaggtctccaaactctgagtcacgaaggcctctaagtaaaaatgaacgcacgaagggtaatgcgacacgtcccaca

SEQ ID NO: 1312 - DNA, 460 bp, Gossypium hirsutum
  Clone ID: LIB3083-027-Q1-L1-A12
tgtctcagaatcagcggactttttgggtcgtaggaacctggtatgagggagttattcgcaaccttcgtaaccttcaaagccgcaagggaatgaccggttaaggactaaatagcccttagtctaatcccggaagagtgaatctaagagaagatcgtattcgtaaaagtcgaaacagtcaaggtcaaattcgtggtaaagcttacggaataaaagaattcgataagcaaactagaaaagttcgcgaaactcgctttcttcgtaagcggcctaattatcgtcctcagtagggacaaaaccgaagaagtagaagaaaaattgaagacaataaaggaggaagaggaaacggtcaggaaagtagaggaactgagaaaggaagaggaagtagtcaaaccaagggagtaatgctcgccggaggagacaatcaaagtcaaggaagtatcagaaaggaagaggtgaaacg

SEQ ID NO: 1313 - DNA, 392 bp, Gossypium hirsutum
  Clone ID: LIB3083-027-Q1-L1-A2
aaacacagttacaatatttataattctttatgttttctggggggccattagctttctttttcttgcagtttcaacaaacctcagattcaagggaagatagaagtattaataatctaagttttgttttttggggtatgtttgtttagggttttggagatcggattacagtgttttcttcttctgcttcttgctggtaatggagttgaagaaggacaagcttgtcaggttctactctgatggaaaacgacataaagaaacaccatggggaaagaatgacccatcattccttgagaagtcatcttctgggtacaagatttcattttcttcagtgctaaaaccggagattggaatggatggaggaagaaatagacttcctgaaatggggaaaattg

SEQ ID NO: 1314 - DNA, 424 bp, Gossypium hirsutum
  Clone ID: LIB3083-027-Q1-L1-A3
attcaaactaactggattcgacccttcttgatgagcttgttgggaatatcgctacacttgcttgtgtctatcacaaacctcctgatggttttgtaactcgtgcaaagactgcaacacagaaaactgaagacgatgactaccctgatggaaatgaaactaggtattctgaaacactttccaatgctgctaatggtggtgcatcaccacccagttctagtagtgtcccacatgctgcagctaggcagccagctcctgccccagctgctcctgcacctgctgcagtgcctgacctcttaagtgatctgattggccttgataacaatcaaattgtccccgctgatcagcctgccacatcttctggcccccctttgcctattttattaccagcaagaaatggacaaggtttgcaaatcagtgcacaatt

SEQ ID NO: 1315 - DNA, 424 bp, Gossypium hirsutum
  Clone ID: LIB3083-027-Q1-L1-A4
tttgcagtgtatcgggtagtcctttcaatcctcagccagggggggtcatacggagagagggttggtcaaacaacccaaggtgttattaagctctaaaaaaactgggaaaggaaagagacctggaaagggcgggaatcgcttctggaaaagcattgggttaggctttaagacacccagagaggccattgaaggaacatatattgataagaaatgcccatttactggcactgtttctattagaggccgtatccttgccggtacttgccatagtgcaaaaatggtaaggaccattatcgtccgaaggaactaccttcactacatcaagaaataccaaagatacgaaaaaaggcacagcaatatcccagctcatatatccctctgctatcgtgttaaagaaggagatcatgttataatcgggcaatgc

SEQ ID NO: 1316 - DNA, 443 bp, Gossypium hirsutum
  Clone ID: LIB3083-027-Q1-L1-A5
tcgcgttttttttttttttttttttttccactcaacattatatattatagagatttcaagacacttgagatgagacagagccatagccatagccacatccggctcccatatggctctgccattgtgtgaggtaaggaaaataacatactttgcaaaccgaaatcatcttcttcagcttcacattcactatcaaatttaacaataaatctactacctcaacaaccaataccagcaacagcaatcacaattttcacaacagctcaaactataggacaatagattagaagcaaaaaattaaaaagaaaaaggatagtattctttgctaacctgctcagccaaaatcttgaaactcctcctattgggagaatatgagagatagcaaagcttcttcaaatttgaaaaaacagcatggccccctatccttaaataagcttctaaccacc

SEQ ID NO: 1317 - DNA, 376 bp, Gossypium hirsutum
  Clone ID: LIB3083-027-Q1-L1-A6
ctcgagtttttttttcaaaaataatttagtgaaacatacgcaaatattctctctttggtgaagttttttctttaaaaaaaaacagtttcaaggattgtttttgtgttgtttctctcccatgatcacaagaatggcttgattttcggttgatcctgcaaataaccgcatttcgttctcttttttaacagagattcattaatcaataaataaccatcagttttataaataaataaaaaaaacctcataacgaagccttgcttttctttgttttgcaaacccctttagccttacctcaagcttcatcttctttttatttctttgaaattttttcattaaaaatctgaacaaaagcatgggcaattcccgggtttctagc

SEQ ID NO: 1318 - DNA, 428 bp, Gossypium hirsutum
  Clone ID: LIB3083-027-Q1-L1-A7
acaaaacagctcctcgttatctccaatttcaaaatcaagatcaaaatcagaatcaagaatccaaagatctaaatctaaatccgtctcctctcctttctctttttttaaccttacaattaaggaaagaagatgaagagagtcttcggcgttaagaaagacaaggaacccccgccttctatccaagatgctaccgatcggatcagtaaaagaggggatacggttgatgagaagttgaagaagctagatgctgagttgagtaggtataaagagcagataaaaaagacaaggcctggccctgctcaagaggctcttaaatctcgagctatgagggttctcaagcaaaaacgaatgtatgaagggcaacgtgatatgctttataaccagacgttcaacctcgatcaagttgcttttgcttctgagggtcttaa

SEQ ID NO: 1319 - DNA, 387 bp, Gossypium hirsutum
  Clone ID: LIB3083-027-Q1-L1-A8
ctaccttttcatccattatcattcacttcaccattgatgaccagtaccccatgcttgtacagctggacatgcaacaccattagagcacctagtgttatgtacagtgatcgggattccgataacgggatcgattctgatgggttatggatcgacggcgatgatctatggccatgttttggtttttgattttttcaggtgccttggacactccaatgctgaagttgttccacatgaagttttcaataagttacctttacttagatatttcatctatacccccacgtatcatagtctccaccacacagagatggagaccaatttttgtctgttcatgccgcttgttgatgcattggggaatacacttaacaccaaatcattcgagctaca

SEQ ID NO: 1320 - DNA, 347 bp, Gossypium hirsutum
  Clone ID: LIB3083-027-Q1-L1-A9
agcggactttttgggtcgtacgaacctggtataagatagccctcccccactcttaaccctaaaactaaaggtaagactacaactaaaacttagagactcaaactcaaacttgctcttctcttccctctcccccccaattccataaccaacgaaagaagacgaagagagctcctggtgccaagaaagataaggaatttttgttcctcacttaagacgtcattgactggactagcaaaagaagggacatcgccgacgagaagccgaagaagtcagacgtcgagccgagcaggcacaaagagtagacaaaaaagataaggttcggtttcctctaagaggtctccaaactc

SEQ ID NO: 1321 - DNA, 410 bp, Gossypium hirsutum
  Clone ID: LIB3083-027-Q1-L1-B1
aaaaaaagttcttcttttcttcattccaatccttccccgacatgcaatcaaatcaaatttgaatacttcccctcgtgattcaacccaatcccatttcttcttatcttgtttaaatcttggcttctttttagcgaatggctcctccagattctatgatcaaaccaagagatgcttgtattgttggtgttgcacgtacaccaatgggtggtttccttggttccctttcctcttcctctgctacccatcttggatctttagccattaaagctgcccttcaaagggcaaaccttgatccatcacttgtgcaagaggtgttctttgggaatgttcttagtgcaaatttaggtcaagctcctgctaggcaggctgcattaggtgctggtatccccaattctgtcatttgtaccact

SEQ ID NO: 1322 - DNA, 205 bp, Gossypium hirsutum
  Clone ID: LIB3083-027-Q1-L1-B10
gctcagatcagcgggctttttggttcgtaggaacctggtttgagacccacggctttcagcttcggaaaccttcattcgattccgcctccaatggaacccgggcggtccagagccaaaccggccgtaaccaacgagcttgctattgagccgttaccaaacacggaggccgcttttacaagtacgaccaaccggtattcaccttcgt

SEQ ID NO: 1323 - DNA, 445 bp, Gossypium hirsutum
  unsure (1)..(445): unsure at all n locations; Clone ID: LIB3083-027-Q1-L1-B11
tttttggttcgtaggaaccctggattgagtcgaacttattacccaaattgggacgggattcaaaaaacgcttgtccggttcctcctaaacgtatttgacggtaagcagaaaaaatctcggacttaactaaatcgttttccttaccatccccgcgatagtgcccactttggttaccatttgtaggctgctgatacctctgcctcctcttctgttatcgtcctgcattccgtaatatcggctactacgccgacagacacactgagaagagggtggttccgtccgagctagcttaagaggccgccctcgttactaggcttatcgctatcttttccaacttcaccggtaccagttaanggtccgtgcactaatactccacatttccctcttcgtaccgtcctngtnacctcctaatcggcctaaaccctgctctccgtgcctgataacg

SEQ ID NO: 1324 - DNA, 441 bp, Gossypium hirsutum
  Clone ID: LIB3083-027-Q1-L1-B12
ggcggtgcctgtctcagaatcagcggactttttgggtcgtaggaacctggtatgagctcgaccctctgcaattagaggttcgcctcgctctaaaggtccctacccttcgtaagaagaacttacggggacggctccgcgaagagtatcgactctaaatacctttaagagaaaagtctaaaaatctacgttttcctccttaacggactagtctgcccgagctactttaataggtgtgcacttacttacgccgacataaagttggtaaacgtaaacggcggcggagtcctcctcagaaggattatcacagtactcccgttcagtaacaagttggtaaagcttggcttcggaaacatggtcgtcaagtttctcctactacttgaactagtcgacctaaagttaacagtagtcataacgtagaataaagaagatgacgacgtttac

SEQ ID NO: 1325 - DNA, 326 bp, Gossypium hirsutum
  Clone ID: LIB3083-027-Q1-L1-B2
caagcttcgcgaatcaaactcctatagccaaaacgcgcgggcggtctttgcataagctgagcctgggaccacaatagcagacatagctgctgtgtcaaccgacatctcaggcatatatgaatgctgggagcagcctgtagaggcttgctagctctaagcccaaggccttgactcagttgctagacaaacgctgacatcaaagcacaatcgcaggaatcgtacattgaatcagggtgatgccatacatacttgggaggcatgatgagtcactgaactctttcgagagtgcattcacgtacattagagcaagtaatcatgaggacata

SEQ ID NO: 1326 - DNA, 385 bp, Gossypium hirsutum
  Clone ID: LIB3083-027-Q1-L1-B3
caaactaggatcttactgaagaagagagctgaaatacgggacgataacttaccaggggggggtgaaatacatatatagctactcaccattctaatattactatagatcaccaatgcatatacattaagaaaacgagttgatactactcataataattgcatccacaaaatgaacagcaaaacaccttcaccagcattcaaagccttgcctatccatcctactactcactcgttctataacacttatttcactacatctatgatgcaagttaggtcacgtatctattgcttatgctgatacatatcaaatggcctcagatatgatagtactaacccaagaaactttgaataatatctaactgtgcagtgccattaataaattcttc

SEQ ID NO: 1327 - DNA, 374 bp, Gossypium hirsutum
  Clone ID: LIB3083-027-Q1-L1-B4
gcgagaggtaccagcgtcccgtcatggcttgttttgcaaagatcggctgttgtctttttaggagggcaagggtctttcggggcttgtttgggatgacaagtttttgtcggagttgaatcaagggaaaccagaagagcagcaacaagaaggagacacgaaacagctgcagaaagaggaaccaaggcagttgcaagacagtcgtaacccagaaaagtttgacgatgttaagggtgttgcccccaccaacaccatcgaaagaaaccgatcaaatggtgaaagacgaggttaccggactggtggtaaggtatcccctgctattgacccgccttctccaaaggtttcagcttgtggtttctgcagtgctcttgggaaac

SEQ ID NO: 1328 - DNA, 410 bp, Gossypium hirsutum
  Clone ID: LIB3083-027-Q1-L1-B5
ttttcattatccagcaaggaagtgattgactctgcagagtttacgcaatgagatcgcatctcatttatttttctgcagcgttgtgttgggtagatttattattggttcctcttttttgaaattcaccttctggcagtgacacatatttatatctaccctttcctttaatatcatattcaagtcttctccctctctctctctctctctctctctctctctctcgtagcgaagcggctctttcttttgacttctagcttataatgaagtaaaatggagccaatgttacccaaatcccacaaactcccatgatactacagtggggatgatatttttggtactcccaggtggatccatggtagcatatgattcacgtctaaagtttcagtctttgtaagttgtgtccatctatc

SEQ ID NO: 1329 - DNA, 398 bp, Gossypium hirsutum
  Clone ID: LIB3083-027-Q1-L1-B6
tactgatgttaggaagaatggcacctgcccctggcgtaaggcctgatggtaaagccgaggtcactgttgagtactacaatgacagtggtgccatggttccagttcgtgtgcacactgtccttatctccacccaacatgatgagactgttacaaacgatgaaatcgctgctgacctcaaggagcatgtcatcaagcctgtcatccctgagaagtaccttgatgagaagacaatcttccaccttaacccatctggccgctttgtaatcggtggtcctcatggtgatgcaggtctcaccggacgtaagatcattattgacacttatggtggctggggagcccatggtggtggtgctttctccggaaaggacccaaccaaagtggacaggagtggtgcttac

SEQ ID NO: 1330 - DNA, 422 bp, Gossypium hirsutum
  Clone ID: LIB3083-027-Q1-L1-B7
gaaaaaatggttctgctagacaaaatgtgggacgatgtgttagctgggcctgaaggctggcgtggtctcggcaggcttaggaagatcaccacccagcctttgtccatcaaagatgaaggagaaaagaaaaagtaccagaggtcgttgtcgctgccgaatagtccagtgtcaggtccgacacccgtgacaccgacgactccgactgcgcgtaaggagaacgtgtggaggagtgtgttccatccgggtagcaacctagccaccaaaagtataggttctgatgttttcgacaagccacaacccaactctcctaccgtctatgactgcaaccaaacggaggctcagagacagagcatgaaggaaaacttggctatttgtttggtcgctgcgtggaaataattccttttgatcagtatacactctta

SEQ ID NO: 1331 - DNA, 335 bp, Gossypium hirsutum
  Clone ID: LIB3083-027-Q1-L1-B8
ttgattatttcagatgaaatatataacactgctgattagagtaactgagcccggcaatagacatgctctcatctatctggagacttctccgaataaaccaacagttgccacaagatctgcaatattacactacatgacggtaagtgctcattgcttaatgtgataatatctgaaaacagcagcatctggaatctatggcttccctaagaatcaacaaccagaatactaccattatcaagatatattaagacattctatctcatttgctaccgccaattcctcgactgaaaatgtaatccagataagatccacctccaaggacagcaataatcttg

SEQ ID NO: 1332 - DNA, 209 bp, Gossypium hirsutum
  Clone ID: LIB3083-027-Q1-L1-B9
cggatccgggataccgaccctaagcgaggtagaaccggcaagggaaagagctattccaataccgggggtaccggttattctgacctttgaaaactgattattaaccgttaatcgactcataagtccggcggcaccgataagttcgcgaccgaaagggccgagaaagaagtcgtagagacgaataagaagctacctaaacacgtccgggc

SEQ ID NO: 1333 - DNA, 429 bp, Gossypium hirsutum
  Clone ID: LIB3083-027-Q1-L1-C1
cagcattgaaggcaaattcgtacctacaaagaaacgtggtgggctagccgtacaggcaactgaactaaaatgtgggggtatagtggtggcatgcgcatttgatcatcgagtagctgatgcatacacagccaacatgtttcttgtgtcatgggcggagatagctcagtcgaaaccggtttcgatggtgccaagctttcgtcgatcgctgttgaatccgagacgaccagggcgtgctgacccgtcgctggacgagatgtatgtgccaataccctcattgccacgtccagaagaaaaccatgaacctactgatcatctcataagtcgcatttattacgttagtagtgaccaaatcattgagcttcagtcacttgcctcttccgatggggacaaaaggtccaagctcgagtcattcagtgcgtttttgtggaa

SEQ ID NO: 1334 - DNA, 416 bp, Gossypium hirsutum
  Clone ID: LIB3083-027-Q1-L1-C10
agcggactttttgggtcgtaggaacctggtatgagttacaccacccggtcttcgaggcctctaaatggaaccacgggttagaaaccgacacacggagcgtaggagctacctctcacaccccgccgcgtggggccttcttcccccgggtcgagctcgaataaggcgccgtataggtaacctcctgcgggccaacagaccctaaatgggatttacggttaaacaccctagagagcgtcaagagctcagcttgataaacgccggaattagatttaaagtcttggtccatcgtaaagtaagcgtccgagtacttccggtcttaaaatgtcaaaaaagtctttaacgcgttctccggcgacgccgccaagctaaagtccaaataacccctaacgacgaatagacctaaaagaaaagtttca

SEQ ID NO: 1335 - DNA, 412 bp, Gossypium hirsutum
  Clone ID: LIB3083-027-Q1-L1-C11
ttttgggtcgtaggaacctggtttgagcccattacccccgttcagtaacaagttggtaaagctcgggttcggaaacatggtcgtcaagtttctcctactacttgaactagccgacctaaagttaacagtagtcataacgtagagtaaagaggatgacgacgtttaccttatcatcctcgttattctctgcagtatcaggaggagcagcgggctaggacctattcctaggccggaggaatgcgtcgaaaagaggaaggagccctccctaaagtcagaagagaagacttacgtcaaggaagctgaaaagaacaattcgtaggtaaaactaaaggagaattaggaggtggaaactaagtaaccaacgaagagtccgatccccaaagtcatattgacgttgaaccctcataaggaa

SEQ ID NO: 1336 - DNA, 448 bp, Gossypium hirsutum
  Clone ID: LIB3083-027-Q1-L1-C12
ctcagatcagcggactttttggtcgtaggaacctggtatgagtgtactagaccagcccggctctgaacgcggaacgcctccgttgaccctcccgccctagccggaccgctcgagagcccactcgcagtaacccccgcgacggacctaccgtggtagtccgtcacgaagcctccagaatgcgaggaaccggtaaatcacaacccctagaactaacccccgaggttacccgcgaccactacgtagaaaagtaatctcgtagaaacaagggaaccaacagcctgacgtaccctttagacggcttccagttgcgctatcaacgcgaaactcggacggaaaagcgcccccacggcgcctatagtcgtcgtcgtcgacgagtggaagaacaccgctccgccggtccccgagataacggaaaaaacagcgtgagaacatcccttctacacaatcg

SEQ ID NO: 1337 - DNA, 318 bp, Gossypium hirsutum
  Clone ID: LIB3083-027-Q1-L1-C2
tttattttaatgttgtagaaggtaaattgttgaattttgaaggaacagatccaccaaaaatcagctaaaatttagaccaaaaagaatgagttcgtcaaggagtgtaaggaagttggaagtggtatcaccagtgccggcagacatagatattgcaaactcagttgaaccatttcatatttctgagattgctaaggaccttaacctcagtcccaaccattatgatctttatggcaaatacaaagccaaggtgttgttatctgtactcgacgagcttgaatcctccgacaatggatactatgtcgtggttggaaggatcac

SEQ ID NO: 1338 - DNA, 421 bp, Gossypium hirsutum
  Clone ID: LIB3083-027-Q1-L1-C3
ctcgtgccggagttttttttttttttttttacgtatcaggggggtattattattaggttgagcaagtacttattcaagtacataatatcatgcaccattatcaaagtagccacaacaacactcaccgatttagggtttaaggggggttctctgtcactggtattacattcacgaccgacaatccatatgcaacagggatttaaattccctgcgagaaactcttaacaacccaagcacgctagaacaaatgaaatcaaagtgaagaacacggaagcaatacgcagcaagctctagacacctgtaccctctccctcacctgggtgttaaggatcacgacacatgaagtaggcatttgggttgctgcgtatctacatgatttcaatggaaaagagccatcacattcattctctaaagcactttt

SEQ ID NO: 1339 - DNA, 358 bp, Gossypium hirsutum
  Clone ID: LIB3083-027-Q1-L1-C4
agaagatgtcctggcaagcgtatgtagaatgatcacttggtgtgtgatattgagggcaaccatctctctgccgccgctatcattggccaagacggcagcgtttgggcccagagctccaatttccctcagttcaagccagaagaaatcactggcatcatgaatgacttttctgaacctggatcgcttgctccgactggattgtaccttggtggcacaaaatacatggtgatccaaggtgaacccggagctgttattcgagggaaaaagggccccggaagtgttactgttaaaaagaccaacctgtccttgatcattgggatctatgacgagccaatgactccaggtcaatgcaacatga

SEQ ID NO: 1340 - DNA, 397 bp, Gossypium hirsutum
  Clone ID: LIB3083-027-Q1-L1-C5
ggaagttccactatcatatattaccggttccatgggaggtcctctggaggtagatgaggtcacaagcctattaaaacgaatgcaattgcatgctgaaaaagctggatcgggtgaagctaagatcagtgtgtctgtacctccaaccagaagtgacattcttcatccatgtgatgtcatggaggatgttgcaattgcttatggctataataatattccaaagagaacgctttcttctttgaagccccttcccttgaaccagctcagtgatcttattagatatgagattgcgatgaatggttttactgaggtgttgacatggattttatgttctaagaaagagaattttgagatgttaaaccggaaggatgataaatccactgcagtgatcattggaaac

SEQ ID NO: 1341 - DNA, 373 bp, Gossypium hirsutum
  Clone ID: LIB3083-027-Q1-L1-C6
cggcacgagttggggacatctatggtggcatggatgacgctaagattggcctgtctgcatcaaccatagcttctagttttggcaaggctatttctgacaagaaggagcttcaagattacagacctgaagatatttccttgtctctcttgagaatgatttcctacaatattggacagatatcttatttaaatgcacttcggtttgggcttaagcgaatcttttttggaggatttttcataaggggtcatgcgtataccatggatacaatctcctttgctgttcatttttggtcaaaaggagaagcacaagctatgttcttgagacatgaaggatttttgggagctgtaagcgcatttatgagttatcaaaaaca

SEQ ID NO: 1342 - DNA, 411 bp, Gossypium hirsutum
  Clone ID: LIB3083-027-Q1-L1-C7
tacatataagcttgggttgaacaagtttgctgatgtaggcaaccaagagtaccgagccaagttcttgggcaccaggactgaccctagacgtcgactcatgaagtccaagatccccagctcacgttacgctcaccgtgccggcgataacttgccggattcagtagactggagagatcatggagctgttagtccggtcaaggatcaaggatcttgtggaagttgttgggcattctcaacaattgcaacagtggaaggcataaacaaaatcgtgtccggtgaactagtctctctatcggaacaagaactagtcgactgtgaccgatcctatgatgccggttgcaatggtggcctaatggactatgccttccaattcattatggacaatggtggcattgacactgaaaaggatta

SEQ ID NO: 1343 - DNA, 375 bp, Gossypium hirsutum
  unsure (1)..(375): unsure at all n locations; Clone ID: LIB3083-027-Q1-L1-C8
aaacaaaccataaaaatcctatgatgctcttcttgtcagtaaactttcagaattgaaagtaaaatattctcaatttcattactgaattatatatacatacatatatatatttgaaggtgtcgcaatggagagcaccgactcgtcgaccggctcacagcagccgaacctcccaccgggattccggttccaccccactgatgaggaactagtggtacactacctcaagaaaaaagctagctccgctcctttgccggttgcaattattgctgangttgatttgtacaagtttgatccatgggaattgccagcgaaggcaacgtttggtgaacaagaatggtacttttttagtccgagagacaggaagtacccgaatgg

SEQ ID NO: 1344 - DNA, 144 bp, Gossypium hirsutum
  unsure (1)..(144): unsure at all n locations; Clone ID: LIB3083-027-Q1-L1-C9
ccccccgccccccccccctccccccccccccccccttatgcggaacccnccggcccgacgaaccaccaccacctaattggccaattccaaaaaaagccggccaaaaggtaacggacccataggcaaaaaaaaaaaattttttcc

SEQ ID NO: 1345 - DNA, 431 bp, Gossypium hirsutum
  unsure (1)..(431): unsure at all n locations; Clone ID: LIB3083-027-Q1-L1-D1
ctgccatcacccgcctgtcacagaagcaaccgttcgcggactgggctgacccgatcaacagaatccacccgtttctaaagaaccgaaccaagacccaagccagggagtatgttcggttcccaaatgttgtacggaaagtaagagaatatgagatctccccctcccttttcagttcttcgttctcttcttcctcttcgtcttcaacggcgtcgtttgggaagctgggttttgttgggtggtatttaggaatggtgaagtcgtggcccgttttaaccaagagcgttacttcatcggctatttatgtagctgctgatttgtcttctcagacgatttcgaagtcatcttcagaaccttacgatttggtgaggacttcgcgtatggcgggatacgggtntgtaatattaggaccatcactgcatctttggttcaac

SEQ ID NO: 1346 - DNA, 458 bp, Gossypium hirsutum
  Clone ID: LIB3083-027-Q1-L1-D10
ctcagatcagcgggctttttgggtcgtaggaacctggtatgagcctaggtcaacgcctcgaacgcggccgacgctctccacggaggcgagaacggccctaattgagtaactgagtccctagtagaaacttcgctgaacgcgaaacctacataggagaagtgcccaacagggaaacatcccgaggagaccagctaagacattgggaagcacgcccctggcgcggacgatatatcgaaggttccggagacgggagtcgccgagacatccactgcacgggaaaacacggatacaaacaggcatacgccgaagaatagtgccattggcgaagccgctacaaaatacccgaataaggaataagaagtcaacacgattaatccttaggatctacttaatctagtcgacccggaggcctaagaaaagacgttatccccagagcggcccgtcagcgaacataagtg

SEQ ID NO: 1347 - DNA, 422 bp, Gossypium hirsutum
  Clone ID: LIB3083-027-Q1-L1-D11
cgcggtgcttgtctcagaatcagcgggctttttaggtcgtgaggaacctggtatgagacggtagcccccgtaatggcgactggagtatcgtcggctgccgggtattctaaacgcggcgtgaatctctcatgtaagtctttccacacgtgatacttgcgggagtattcgccggggacgggctcatgagttgcgcgtgctaattagtctgcgaaccgggatgtctagtcctaatgggattccgatatcacgtctgaaaaggttaaactcgttaatcagtgtcgtcatcccgacggagacgacgaccaacgtccctgttttactactagaaaagatacctacgtgttaagtctacgtcgctacaaattcgcctatactacgtgcagacgaccacacatcgttcgcacgtcccagaaatcatccct

SEQ ID NO: 1348 - DNA, 460 bp, Gossypium hirsutum
  Clone ID: LIB3083-027-Q1-L1-D12
gtctcagaatcagcggactttttgggtcgtaggcgcgcccggaaataagacagtcgggcattcgtccaccccgtaccggtcacccgcataacgccgcggcttccgattggcacggcggaagtctaggcacacgccattagcggtattaccgtctagcggcatcctcttaaagacgacatgaaattctattggagtacaagaagactcccgagaaacgtacccggcttcctcctcggtattactcgctcactcggaccatccgctcccgccgcctgagcggcgtgcgtcgtcgccgacagcgtaagagaagaagacgccttcgggacagcgaactccgcctcttggcgccgcgccaacgtttcatcgctcgtgacagatccctccaataagcctatcactaatcccgtggtaacaatcggtgaagtacaccgtattctcgtgaggacgatacatgagtcct

SEQ ID NO: 1349 - DNA, 394 bp, Gossypium hirsutum
  unsure (1)..(394): unsure at all n locations; Clone ID: LIB3083-027-Q1-L1-D2
ctccatccttcctcatttttcagtgccgctatcttcttggaagaatcaaatggcgaacgaaggtgccttaaggtcggctatagtatggctatcggtgatcatggttttagttgggttattcacgttttctttgaagaaaattatggtaacttacgcgtttgggatgctcggaattagtgggatactgttgcccgactgggatttcttcgatcgtgatttttctcgctggccttatccggttactgccgacgaaagagctgctcttcaagctcgaagatctggattcaaaaggtacaggatttacccaatgagactaattatttacaccancanttatagcattggcccttacaaagtgtggattttcgtatcaagttaaatccaagaactctac

SEQ ID NO: 1350 - DNA, 385 bp, Gossypium hirsutum
  Clone ID: LIB3083-027-Q1-L1-D3
ctagtctcgagtttttttttcatttcctttttttgtttgttggttttttatcgcgggctgttcaattattcttttttgggaaaaagatctctctctcactctttctctctcctctcttccctgatctcattagatccattcaaagggccacaaatcatcagaggaagaagtaaagcaaattaacaaaaatggcagcaacattaggagactcaagctcctggtccactgctcttgtcaagatttcaccttatactttcttcgccgtcagtatcgccattgccatcggcgtttccgtcctcagcgccgcctggggaatttacattacttggagtagtttgatcggtgccgctattaaagctcctcgaatcacttccaagaatcttat

SEQ ID NO: 1351 - DNA, 456 bp, Gossypium hirsutum
  unsure (1)..(456): unsure at all n locations; Clone ID: LIB3083-027-Q1-L1-D4
tctagaactggcgggtggatccggctgcatgctttaccatgcctcgccacgattctttgcccttgcggacttcaatgacctaggtgggataggccctatgagagacttgctggtggccaatacactttgcaattcaacgatgagtctggtaccgtccgcctcgattccggatggagcaaaacaaaagtcactagcgcagtacatacgtccaagccagtcgcagtctatcaaatcgataaggtccttcttccggaggccattttcgggaccgacatacctccgacacctgcacctgccccggctcttggtattggcccatcagctgacactccatcagcagcaaaatccgaagaaactggttcctcatcaaagccttcgttttcgggttcatcatctcctangatcatgatgaanctcggcatttggacttcagctgttttggcattcttaggtgga

SEQ ID NO: 1352 - DNA, 384 bp, Gossypium hirsutum
  Clone ID: LIB3083-027-Q1-L1-D5
cggcacgagtattggtgtcaccactgaggaactcgtgcggaaggcaagacagggtggtatttcagcttaatgctatgctacctcggtgaggatggtgagtggaggatatacatgtatgaacctgagccacgtggtaatgaggttatcagaaccctaaaatccttgcttcatatcatgtgacatgggaactgggatgtgggtgggaagacgtggtccagcaagcagctatgcagttgtgcatattgttgattttaatgtgtgtgtgtatttccttatctcaatttgagggtttcattttctgtcatctatgtgctgtacattatattttggggtatgtggcatgttgtagctttatgaaaaaaaaaataaaaaaaactcgcggca

SEQ ID NO: 1353 - DNA, 418 bp, Gossypium hirsutum
  unsure (1)..(418): unsure at all n locations; Clone ID: LIB3083-027-Q1-L1-D6
attgtctccaaggttttcaagtttgccactctctgggagggggaactggttcgggtatgggtactctgttgatttctaagatcagagaagaataccctgatagaatgatgctcacgttctcagtcttcccatcaccaaaggtttcagacactgtggttgagccgtataatgccaccctttctgttcatcagcttgtcgaaaatgcggatgagtgtatggtgttggacaatgaagctttgtacgatatctgtttcaggactctcaagttaactactcctagctttggtgatttgaaccatctaatctctgcaaccatgagcggtgtgacatgctgccttaggttccctggccagctcaactctgacctncggaaacttgctgtcaacctcattcctttccctcggctccacttttttat

SEQ ID NO: 1354 - DNA, 424 bp, Gossypium hirsutum
  Clone ID: LIB3083-027-Q1-L1-D7
aagttgaaggcatcctaggggctttaaaaccagaggtgggtttttatgattgctgggtttggatcccagacttggctcgccaacttgggatccactccatatgctatgtactggtttcctcgatgatcatgtcgttaggatcaaacatcaggacgataaccaaagaaacgactgtagaagaagtggcgaaattgcctcctgattacccttcttccactgtgaaattcaaagctgaagaggctgctgcattgttgtttgaggctaacgatttcgggagtggactgtcgtttggggaacgcacaaggactgctgtgagtggaagtgatgccattgccttcaggacttgccgtgaaaccgagggaccattttgcgactattttgctcgaggaattgggaagtctgttttgttgacagggccttgctt

SEQ ID NO: 1355 - DNA, 310 bp, Gossypium hirsutum
  unsure (1)..(310): unsure at all n locations; Clone ID: LIB3083-027-Q1-L1-D8
tcctttattgctttttagaatttttcttaatcgaaaatgagggagtgcatttcgatccagatgggtcaggccggtatccaggtcggaaacgcttgctgggagctttactgtctcgagcatggaatccagcctgatggtcagatgccaagtgacaaaactgtcggaggaagtgatgatgcttttaacacctttttcagtgaaactggtgctgggaagcacgtccctcgtgccgtcttcgtggatcttgaacccactgttattgatgaagtgagaactggtgcttaccgncagctctttcacccagaacaac

SEQ ID NO: 1356 - DNA, 435 bp, Gossypium hirsutum
  unsure (1)..(435): unsure at all n locations; Clone ID: LIB3083-027-Q1-L1-D9
tttttgggtcgtaggaacctggtatgaggaatccgtccaaggatctccccattaagcttaatcctcggacggtacccttacacgcagtcgtcctcgaggaggaaataacggagaacccgccggccctaagccccaaggaagttcgcgtttatggcccgggagccgtcaacgccgtaaccccggaactgcgtctcacagagggcggagacccttagaaatccgtaaatccgtacctagcttacgactactcagccaaaaggacggaaaagagaataaagggggagatcgactcggccgcttcacgttacggaggtccctagctctcgaaagagtccgattaattacctttagagagcgagaccccgatcgaagctacgagcctcgcggagtaactcggggtaaaacacgtagtttcccacgcnctcgatttcccca

SEQ ID NO: 1357 - DNA, 402 bp, Gossypium hirsutum
  Clone ID: LIB3083-027-Q1-L1-E1
gagagagagaaatccaagtttttgttggaggaagtaggcgtgccaagggggcttttgccgcttagagacatcgaagaatgtgggtacgtgaaggacacaggtttcgtgtggctcaaacaaaagaagagcatcacccacaagttcgaaaagatagggaagctggtttcctatgcaactgaagtcacggctgtcgttgagaaaggcaagatcaagaagctgactggggtgaagaccaaagagcttttggtttggatcacactgagtgatatccaagtggatgatcctcccactgggaagatcactttcaagaccccttcaaggctgtttaggactttccctgtatcagcttttgagattgaaggtgaacaagttaaaggttctaagggtaaagatgaagagaaa

SEQ ID NO: 1358 - DNA, 460 bp, Gossypium hirsutum
  unsure (1)..(460): unsure at all n locations; Clone ID: LIB3083-027-Q1-L1-E10
ttcggtgcctgtctcagatcagcgggctttttggttcgtaggaccttgttttaattaggccctccattttattaggaattctcttactcatcatgcggttcctgccctgtgggccgcttataaggataatcctccgatcgagataaggactgggtagcctgcgtagggtatgtgtgaggcgaatctggcggaggtaagccacctggcggcggacctccctgcggaaggaaaggccgctgatgtgacgaacggtgagaggagttgcggtgagtctaagcctaacacaaaggcggctgttgatgccgtgccctgacatggagggcggagaggatggtgcaggacatccacggcccggcgcgatgatgcggtgtccatcggccttcntggaaagacgattggtggccttaaaaaacgttacgccgaccgacccatcgagtacacgaacggtacctacggccaa

SEQ ID NO: 1359 - DNA, 383 bp, Gossypium hirsutum
  Clone ID: LIB3083-027-Q1-L1-E11
ccgctccgaaggaaaggccggaacgacggggggagaagtagtaataatttctggtattcccgcgccgcccgtcctggcctatttagagaccgccctccctccttccgcggataccgcgtcattcgccccatgcgcggaataaggaccgtagaagaagtcggcatccgtttaacacgctgcatgaagacgaagaaagcttggaaggcccccatagcccaaggtggccccaatttacacttgcccacgagtacgacccgcacgagacccgtccttctcgcacacgacgcaatctccggtcgattaacgaagcaaacgcaatcacaaattccggtactaagccggcgaccgactacctgaaaaaccaacaccgccctgaatttccc

SEQ ID NO: 1360 - DNA, 429 bp, Gossypium hirsutum
  Clone ID: LIB3083-027-Q1-L1-E12
ctcagatcagcgggctttttgggtcgtaggaacctggtatgagtcaattacgtcaccagggcccgggaccgaaaccgaagtggagtgaacggaccgccgaaagctggaccaccggaaaccggggaacctgatagaaacgggaagtgaagatgtcgatagcgacaagagcaagtaacggctgctcttaaatagggtccacaaagggaaggaggaagattttaaatcccggggatccccttctcccggcccaaccggtgttatcgttattatccctgtcgccagctagtcgaggaaactcgccgaccggacgcccgtctagccagttaggctctaaccactctaaaggggaggcctcccctgaatacttccctaggaggaagtacggagaaggcataattgctgaccgtaagaagagcatgaggaagaaac

SEQ ID NO: 1361 - DNA, 368 bp, Gossypium hirsutum
  Clone ID: LIB3083-027-Q1-L1-E2
tcaagattatcttcaaaagtgcaatggtccaaaatcacggatcggagtttccacaacttgtgcaagacttagagcaagcaaacagcaggccgaaatcccactctcgtagtctgtcagatacagaaaagccttgcaggaatggtaatgtcaagctatttggtcagatactcaattccagttcccaggacgatgggaagatccgtttccgtgaacagagcatgaaatcttcgaatttgaacttcagaggtcataacaatgttgatggaaatgcatctttctcaaagtttgatcaaaatatcatttttgcaccggaaaatgttcccaggagaagctattgtttctgggatggcaataggatacaaactggg

SEQ ID NO: 1362 - DNA, 277 bp, Gossypium hirsutum
  Clone ID: LIB3083-027-Q1-L1-E3
gaagatttgtatgaagaacacatgtgatgaaagcgaaagccagacgaagttgtcggtaatgcagcatatacaggtatgtgattcgagtggatttgtatgtaatgagtaatgaaagtgtcttttccctatttttccctttcacgagtttgctttttttggtttctatttgagagagtaatgtataatatatccgaaaatagtaatgtaatacctatatctatgtttgtattcatttggtttttgtgtattatatgatcaatgccttattttttctctt

SEQ ID NO: 1363 - DNA, 324 bp, Gossypium hirsutum
  Clone ID: LIB3083-027-Q1-L1-E4
tgcattaattccgaaccagcaagttatttttatccttacaagtcaatccatatggtagtttattcatatggtgagcgtgaagacacttaagcatccatgcatcttaatctcacacattgtgatttacccacccctagctcaagaacccataacccgttcttattgattagtcagctctatcaaacctccttccttttttttcaccgaatcgtactattactgatcccacatgatgctctgccatcatcataaatacctctctatctctatgcattaatccataagaacctatctaacttgtactcaccttatacttaaattcaa

SEQ ID NO: 1364 - DNA, 399 bp, Gossypium hirsutum
  Clone ID: LIB3083-027-Q1-L1-E5
agaattgaaacagaggggggaaggaataaaggagtagagatggggctcaaaaacagagtagaagaagataattgttcagtgaatgaagctttgttgtttgtcaccatctccatcattggtctgcaagtagatgtacacttgaaagatggctccgtttactctggaatcttccacactgcttctgttgagaaggaatatggtattgttttgaagaaagcaaaattgactaaacagggcagatgtgccaccaatgttgcgaatggcagtgtagtagagacgcttgtaatccttgctggtgatcttgttcaagtttttgcgaagggagtcccacttcctcttgatggttttgctggaaatatagcttgcggtaatggagaagctgcttctgagattccccct

SEQ ID NO: 1365 - DNA, 335 bp, Gossypium hirsutum
  Clone ID: LIB3083-027-Q1-L1-E6
gttgagcctattgcgcctgcgagttatttcaacgagaggattgattatatgaagggcaaggtccatcctaaccttgctaaagaacggagagccatcataagggaatatgaacaacttaaagtaaggatcaatgcattattctcaaaagctcatacgaaaccaaaacaaggatggttgatgcaaaatggcaccccatggtcctgaaataacactcttgatcatcctggaatgattcacgtctatctatgaagtgccggtgcactccatgtcgatcgcaaatagctgcctcgactagactatgtttctcgttagaaacgacctgattatcagcacca

SEQ ID NO: 1366 - DNA, 341 bp, Gossypium hirsutum
  Clone ID: LIB3083-027-Q1-L1-E7
gttgtctaatacgacaaatccttcacttggaaataatggctccttatctgaaacaggaaagttgaagggagattcacttgaatcattgcacgtgaagcagattaaaaagcacattagtacacctgttccgcatgattcatattcagttctttccataagcagttccggaaaatatcttgcaattgtgtggcccgatattccttatttctcaatctacaaagtcagcgattggtccattgttgattcaggaagtgcacggcttctggcttgggatacatgttctgacagatttgctatactagagtctgcattgccttctagaatgcccattcctcccaaag

SEQ ID NO: 1367 - DNA, 194 bp, Gossypium hirsutum
  unsure (1)..(194): unsure at all n locations; Clone ID: LIB3083-027-Q1-L1-E8
caagttatttttttccttacaagtttgttcatctggtcgtntattcatataggtaggtggatgtcccttaaacttgcatgtctgttggtgttgtgcatggtgatgggtgcacccctggctcaaggggccataacccgtgctgatggcttaatctgcctcccacgctgccttccttttntgtcatggaatggtga

SEQ ID NO: 1368 - DNA, 422 bp, Gossypium hirsutum
  Clone ID: LIB3083-027-Q1-L1-E9
ggggctttttggttcgtaagaaccttgtattaaggccccccccccccccccccccaattttttaaacccaatggggcgttatcagcccaggcccgtagttaccccattagattaaattaggcattaaaccttacgatagtccaacaacacacgcagagcttacacggccaaaacgtacttccaccaaactctacaacactataatatttcccctagacccgcctctcttaatctctctcatttaagacggagaactcctccgctacggcgggagcagggagcgggagccttctctctaactatacccggagcgaagaaaccgtgagacgttaaggtccgaacagtacctagtctcgtcttcgccattacgcccgtccttctaatttctctcactctcgtaactccagtctggagatacatat

SEQ ID NO: 1369 - DNA, 407 bp, Gossypium hirsutum
  Clone ID: LIB3083-027-Q1-L1-F1
gtttctttcaatctttgcaactggtattctcgagctaaggtggagtggagtaagcattgaagaatggtggaggaatgagcaattttgggtcatcggtggcatttcggcacatttgttcgctgttatccaaggcttgttgaaagttctagctggtattgacactaatttcactgtcacatccaaggcaactgatgacgaggagttcggggaattgtatactttcaaatggacaacccttctaattcctcctactaccgtcttaatcatcaatttagtcggtgtcgttgcaagcatctcggatgccataaacaatggataccaatcatggggacctctttttgggaagctcttcttctctttctgggtgattgtccatctctatccattcctcaaaggtttaatgggga

SEQ ID NO: 1370 - DNA, 450 bp, Gossypium hirsutum
  Clone ID: LIB3083-027-Q1-L1-F11
tgtctcagaatcagcgggctttttgggtcgtaggaacatcgtatgaggagccgacccccacgacttccatatacaaacttcatcagggagtttcacccacccggttccgagaccacaaaaccgaactatatctatattaatatcccacgttaaccgccataaataacctgaacacataaccccctatcccgaaaccccaccatatgaagtaactcacgccatacgtctcgacgtaaaataaagagttcctacagagggctcacattcatagtacaaaaaaccagcaccatagaccacatacaccatcgaacgtccaggacggtacattattcgatctatcgaccaggagaatccccaattctgaagggcgctttggcatttaacctaattcacaacgagctacaccataacctatcggttccttactcataatgctacgatcgggaaaat

SEQ ID NO: 1371 - DNA, 420 bp, Gossypium hirsutum
  unsure (1)..(420): unsure at all n locations; Clone ID: LIB3083-027-Q1-L1-F12
tcagaatcagcggagttgttgggtcgtaggaacctggtatgagcaaaagtcagtaacactccgccggacctgaagtcgtgagggagaaccgttgatcctgggcgggtaaggctcccttaggaagactagagctatactagtatcgttaccgttgggatttcaggacacacggtcttggagcattcagtttacggttagccaattgagaaagtagacgctcacagccctggngcgtccccatctgaaacagccatagggaagtaaaataataagagtaaagtaatagaacacctagatagtacagcaatagccatccggagatacccctagccagggatcgcggaggagacccacgatttaaactcaacgccatataacgataataacggtagtaatgccaggaacgaaaacnctagagtg

SEQ ID NO: 1372 - DNA, 254 bp, Gossypium hirsutum
  Clone ID: LIB3083-027-Q1-L1-F2
acatgacaatggatttcacacaccttataagtacagttgggggcaagagaggtctccaagaagtgcactgagtccacgaagtgattcccttgatttagccattgatggtgtggtggcaacctccattgagcagctttatcacaatgtttatgagatgcaaagctctgatcaatctccatcaatgtctagttacggatcttacggtgaagaatcgaggatcgattccgaattacgccatcttgtcggggatctcg

SEQ ID NO: 1373 - DNA, 385 bp, Gossypium hirsutum
  Clone ID: LIB3083-027-Q1-L1-F3
cttaactaaaaggatggaaataccattaggaagcagtgataaagttagtttcagacattaaatttacagaaaaacaaaggttccaagttcagacagttaaaataactgtcatcgtaaagggcaaagcatttactcaagcaaacaccatatagaatttacaccttttcttttagctatatatacataagcttctttctgcattgcattgaatcaagctaaaagtaaaggggaaccaaatgtgttttctccactgtaagtcatgtaaagaaaaccatcttcatccctgttttcctcgtaaatagcggacatcaaggcagcagtaggtgggagagtgttcttcacaaagacaaatatagctttctcggcactaagcttaatcctttta

SEQ ID NO: 1374 - DNA, 406 bp, Gossypium hirsutum
  unsure (1)..(406): unsure at all n locations; Clone ID: LIB3083-027-Q1-L1-F4
aggccctataccttacgagtgtgtaagaagagctggcggttgggaaagacaccaagccgggagaggttccatcattcagcagattttaaggctagctattgaaactcatagcacagctactaaaaagaataaggaatggcaagttaaaattattactgtcatcgtcaaagccgaggagattatgtattccaaagccaattctgaggctgaatacaccaacccggaaaccttatgggaccgtgctaatgatgccatcaacacgattatccgtcgagatgagagcactgaaacangagagcttttgccaccttgtgttgaagcggncctaaacctgggtgctattcagtgagagcttcaagagccaacgacacagtaatcctaggacttaccttacgccaagagcacc

SEQ ID NO: 1375 - DNA, 392 bp, Gossypium hirsutum
  unsure (1)..(392): unsure at all n locations; Clone ID: LIB3083-027-Q1-L1-F5
caagctagctaaggtcaaagctcaggtttctgaagtcagaggtgttatgatggaggacatcgaaaaggtgttagatagaggggaaaagatagagctgctagtggataagactgagaatcttcataatcaggctcaagactttcgaagtacagggacaaaaatccgaagaaaaatgtggctacaaaacatgaagatcaagctgattgttctaggaatacttattgccttgatccttatcattgtcctctctgtttgccatggtttcaactgtggcaaaaaaataaatgctattcttagaaggctgtattagctttcaccgcagcttttgtgatataatcttgtaagggaaagtttaaaatacatacatatatatataatactntatatgtcat

SEQ ID NO: 1376 - DNA, 303 bp, Gossypium hirsutum
  Clone ID: LIB3083-027-Q1-L1-F6
ggacaatcaccggttttcattgcctcaactttggtggagaatggttgccttggtggaggaactaattccacatcactgattaaagaggccattcacgtaattagctgtggttatgaagaaaaaactgagtggggcaaagagatcggatggatttatgggtcggtgacggaagatatattaacaggtttcaagatgcattgtagagggtggaaatcggtttattgtgtaccaaaaagaccggcattcaaagggtccgctccaatcaatctctcggatcggttgcaccaagttttgagatgggca

SEQ ID NO: 1377 - DNA, 426 bp, Gossypium hirsutum
  Clone ID: LIB3083-027-Q1-L1-F7
tgcttctgaacatctggaaacagaggcaaaaaaatttggattgggttcaaaaaggacaagtaatcctgcatttattgctgcacaaaccaaatttgaggagttgagttcaacagccaattcaagtagatcaattgattcatcctaccaagatgttagagttgaatcaaacttggacactgtgccttctggggcagatatgataagcaggtcaaaggacccaagcatctcagaaaatccagtcctcaacaattggagggttcaacatggtggctccgaatgtggaactgagctttctattacttccactcttgattcacctgatagatcagaagctggaaccttagaatatgaaagtgcaaccaaagtttctgagcaagaaaactgtacttctaagagtacaaaagacttggatgttaaaaacaatga

SEQ ID NO: 1378 - DNA, 355 bp, Gossypium hirsutum
  Clone ID: LIB3083-027-Q1-L1-F8
cacttaaaattaaagtaattctttccgaaggtgagatggcaaataaggccagttgtttgcaaagacaaaaagttaaaaaacgtagttaaagagtaacaagtttatatatcttaattaaaacaagcatatgggctcacaaggaccacctgtatatataactttgttttttttatctctattctcctcaggctcagggtgtatcttattcccaatcttaactaccagcatagaataaacaccaacatataaccaaacacgccctttctttcttccccactatgaccaacccaatatctgcagctgacaactgaaatgaagggagccctttttgcctatatcttgcaattgcacccct

SEQ ID NO: 1379 - DNA, 423 bp, Gossypium hirsutum
  Clone ID: LIB3083-027-Q1-L1-F9
tgctcagatcagcggacttgttgggtcgtaggacacctggtttcaggtaaccctccccggcgcttctcttctgaacatactcgcgcgcggtcgtatagccggctagaaattcagtaaagttaagcaccacccggacgacttagtcgaggccgcaaatacgtccgaactctccgtagaagtcctagacttcgaatttcctctagatattagactagaagatcttacccgaaatacacttctgacggtcccagaaaaaacctcgcgtacgccacttccctaattagccgggaagaaggatacgttcgattctcgatgaaggcagacactaaccccccgtcaggcccgggagccgctcgtcgaaaacaacactttggggttcctcgctcgaccacccggttacccgaggtacagacgcggagcatc

SEQ ID NO: 1380 - DNA, 417 bp, Gossypium hirsutum
  Clone ID: LIB3083-027-Q1-L1-G1
cttatagccaccgccgctggtgttcaaaccgtacgttgggctgctattgttatcatcaccgtcgtctttttcgttttcctttccatctttaatattattggtggatttcttggcggggctagttttgatcctgctgctacaactgccttctacgccgccggttccggcgccgatacccttatctccatggccctccgcttcccagctcaggctgctggtgccgtgggtggtgccctggcgatcatggaggcaatcccggaacaatacaagcacatgatagggggaccatctgtgaaagtagatacgcacactggagcctttgctgagggggtcttgacttttgcaatcacctttattgttcttttaatcatgcttagaggcccgcagagtgaaatcttcaagacgtggtttctttct

SEQ ID NO: 1381 - DNA, 244 bp, Gossypium hirsutum
  Clone ID: LIB3083-027-Q1-L1-G10
tttttggttcgaaggaccttgttttgaggaattaggcaattggccccttaccttccgaaaaggaagggttcccccgattagtaaccagattattccgaaattcctaattcctgaactaacgattaaacgccaacgcaagaaggcttcaaatttataatcgaattcgaaaacttaccgaaattcgaattattcgtaacgaaggtaccgtaaaaagtattgaccacaaacgacgccgataaattac

SEQ ID NO: 1382 - DNA, 427 bp, Gossypium hirsutum
  Clone ID: LIB3083-027-Q1-L1-G11
aacctggtatgaggaaagattaccatcccggaggccgagagcctagacattagcgataacgctaaggtcgagacttaggataaggagggcacctttttagattaatagaggccgactcccgttggcaagtaatccgaagacggttgtatctctgtcgaccataatacttaaaaggaacttatttcttatccggcgtcctgctcctgcggcggcacgtagacccccgcgaagatctccattgggaaaattactattccggaagccgagagtcttgatatcaccgataacgctaaggttaaaacttaggataaggaaggcactttcttagattaatagaggccgacccctgtgggcaagtagtccgaggacggtaggatatccgtagatcataatacctaaaaggagctgatttcctacccggcctcct

SEQ ID NO: 1383 - DNA, 227 bp, Gossypium hirsutum
  Clone ID: LIB3083-027-Q1-L1-G12
ccccccccccgtgtatttgtccccttcggacgagttcggcccccaaggccggcaggtccttccaactttaattccactttcttaaagtctgttcaattggccttcgtatagttcctccctcctaccttcaacgcggcaatccttggacggatgagcatcctactagaatccccctgtacaactttctctacccggagctcgacatgaaaatttcctatccgccgtct

SEQ ID NO: 1384 - DNA, 413 bp, Gossypium hirsutum
  Clone ID: LIB3083-027-Q1-L1-G2
attgatcggacccttcttcgtgcccgggaccccccacagcctgtgttccaccacgtcgagtatcaaccaccaccggcaatgaagattccaccccagtccaccggtcctgaaagcacagcaatctccattttcaaattgacccgggatcaactcaatgcactcaaagcaaagtgcaaggaagatggtaacgatgttaactatagttcatacgagatgttgtcaggtcatgtgtggagatcagtctgcaaggcacgtggacttgaagatgatcaagggactaaactgtacattgccactgatggaagggcaaggttgcgccccccactcccacctggttactttgggaatgtgatcttcactgctaccccaatagcagtggcaagggatctactgtcaaagccaacatggtacgc

SEQ ID NO: 1385 - DNA, 412 bp, Gossypium hirsutum
  Clone ID: LIB3083-027-Q1-L1-G3
gagttttcttttctttttttaaacgatgatataaattctgacgttttttcttgatggttgattgtaaaaaataaattttgtttggttgaaattagatgtgaagaaagagattatgttttattttattttgtattaaaattgtaaatttttttttatgtgtatgtattttgcatgagacaggaatcgctgggttcgattttgtcagacaagatcggccaaattaagatttcaggagattagagaagatggaccctcatgatgagacgggccgccaagcttcagaaggccccatcctgtgtgttaataactgtggtttctttggaagtgcggcgaccatgaatatgtgctccaaatgtcacatggcaatgatcctgaagcaggaacaggcacaactcgtagcatcatccatcga

SEQ ID NO: 1386 - DNA, 397 bp, Gossypium hirsutum
  unsure (1)..(397): unsure at all n locations; Clone ID: LIB3083-027-Q1-L1-G4
gcggagcatccaccttaaacaccccgattttcttgtgtgtccttctcgaggacgtaattcctgggaatcatcacttcctcttccccaaaaagtcatcctcttaactgtggccctggcagaacactcaattaaacgccgtcctaataaaaaaacgctntctttttattaaccgacttgttaactcagtggtctctatctacaaaaccgagtcaagtggtgcggtttgatatcggtgatgcttcgtgagtttattttctttntcaagtgataagattcaagaaacttaaaaaaagagagaaaaatggatccggcagacatgatggtagggccgggtatggatatgccgatcatgcacgacagtgatcgatacgatttcgttaaagatatcgggtcgggt

SEQ ID NO: 1387 - DNA, 356 bp, Gossypium hirsutum
  unsure (1)..(356): unsure at all n locations; Clone ID: LIB3083-027-Q1-L1-G5
ctcgtgccgctcttttgaagcctaacatggtgacgcctggttccgactccccgaaggttgccccagaggttattgctgagtacactgtccgtgccttgcagcgtaccgtccctgctgcagtccctgctattgtgttcttgtctggtgggcaaagtgaggaggaggctacccttaaccttaatgccatgaacaagctccagaccaagaaaccatggtcactctcattctcatttggacgtgcccttcagcagagcactctcaaggcctgggctggaaaggaagaaaacgtgaagaaagcacaagatgctntccttgttaggtgcaaggctaactcggaggccaccttgggtacatac

SEQ ID NO: 1388 - DNA, 350 bp, Gossypium hirsutum
  Clone ID: LIB3083-027-Q1-L1-G6
caacagccaattcaagtagatcaattgattcatcgtacgaagatgttagagtggaggcaaacttggacactgtgccttctggggcagatatgataagcaggtcaaaggacccaagcatctcagaaaatccagtcctcaacaattggagggttcaacatggtggctccgaatgtggaactgagctttctattacttccactcttgattcacctgatagatcagaagctggaaccttagaatatgaaagtgcaaccaaagtttctgagcaagaaaactgtacttctaagagtacaaaggacttggatgttaaaaacaatgatacagttgcaatcccagtgcccgattcttct

SEQ ID NO: 1389 - DNA, 225 bp, Gossypium hirsutum
  Clone ID: LIB3083-027-Q1-L1-G7
aagctacatcctctccacctaaaacaaacaacttatcggtcgactttctcaaacgggagtctgtcctacacactatcccttattctacaactatcatatccaaaaccaaacaccctgttccatccacatattcagtactcaaccattattatacatcaccacttacacgccttcatatgaacacatcccttcattatcactattactcatcatacaactatctac

SEQ ID NO: 1390 - DNA, 386 bp, Gossypium hirsutum
  Clone ID: LIB3083-027-Q1-L1-G8
tcacatgctgccttcgcttccctggccaactcaagtccgatcttcgaaaacgggcggtagacttgatcccattcccacgcctccattttttcatggttggttttgcacctttaacatcccggggttcacaacaataccgagctttaacgatccccgagctaactcaacaaatgtgggattccaaaaacatgatgtgcgcggctgatcctcgtcatggaaggtacttaacagcctcggcaatgtttcgaggcaaaatgagcaccaaggaagttgatgaacaaatgatcaatgtccaaaacaagaactcttcgtactttgtggagtggattccgaacaatgttaaatcaagtgtttgcgacatcccaccaactgggttgacgatgtca

SEQ ID NO: 1391 - DNA, 367 bp, Gossypium hirsutum
  Clone ID: LIB3083-027-Q1-L1-G9
cgctacgggaagggactcaacacacagctggccgtgtaggcaccatagtggaggagaaaagcaaagaggtgaatggagagtagactctaaaattaccctacctacgctccaatactttaaacaacacggactgaccatcgaaagtcgtaagagtccttggcctctctaatccacttaactgactctctagagacgccttggaagagactcatagaagtccggacgtcgccggggaaggcgaaaaacggcgggaggtcgcggagtcataaaagtcaaccccggtatacaataacactgagctaccgaaggaagaagcgaggaatccattcccaccgatcgcgccgaaacgcagctataacaagtccat

SEQ ID NO: 1392 - DNA, 427 bp, Gossypium hirsutum
  Clone ID: LIB3083-027-Q1-L1-H1
agatggtcgaacatgtgtggagagaatcaatgctgccagtaggattttcaataacaagcttaggggtcttgtcgatcaattcaataacgccaattctgatgctaaattcatctacattaacgcctatggaattttccaagacatcaccagcaaccctgcagcttacggttttaaggtgacaaatgcaggatgttgtggagtggggaggaacaatgggcaaataacatgcttgccattccaaacaccatgccagaacagggatgagtacttgttttgggatgcatttcatccaagtgaggctgccaatgtgatcattgggaggagatcctacagcgctcaatctcctaccgatgcttaccccattgatatccgccgtcttgctcagctctgaaacttgaagtcgacgaggtttttgatgggaaattta

SEQ ID NO: 1393 - DNA, 419 bp, Gossypium hirsutum
  Clone ID: LIB3083-027-Q1-L1-H10
ctcagatcagcggactttttgggtcgtaggaacctggtatgagttaagaaccgcctctgccctacgaaggcgtataagcatgcgaaagtcttaaccgataccgatcactaatctgacaaccaccactagaattactgaaggcacgctaaaagtagaagtgacaagtaatctccggacggttagaagcactacgatataagcctccgctagttcgcggagctgaacaataacaggttcaccgccttccgtggaccgacagtacggagcccacccaacgacatacccgaacccacctgcgagggagtagaatctaaagcgaataggaaaaataccgtgcggaagagcgacaggggttataaacctggaaagaacgcacacttccctaacccttaaaacggaattccgaccggcggcggaaa

SEQ ID NO: 1394 - DNA, 459 bp, Gossypium hirsutum
  unsure (1)..(459): unsure at all n locations; Clone ID: LIB3083-027-Q1-L1-H11
tctcagaatcagcgggctttttgggtcgtaggaacctggtatgagctgaaattgctctctatattagtccctgctccctagtagcggttgttattatcgtaggtatccttcccaaagttgtatcttccctcatattgctgacactcctactgattaaactaattgcttctaaattatgtcccatactactactgcttctatggcacctgttgaccttaaaactatcgacagtctactacgctctcataaagattaatgttactgctgttaagacggggatagctttcctgttagccctcgagatgatactgtccgatccttacattcntgccccttagaaagaaaagactctctccgtcggctatgaagagcataccgcgagaagaggatggtacccacctttcccaccggacgacgtccccaagggaactaaatagaccggcgccaccggccggggcc

SEQ ID NO: 1395 - DNA, 392 bp, Gossypium hirsutum
  Clone ID: LIB3083-027-Q1-L1-H12
tcgtaggaacctggtatgagctcgtcttctccagccctttcccccgctttccgcccacgggacgtccttaatctacggtcgttgtcgacgctcagccttggcgtcctgctcgagggtctgtacgggttattgatcattgggtttccgaagaagttcctagcgtgcccggcgaaactgctcaactgaagactaccaacgactgcgagatcggaagactttgacgtcccagacctgccatcccttgcgatgagaaagtcacgagggatgtgactgaaggaacgaatggctaaaactccgacggaaggaatacaatcgctaatgaactttaactgtgtagaagcggacgtcgcggtcgacgacccggaggaagaaatggccgccatagttgtggc

SEQ ID NO: 1396 - DNA, 408 bp, Gossypium hirsutum
  Clone ID: LIB3083-027-Q1-L1-H2
gacgttgtcaatacaaaacgatggaataagattaaagtaagaaaattctcaaggtcaggctggaaaccgaagcataatcacaatatattctgtcaaaaacaaaaatgcaacagtcgcgaatggaaaaagatggaaatgataaaagaagggaaagtttttttttactatccctaaacacaacaaagggaaatcatccagttccatccatggatctcaaaaaaacttggttaatcgattaaaccaatgtcggacgggcaactcgcggcctcacgggtgtcttcgaaggacttaccctgataagctgggttcctagcaccattccactacaattcagtgcgactatggcactttccgccatggcaaattcaacaaaagcaattcgggttgaatgaacattatcacctaaaa

SEQ ID NO: 1397 - DNA, 405 bp, Gossypium hirsutum
  Clone ID: LIB3083-027-Q1-L1-H3
agatgggagtagaaggcaccttggaatacatctctgatgggcttagcagcgtgaagaaggagaagaagaagaagaagcaaattcaaactgtagctctcaaaatcaggatggattgtgaaggttgtgctcgtaaggtcaagaaggtcctctccggcgtaaagggggcaaagtctgtggacgtggacttaaaacaacaaaaggccaccgtgacgggttacgtagaggcaaagaaagtactggcggctgcgcagtcaaccaagaagaaggtggaattgtggccttatgtgccttacactctggtggctaatccttatgtggctcaagcttacgacaagaaagctcctcccaatcatgtcaggaaggttccggccagtgccaccgtttctgagaccaccattgacaacc

SEQ ID NO: 1398 - DNA, 425 bp, Gossypium hirsutum
  Clone ID: LIB3083-027-Q1-L1-H4
cggcacgagctggtgttcaatctcggccggtgagcggggagtgcccaataggaagctctgttgcttatggggaacacatgtcaaataaacgagttcatccatatcctatgtctgaacctggaagtgcaagatgggatgaaaagaaagagggaggatggagagaaaggatggatgattggaaaatgcagcaagggaatttgggtcctgaacctgatgatgcctatgatgctgacatggctatgcttgatgaagctaggcagccattgtcaaggaaagtgccaattgcatcgagcaaaatcaatccttatcgtatggtgattgtggctcgtctagttatccttgctttctttcttcgctatcggattctgaacccggtacatgatgcaattgggctttggctaacttccgtgatctgtgaaatctgg

SEQ ID NO: 1399 - DNA, 390 bp, Gossypium hirsutum
  Clone ID: LIB3083-027-Q1-L1-H5
ttggttgtacagctctgctcggcgacgatctgatgttcgtcgtctgtctgagggacaccaacttcaatcaaaatcaatggctgcaatcttcgctcgtaactctctcaacgctctccgagctcgacaccttgctgtgtcagggcaagtgttgcagggttcacagcactacgggttgcgactcagttcacgctcatatggcacgcagaaagatgatgaagaaagagagcagcttgcaaaggagatttcaaaggactggagttctgttttcgagagaagcataaacacactgtttctaactgaaatggttcggggtctcatgctgacactcaaatacttctttgaaagaaaagttactatgaactatccatttgagaagggtccattgagccc

SEQ ID NO: 1400 - DNA, 349 bp, Gossypium hirsutum
  Clone ID: LIB3083-027-Q1-L1-H6
gcgacttgccgttcctcttaatagctactctgccgcaagctattaatcgactagcgagggcaatatacataccgaaaagaaacacttctacagcagactgtgttacacaatgcaatgactcaaatgattgcacttattcgaactaaaaaaatgaaaaagaaaaatcactaaaagaatgtactgcaaacttagattaccaatagaaatatgaatatgtataaaaatctcaccaacttcaatcttgatggaatgcaaaacatgtgacctagcaaatcacactcagacatgacatgatcatgttacacaacctttgcaataatgctataaaatcatgtcctatattattatg

SEQ ID NO: 1401 - DNA, 306 bp, Gossypium hirsutum
  Clone ID: LIB3083-027-Q1-L1-H7
cccctggcttcattaattcctcactacacatatacaatatttacaattatctatattatctgtgcacctttaaaactgtggttgtcctcctattcaacaaccctcatatacaaatctcgataaaactattcacaattcacttcctataatttacactattttaatcatcttcatatactcatcttcttacaactacaactcattatccctgtcccttctaatttttcttaatactcacaacatttcttttcattacttctctagaaactctacaatgaatactaccatttttaatacttttatcca

SEQ ID NO: 1402 - DNA, 363 bp, Gossypium hirsutum
  unsure (1)..(363): unsure at all n locations; Clone ID: LIB3083-027-Q1-L1-H8
gcagcatgcacgcacaatagctgggaaatctcaactttgtattaactcttatgcagaagcacttgaggttattccacggcagctttgtgacaatgctggatttgatgcaactgatgtgttgaacaaattaaggcacaagcatgcactttcatctggtgagggtgcaccttacggagtggacatcaacactggcggaataacagattcatttgcaaactttgtgtgggagccatcaattgtaaagatcaatgcaatcaatgctgcaactgangctgcatgtctaattctaagtgtcgatgagactgtaaagatccccaagtcgagagtgcacanggagaagctgctgcaagtgccatgggtggc

SEQ ID NO: 1403 - DNA, 440 bp, Gossypium hirsutum
  Clone ID: LIB3083-028-Q1-L1-A1
ggttcggtttttgattcatggacctgtcaatatagtacggtgatggttgttagggcagaaggccttcaagactcatattttctgggtgatatggatccatatgttataattcaatacaaaggtcaagaacgcaaaagcagtgcggccagaggtgatggatctagtccatcatggaatgaaaaattcacattcaaggtggagtatccagggtctggtggtgactacaagctacttattaaaatcatggacaaagacaccttctcttctgatgactttgtaggccaagccaccatatttgtgaaggatttgttggcagttggagcagatgaaggaagtgctgaactacatcctactaaacatagtgtagttaatgctgaacaacgttattgtggagaaattgtagttggtcttactttcaccaaaaaggaagaaaatgatta

SEQ ID NO: 1404 - DNA, 469 bp, Gossypium hirsutum
  Clone ID: LIB3083-028-Q1-L1-A10
tggcggtgcttgtctcagaatcagcggactttttgggtcgtaggaacctggtatgagggcgcaaggccaccgcgtccgaacgggttcgctgcggaagtctaagggtatcctaacgacggcaaacacctccccgaaacaacggagtcgcgacgccatacgtactaccattgccctaccgtacgcaacacaatccgaggcggggcggggcggggggtacttccaaaaagaacaggtcatccccaggttcgccccgcacccgagacgaaagaaaaccgggaaacgccgcgtagccgtggccatacgcccaagcccctaaagcatctccccctcacaaccccccccaatgaatactccgcaacggatccgcagagccgcatgctcagctcccccgctattagtcttatcagaaacgtcgcgccaaacgtaaagggacagaaaaaactaacaaacgccacccgtcccactcggc

SEQ ID NO: 1405 - DNA, 468 bp, Gossypium hirsutum
  Clone ID: LIB3083-028-Q1-L1-A11
gtctcagagatcagcggactttttgggtcgtaggaacctggtatgaggaaaaacatagaaaaagaagtacacacggtaagtgagctggtcgcggaagccgatgtgtgcactcgtggtggtgttagaggtggaagtaataataggggtagagaagtaattatacaaatctgagagaaagcggattccccggcccgacaattaactaaggttcaaataaggtgttgtccggggcattctctcatgtaaggcccatatacccgatattgcataagaaccccggcgcccgcacgactaaacacctaagtttagtaagccgtttgggaacgtcgacccttatccgcccaaggttggaaccgaatttaaacgggaagactttgagcgcgtcagcggaagaaagcggctcgctatcagtaatagaaaggtcaactctgagaacacgcggtccgaaattccgacggtaccgactgg

SEQ ID NO: 1406 - DNA, 291 bp, Gossypium hirsutum
  Clone ID: LIB3083-028-Q1-L1-A12
tggcggtccctgtctcagaatcagcggactttttgggtcgtaggaacctggtatgagaagtcataggtaagtgtcggcctcctgtttcgacccgttgagaactaattcgcaattcggcggatataccataacgcgcccgcgatccggaagacttaaagaacaaaccctccgaaacccaaagtacatccaagagattgacccagattctaggcaccttcaattcctatatcccctacctaacacttcacctcacagacataacgtccgtatccgaaactaaccgcaaacacc

SEQ ID NO: 1407 - DNA, 403 bp, Gossypium hirsutum
  Clone ID: LIB3083-028-Q1-L1-A2
gtcaaatatattgaaagaggaaagaagattgatgagaatgttcagagagaaatcattaaccaccgatctttacgacatccaaacataatcaggtttaaagaggttgtggtgactccaacacatttagctattgtcatggagtatgctgccggcggtgaactcttcgagagaatatgcactgcaagtcgatttagtgaagaccaagctaggtttttcttccagcagctaatatctggtgtcagctactgtcattccatgcaaatttgtcacacggatctgaaactagaaaacacactcctggacggaagtccaacaccacgtcttaaaatatgcgactttgggtactccaagtctgcagtgctgcattcacaacccaagtcaactgtaggaacaccagcctata

SEQ ID NO: 1408 - DNA, 439 bp, Gossypium hirsutum
  Clone ID: LIB3083-028-Q1-L1-A3
gaaaaaaaacgcatcaaattcaaggatggcagttggaatattggaagggttgttggttagtgcaaaaggccttcaagactcagattttctgggtgatatggatccatatgttataattcaatacaaaggtcaagaacgcaaaagcagtgcggccagaggtgatggatctagtccatcatggaatgaaaaattcacattcaaggtggagtatccagggtctggtggtgactacaagctacttattaaaatcatggacaaagacaccttctcttctgatgactttgtaggccaagccaccatatttgtgaaggatttgttggcagttggagcagatgaaggaagtgctgaactacatcctactaaacatagtgtagttaatgctgaacaacgttattgtggagaaattgaagttggtcttactttaaccaaaaaggaggaa

SEQ ID NO: 1409 - DNA, 409 bp, Gossypium hirsutum
  Clone ID: LIB3083-028-Q1-L1-A4
tttttgtttttttttttttgtcatacaaatgtctatatgtatatgaaacataggcgtggtaacatagttgaagtgtaaattattcaatcgtaattatgagaacgaagttggaatcagttgggtagaattttagagttcatctttgggataaaaggaaggtgttgtaggattagaggaagagttcttgatgggatatgaagcttgcattgctataccacagagaccttgtttgtctttgatgccacgttccattcttatgtaacctttctcaccccaatcaggtccccatgagttctttactatccaattcttagttccatcaagggttgttccatatcccactgctgcaaccccatgggtcagctttattccacattgtccaatgtataccccctccgagtagaattgg

SEQ ID NO: 1410 - DNA, 436 bp, Gossypium hirsutum
  Clone ID: LIB3083-028-Q1-L1-A5
ggttgggtttttgattcagggacgggtcaatatagtatgtgttggttgttagggcagggggccttcaagactcatattttctgggtgatatggatccatatgttataattcaatacaaaggtcaagaacgcaaaagcagtgcggccagaggtgatggatctagtccatcatggaatgaaaaattcacattcaaggtggagtatccagggtctggtggtgactacaagctacttattaaaatcatggacaaagacaccttctcttctgatgactttgtaggccaagccaccatatttgtgaaggatttgttggcagttggagcagatgaaggaagtgctgaactacatcctactaaacatagtgtagttaatgctgaacaacgttattgtggagaaattgtagttggtcttactttcaccaaaaaggaagaaaatga

SEQ ID NO: 1411 - DNA, 307 bp, Gossypium hirsutum
  Clone ID: LIB3083-028-Q1-L1-A6
ccttaatcatagtagttgcttctcttgctcaagggagggcttgtgtaaagttgtcgtcctagtcatagctaagtaaggttatggagaagatagccatctttaagattagctttctatgctttataagcaactctcgttattgtaagcatagctatgactcgtttctttttgcccatcccttcactcccttttttttgatctttactcgtgtttttgttcttatggcttcctcccagagggtgacatgaagtgaaagcttcttacatgatattggaatgcacgcattttatttaaaagaaaaagagac

SEQ ID NO: 1412 - DNA, 408 bp, Gossypium hirsutum
  Clone ID: LIB3083-028-Q1-L1-A7
agactgctctccaagctgggaactgagtattcttactcggtagatgaggagggtattggcaagactgcttttgaactgatctttgcttttgatgaagtcatttgtcttgggcacaaggaaaatgtgactgtcgcacaggttaagcaatactgtgaaatggagagtcatgaagagaagttgcacaagctggtattgcagagcaagattaatgaaactaaggatgtcatgaagcgtaaagctagtgagattgacaagagcaagattgataagaatagatctgacaaaggagggttcatgtcaatgggatctggaagaatagaaactagctttagtgaattgagtatttctagcagcgcaagcggctttggaagtggttctgggtttggtgggattaccactgatctcgat

SEQ ID NO: 1413 - DNA, 429 bp, Gossypium hirsutum
  Clone ID: LIB3083-028-Q1-L1-A8
tgttttttttttttgtttcttctattttttccaggatggcttataaatatatgaagtggaaggccataaataaagcaacaatgagcaaatagccatttatgtcatcaaaccaccattatgacagccaagtaaacaaatccaagcatgtattacttacacataacgttctggaacaatcaaaggtagcatgcgaaagaaaaagtcctcaatcccgtcccgagattcctattccagtctttttctatgcttacaatggcccggcatgggcacttgtgttgtaaattgcgaatggtacttgaatagcagtcagaatgtgattagatcatcttttggtccttgttgcttctatgaatcttgaccccctccggatgaacctccacctttcttaccgaaaatcatttcatcgacatcatccatcatgtcatcatt

SEQ ID NO: 1414 - DNA, 347 bp, Gossypium hirsutum; identical to SEQ ID NO: 1320
  Clone ID: LIB3083-028-Q1-L1-A9

SEQ ID NO: 1415 - DNA, 425 bp, Gossypium hirsutum
  Clone ID: LIB3083-028-Q1-L1-B1
tgaagtcttctctcgcattgaccataactcagagcttgggtatgccaaacgtgccttcattcactggtatgttggtgagggtatggaagaaggagaattctcaaaggctcgtgaggatcttgctgcattgtataaggattatgaacaagtcggtgctgagtcggttgagggtgatgagggtgaagatgatgagtactaataagcacctgtgattgagtgtgcgtatgatgtctattattacctgttgcttccgagctatgcacgctactattctatgaagcttgttaaagacttgaaatggtttactgtatgttatgctttttcatgtttcactagtgcttgctatgaaactcgatatacaagttgcctgcattggaagtacatcgttaaggcaactagtacatgcccaacacgtatcatggatt

SEQ ID NO: 1416 - DNA, 466 bp, Gossypium hirsutum
  Clone ID: LIB3083-028-Q1-L1-B10
tggcggtggttgtctcagaatcagcggactttttgggtcgtaggtccctgtaattagtagaatgatcgcgacttataacactataataaactggaggggtcgaccttagggtcgtttgctcagactgtagagtcccgctcctcctactcgttacacttacattagctggcggtatgcctagcacgccgtctacggaataggattacaactgatttcggtccatcctctctttggagacttccactgtccctctcgttccactcgcctgcccctgtcccctacaatctaatgtataggacataacggtaagtccccgatttgtgactaagttgctggcccacaccattctttacgttccgctttaagctcgcgcctttattagggcccgtccgcatcctgaccttatgctaaggttagtctcatgcaccaggtggcacgtgcctagatatataaatccttactaata

SEQ ID NO: 1417 - DNA, 470 bp, Gossypium hirsutum
  Clone ID: LIB3083-028-Q1-L1-B11
gcggtggttgtctcagaatcagcggactttttgggtcgtaggaacctggtatgagagaatacgccggattccccaactccggaaatttgggggagcctattacgtccgagtccgtcgaggcggcataagaaataacagatttgaacgtgaagacagagcctaggttaaatatagaagacgatttgtataagaggaagttcgacactctaagagttaaagagccatccggccggtaatttaaggctctttcttgaaagggctctttctcaacggccctagatccttgataatgcactcccggcgactataaggctggtagtagtattattattattaatgatctactactccaagacggttcacacatctcctctatagatagagtgacaaaaacacacaacggccaagaggaaaagagtccgttgccgctcccctttcaccgaaataaccaacaccacagcgcactccca

SEQ ID NO: 1418 - DNA, 232 bp, Gossypium hirsutum
  Clone ID: LIB3083-028-Q1-L1-B12
ggttgtctcataatcagcggactttttgggtcgtacgaacctggtatgagacattcctccacttatcatcaccccgtaattacggtgccgcatctaacgtacggggcggtcaccgactaatatacatataactcattttattgtataatacctactctacgccatatatcaaatactatttctacataagactgtccttaaccccaaaagcttcctaatcatcacttcgcta

SEQ ID NO: 1419 - DNA, 237 bp, Gossypium hirsutum
  Clone ID: LIB3083-028-Q1-L1-B2
gtcccccctaagagattcttcagcttgacctgcaagaagagagatagagaaagagttgagcaaaggtacttcccttttattaacaagactgcacaagaaattataaacaagagtgagagcctcagtatttacacatacgatcaagagtgctccctgtgggagcccacagttttcaagcaccctgcaacatttgagaccctggcaatggatccccaccttaaggagttcataatgaaa

SEQ ID NO: 1420 - DNA, 351 bp, Gossypium hirsutum
  Clone ID: LIB3083-028-Q1-L1-B3
gtttctttatagggtgctgacttaacaaaagccgtagcgttaccagtgtgggacacatatacatcaacatctaaccctaatcattttccttttcaagtcctataatttcaaccagtaaccattcctgtctaccatttccttcctatcaatcacattattctaaatccctaagtaaaaatccttaatagtatattcattcactataagtctcatcatattatgcattaaaacagcataaagcaatatccatttttatctatcataatactacaactcatttacttatatcatatctattcattaatcattgctctggtactacatatcattatataattctatttatcacaa

SEQ ID NO: 1421 - DNA, 403 bp, Gossypium hirsutum
  Clone ID: LIB3083-028-Q1-L1-B4
caatggcttcttgtctagctcttaagaggctcgtctcatccaacatcctcggtagctgcttacgcgtcgccatcgctccatccatctccagactctttaacaccaacgccgccacgcctgatgaccacgatgatcgccgtcgtgctgacggtttcttcccagatctgcaggggcggcgccagggggccaaaaaagatatgtttgatcctttgtctccaacaaggagcctgaacatgatggatcaagtcaaggggaatcgatttctctccacatcccgtgacattccagggcttgggagcgaggccaaagaatcaaaccttcgcccgttatctcctcatcttcctatttataagccacaactttctgcgactctttcaattaccaattggatcttccggggttt

SEQ ID NO: 1422 - DNA, 384 bp, Gossypium hirsutum
  Clone ID: LIB3083-028-Q1-L1-B5
agatggctatcggtaatgcgccctggccaattggtgtcgctatggttggtatccatgaacgttcagctcgtgagaagatctataccaatagtgttgcccacataatgaacgatgagactactcgcaaatacttgcaatcagtgaaaaggctaatgaccttttgccaacgacgatatcctacccttccatctaaagcagttgagttcaacagcttggctaatggtagtgatttacagtcattgctagcagaagagagggattccagggttagttcctcagatgacaagcttaggttaatgcccacttcaacggacacctgattatcttcttatttttcctgaggttttaaattgctatattatacccgagaagttgattatgttg

SEQ ID NO: 1423 - DNA, 421 bp, Gossypium hirsutum
  Clone ID: LIB3083-028-Q1-L1-B6
aaaggatgagaaggcagaagagaaggcaacagaggaaaagaaaggggaaccaccggcacccacccctccgcctcctccttttatcttgttagtggacttgcattgtgtgggatgtgcaaagaagattgagaaatccatcatgaagattagaggtgtggaaggagtggagatcgacatggctcaaaaccaagtgacaataaagggaataattgagcctcaaacaatatgtgctaagatcatgaagaaaaccaagagaagagctaaagtactgtctcctttgccaccagctgaaggtgaacctataccagaagttgtcacttcacaggttagtggattagcaaccgtggagcttaatgtagacatgcattgccaagcctgtgctgaccagctcaagaaaaagatactaaaaatgagaggcgta

SEQ ID NO: 1424 - DNA, 419 bp, Gossypium hirsutum
  Clone ID: LIB3083-028-Q1-L1-B7
gttcaatgagactatgtttagctcccattccaagaaagcgtcctggttttcgacatcatccacttctttagattccaaggcttcttcatcatcaaaaaagtttcctgttttaacctttgatttttgggggaaaccacttgttgtcccagatcagaatggttcaagaaactgcaccaccaaacctgaaaacaaattctcggttcaagctgaaacaaactgtgtgagccgatgtattagatggtgggaaaaaaatcttaaacccaacatggtcaagatccactctgctcaagaacttgtatgttccttacaaaatgctggtgatcgattggtcattatcgacttctattcacccggttgtggtggttgcaaagccctccatcctaagatctgtcaactggctgaacagaatccaaatgcga

SEQ ID NO: 1425 - DNA, 411 bp, Gossypium hirsutum
  Clone ID: LIB3083-028-Q1-L1-B8
caaacaaaaagttcgaatgttcatgttaaacttaaacgcatctagagatatcaattgatctttcaaagcacaaacttgtattgctttcacaccctcaaagaattcgcttgaaatttcaagcgaagtttccacaaaataatcaccaacaagtaaaagaaatttgagatttgggaaaaccactcctttaagaagttcatcggtagtgcttgaaactttcatccatcggtagtgcgtcaacagtcccaaaagaaatctcatttcttgaagatgttatccacaaagcaaattggcgaaccacatcatgcattttgacatgccattctccacaatctagtaacaaaccagggttcttgaggatctcaatcgatgcaagaacttcgcttctaacgtctttaattgagtcgatgcctt

SEQ ID NO: 1426 - DNA, 390 bp, Gossypium hirsutum
  Clone ID: LIB3083-028-Q1-L1-B9
tggcggtggttgtctcagaatcagcggactttttgggtcgtaggaacctggtatgagtggtaagttcactcattatcccgccggaattctgagtcggagttaacacatcggtggttacgccggttaggccgttaagactagcttaattgttttctccgacaaagctcgctttaccagtcgcgggacacgcataggccccggggttatcgcgaacgccgtcaaatttaaaaagggctaaatcgccgtagcccccggatcgggcgttgccggctccgttgttgtcgaaggcgtaagggcccgcggggtcctctggactactgtcgccgacgcgaattttagaagacccgaagaagtcaagaggcccgggaccatagaacccgcgaacttaaa

SEQ ID NO: 1427 - DNA, 380 bp, Gossypium hirsutum
  unsure (1)..(380): unsure at all n locations; Clone ID: LIB3083-028-Q1-L1-C1
aaaaaaaaccatttatttttcttcagctctaagcgacagcaacaatggctgacttcaagaaagccactgctttgattctcacagtggctttgcttgtgaatctcgctttaatggttgatgctgatggtgatgatgataagaagattcgagtcaggaaacataagggtgagaagcagtgtatacaaggatgggaatgttcctactggtcgaaatattgttgcaacaaaacggtttcagatgtcttccaagtttatcaatttgaggacctgtttgctaaaaggaattcgccggtggctcatgctgntggattttgggattaccattcttttattttggctgcttccatttatgagcctttgggttttgggactactggtggt

SEQ ID NO: 1428 - DNA, 467 bp, Gossypium hirsutum
  unsure (1)..(467): unsure at all n locations; Clone ID: LIB3083-028-Q1-L1-C10
tggcggtgcgttgtctcagaatcagcgggctttttgggtcgtaggaacctggtatgagacctaaagtccctaaaagaatagtctttcttttgcgcgtgaaatcgaactaaaggattatcgcttattattagtcggtttagggtggtcgtgaagaaggtccctactctcgctctcaaaatcataatttatcctcctattggtgatgctacggataccttttagacttaagcttccgctccttacgggagaacacgttggcagtcttactaggaaacggcgggatcggggccggctccgggcctctcttaaaaagtttctgcctgtcaaagataccgaaacgaatgaagaagaaattaggacttccgggcgttataataaaggtagccggaggtacgcgccccataaagctagactcgagactagaaaatctgcgggactcgacaaagccggttcnttataaatccata

SEQ ID NO: 1429 - DNA, 219 bp, Gossypium hirsutum
  Clone ID: LIB3083-028-Q1-L1-C11
agcgggctttttaggtcgtacgaacctgctatcagacctaccgtccctaaaagaatagtctttctttcgggcgggacctccaactaagggatgatcgcttattattactcgatttcaagtagtcttaaacaaagtccctactctcgctctcacaatcataatctatccccctattcctcctactacttatacctattaaacctcaacttccactcttta

SEQ ID NO: 1430 - DNA, 426 bp, Gossypium hirsutum
  Clone ID: LIB3083-028-Q1-L1-C2
gaagaatcagtgagaggggaagagagttgagttttcctgaatacgggtgggttcttttcactgtgttagattatttagaacaaggaaaaacgtctttctttttgtactctccattttcaactgaagtagttcagctgccgcatttaggggaacctctcttcttcgaagtggggactttttccttagatgcaacctgccctaaatgccttatctttgtgttgggtacaaatagaaacaattgttatgtcctcctggtggttcaacatggaagattttttagttcaataatggtttcactgagcctaattctgttgttgatgctgcttatgccaaaggggttttctattgtattttcaatggaggtcaatgttgaacttaaagagtggagtggtattctaattgatcaacgatttccaggtgttctaa

SEQ ID NO: 1431 - DNA, 316 bp, Gossypium hirsutum
  Clone ID: LIB3083-028-Q1-L1-C3
agatagagatagaactagtctcgacacttgctggattgcactttgaatggggactctgaccactcccacatttggtacctatgagtcaccaaattattggaaaccccctactcctgtattcaagccttccaaagtgaaaccaccaccatattaacctaatccaccaatgtattaaccacccaaaaaagagaagccctaacctaaaccaccggtttattcaccttcaaaaaaagagaatccttgacccaaaccaccaatttattaaccttccaaaaaagaaaatccttaaccaaaaccccccatttatacaccttcc

SEQ ID NO: 1432 - DNA, 318 bp, Gossypium hirsutum
  Clone ID: LIB3083-028-Q1-L1-C4
tttctgtgtttgattttctttcaatattcaaaaactttgcaaagctagtagttggtgtgattctcttttaagattttgtgtggaaaaaaatagacaaaaatatggctgagcactaatagaataagcacgaggaatctttgatggaaaagatagctgagaacatccatggtcatgattcatcgtcatcgtcttcagattccgatgactacaagcaatcggaatcttcgatcaaggacaaggtgtttcgtctctttggaagagaaaagcccgtccaccatgtttacggtggaggcatacctgccgacattttactgtgga

SEQ ID NO: 1433 - DNA, 398 bp, Gossypium hirsutum
  Clone ID: LIB3083-028-Q1-L1-C5
gaatgcaaaggcgtgagatccaccagagcgctggtgaactatcattattttaatatatatagacccacgcatcttttacgttttgcatattactacttcccattaatttatttcagatggaagatacgagagaagaatcatcttctgtaattctaagattcacagactcttttaacaaatcaaatgaagtgaaagaatgtggtcgcagtagcgcactcatctcttgcgcatcttccagcagtgtttgattaggagcgaccttctttggctccttgaaggaattctcatccatcagattagcagacgtgagagtggtctttgttgatccagacagctttacagaatttggatccaatccatcaacagaaatttggaggttgactgaattgctcccaaag

SEQ ID NO: 1434 - DNA, 385 bp, Gossypium hirsutum
  Clone ID: LIB3083-028-Q1-L1-C6
atttatgattggtgcatgaagtctcaatatcatgctatgttacatttgacagtgaccaactctgtctccgatcagattctgtctgtaattcatatcaaaagataacatggaatcagatcttgctaaactcttcattggtgggatatcttgggacactgatgaggaacgtctcaaggagtatttcatgaaatatggacaagtcgtggaagcaatgatcatcagagatcggtttactggtcctgcccgtcgattcagtttcattgtctttgctgatcctgctgatgcttaaaaggtaattatggataagcatatgattgatggccacacggtttaagccaacaaagctgttcctaaggatgatcaaaacattttaaacaagaacatt

SEQ ID NO: 1435 - DNA, 354 bp, Gossypium hirsutum
  Clone ID: LIB3083-028-Q1-L1-C7
aaaccatcaacgataaggatcgttgcccacaatgcaaaggtgatgaggttgtgcaagagaagaaagtcttggaggttattgttgagaagggtatgcagaatggacaaaggattactttcccaggagaagctgatgaagcgcccgatacggttactggggacattgtattcgtcctgcaacagaaagatcatcctaaatttaaacgaaagggtgatgacttatttgtagagcatacattggcacttactgaagccctttgtggctttcagttcatactgactcacttagatggcagacaacttctcattaaaacccaacctggggaagtcgttaagcctgatcaattcaaagcaa

SEQ ID NO: 1436 - DNA, 393 bp, Gossypium hirsutum
  Clone ID: LIB3083-028-Q1-L1-C8
atgaaaccagattatgctgatgcacattgtgatgggggagtcagctttgcatgctctgggtgaagatgagagggcaattgaggttttccagaaagctattgacttgaaacctggtcatgttgatgctttatacaatctaggtgggctttatatggacttgggtaggttccagagagcttctgagatgtacactagggttttagcggtgttgccgaatcattggcgggcacagctcaataaggctgtttctttgttgggagctggagaaactgaagaagctaagaaagctttgaaagacgctttgaaaatgacaaacagggttgaattacacgatgccatttaccatttgaaacagctgcagaagaagaagtaaagagtaatggtggtggcaat

SEQ ID NO: 1437 - DNA, 470 bp, Gossypium hirsutum
  Clone ID: LIB3083-028-Q1-L1-C9
tggcggtcgttgtctcagaatcagcggactttttgggtcgtaggaacctggtatgagacggtcgagagcggaaggtaggtcgaccccgcctcggcggccggtgacgatagactcgacgaggagacgcccgagacaactagcagcgtaacccttagcggcgcttctcttctgaacatacttgcacccgttcgtatagccggctagaaattcagtaaagttaagcaccacccggacgatttagtcgaggccgcaaatacgtccgaactctccgtagaagtcctagacttcgaatttcctctagacattagactagaagatcttacccgaaatacacttctgacggtcccagagaaaatctcgcgtacgccacttccctaattagccgggaagaaggatacgttcgattctcgatgaaggcagacactaacccctcgtcaggcccgggagccgctcgtcgaaaacaacacgtt

SEQ ID NO: 1438 - DNA, 419 bp, Gossypium hirsutum
  Clone ID: LIB3083-028-Q1-L1-D1
ctttcttccaaataccatggtgagggtggttggggactgtttcttcttcttcttcttcttcttctcaatttaacacggttttgaatatatatatatgtatatatgtataaaagaaaatccttctttatatttatatttttcactcttcaatttctccttcatttccttgcttaatttcccataaaaatcttttacccaaattttatttatttatttcttcttttttctccatttggttcctcgattcaattttcttgaaaatccagaagcaaggtttctatccctttcttggagagcttcttttatttgtctatttgaaaaaaacaagagttgttagatctcaaagcctggatctttgaaagcagagccttctttttcctccttttttggtctaaaagttcatcttttgattttctttt

SEQ ID NO: 1439 - DNA, 341 bp, Gossypium hirsutum
  Clone ID: LIB3083-028-Q1-L1-D10
tctcagaatcagcggactttttcggtcgtacgaacctcgtatcagactccccttcctacacaataccttccattacaatagagggtctctcaagtccgggaaggacctcgcatcccacccaagaaaactcccaataactcaactttcaattctactaacactgtcaccaatcaactacctagcttacaccaatatcaccatttcaatatcaaaacttccccttacacattaacatccacttaactaaccacacttaattcaaacatacatatactcgattaacattcatatccctcaccattcctcccacaataaacctattttccaaacccctacaatat

SEQ ID NO: 1440 - DNA, 461 bp, Gossypium hirsutum
  Clone ID: LIB3083-028-Q1-L1-D12
gcggtggttgtctcagaatcagcggactttttgggtcgtaggaacctggtatgagcctaccccagccggccctaactaagaaagaggaaggggggctaccccgccccggaagaaaaacggcgtagatttccctaccaagtagcatcccaataattctcggaaatatggtcacccacggaatagaagcaggtgggaggtggtaacccgagacaaccggaaaaggctacacgaaacacgggaccagcagataacaccctcggtacgggcacgcattaagcccccatcccaacggtaactttaacccgacgaagaaaaggaatcccggggccaaagccggccggttgcccaaaggaggcgattgggaaccgggcgtaagtctagagtgcagcgagatcgtcaacgaagacacatcgacccctcccccttaaccagatccggtcatctaagcctagtgcgtcccg

SEQ ID NO: 1441 - DNA, 334 bp, Gossypium hirsutum
  Clone ID: LIB3083-028-Q1-L1-D2
ctcgtgccgaaaaacccagtattctgtcatcactatgggggccaaatggctgctatgttttacaatggcagcactaatggcagtgtcaaatggccaggaatcagtgaagccattggtgaagatagttaaaggcaagaaactttgtgataaagggtgggaatgtaaagggtggtcacagttttgttgtaaccaaaccatttctgattatttccgaacttatcaatttgagaaccttttcgctaaacgtaatacaccggtggcacatgcggttgggttctgggattaccattctttcattacggcggcggctcagtatcagcctcatggttttggt

SEQ ID NO: 1442 - DNA, 413 bp, Gossypium hirsutum
  Clone ID: LIB3083-028-Q1-L1-D3
attttgttctaagaaatagggttttaattacatgttgggcacggttttaacgttaatactccttcttcacccagtacgtcatcttcctttctctcttccgcgccggccatagtctccttcttcttcccttgccgctgtggactccctttagtcagcttcttgtcagggactattagtcatcaggagagtcagacgttggataatgtgaacccttttgcgacgagagttcgaggatgtcattgagagatgcgataatgatttcttggacgataatcatgatcaagatgagcatagtgaaagctaccaatcccatcaagccgttcatgagagtgactcatattaatattaagtggctcctcgaaatacaattggtgatgtaccattgtactggtgcacagatgaaaaacatattg

SEQ ID NO: 1443 - DNA, 185 bp, Gossypium hirsutum
  Clone ID: LIB3083-028-Q1-L1-D4
gattaggatcgtaagaaacttaaatcttcataggaaatgggcagcgtttctttgaaagtatacaaggtgtacttaaagttcctttttaaacttccggttcactaactgatcccaaactcttttgaccaaatattccattcctattggggtacctaccgaacccgaaaaatccttttccctttcca

SEQ ID NO: 1444 - DNA, 404 bp, Gossypium hirsutum
  Clone ID: LIB3083-028-Q1-L1-D5
atcacctgcaagaaaaggcctattcttccatagcaggccgaataggaaatatttcattattagtaacggatagcattttatacaaaggcatttatccttccaatttggtgtacatttcgtctttatgtggagtagtctatacaactttacaaataattcaaagccaatatttgaaaccaaccagataaaaagtcttaaaggaaccaaagaaactaaaattgcacattattcatcactcactccattaccaacttgcacacatgggctctgtgacgaacatacacataaatactccgagacaacgtttacgttcctaaacatggttcaccgtcatgtatgatttttccaacaccgcatgttgtccttcacaaaatagaacatgagcagacagtctttctgggtga

SEQ ID NO: 1445 - DNA, 419 bp, Gossypium hirsutum
  Clone ID: LIB3083-028-Q1-L1-D6
tttgattgtatggcagcacctaaatcaacatcgtggctgtcacacacctatgaaaaaccccattttttcccactcttcctcacccttgtcttcttggttttccttctactcctcaacccctcttcaaaccctatcaactcatctaatgtcaccccttccatccctttcaagaggctcctcttacataattcatggaaatcatcatcatcaaccatgaacttgccccccaagcaaaggcgtcatccccgcacctacgcgtcttcgttcggagccgaagctcatgaagttccaagcggtccaaaccctatttccaacaggtaggaaagtgtgattttgtggagacatatggggtgaagatgattaagaaagagtcgtgacagcgaaactttattgttaatttgcttgtcatatcctttcta

SEQ ID NO: 1446 - DNA, 186 bp, Gossypium hirsutum
  Clone ID: LIB3083-028-Q1-L1-D7
aagctgcatattatctttgttagttccgacaaatgaatggcaagtttatataagaaatgcgatcgttttctttttgaagtctggttatagtttttggggatataaaaatgcattgattatttatgcatatcggcagttaactttatgttctagcttattactgtcaactgtagaaataaatctaat

SEQ ID NO: 1447 - DNA, 415 bp, Gossypium hirsutum
  Clone ID: LIB3083-028-Q1-L1-D8
tttttgttttttttttttttaccatataagaacgaaaggagattagtcttggaattcctaaataaatcaatgtctatagcaagatatataagataagttcaccatgctattgcttcgagccatgagacaaaacacagaactaataccaggctgtttaaactgatggttgatagagttttaacatttgaacctatcacactccaaggcaaagttctaaaggctctcctcaagcaactaaagatacacaagatataagaggcgttgtcattgcgtgtgcgtccaaccatagaacaaacttatatattgcgaggtatactataaaaaagcagcactgatttcaagcaataccctttttccaaaattgcgaaagctaagaagcacaagcattccttcagtcaaagcctaagctcacagt

SEQ ID NO: 1448 - DNA, 444 bp, Gossypium hirsutum
  Clone ID: LIB3083-028-Q1-L1-D9
tggcggtccttgtctcagaatcagcgggctttttgggtcgtaggaacctcgtatgagactaaaattgatacacaggaccttagatcgcgatggggggtcctccagctccgctaaaaaactcgcatcccagccacaaaaaacaagaacaactcaaccgggacgtccgccaacaccgacagcaaccgaagaactggagaaccctaattgaccagtcaaccgtcaagggcccacatccacagagcgaccgacgaaacaaacaacagttcaccgaccgacccgagcctctatccaatttgcccgttcttactactcctttctacggtcatcgagaaagcagtcgtttccgtcgtcgccattctcgacctcatcattacacccgataaaactactaataaggaaacttctatcattgctgcgcacgaagactacaagttaaatccacgc

SEQ ID NO: 1449 - DNA, 419 bp, Gossypium hirsutum
  Clone ID: LIB3083-028-Q1-L1-E1
cttgagttgagaatgattcctgttgtactgcatgcgtgggctgccaaattcaactccatctttgaagcattgtcagtattgagtttttgttggagcatgggtggccttggcttctagtgggcacttgccgttaaacaaatttcgaggaagattggggaaaaccatatttaagacgcgaaacttgtaaggagtaaaatgccttaattggttacttgggatggagataaaaacgtgttaataagatcatctatcgggtttggggctatgtcttgaagagttggttggaaaaagaacttggtttactatcctaactatctatccaatgctcatttgcctaagttgctgttaaaagtcggcaaccggcagctgagactaaagtatatgatgtgtgctcgacccagttactctgtggatgagct

SEQ ID NO: 1450 - DNA, 463 bp, Gossypium hirsutum
  Clone ID: LIB3083-028-Q1-L1-E10
tcgttgtctcagaatcagcggactttttgggtcgtaggaacctggtatgagtatacccaggttcttgccgctgccttcgtaatagagtagggcaccacgtaaaggagcggtaacgactaaggcctacgatccgtgatagaaactaaaaattgactccccggtctatccgaaagactctaaactcgaatccgtctcctcctctgccgtcaaagccattggcggcgtattcaataagtccctcaagacaaaggcggcgaggtcgcttaccgtctaagcctcgatcgcaactctatagaactagaatctcgtaccgagggacgtacataagaagaagaaacctccgttctctgactcttgcttcaagaacatttgagtcacttgtacaaggtccattaagtattaggtactcccgaagattgaatgggagaagaagaacgaaacgcatccattaacgaagaagcac

SEQ ID NO: 1451 - DNA, 448 bp, Gossypium hirsutum
  Clone ID: LIB3083-028-Q1-L1-E11
tggcggtccttgtctcagaatcagcgggctttttgggtcgtaggaacctggtatgagtaaatccttaaaaagcctacccgtagatagccgagcgatggtctaaaggaacggaacggcgttccgcagggtcccaaggaagacttaggcacccctaagtacacacgaaacgagggaacaacgtcatagtcacagccacacgtgacatagtcgacggaacgcaaaacaagagaaacaagactacgacaacacaatccgtagcccctctacgtagaatcaatcctctcgaatagtcggcttataaacggggataatcccctactacgaagcaatccctcaccccacagtacgaacgaaataaatttaaaacccggaaaaaaaaatccaaaccaaaaaaaaaaatctgagggggggtttggcatttaacctgtttcacagcgagctgcaccat

SEQ ID NO: 1452 - DNA, 467 bp, Gossypium hirsutum
  unsure (1)..(467): unsure at all n locations; Clone ID: LIB3083-028-Q1-L1-E12
tggcggtcgttgtctcagaatcagcggactttttgggtcgtaggaacctggtatgagtatcccgccggagaactatccaagaccccgtgttggcaggccggaggctacgtagtggcatcaggccccgccggagtattccggatgactgttatacacacagcagagggaggcataatttgaatccacataattacaaagagcacgcgttacatagtattgaacccaccgaggatctcctccctctacccaataaaggtaacacttgaacataccacccattaagcggagctcggagtataccgtacataaacacccgacctccggggcgggtaatcattattcgatacgcgggagtaacggctaaagttccatacaatcgagaccgcgagcgcagcatgaaacaaacgtttcaaaatattcnccgcctctcataccaatggcaatggcggttcctccgaatgtacgaa

SEQ ID NO: 1453 - DNA, 319 bp, Gossypium hirsutum
  Clone ID: LIB3083-028-Q1-L1-E2
gaagaatataacgcatggttatcatttagtgaaggggagagcggatcatccaatggaagactatgttttcgcggagtttaagcaagtcaatggcagtgagctcggtttatttgccatatttgatggccatttgagccatgttattcccgattatttgaaggcgaacttgtttaacaatatcttgaatgagcccgacttttggactgaaccagagaatgcgattaggaaagcgtatcgtttaacggatacaaatatattggaacaagccattgatttgggcaaagggggttcaacggcaatgacagcaatattgatcaac

SEQ ID NO: 1454 - DNA, 357 bp, Gossypium hirsutum
  Clone ID: LIB3083-028-Q1-L1-E3
tgctttggttagggtgtctgcagttcttacaagtgctgcgttcatcctcaatgttgattgtgaccactatgttaacaatagcaaggcagttagggaggcaatgtgcttcttgatggacccacaagtcggtcgagatgtctgctatgtgcagtttcctcaaagatttgatggcatagataggagtgatcgatatgccaatcggaacacagttttctttgatgttaacatgaaaagtcttgatgggatccaagggcctgtttatgtgggaacacgttgtgttttcaataagcaagcactttatggctatggtccaccttcaatgccaagttttcccaagtcatcctcctcatcttgctc

SEQ ID NO: 1455 - DNA, 199 bp, Gossypium hirsutum
  Clone ID: LIB3083-028-Q1-L1-E4
ggtgttaatttcatgcgtgcagttcgtggagtacagtagaatgatatacttggacggcgacattcaggtatacgacaacatcgatcacctgtttgatctgcctgatgggcatttctacgcagtaatggattgcttctgtgagaaaacatggagccacaccccacaatacaggatcggttactgccaacaatgccctgac

SEQ ID NO: 1456 - DNA, 418 bp, Gossypium hirsutum
  Clone ID: LIB3083-028-Q1-L1-E5
gttcgtctgaggaagagctcaatgattttatctatagcgtgcaggatcacatccagcatgaaagcatcccgttgtccgaggagaaacaacttcttagagaaattaaacaactagaggggacccgggaaaaagttattgctaatgctgcgatgagagcaaagattcaggaatcacttggtcagaaagaagccattcaagatcaagttaaacttatgggcgttgatttggatggcgtaaggaaggaacaaaatgcgatctggtctaagaaaaagcaaattaaagaaaaagtcaatgccatagagagtaaaatcgaatctttacaggaggagctgaatgccgtaatccagaagaagaacaaagcttatgaaaccatgcaacaactgtggaaacaacgtgatgaggcgaatgctcactttta

SEQ ID NO: 1457 - DNA, 299 bp, Gossypium hirsutum
  Clone ID: LIB3083-028-Q1-L1-E6
gttaagttgaagggaactgctggaaacgtctgcggtgaagacaatgagtgtggcagtcaattttttgattctccaggcttggaggatatggttagtggtaggaggtcccactacaccgagggaggaagccctgtgtttgatgattctgatcaccgcgtctgtgatcatagtcatccaacctctttatcttctgattcatttctggagggagaggtttgtaagagagtagttattagtcaagatgcctgtactggtgagacacaatcatctgattctgactcttctgaagaagatgaaaa

SEQ ID NO: 1458 - DNA, 378 bp, Gossypium hirsutum
  Clone ID: LIB3083-028-Q1-L1-E7
caagtgttctttttcccttcttttgaaggggtggtttagtggattcaacagagactttgagaaagagaagaagatttattttttttaaaggagaatttttttaaagtttgggcttttgtttttggattaaaaaattcaaatgggatcattttcagggcaaagtagtggaagctgtgatctttcattcaagatcttgttgatcggagactcgtctgttggcaagagtagtatgcttcttagctttatttcagcttctgcagaagatctagctcccactattggtgtggattttaaggtcaagttgctaagtgttgctgggaagaggttaaagctcactatttgggatactgctggacaggaaaagttcagaacacttac

SEQ ID NO: 1459 - DNA, 416 bp, Gossypium hirsutum
  unsure (1)..(416): unsure at all n locations; Clone ID: LIB3083-028-Q1-L1-E8
aactttcaaaggatgaggttgtctttttccgaggggcggtcgaaaaagattattatttccaaatgtactatgatgatttgcctatctggggttttattggcaaagttgataaggaaggaaaagctgatcccagtgagtacaagtattacctttacaagcatatccagtttgatgtactttataacaaggatcgtgttattgagatcagcgcaaggatggatccacatttgctcgtggacttgactgatgataaggaagttgatgctgagtttatgtacactgtgaaatggaaggaaactgatactccttttgagaagaggatggagagatattccatgtcttcttctttgccgcatcatttagagattcattggctttcaattatcaactcttgtgtgacggttctncttttgact

SEQ ID NO: 1460 - DNA, 470 bp, Gossypium hirsutum
  unsure (1)..(470): unsure at all n locations; Clone ID: LIB3083-028-Q1-L1-E9
tggcggtcgttgtctcagaatcagcgggctttttgggtcgtaggaacctggtatgagagtcgaagaaatctcctaacggtcgaaaagagtaagggcgggactactggaggaatcggacactcgggaaagcctaccgcggaagttagcgtaaaagagggctactttatccctgcccccgcaagggagcttattgctcttgatttcgccaagggaaaatccgctgataatcctaagaatccaggggcttacccgccgccaggggacacgcatgattacgagagcccggctaaggtaacaaagtaagccgacgcggcgaccctggccgcgggctaaacgtagccagtagactaagccaagactaccgtcgtcaccaaagaagtcgggaacgctaagagaccccctttactggaacccggaacggatgcggataagaataacgtggccgagttagtanaactgatacctgtaac

SEQ ID NO: 1461 - DNA, 397 bp, Gossypium hirsutum
  Clone ID: LIB3083-028-Q1-L1-F1
gtggctactgagtcgctaccgggggaccattggcttggggtctgtgctacaacaaagaaatgagccctagcaaaatatattgcgatgattactacaaatacacctatccttgcacaccaggagtctcatatcatggccgtggtgccttgcctatctactggaactacaactatggggaaactggagaggctttgaaggtggacttgttgaaccacccagaatacttagaagacaacgcaaccttggctttccagacagcaatgtggaagtggatgacgccggtgaagaaacaccaaccctcagcccatgacgttttcgttggcaactggaaaccaaccaagaacgacaccttggccaagagggttccaggttttggaaccaccatgaatggtcttta

SEQ ID NO: 1462 - DNA, 467 bp, Gossypium hirsutum
  Clone ID: LIB3083-028-Q1-L1-F10
tggcggtcgttgtctcagaatcagcgggctttttgggtcgtaggaacctggtatgaggactaccgtcgtcaccaaagaagtcgggaacgctaagagaccccctttactggaacccggaacggatgcggataagaataacgtggccgagttagtaaaactgatacctgtaactaaggtctaaacttgctgcgtcgccgaggtcgaagggactttccatatccacgcgttcgtcaatcgtcccgtaggtcacccctccttcataccgctgtagttaggagttattctctttttaagagataaggcggccacctcaggcgacggaaacttcaaagtcgcccctaattacgaagtcgatactggaatgcatattactaaagtcgctgacgattttagaatagtgaataagatctcacctactaagttccttaagaatattcatctacccaatgagtctactgtttcgcggg

SEQ ID NO: 1463 - DNA, 424 bp, Gossypium hirsutum
  Clone ID: LIB3083-028-Q1-L1-F11
tggcggtgcgttgtctcagaatcagcgggctttttgggtcgtaggccccagaggaagtcgccgcctccttctcacggacgttcgagcacccctaggggaccaggagattacggaaaggcgcctccacgcccggtttcttcggaatcggtaaaatgtcttcggtcaaagtagccgttatcgagcgtggaataatcccccctaacgccctcctcgtcatcccagttctaaagcggtacggggagagcgaatgtacggcctggcgtccgcccgactccgtaagagtccacgtatttagcataacccccaccgacgagaccgatctctcccgtaacgtttgcggggtcctcggcgagtacgagctactcatgagggccaaacttgaatcctccgcctaggcagacggcgcaaaccacatcggtataaa

SEQ ID NO: 1464 - DNA, 186 bp, Gossypium hirsutum
  Clone ID: LIB3083-028-Q1-L1-F12
gtctcagaatcagcggactttttaggtcgtaggaacctgatatgataattaccttcatcactcacgaattcgtacacatcagtaggcccacttgactgggaagtggcacctatacacatataatacgtacccattaatacaacctatcctgtacctaagtctaaacttcttctcgacttaccatcg

SEQ ID NO: 1465 - DNA, 111 bp, Gossypium hirsutum
  Clone ID: LIB3083-028-Q1-L1-F2
aaagagcatatactctataaaatacccaacaaacgaaaggatatgttactatcggaaattaaatcaaatattttactgaaatacgatgactataatatatctaatatcgca

SEQ ID NO: 1466 - DNA, 412 bp, Gossypium hirsutum
  Clone ID: LIB3083-028-Q1-L1-F3
ctctctctctctctctctcgcctcggtcgtttgttttcgtttcgtttctttaggagggtggtcaatatggggtcttcgattttgccagatctcggagctgagatcttgatccccgtttgcgccgttattggaattgtcttttctcttgcacaatggcttcttgtttccaaggtgaagctctccccgggtcgagactcgggttcccccggtaacaacggtgcgggtgggaaaaacggctattccgattacctcattgaagaagaagaaagtcttaatgaccataatgttgctattaagtgtgcttaaattcagaccgccatatctgaaggagcaacctcatttcttttcactgagtaccagtatgttggcattttcatggttgcttttgcaatcttgattttccttttccttg

SEQ ID NO: 1467 - DNA, 315 bp, Gossypium hirsutum
  Clone ID: LIB3083-028-Q1-L1-F4
gagaatatctcatccttttattttcatttcgtcttcttgtcaggtcaaattcatcatggaaattacttgtagttatcaaaatggggacaataggcaaaactactacggccgctctttttctttgtcttcttctgtttcctattgtcttttccacgcctaatgacagattggttagaattggactcaaaaagagaaagattgaccgaaacaatcggatggctgcacaccttgaatccaaagagggaaaggcatctgaagcttctcttagaaagtatcgtcttcataggaactttggggaatcagaggacattgata

SEQ ID NO: 1468 - DNA, 365 bp, Gossypium hirsutum
  Clone ID: LIB3083-028-Q1-L1-F5
cgtaagcaaaccacaaaggaaagcttggagagagacccgaaaacaatgtctaaggaagttagtgaagaaggacagggtcgtaaggactatgtggaccctccaccggcacctctgattgacatggctgaactcaagtcatggtctttttacagagccctcatagctgagttcatagccactctcctcttcctctatgtcactgttgctactgtaattggtcacaagaaacaacaagatgcatgtgatggtgttggtctcttgggtattgcatgggctttcggtggcatgatctttatccttggttactgcacttcccgtatcttaagttgacacattaaccctgcggtgacttttgggttggtttt

SEQ ID NO: 1469 - DNA, 319 bp, Gossypium hirsutum
  Clone ID: LIB3083-028-Q1-L1-F6
taccagcctgccattaacgccttttagcaattaggaatggcccattgcccatttctgcactaaaatcaatcaaaaataggaatcaaaattcaaaatcttgttcttttatccactgctttaaagctttaaatcaaattattacgtagaaacttatagcaatttatccttcttcatgggttgctcttcttctctcccagatcggagttccgggcggtccactggacttaacaacgcggacaatcctgaaagtcccgatgccaaaaatctacgcgtaaagctggtcttgttaggtgattcttgagttggaaaaagttgtatt

SEQ ID NO: 1470 - DNA, 427 bp, Gossypium hirsutum
  Clone ID: LIB3083-028-Q1-L1-F7
agcattagcaaccatagccatggcttcctcaccggaacgcttctctatgtctatcctctgcctttttgccctcttctccatgcaaatccatgctagagagtacttcagcaaattcccaagagttaacatcaatgagaaagagacaacaaccagagagcaaaagcacgagaccttcgttccccagaccacccaaaagccagaagaacaagagccaaggttcattcctgaaacccaaaatggttatggcctttacggccacgagtcaggctcaggctcaagctcaagctcaggctcaagccggcccagtttcaccaccaaagaaacctatgaaccctatgtcacccctgttagattccaccctgatgagccctataacagcatccccgaatcctccaacaataaagacacttactactacaacaagaat

SEQ ID NO: 1471 - DNA, 314 bp, Gossypium hirsutum
  Clone ID: LIB3083-028-Q1-L1-F8
caatagagggatttaggcagttgctggatgaagcatcggaggatattgatcatgacaccaattatcagactttcaaaagaaaatggggaagtgatccacgatttgaggctttggaccgtaaggatcgggggcttctattaaatgaaagggttcttcttttgaagagggctgctgaagaaaaggctcgagttatacgtgctgctgctgcttctagttttaagtccatgcttaaagagaaaggagatatcaatgtaaattcccgctggtccagggtgaaggatagcttaagggatgatcctaagtacaagtgtgtt

SEQ ID NO: 1472 - DNA, 464 bp, Gossypium hirsutum
  unsure (1)..(464): unsure at all n locations; Clone ID: LIB3083-028-Q1-L1-F9
cggtcgttgtctcagaatcagcggactttttgggtcgtaggaacctggtatgaggccccccccccccccccccataaaagaaacaggactaacggttccacacacggacgacacacaagaaaactatattaaccataccataaaactaaacccacgctatcaacgcaatacgacacacacagagacactcaaaatcccagagaaaccgaaaaccgacaatatttaaacaccactctggagaagaccagaggtcatcttttctactattagcgagagcgaaaccaagggcagttaacgctacaaagctccgaaaagtcccgaacctaacgtattaagagagtaaccaaagagattaatacggaagagtacaagaagatagtggaaattggtaaagtagaattcgtcttggcagttaccgtangagaaggagtaacacttcgcgttacggctttggatataataaa

SEQ ID NO: 1473 - DNA, 423 bp, Gossypium hirsutum
  Clone ID: LIB3083-028-Q1-L1-G1
ctcaccaaatctcttctctatgtctatcctcttcctatgtgccgtgttctacatgcagaggcatgctagagagtactttagcaaattcccaagagttaacatcaattacaaagagacatctaccagatagcaaaaatacgagaccttacttcaccagaccacccaaaaccctgaacttcaagatccaaggttcattccttaaacccaaaatggttatcgcctttactgccacaagtcatgctcaggctaaagctcaggctcaatctcaagctcgcccagtttcactacctacgtaacctattaaccctatgttacgactaacagattccactatgatgagctgtataacatcattgatcgaatccttcaacaatcaatacacttactactacaacaagaatgtctataagtccactaagcttc

SEQ ID NO: 1474 - DNA, 431 bp, Gossypium hirsutum
  Clone ID: LIB3083-028-Q1-L1-G10
tggcggtggttgtctcagaatcagcggactttttgggtcgtaggaacctggtatgagtccggcctagatacccggataatggaattacgcgggtcggaatgagggcctagctataaccttcttccacgtctttttctaaaagacgtaggtttgttagaccttatcagacatcttatggctcacccccgctcatccttgcggaccgccccacgacgcgaacaacgatttcgaaggcggtcatcatgtaagaggcgtaagggtagtcgcccgggagaatcctaagaataacttatcccctgatactcctatcgaatacttaatcatccatcatgaagatacgtaatgagtcacacctcgtccgggtttatcagggcgggtatttcggagcttgaggtcaacggaagtcgcggcacccgggcgtaccttcggta

SEQ ID NO: 1475 - DNA, 465 bp, Gossypium hirsutum
  Clone ID: LIB3083-028-Q1-L1-G11
ggcggtgcttgtctcagaatcagcgggctttttgggtcgtaggccctaacaggtaagtatcccacggtcacggcttattcctaacgttaaggcgcgttaagctacttcggctactccgtctgcgccgtcgttttggtaagaaggaattcaaagacttactagagtcacacagggacgtacaatgggaagaatccgacgtcgttactcccaattccagggaaaccgataaccacgacgagcacgaaagactaacgccgactctctaaataagtcccgagaaaatccccggtccactcctagctcctaccgaactcatatcaacggagaacggaggatcggtcgaactcgttaatttccttatatcaactaaggaagtaacctacgctactggtcgcggtcacgaggagaagatcgtacgggggaaagagaccggacggacacacggcctagctatcgaggacactc

SEQ ID NO: 1476 - DNA, 473 bp, Gossypium hirsutum
  Clone ID: LIB3083-028-Q1-L1-G12
tggcggtgcgttgtctcagaatcagcgggctttttgggtcgtaggaacctggtatgagggagccccatgctcgaccgcaccctcttagtagtggatgcgcatattaaacggttgcgcagacccgccgcggcggccagaccctaagacggcgcttgatgtaagtaagaagaaggtcgtctagaagaaggtcgtcgttgtcgtaaagagaggagggaaggttgtcgtactccttaaggtggtagtcgtagtgattgtggagaatggtgccgacaacgtcctcgacaaagccagtacgtcttagacacttgactggattcgcatcggcgcctctcgtctgtacttctcccttagagacacctgcacagagcttccactagccatcccttatggatacgactccaccgccgacctaataccggagtccaaccacggtagatgtcacggcccgtcaggaccaaacggccgcgggaaac

SEQ ID NO: 1477 - DNA, 355 bp, Gossypium hirsutum
  Clone ID: LIB3083-028-Q1-L1-G2
aatgaatattgtattgttcctgattggttgcataaaatgttttggggctatgggcatgcttctgctgcacagtggataaacatgcctgatcttctggagacagtggatttcaaagatacttttcttaatgcaggccatctgaaagagagtttttcacattatcaggtttgctttgttgattcagatggtatggaaactttggatccaagaccaccattccgcatcaagcttcctcggtcacttaaaagtgatactcatgctccatcagaaaatggaagatctgatactggtgtcaatgatgccaagatggtagatgcttgtgttgagaaagaaaaactaattgttgaagcatata

SEQ ID NO: 1478 - DNA, 401 bp, Gossypium hirsutum
  Clone ID: LIB3083-028-Q1-L1-G3
ctttagcttctctacttttcgtacttcccacttgaaatgtcttatgattgaggtcagacatcaaacatacacactctcatcgatctttcttcttatgatacctggttttgcccttactcatgtcaatcaacacacagcataatgttctaatcagctagtcatgcttgctccatgtctcccatacataggcggagaggcaaaaacacccaccatagattgttgcagtgggctcaaacaggtgctggataagatcatgaaacgcctgcatgtgttgattaaagatatagacgacccgatcctccgcctcaagatcaaccgtactcttgcaggaactctctctagtacttgtcgagccagcgctagcatgacagaatgtatctccctgctgcacttggcaccca

SEQ ID NO: 1479 - DNA, 402 bp, Gossypium hirsutum
  Clone ID: LIB3083-028-Q1-L1-G4
cttccctcgctgtgaatggtacagtaaaacaacccaaggtgggaaaaggttgcaaaaggaataaccgagcccgtacgatcccttctcttctctgcgtcaaaaaccacataaatattcaacgagggcggaaccaggttttccaccctcttcctcccgctatataaagccattttcacgaaagccaagctcgtccagttttcatttttgtagtcaaaacagtgcctttctcctataaatatgggcttttctttcccttccaagcaccctgttccatgtctcgttgaatggattcccttctcgccccttcctccacgtcgtctttccctgttctgaacaacaatagcaacaataggattgagcataaatcgctgccatccagtttgtgtttctttaatttgagaa

SEQ ID NO: 1480 - DNA, 420 bp, Gossypium hirsutum
  Clone ID: LIB3083-028-Q1-L1-G5
catggttgaggttatgcctcgtaatatttgcaggggtgggagcactggcagggtgtggacctgctctttattggagattcaagaaaactctcagattcgtcgattccaaatcctcttgtcctccttgtatctgtgattgtcctcctcctctttccctcctcaagattgcccctgggttggccaatctctcagtcacagattgtggaagcaacgaccccgatctcaagaaagagatggagaagcaatttgtggaccttttaaccgaagagttgaagttgcaagaagctgtcgccgaagagcacactcaccatatgaacattacctttggtgaagccaaaagggtggcttcccaatatcaaagggaggcagaaaagtgtattgcagccatagaaacctgcgagggagccagagaacgggctg

SEQ ID NO: 1481 - DNA, 305 bp, Gossypium hirsutum
  Clone ID: LIB3083-028-Q1-L1-G6
ggaatgttgtctaaagccacctagccactatcggcacgatctcagttgattgtaagagaatagtattttagaaaaaggtaattaaaagatgagtgaagttttcgaaggatatgaacggcagtattgcgagctatccgcgaatctttccaagaagtgtacggcttctggtgctctgaatggagagaatatgaaacaaaaactttctgaaataaaagccagactagaagatgcagaaactctgattctgtaaatggacctttaggcaagaagcttgcagtcaaattttaacgctgtacttcttgcta

SEQ ID NO: 1482 - DNA, 424 bp, Gossypium hirsutum
  Clone ID: LIB3083-028-Q1-L1-G7
attctgtgctttctattttgtaaaccatggctcgtaacgttcgtcaccctttgttccttttccaactttttctcatttgtgtctcaccaatgatcggtagccacactgtctcggcaacggctcgacgtttattcgagacacaaacaaccttatcggagctgccacaattggcttcaaaatacgaaaagcacgaagagtttgaatatgaaaagtcagaatacaaacagccaaagtatcacgaagagtaccccaaacatgagaagcctgaaatgcacaaggaggaaaaaaaaaaaccctgcaaacaacatgaagagtacgagaaagaaaaacctgagttccccaaacaggaaaagcctaaagagcacgagaaacacgaagtcgaatatccgaaaatacccgagtacaaggaaaaacaagatgagga

SEQ ID NO: 1483 - DNA, 417 bp, Gossypium hirsutum
  Clone ID: LIB3083-028-Q1-L1-G8
aattaatgaaacaagaatagagtgatccagaaagtagagatgtcaatactatgggaaaaaagcgagacatggcggtggctagtgaggaggacaagggactcgaagccgttcttcttggcctttgccaccctctgcggcgttgttccgggtgtcattggctacggcgtcatgcaacttaccaactcccgcaaccctcacttggaggcccggctgcgcgaaaacgcccgccccgaatccctcatgatggggaaagtgaaccaagagcgattagcggaataccttggggagctccagcgaaagaggatacaaatgatcggtatgtagctgctttgaggggagagacattgactaggactccttatcagagaattcagcctgttccaaagcaaaacgctgagaagaacaacagcaacgaga

SEQ ID NO: 1484 - DNA, 377 bp, Gossypium hirsutum
  Clone ID: LIB3083-028-Q1-L1-G9
ggcggtgcttgtctcagaatcagcgggctttttgggtcgtaggaacctggtatgaggggaagtagcaaatatctacggccgagacggaatcgtgcgcgaacgaactagggcacgcccgccacgatcgcaggctccaaaagccgcgcatcgaccttagcagatcgacacaaaaaccccttcttacctgcgtctctaggcgtaacgaaggtaccagccggacgcaaaacaccgtacccaacccaacgggcccggccggacagcaacaccggcccgaggtcaccgcttctctctcacgaacgccccgagaacccggcaccgacgcaataaccgtcggtcccccctaagctaacgcggaaacccaaaaaacgccggcccct

SEQ ID NO: 1485 - DNA, 247 bp, Gossypium hirsutum
  Clone ID: LIB3083-028-Q1-L1-H1
tcaactcctctttgtatcatcagatggaacaatattaggtgcaggtttacacaacaatacgatatttacattacaaacagaaacaatgccaatagaggttgctactacatccaatctctttgccttcaaaattctgatgcctctcacacaacatacgcaatcttctataaattgaaacaacatatactaccttcttatgcacaatatatccttatctaaaaagtcaactacacattcattatcctta

SEQ ID NO: 1486 - DNA, 394 bp, Gossypium hirsutum
  Clone ID: LIB3083-028-Q1-L1-H10
tgtctcagaatcagcggactttttgggtcgtaggaacctggtatgaggcccccccccccccccccccccacacaaaaagtagggtagccacacatgaaagagggtccttactcaaataccacgtatacaaatctcaatcatatccggaacactaagccttggggtctcaattcgcgcattgtccaatccaagcacgctaaacgttcctcccaaattttatctctctctaaattctaccctacaccggtacaattatcctaatcgtatttataactaatcgacaacattcaactcaaataagtcgatactaataacttccggacgaatctgtattcctcaatcacacttctacgacttccgattgatacccggtatacgttaagtctctccttta

SEQ ID NO: 1487 - DNA, 432 bp, Gossypium hirsutum
  Clone ID: LIB3083-028-Q1-L1-H11
ggcggtcgctgtctcagaatcagcgggctttttgggtcgtaggaacctggtatgagtcacccatgagggccacgtttctttatacgttacctgctggtccgatccggtcggctgagattctatcgaccatccgacgaaaacctcgatcgagtgcggacaccttcctattattatagttgaatgggaaaccgcgagagatgccaaggaaaagccgctccataccgtttccgatcacgaataggagtcagagattctaaaaataagtctactagcagagaagagtcacgagccattcgacggctaggccaccattaccggcgtcgaatgccctagacgttctgaagcgtccccttaattacttccgaccggcacggaagtcgtaagtacttacgagatcatacataacctaacaacgaagcgtgacgcggacac

SEQ ID NO: 1488 - DNA, 442 bp, Gossypium hirsutum
  unsure (1)..(442): unsure at all n locations; Clone ID: LIB3083-028-Q1-L1-H12
gtctcagaatcagcgggctttttgggtcgtaggaacctggtatgagtcaatacggattggctgacaactgttgttgcggagaagagttccaaacataagggcaaagataaaagatcttcggaagaagttccgatgtatctcctgcgttgtgaagatacgctgcatgaaacatcggagcctaccggggatgtggcgtctggtccggtcgccgtcatttaccctccttgcccggagttgtgatcgaatctcgattagtccatgtggtcttggaaaaaaagcgcaagtaataagagatcggtgtatgcggtagtcaggtacgggtccaattgtcctgctaggaggaaagatatcgtcttctccgattctaccgncaggaagcacgcangggtagccaaataaggagacgactacaaaaatccggtagccttaggcaccccggtcg

SEQ ID NO: 1489 - DNA, 358 bp, Gossypium hirsutum
  Clone ID: LIB3083-028-Q1-L1-H2
ccacatcggtcaggccggtatccaggtcggaaacgcttggtgggagctttactgtctcgagcatggaatccagcctgatggtcagatgccaagtgacaaaactgtcggaggaggtgatgatgcttttaacacctttttcagtgaaactggtgctgggaagcacgtccctcgtgccgtcttcgtggatcttgaacccactgttattgatgaagtgagaactggtgcttaccgccagctcttccacccagaacaactcatcagcggcaaggaagactcagctaacaactttgcccgtggtcactacaccattggcaaggagattgtcgacctctgtttggaccgcatcaagaaacttgct

SEQ ID NO: 1490 - DNA, 415 bp, Gossypium hirsutum
  Clone ID: LIB3083-028-Q1-L1-H3
ccggtgacaggaagctgttgcaatcgtcgtcgccagctgctacggcgaatatcgtcgtggcccaagatggttcagggaattataagacgataaaagacgctatatccgctgcttcgaagaggtccggaagtggaaggtatgtgatatacgttaaggcaggcacatacaaggaaaatgttgagataggaagcaagctgaaaaacatcatgatggtgggcgatggtatagggaaaactataatcacagggagcaaaagcgtcggaagaggatccacaacgttcaattcagccaccgttgccgttgttggagatgggttcattgctcgtggcattacgttcagaaacaccgctggtcctactaaccatcaagcagtggctctacgttcaagctccgatctctcggggttctacaaatg

SEQ ID NO: 1491 - DNA, 385 bp, Gossypium hirsutum
  Clone ID: LIB3083-028-Q1-L1-H4
ccggtgacaggaagctgttgcaatcgatcgcaccagcggttacggctaatatgagggtggcccatgatggctcagggaattataatacgataaaagacgctatatccgctgcttcaaagaggtccggaagtggacgggatgcgatatacgttaaggccagcacatacatggaaaatgttgagattggaaacaagctgaaaaacatcatgatggtgggcgatggtatagggaaaactattatcacatggagctaaatcgtcagacgcagatccacaactgtcaatccagccaccgctgccgtacctggaaacgggttcattgctcatggccttacgtgcataaacaccggttgacctactaaccattaggcatgggctctaccttc

SEQ ID NO: 1492 - DNA, 418 bp, Gossypium hirsutum
  Clone ID: LIB3083-028-Q1-L1-H5
caaaaatcacttgattgttgataatttgaaactgagacgaacacttggatggggtttccagtagtcgataccgagtatctcaaggagatcgataaagctcgtcgagacgttcgcgctctcatcgccttgaagaattgcgctcctatcatgcttcgcttagcgtggcacgatgctgggacgtatgatgtgagcactaaaaccggaggtccaaatggctctataaggaatgaagaacagttcactcatggcgccaatagcggattgaaaatcgctattgattttcgtgaggaagtgaaggctaaacatcctaaaattacgtatgcagacctataccagcttgctggtgatgttgctgctgaagtcactggaagtcctaccattgactttgtacctggaagaaaggattcaaacatttgcc

SEQ ID NO: 1493 - DNA, 409 bp, Gossypium hirsutum
  Clone ID: LIB3083-028-Q1-L1-H6
atcctatcacggaccaagcaatagaaaaacttgggcagggtgttgacaacgaggtcacgagagcgtttatttcaatggaattgcatgagaagcttgaatcacttaagttggagttatcccgagcctctgataatcagacccttaatcctaatttgaaggctaaggcggataaacttatgcatgaatttaagcaaaatttgtctagaccagtgacctatcttggtttaaaacataagctcgataagctaatcatggttagcagactcattgatcagaaagagaaaggtgagaaactgaaagccgcggttaatcagaagattccattcgagatcaatgaaaagttggaacaattgcaaaccgctcaggctaacttatctaaaggagatccactcgatgaacatttggtggc

SEQ ID NO: 1494 - DNA, 426 bp, Gossypium hirsutum
  Clone ID: LIB3083-028-Q1-L1-H7
agcaaatgggtgaaaatgaccttaaagagctagggatggctatgtatccaggtgcttaccatgttacagatgagaagatttacaatttgtgtctgctaacaataaatttaggggattcgataaaatgggttgtgatcagggtgtcttctagattcaaatccataatcatctatttatgtgaatatattgtttgggccctaggaagaagacacttctggctttgctgcttgtaacagctcattttttgtgatgacagaaacagtggtttcgagaccacaatcccgatggaattttgaaggaagaatagccattgctagggtttgaaggttcgattagcttaggtgtgtgcatgtaagtgatcccgagccccatttttaatgattattatgtttatgatatagttttagcttaatctagctagcctgg

SEQ ID NO: 1495 - DNA, 402 bp, Gossypium hirsutum
  Clone ID: LIB3083-028-Q1-L1-H8
atgagacctatgtaaagcaattgtctgattacattatggcggctctagtggaggcattgcataaggaacctgatacggaaatatgtgcaagcatgttagatgcattgaatgaatgcgtacagatctctggtcctctgctagatgaaagtcaagttagatctattgtggatgagataaaacaagtaatcacagctagtgctagcagaaaaagtgagagagctgaaagagccaaagctgaagactttgatgctgaggagggagagttgattaaagaggaaaatgaacaagaggaagaagtttttgaccaagtgggtgaaatcttgggaactttgatcaaaacatttaaagcctctttcctgcctttctttgatgagctatcttcatatcttacacctatgtggg

SEQ ID NO: 1496 - DNA, 468 bp, Gossypium hirsutum
  Clone ID: LIB3083-028-Q1-L1-H9
ggcggtgcttgtctcagaatcagcgggctttttgggtcgtaggcccccccccctccaatatataacaatacctcccccacaacaatatataggaagacacacacgaaagaaaacggggctcaaaaactatagaaaaccgagaattttacacgcgttttttccctaatacaaaaccacaatgctctagaaaaagagaattagttacttattcaagaacgttaaaattagtcgagcttaaacgtttgagcctacaacgacttcaggagacgacgaatttgaaaatgaaggtcccgacgaggaattagccctcctggaccccgtcgtcgacggagcgctagtcgacgggttaacattaagagttggggtaggcgtatgcgctggaggcacgctggctttgaaaacggttcttggaaagaggattccactgacccgacagatcgtgatcggtccggatgcacgcatcgtgtc

SEQ ID NO: 1497 - DNA, 235 bp, Gossypium hirsutum
  unsure (1)..(235): unsure at all n locations; Clone ID: LIB3083-029-Q1-L1-C12
ctcagtcaancacacttattaancaanntctatttaactgaacacacactgtctcaaaaagtacacttcataccaaatttggcacacccaaatatcttttcacacacttaatttctcaaataatctatatcttcatatatatatattataataccccttccattttcaatttatatatactattctatttaacaaattaatcacccaatatcaaatccaaaaccatatcaatatt

SEQ ID NO: 1498 - DNA, 343 bp, Gossypium hirsutum
  Clone ID: LIB3083-029-Q1-L1-D10
aaacaaccccgtgctttaaaattccaacaatataattttttttctggtttccctgctaacttaaaggagggcttaaagatgctgaaggatagtattttcttttgacaatggatcatatcatcaacatgtatttagttcgacacacatatgctaaaaggacattaaacaaaatatatgactgtgctatttcaactaacatatgatacacactgattcttccctcttaacaggtaaactcctgtatagtaataagctactctttcttggtatagttacgtacctcattatcctaacccattatcaagaggggaacaagaaattgtatgatcttgatgacaaactc

SEQ ID NO: 1499 - DNA, 213 bp, Gossypium hirsutum
  Clone ID: LIB3083-029-Q1-L1-D11
acaccaatcaaattaaccggattaagagaatatttttaatacaaaaaaagccccaaacaattccttttattcttaaaaatcaaaaaaaaaaaatatttttaaaattcaaaaaaccaataattccattctctttttattatccctaaatcaatcctttcaaaaaaaatattcccccaacaaatttacaataatatttttaaaaaaaaattttca

SEQ ID NO: 1500 - DNA, 396 bp, Gossypium hirsutum
  unsure (1)..(396): unsure at all n locations; Clone ID: LIB3083-029-Q1-L1-D4
aaatataagcnatatttcatataaatgaaaatttttttcactaatgtaatacataanaaggcagagcgtttttattaaatactagggaaaatatcatttnttttaattgctttgttagtgttttttaccaataatgactttttttctctctcttttttgttaataatttttttaattttcccaatatgttaactaagaaaatttacctaaaaaaaataaatttattgcaactcatttcatttatctttacatatatattaaccatcaatttttgattataaaatattttctatctttatattacttctcttcattattgactataacccatttttcttatcttttaatactctaatctgccatgataatccttattattcttcaccatttttaaac

SEQ ID NO: 1501 - DNA, 351 bp, Gossypium hirsutum
  Clone ID: LIB3083-029-Q1-L1-E10
cttacgaaactccccaccccccactaaaaaatttaattttttaattacacacctcactgttttttacaatgtattctcatgaaagccaaaaaaacaagctcctattgtttactttgctttctccggagttcggaagaaaactgactaagcttcattccacaaagcattcttgccttctccacaccgtccgtgaacatctttcatcctctcaacagacttgcatattccactgcaggtccaatcgaacgaaacaacacaaacgctgcctgctttaaccttccactcgcaatctgtggtgccacagcataagcttcgatcatctatatgatcgacatccaaccctataaacca

SEQ ID NO: 1502 - DNA, 398 bp, Gossypium hirsutum
  unsure (1)..(398): unsure at all n locations; Clone ID: LIB3083-029-Q1-L1-E11
acttaataatcanaacatttttattaaactagcaaatcatgtctatttgaaaaatttttcttaacttcccctgtttttaactttcatatagcatgcaatttatcaccaatattacctaaaacctaccctacataaaaccatatcaaaaacataatatatttaacacaaacatattataacaacctcactttatatattaagagacgtgctcgtgcctaattccttcatcctcttttatccactatttctagatctgtcgccacctctttttatctccatcttttgttccctttagttagggttaatttcaagcttatcataatcatattcatagctttttcctgtttaaaattgatatcctctcacatttccacacatacatactatccttaatcata

SEQ ID NO: 1503 - DNA, 452 bp, Gossypium hirsutum
  Clone ID: LIB3083-029-Q1-L1-E4
taattttcagtttgtttgaatataaaatacaatttttttataaaaaaatattttttttaattaagtcgatctgaataagacacgctcttttttacataatgacgaaacactacatataaaatttcaagtctatcatatcatttatctaaaactattttattaatatccaaaaagaaaagtccatctctttttttaatcatacatttaagtgtactcgctttttaactgcattataaacttttcacctattattacattcttttatcacacaacttgataattcctcttaatcaaattttttcccttataaaacttttctaaattaacttcaccgccttttatattaataattttcacaacctttaatatactttattttctcccttcttaaaaacctacataattttcaataacacattttaattttctttattctcaataaactctcattt

SEQ ID NO: 1504 - DNA, 387 bp, Gossypium hirsutum
  Clone ID: LIB3083-029-Q1-L1-F10
catatgttattgtttttagagctaacatcttgaaaatgactgcgtaataacaaaagttgggcctataattatgcatctgagtattcaacatgttttcactccaacaaaaataataataattgtaaacaaaatgggaatggtgaagtgaggaatgcaaagtttttgttggcatcaactaaggtttagaatggttcatatttcatacaacactgccaaagcagcccaaagcacccacgcgcttccggtctgctcttttcgtaatcatcatcgtagaatcttttgataaactacctatcaactggttctgataaagcaaaagtatgcttacttcttgtgaacagggaagaccatccaacttcctactcacacttgattgaacggtaaatg

SEQ ID NO: 1505 - DNA, 394 bp, Gossypium hirsutum
  unsure (1)..(394): unsure at all n locations; Clone ID: LIB3083-029-Q1-L1-F11
gacaaanaaatgaattaatttaataacactccaatgtttaatccatatttagcactcaattcttatggatgttttttataatataacaagtcaaccccanaaaataaacaatttcaaacatgcaaatctatttgtttctcttggctcaaaagcatatatacatatacacaacattgttatatacatgacaacatatatatgcatttataatgatacatatttcattcaaagaaattattaaatccaccctagtaaactcaataattttaactgaaacaccatctaaataatcccatcaaattcacatatacattcactacacacatcatattccaatcaatacactatccgttcattcgtacttttagccctcttcatacaccatttttaaacc

SEQ ID NO: 1506 - DNA, 450 bp, Gossypium hirsutum
  unsure (1)..(450): unsure at all n locations; Clone ID: LIB3083-029-Q1-L1-F12
ataagcagttgtgtgaatgtngaaggaggaatggaagcttgaaactcttgtgatctctatgagacccttgccatcaccggagtgtattttcgtgaacacaagacgcaaggttgactgctactgacaagatgcgaagccgtgaccacacagtttctgccacccatggagacatggaccagaacactcgtgacatcatcatgcgtgaattccgctccggttcttctcgtgttctcatcacaactgatctccttgctcgtggtattgatgtgcagcaagtgtctctagtcataaactatgatctgccgactcaaccagaaaactacctccaccgtatcggacgaagtggaaggtttggaaggaaaggtgttgccattaactttgtgactaatgatgacgagagaatgctgtatgacatccagaagttctacaatgtgatcattgaggagctgc

SEQ ID NO: 1507 - DNA, 423 bp, Gossypium hirsutum
  Clone ID: LIB3083-029-Q1-L1-F4
aaaaccgcataaacatggcgattggaatcaactttaaaatagtgcttatacaagaaattcaaatgaagccctttaataatattggaaaaaaaaccttcaatagcaagaaaaacaaagagttaaaatacctaaaggaatttactccataaactcaaacccataatcaacgacaataccgttttgccttcataatctattaattcatgcaattaggaatggcataacggtaagcataaaagcttcgtatgtaaaagtcgcattaccactgtacatggcatccttctccttgaatttctcagttattcctttaactgtaaggcatcactcgatgaatttgtcatattcaatggccttgtttttgcctccaattttatcaaactttgatacaagcaaattccaaaacaacaggagagactgaaaatc

SEQ ID NO: 1508 - DNA, 417 bp, Gossypium hirsutum
  unsure (1)..(417): unsure at all n locations; Clone ID: LIB3083-029-Q1-L1-F5
acaaccaatacaccaanttttttatatatgcatgctctaggatctcatacaaaactttaaaaatcattcaggccacatactttanatcttataaatttttcacgtctatcatcataaatatcacctcactaataataatacacaataaatcattacataccatttattcaaaacaacactaaataattaaattaatctcccaccattaaatatgcaccaaatataaacccataactcctataaaataacataactaacctcttcactaaaaaataatatacttatccttcttccttgcttcaaatatcatattgttaccctaatttatatataccccttttatcaaaaaaaccttcttttcaaccttttccctcaacaaacaacttttcccttttcaaactttctttttaactccct

SEQ ID NO: 1509 - DNA, 375 bp, Gossypium hirsutum
  Clone ID: LIB3083-029-Q1-L1-F6
caaccaaacatatcccaatctatataaacaataaatcccttctaatccggaaaagttttaaacttaagggggcccaacacaatcctctctcaaataatacaatataacgtttaactaacctattctctctattataaaagtcccatatcataacatcatcccataaatcactataaaaacacatccttattaatccaatcaattaaacattacaaaactttttcatcaaattttaaccactctttttttttaaaccatcatattgatcaaaacccattccatatctaaccatcccataatcttttattccgtccacattttaatttcttcactcttgttatttccaactatacctccccttacatccccctaaaa

SEQ ID NO: 1510 - DNA, 417 bp, Gossypium hirsutum
  unsure (1)..(417): unsure at all n locations; Clone ID: LIB3083-029-Q1-L1-G10
cggaatgtcccaatattttagcaatttgataaagcagttctaacacaatggggggaggcgttactgctggacaggatatannaagataaggcaaaacacaaacggtgtaaggagtttaaagatcattctgataacagttttcagttttagtttttgagaggaaagccctacaagacatcaaatatcaatccatcattcttcccctcagcatggctgccgctttcctcacttgcctcacgggccctaagatgaataccttgtccggtgggcccttggcacccccaaaatgaatttccgcattgcaagactccttaattgacaagatggaaaccccttttcttccaatgacacgtcccatcttcccttgcggaacatccagaattgaaagtatttcttcttcaggagcatcccccttca

SEQ ID NO: 1511 - DNA, 436 bp, Gossypium hirsutum
  unsure (1)..(436): unsure at all n locations; Clone ID: LIB3083-029-Q1-L1-G11
ttagacaatgcagccagccagttataatatcgtaataaccaactcattcgctcttaccgttttagtgggcagcatcgaaatgacgaatgacttccattgccagttgatgagggctcttgttctgcagctttgcaagctcttccatggcttcgtatgtctctttatcggcgaatggcttaaggttataccttaccggtgattgaactggaccttcccacttgtctaccagctcatgaagtttttcgaatcccattcgggttgtgaagtcgccgaatgattctttgggctgtctttttcgtttccagtagtagaataaaggctcgaaaactttttcgagatcttgaactttgactttgttcataaaagttcttgctaattgggtttgattcggtgttcctccgaaccaaatctgataactgnttggaccgtcaccaac

SEQ ID NO: 1512 - DNA, 421 bp, Gossypium hirsutum
  Clone ID: LIB3083-029-Q1-L1-G12
gaagcgcaactaactcgatgccaccaaattttgtatgaattccctgagctcctttcgatgaaggagtctcttgttaagtatgtagtccaaccgaataagaagactggtggagcttgagcagttactttgcctgataaaaagtttgtcttcaaagataaactatgtgagactatttgagcttgagattttaggttatgaattcattgatttcctcttctttttatcatcttgtttatgaatttggttcgtgtgggtcgatatggatggtgataacctcggccgataatcacacacgcctcctcccagatgacccgaaagattgctggtatttttgtatttgaatgttgtattcatatatgaacatttgaataagtcagttggaaatggttttatctggttatgaatatgcattttgagtttt

SEQ ID NO: 1513 - DNA, 426 bp, Gossypium hirsutum
  Clone ID: LIB3083-029-Q1-L1-G4
acataattacttttatataatatatatgaatcgtataaatccaaccaaacatattccaaacagggtggacaataaattccttcaaatacaaaaaaagagtgtcctcaaaaggtaaaaaaataataatgtctcaaagaatacaatataatggtaaagtaacgtaggctctctagtagaaaagtcccatatgagacatcagcccatagaatacgagaaaaacaaggccgaaataagcaaatgaatgaaacattacagagctattgcatcaaatgtgaggcactcttttgttttaaaccatcagattgagcagagcccatcccatggctaagcttcccatcatcttttgtacggtccacatttgatttgctccactcgtgtcaattccagctggacctggcgtatcaaccccgaaggtaggtgcttggg

SEQ ID NO: 1514 - DNA, 392 bp, Gossypium hirsutum
  unsure (1)..(392): unsure at all n locations; Clone ID: LIB3083-029-Q1-L1-G5
acaaacatagccatangtattacattactattttttaatatattatacattactctctcaaatggaagccttattaagcaaagtcgggaaagggaaaaatagggaaaagacactttcattactcattacatacaaatccaaacacaaagctcgaatcacatacctgtatatgctgcattaccgacaacttcttttggttttcgctttcatcacatgtgttcttcatccaaatcttcctcatcctcatattcgccttcctcgtcagcggtagcgtcctggtattgttgatattcagacacaagatcgttcatgttgctcttaacctcagttaactccatctcgtccataccttcaccgttttaccaattcaagaaagctttccttctgaacat

SEQ ID NO: 1515 - DNA, 367 bp, Gossypium hirsutum
  Clone ID: LIB3083-029-Q1-L1-G6
gaaagtactgttatttattgcaacagaaaatttgaaattcacacattcatatcataggggggttaacaaaacatataaataataaattaacgattcctctcttaattttaacaattttcttcttcttcttttgttgctacatttattgcatgaggtactgctgtggaacttgttcacactaaccaccttcattaaatgcgtaaaacaatgcaagatagcttaaggatgatggggagcaaagggtggcaaagaaggccattttccgaacttgggatggtggtggaaatacttgggaggaatcttagggagaggaggtagcttaagaaggggagggtggtggtggaaatacttgggaggaatcttggga

SEQ ID NO: 1516 - DNA, 438 bp, Gossypium hirsutum
  unsure (1)..(438): unsure at all n locations; Clone ID: LIB3083-029-Q1-L1-H10
tttatttttaacctttgagatgaatgcaaatttatgttgtacgctaaaatgtggctttagctggtaaaataagtagatttctcgaagtanggatgaaaattcatgatgtttagatagactcaggtaataagacggcaacaagggctgcagaacacatttaacttaaaacaacttaaaaggaagaaacaaacaggcataccagattcacgaacaaccaaaacaccgactaatggagaacagactagatggtggctccagtgatggctccagttctggcttcttgcgaggaagatgcttaaaaaatgcttttaccgctccactcaccccatcatcattctccattgccttggcaagttcaacagctctctctttaacctttgggtttagcatgaattttattgcatcaatcagcttgngaagtgagaattcatcattcgg

SEQ ID NO: 1517 - DNA, 391 bp, Gossypium hirsutum
  unsure (1)..(391): unsure at all n locations; Clone ID: LIB3083-029-Q1-L1-H11
agttactacctggagctggaatgggctaagccaagcatgctaatcttttggacattcatgtgaccaactnttgatctcttgatagtcgtcaaagccagggtatcctcctgcttccctttaaattccaggatttctcctaaaacttgctggcttcctttaagctcaagcctttccacattagggcctggcctagaatgaaatttaaccgcttattgaaagagtccttcattttcttctttccaccacgaaaagcgccctttacccacccggatatcatacctttgggtcctggttctaattgcacccattgatcataagtgattacctcaggtggaaaatttctataaatctcacagaagttctgattgtgaattataactctgtaagaaaa

SEQ ID NO: 1518 - DNA, 409 bp, Gossypium hirsutum
  Clone ID: LIB3083-029-Q1-L1-H4
tttgtagataaagttaatattacgtagtcgcataaatcggcatagtacacaacccacaactcgggaggtttaacatccatatttattctgtagctatcgttattttggcttccactagctggtgaactttccatgccaaaacttcacttgacgctgttgcagtcagtgctagggctgatcttgtaagggatgttgacaccgcacttgcctgggagtccgcttgcaataccatagttgatgccagaaatgccggcggccgcacttttgatgcatttgcaagctgcttgccggtctggtgttgtttgggcggcggagttgagagattttatgccgccgcagcaacctgggggaacgccaccagcaccattccctgtcaagtaaccaatgcagggtgcgagggagcttgtga

SEQ ID NO: 1519 - DNA, 369 bp, Gossypium hirsutum
  unsure (1)..(369): unsure at all n locations; Clone ID: LIB3083-029-Q1-L1-H5
attccctccttttttttattcattgaaatgtctgttggggtatgtaaggttactcagaaaaacgtccttgcctcnatttctaggcgtgcagttcgaatcaagactgctgctggaagaggtgcttatgtctcagatataacctatctaaatcttacatttaataatgcccgagttggaattatcatcaagacagactactatcagcaccctgacgatgactttgaccgacaggccctcccacttttaaggcacattatcttttccgccatacatggtcacggagttcgtgtacctgttaaaatacactgaagcaaagatattcccatcaaaaacgtgacgcttagggatatatctattgcgataacatat

SEQ ID NO: 1520 - DNA, 372 bp, Gossypium hirsutum
  Clone ID: LIB3083-029-Q1-L1-H6
cctcaagactgaaagaaggaaacttgatgtcatatagtttgagtccatgcaacaactttcgggcgaagaagagcaatgatgatatgtttatcaaactgtgatctgaaaaggacaagcgcaaggatgctgataaagaagaaaaagtcaactagcctgtgagcatcaatgagttcctgaagccagctgaatgggagaggtactattgacctgggcatggacgatgccgtgaccgtggtcccagaggtgggtatggaggcaacacatccagcaatgtgcaagctccctcaattgcagatcctggacactttcgctcattgggtggcaaagtgatgtccgacaccacaatctacacaattggtctcacttggaatc

SEQ ID NO: 1521 - DNA, 319 bp, Gossypium hirsutum
  Clone ID: LIB3083-030-Q1-L1-A1
aaaatgtgattttcttaataactaattcaagcttaaataatacaagtatggcaatctccactcagcgagtgtatttatgcaccatggacctcaaattccatgactcgacaatgatatatgaatacaacaatataacagtcacaagcgtcaacattattgcaaaaatctttaattcctacattttgcatttttcacccactcttcatccactccatctaattacatccatgccgtacaatggatcttacatcatcaacccaaatacactgcacaaatcatctataatgtgtggctacgttacaaaagttgaactaaaatg

SEQ ID NO: 1522 - DNA, 470 bp, Gossypium hirsutum
  Clone ID: LIB3083-030-Q1-L1-A2
taattatctgatgattattacgaggtctatgatatgatcgtatgattgtgtgtaaatttcgtgaagaaattctatgcataaggtgcggtattcgaagttagggactaaattgaatagttgcaaaactttcattctagaagtttctagtatgaaattgctttgaaatattaactaggaggtcttaaatataatttcaccaatttctaagtttatggacaaaaattggacatggatggaatttttggaaagtttactaaaaatggcattttggtcatttaggggtaaaatgaattaaaatacataattaaaagccaattttgttcatcttcttcaccatggacgtgtataccaagggagactccatggctagggtttccaagcgtccaagctcgattgtaagtccgttctagcccccgttttaatgatttttactttttggaatccctagtaaccttgatttagcttatgct

SEQ ID NO: 1523 - DNA, 374 bp, Gossypium hirsutum
  Clone ID: LIB3083-030-Q1-L1-A3
gttaatgtccatcctatatttgaccttgtgcttaaaaaagctgaaaagggggcgggtccttttcaacctggacagggttggtatgattttcgagctggattctggggtgttcttggtgggccttgtcttggcataatccctcgatttatcgaataatttaattatccaatgccagaaaactgtgccggaggaaccactggtgttttcgtaaatgggagagagctccatcagaaagatttggatttgcttgctaatataaggcttccaaccgatagagatagatcttacatcatctagatctctggcagaatcctggacgaatacacttgtgaatagctagattgccttggcaaacttgcccctacagttgataa

SEQ ID NO: 1524 - DNA, 413 bp, Gossypium hirsutum
  Clone ID: LIB3083-030-Q1-L1-A4
ttgcgctggaattggcaattatttattggatgatttgatcagcgtaccacaatcttaaaaacggcttgttatttttaaagataatcttggaatatcgaaagaacaatctacattgcatcattcattgatacaatttaaaactgtttttaaccattgcccttaatacagaaatttttgcatggccagaaaatgtaagaaagaatacaatttgcaaagggcttcttgatctgatggtaatagttggcaaactagtaatgcaagagaaaacaaaatccttgcatcatcacactgtttcaatcttgattgaaagaaaaactgagatcttatttgtgtataaatcaagttgtattgaaatgctggggcttttaaacatttgacaaattttttactcctgatagaacaagaatagtttt

SEQ ID NO: 1525 - DNA, 483 bp, Gossypium hirsutum
  Clone ID: LIB3083-030-Q1-L1-A6
ctcaagtttttttaattttccttttgtttttttttttttgtttttttttttttttttttttttttttttttacaagaaaaaccaatctccaatcgaataatttggtgtatatcaatgcctttaaacaacacgcatgtacagctttcaatgaatagtacaaacagggcaaaggaaagataaaactttggttgcaaagccagggagcattacaagagctatttaaatgatacaggtgggaaaacaacgaccatcgcctaagagcaacaagatgcagttgcagtccgttctgaaggtctattcatgaaaaccattccagcaggattttgtgctggctgcactcgaggtaatcttttagctatttcataaaaaagttcattgacattggatgcggtctttgcaaaagtttccatgaaaaaaagaccattctcctgagcataagtttgtgcttcctctgctgccaccttccttgcatccaataagtca

SEQ ID NO: 1526 - DNA, 469 bp, Gossypium hirsutum
  unsure (1)..(469): unsure at all n locations; Clone ID: LIB3083-030-Q1-L1-A7
gtctaccttcgagggcctagtccagctggcagacatggagctggatgattgtgttgaaacaactctatatgatgtcaagattggtgaagatatgcgtaggaagcaggcgcaagcagctcaagaggcttatgaggaagatgatgacatgcatggtggtgcccaaagagtgcaatgcgctcagcaatgatcggtggcagacggtaaggaatggaatgtatgattgtttaacaaaaattatttgaaaataccattctggatatggttgtttgcttagaccatttcttctagagtgctatctgctttggtaactggtaaagtgtatggaaagatttagcgttggaacttgacctatttgtttatggtatacaacctattgcttcttgtgagcttagtttttttagttttgattntatatttgaatttgagaaatcatttanggatattttatgaattgaaggtgttcattgtt

SEQ ID NO: 1527 - DNA, 313 bp, Gossypium hirsutum
  Clone ID: LIB3083-030-Q1-L1-A8
aatttttctgttttcatgcttttggaagtcatgtttatgttccttaccctcatcttgtttttccttgtattcggtatgttcaatattcgacttcgtgtttctcatgctctttaggcttttcccctttggggaaattgggtttttctttctcgtactcttcgtgctccttcgattcgtgtgactcgtggcactcatcatgtttatgttccttgccctcatcttgtttttccttgtactcgggtattttcggatattcgacttcatgtttctcgtgctctttgggcttttcccctttggggaaattgggtttttc

SEQ ID NO: 1528 - DNA, 407 bp, Gossypium hirsutum
  Clone ID: LIB3083-030-Q1-L1-B1
ctgggaaagcatttgcgcattttctcgttaattatacatttttccagcccatcataaagcacagttaggatcagatacaccaaagtaccaacaaccaacaaacaaacatggaccgacggaaaccatgtttcgtgtttatcgcacaagaacacacacaaaaaagagaggatgaaatactctgtaatttgagtatttcggtctacaacaacagtcttgtccagcttatgacttgaacaaagaataccaaactgcattggcagaataactcgactttggagaacaaaaataataccctacttatgcttcagacataatgcaatctatagcctgcttgcatatgccagtcatcgtggcctcaggcccgtaaacctcaaggggtactcctagttcctccccaagagcacgca

SEQ ID NO: 1529 - DNA, 457 bp, Gossypium hirsutum
  Clone ID: LIB3083-030-Q1-L1-B2
tttttctgttttttaaaaaaaaaaggatcaattttatatgataaagtataaaaataacagcatcctaaacaaatctgtctgatggggtttatatagaacccaaatattaataaatagatgatgcctaaaacttaatccaaggccctctgccacccatatgcatcaactatttgctagctgtcaatttaaggcacttctccaattcctgctaaatatctaacaaaaatcatagaatattttctatgacagaatggaaggaaatgaaaaataacctgtcactcgcatttgatagacctgtatatgtgacggacaaagagtagcgaggcacggaaaccaactgtcccgagcatgaggaagaatccgtagcagatgcaggccatataaccaaagaagaacgaggtttgcataaatccagacatgtctgatcgagcgtagtaataatacaagcagtaagcgt

SEQ ID NO: 1530 - DNA, 456 bp, Gossypium hirsutum
  Clone ID: LIB3083-030-Q1-L1-B3
ttcaaaagaagttaatggagaatgtccaagttaaacatacaattttacaacatatcatgcaatgcatacaacgaacgggtttagctactaggggtaaaccacaacaaaatcaacacattgaacaacacccacaacagccacaaaccagtgattgtagctgattacaaagcaaacaaaaactaatgtgtattttcatcagctactactttaacaattgtatgacttccacaatttaataaacttgtcatgactcgcggaagaaaccaggccagtcaccggtgacactgccaatgcagctatcagtccttcatgagccgacaatgtctttgtcttaccctccgtcatattccatagctccaaagactggtaacagccaatgaccagcaatgaaggacttgtaagatggaaaacacactagtgaaacttgttgccattacaactcaattcatgaacaca

SEQ ID NO: 1531 - DNA, 278 bp, Gossypium hirsutum
  Clone ID: LIB3083-030-Q1-L1-B4
tttgttgcaatcaaactttccatgatacttttacctttaaaaaaagatcacatttcctggatgcgttacatccgcatagtggggaaaatatttaccaacatgatttacaaacgatacatcatataactttcgtattataatccaccaccatttatctttaaatttacatatatatacacttttttttcaaatattgttaaccttattattcgttacttacaattccattccctttctaacatttccttttcaaatctttcaaactctatatatttttt

SEQ ID NO: 1532 - DNA, 440 bp, Gossypium hirsutum
  Clone ID: LIB3083-030-Q1-L1-B5
tatgtgcttacgtggtgcgtgtgaatatgatagaagggttaggatgaaggaagggagggaagaacagggcgcgactctgaagcgcaaggggacgcggagagcctcctacgacaagggacgtacggacgaagtacttgacgtctattaactagtcttgttatgttattttgggttccggtactcttgctcctgttcctcgcactcatcctcctcgtgaataacctcataacacgtctcacgtctattacttctacctaaccctctatgctaaagttgcggacgactatgcaaattcccggacttatgtatcttaccttactactatccaacacgtccgtcaatacccctctttaattcctaacgcccagaccctacattgcgcctttccttcctttacccatcaactcccctccgtcgccttcataccccatctttcctaa

SEQ ID NO: 1533 - DNA, 455 bp, Gossypium hirsutum
  Clone ID: LIB3083-030-Q1-L1-B6
ccctcaagttttttttctgttccttttgttatttatgttttgtgtaaaaagaaatgactcattatttataaattataataaaaaagtatttcgatagtgaaaaccataaatatcatggtcaatcatcaacaatcaaatttcagacattatggatatcacctctagagttcaaacttaatagtttggttcactataggaaatgtgtatattataggctaatggcacttgctcgcctatttcacacataaagccagcgggcgccactttgctacctcggcataaaacgctcatgtgccttatataagtaatatgtcaattccagttttaatattagacggacactataatattgtcttaaaactggcctccttcaaaagtttgtccgaattgccaaccagcgggcactacattgtagtttgtgatagtcctgctatcgctggcagtcactttgaaag

SEQ ID NO: 1534 - DNA, 225 bp, Gossypium hirsutum
  Clone ID: LIB3083-030-Q1-L1-B7
cttttggtcatcgtcatcatccatgagtaaacgacataattcagcagcttcagcagcctcaggttcagtttcttcttctgcctgagccttatagggacgtcttctcatcttgagccccttaacagcatctgctttgtcaaccttgttattgttgttaccttcttccccttcttcgaattcctctgcatcaagcaaattttctaggtcgccagcaaaggaatcaag

SEQ ID NO: 1535 - DNA, 424 bp, Gossypium hirsutum
  Clone ID: LIB3083-030-Q1-L1-B8
cataatacagatgctatttattatgaaaaaatatataaagaacaattaagaataacagatctgtcatgttctttactgcgagtacaatacgtagcagtgtttgacaaaggcactcgctccctcaatctctcaggatccaaccgttttgataaagcacatagtcttgaatgaatgataatatacaaacatataattatatgaatgaccattgcattaaccatatctactttatactgtaccatgcacattgcgtcttggaataccaccaactataataagactaatgcttacgaactgttaaccgatgaacaattcattctttggatcttattcacaagcacgttaacttgctctctgtacaatctattcacgtctacaatatcatcatagagtacctataactcctcatggcgtttacccatta

SEQ ID NO: 1536 - DNA, 454 bp, Gossypium hirsutum
  Clone ID: LIB3083-030-Q1-L1-C1
ttgagtgcaatggccttgtctagaatatctaccatggtatagcagctctacacatgagatactcatccgttggagcatcatcactgacaaaaatgcagcacaaagcaactcccatccattgactatcatttcgaacttccagaggcaaatttatcttaaaccaagactcacctctttgttgactaaaccattctgcgatttcacttccaggtagaataacatcaaacatttctcttgaatttccaaaaacctgcaaaataaaacttcgcttgtttggtaattaacaccatgaataattataagacacagagaaacagagatattaacgaacctttagatgttttttcagcaatgttaaggcaccgatgttctcagccaatctgaagcaattaacacctactatatctgaccaataacttgaccgataatttgaattgtaaacttttgatggatt

SEQ ID NO: 1537 - DNA, 320 bp, Gossypium hirsutum
  Clone ID: LIB3083-030-Q1-L1-C2
atccaaaggtatgatatatccaaccattcagttcactatttacaatatagccataaattcctaactagcttagttatcatcacagaatgcaaataaaggcataacaacaatccgactgtctcagatgaaaaatgagggggaaaggagaatgaaaaataataataataagacgatataatgctcccccctgcttccagaacttcccacattgcacaaatctacttaatagcttcaagccttcgtagctaagttgtaggaaagccaatctatgcccttataaagcccctcaccagatgttgcacacgtactctggatatacc

SEQ ID NO: 1538 - DNA, 369 bp, Gossypium hirsutum
  Clone ID: LIB3083-030-Q1-L1-C3
tccataatcatcccaggtaatccagattcaagtgcacaaatttcccgtccaccttgcactctgcgaacttggactggctcaactccaccttgggccagggtatcctcagtttcacctgaaatcatgtataactcctcatcttgacttggttctttatatggtttccgccaatcctgaaatccctgaattaattcccttcttatatcaaaaaaagtctccctcttattcccgcgcttcttgctttctagatagttatcaagacgaaagctttttaacaaacttggtctgtccctaacatgttctattgccattttcaatgcatcattcctcattattgtcacctttaaaatcctcatcgtaaacatcttt

SEQ ID NO: 1539 - DNA, 293 bp, Gossypium hirsutum
  unsure (1)..(293): unsure at all n locations; Clone ID: LIB3083-030-Q1-L1-C4
cgaattcggtnggcagccnncgggggtaatccacttttagttcttagagctgtgtccgtccatccgtcggtggagcctccggggctttggtgttccncnttttagtgagggggttaatnnttcgagctttggcngnntaatcatggtcattnnngctgtttcctttgtgtnngaaattgtnntatccgctttcacaatnnntccacacctaacataccgtagccntnggaagccataaannngtgtaaagcccctgggnngtgccttaatnngagtgagcctanannctcaca

SEQ ID NO: 1540 - DNA, 441 bp, Gossypium hirsutum
  Clone ID: LIB3083-030-Q1-L1-C5
tcttacatttttgtaaaaaatcataatacgtacattatacatttttgaggaactttcatttgtacagcttatttgtagtgtttgtttggtggtgcatgcatactattttgcggtttcgaaaacaggcatgggtctccaaagaagtggaataagttattgaataatgaatttttcgagacgtatggtaatgcttatatgatatcaggaaatccacggaagaaaaatgaaatgcaatgctaatcttacaagtatgtataatagagaaactatattatccaaattttgcagccatagaaactctgcaatagctcttctttactactggtataaatatttagtaggcctctcgacccatcaagattttcatgcacttggtatgaaaaacacacgaaaaaaaccttacaaagataatgcgtagggaaccttcaaccgcatgaatga

SEQ ID NO: 1541 - DNA, 476 bp, Gossypium hirsutum
  Clone ID: LIB3083-030-Q1-L1-C6
cctcaagttttgttacttttccggtgagaaatatttttatggtttacattcataagtgctttagcatcaactaggggaaatgatttccctagacagatactttaaacgtatagcagcatcgcattgtgttggagctgaaagaggggatggcatttcaactgaggatggtcaatcacttgatccatactatcctgaatatagcttttccggattggataagtcccgaagaatttttgcaaattgcattgaaacctccttgctacctatatacataggctttgaaaaggcctagttcacatattcacttttgttgtctcttttatctagttgcagagaaaaatgaaattgaaccagagatagctgggtcaccgttgaggcttcctcatatggcttgcaatttgacaggtttcgtgtgagtttgtatttttatcatgtggcatgaagcttagataacaggtcaggaaaatttacatgcc

SEQ ID NO: 1542 - DNA, 461 bp, Gossypium hirsutum
  Clone ID: LIB3083-030-Q1-L1-C7
cttgtggaactttaatcagaccggccattaaataattgataacaagctatcacaagaactcttaaaagttgctgggaacattaaacattaaaacaaaatcccaaaacatcttagactaccattaccagaccatcctaccaaaccaacagaccaaaaaggataaaacgactgtagaaaccaatcatactcatagcaataacataaaactgtagaaataaataaccaccaaaactgcaaaccctccctttctcccgcttcttccaatcaaaatcttataaaccacactccgacagcagcaattaatttctactgctgcttgcattccggaggcctctcaccttgctgcccatcccctactgctttaccactcttcttatgagccgacttctttttggtcttacttccttcgtcatcatcctcatcctcatcgtcagcatcctcatcctcttcctcatcatcct

SEQ ID NO: 1543 - DNA, 449 bp, Gossypium hirsutum
  Clone ID: LIB3083-030-Q1-L1-C8
gcagcttgaacaatcaaatccatagtttaaaatttagtaataaaaacatcatcgtattgtgtgacaattttcttcagaccccccaacaatacccagtttctgaatttcgagttttctcaactataaactaatacatgactaaacgttttcccataaacttacaactagatagccggcaatgactggaaaacgaggtccgtttacgttgattttagatcacatattgtggtgccggcgctttaagaattcaaaccaaatggcattctgggggttttgatattatatgatgtctgcaacgatcatctgggattatgaaagtatgaactgaaattcgcagcatttgctgtttaggtgccgctcatcatgacttcccccaaggttggaactcactaatgtaatcacattaatgacctttgcttggaaatgaactgtccacttttcatatcatc

SEQ ID NO: 1544 - DNA, 453 bp, Gossypium hirsutum
  Clone ID: LIB3083-030-Q1-L1-D1
ttttaaagccactaaatcatcagatccagcttattaaattaaatcatcccttttacaatagcagagtccaagtgccaaatatggcaaggaatactcccaaaatatgacatatttactttaaaaactaggcttcttaactcatcaaccaagcaagttttctagacaaagatggaaaaaagggaaaataaacgtcaaagcccaccattttacacaacttatcataccaaagcaaattgctgctgctgccaaaataatctttgttccatattttcatggagaagcctctgcctaaatttctcacaaccttcatttacaaaattcacgccacaagaaaaagccatatatttaaacgagggagatccacccgtcaagccacgttaatattcttgaaactcgatgtagcatgagcaggtgtgtttgtcatttataacctctacaatatccagaaacaaa

SEQ ID NO: 1545 - DNA, 458 bp, Gossypium hirsutum
  unsure (1)..(458): unsure at all n locations; Clone ID: LIB3083-030-Q1-L1-D2
aaattgccaggtctgttgcatcacaagatagcgtgtgccatgaacgcccttgttcgtgtctcgggggtgcttacaaatgctcctttgggtgggaacttggattgtgaccattatttaaataacagcaaggctgtaagagaggctatgtgtttcttgatggaccctcaaattggaagaaaggtttgctatgtccaattccctcaacgtttcgatggtattgatagacatgatcgatatgccaatcggaacacagttttctttgatattaacatgaaaggtctagatggtatacaaggccctgtatatgtcggcacggngtgtgttttcagaaggcaagctctttatggttatgaaccttcaaagggacctaagcgcccgaaaatggtaacctgtggttgctgcccttgctttggaccccgcagaaaggacaaaaagcactctaaagatggtggaaatgc

SEQ ID NO: 1546 - DNA, 467 bp, Gossypium hirsutum
  Clone ID: LIB3083-030-Q1-L1-D3
gtttattttttttttcttttgtttaaaaaggagtgatacaattatttctacttatttcgcaagtatatagagtagtaattagttgattggattaggtcatataataatacagatatgttataaatatcaaggcttgccaggtttcttcctagggtcgtgctcgtgcttttggttagccccagtatcatcataatcttgcattccacccagcatcatcagcttcctcactgtcctcatttggatcatcatcatctccttcccaccctgttcaactgagtaatctgcagcttgcttcatgccaccatgaagcccttcttcaaccatgccttgagagaaaggcatgaggaggagcagagacaccagaagaaaagtcttgaaccaaggagttcataaatatgcagatttgagcttcaaaaataagttgtgataggtgatggaataaggactgacaatggttgatttgcaac

SEQ ID NO: 1547 - DNA, 383 bp, Gossypium hirsutum
  Clone ID: LIB3083-030-Q1-L1-D4
ggaaatggcaaggcatacatgtgttatggaaagaattttaagattggaaagattttgtaccgcaaaggtcggtgtaacatcatagaactacagataaatcctcctgcacagatttaatctccttgacctaacacacagacacatatgtcgccactccaacacataagttactaacagccaccagttcggacaaaacacaacttcagcactatacatctcagacagacaacaagccaaatctgcataaggagtctctcccctcatgcaacataatttccccatggcttacttacctctttcgtcgtttggcattcacctttaaatcatatactggtgaaggatgaaacccattctgagatcttttcagatcatccttaaaacat

SEQ ID NO: 1548 - DNA, 477 bp, Gossypium hirsutum
  Clone ID: LIB3083-030-Q1-L1-D5
cctaagttttttttcggttctgtttgacctggagaaactgctgcggagtatcttatattattagaagaaaaagtcaccactgaagagctggcatgcatgaataagatgactgatattgatactcatttaatattcatacatgctaccccataatatctatatatgttcatcgcaggtgagttattcgggctacatattatttctcgacagtcaccaactgcctgctactcacttcaagcttaggacttcaatctcgaattcgagaaccgagtttggctgtattccccatgcaggaaacccaccagcaccataagcatagtctggggagcaccgaagacgagcaacttctgccacttgcattcccatcacaccttcatcccatccttttataacagagcccttgccaatttggaaagagaaaagttgctgccctggatcctttgtgcttcaaaaatttctcagaccaatctccatttt

SEQ ID NO: 1549 - DNA, 391 bp, Gossypium hirsutum
  Clone ID: LIB3083-030-Q1-L1-D6
gttcagattatgcaacgcccttatcctggtgactaactgagatagacacacactggacgcaaaactgagcctgggagactctaatggggtgcagactctaccggcacaaagacataagctcgcattaatcctaacccaggctgtcaatgctctgctacgtgcgcaaaatgaattagcactgcactttgaaacagatgctcatacttctagctctgctacgaacatagtcccaaccataatccataacgcttcatgagagtgaccataaccgtaccggtcgcctactattaatcccctaactatgcggcaaccattaaccattccgtgtggaacgatccgtccatgtaaccctttgcataagcctgaccgccattattgcatatctcagctt

SEQ ID NO: 1550 - DNA, 410 bp, Gossypium hirsutum
  Clone ID: LIB3083-030-Q1-L1-D7
ggtgaaattcaactttatgattcattaacaaagattttagaacgttacacaaagaattgatggcaaccgtgtaggaaagtagcatttttagtacaatattgagggtttatacagccttaaccctattaaaccctgttacttattttacaagcaattaaattaactatgaaatcgcaacatattaaagccctgaagtgaaaggcacaccggtgctcggcaaccaagaattcccagccagaaagttaccgacggtgaactttgacacctcgcttgcgctcttaagaacatggtagcctccccatttgactctattagaagtggatgaaccggggccagtgttcatatactccgataatacagcgtcttaagtgcaaaattaccatcccattccatccagccggccgggttaa

SEQ ID NO: 1551 - DNA, 379 bp, Gossypium hirsutum
  Clone ID: LIB3083-030-Q1-L1-D8
gaaataaagatatagtagaagcaatgaagattatggatagcatcagtatgaagaaccacatcacagactgggaagcatatacccctcatgttctcttcggccattgcaccttcctttgatgcccattggaacccagcgactactgaatccttaatttcattcaggtactgaactcctttacacatatcaaccaccatgttaggacctgtggtctcagggccaaaacaccatatcttcttagcaagatctttgtcccatccatactcctcagccaaaatttttgaacgaaccttgggatcatctcttggaccaatacgaccttcatcaatggcttcagccagaccttcctccaagggtcgagcttccatgtataatcggt

SEQ ID NO: 1552 - DNA, 411 bp, Gossypium hirsutum
  Clone ID: LIB3083-030-Q1-L1-E2
gtgagagactaagacttcttcgctacttcactcaaatacaaggctcaaacaaatgtggccaaggttccgcaggatacaaactgtgaccaaaccaaaaaacagttgaaaactacaaattaaataaactgcatttgtgcacctccgatcacgttttccctagggacaccatctgtttttctcctagccctgatcaatccatataccattatcagttagacaagatttaatagttttttacaacacaaaaatgctgcctactcgtgaatacctgaaaatatgtggggatcaaaccatttgttgttcacggcagattgcggtttacaccaaaacaaaataacatacctaccctcaatttcatcctccctactcataaccaccaatgccacttagacgtccatgaaagtttccccc

SEQ ID NO: 1553 - DNA, 304 bp, Gossypium hirsutum
  Clone ID: LIB3083-030-Q1-L1-E3
ctgttaataggaacaactagtctagcaattaaaggttttcatgtccatgcatccatacaaatacaattggatttggatggggcaaattaaatccctaatagtcaaataacgtcccatacagcatcctaccataagtaaaacagctacatctaaaattccattttaacaagtgcattggattcttcacatactttacactatcacggattttcttgacaatctcatgccctgcaccaagcacatcctttgccatgctgctcaggttacgagctatgcaatttccaagtaacaactgaccgttaag

SEQ ID NO: 1554 - DNA, 471 bp, Gossypium hirsutum
  Clone ID: LIB3083-030-Q1-L1-E4
cctgttaagtgtaacaaggcaagttgcccttagcatacactgtttaaagcttgaccattagcactagcaaaggacgcttagtcttctcaatttaactcttctgtaccacacaaatgctcacatcaaatgctgctaatttttgttgaggaaagtgatgatgagctcattcacctgctctggtagttgttcttgaacaaagtgattcccttctgacatgaaagtgatgtccagattaggcataaactgcttcactatccctttcttcatgtactcctccattcctgggaatttcataaaatagtccttctcccccattatcagcaatgatggagctgtcacttttggattggttataccataatccaattgagagcacctgtaggggacctgcaatgcggttcggaaaccagaattttgatataaagctgcatagacctcaagatcctcctctgtgaaccatggtggcaatgg

SEQ ID NO: 1555 - DNA, 472 bp, Gossypium hirsutum
  unsure (1)..(472): unsure at all n locations; Clone ID: LIB3083-030-Q1-L1-E6
ttgccctagacggtgcaattggatcattttcagcctggatgcagagcaatggtcttttaacatgttttatcgagtcacaagtgctgcaattatagtaatagtcatccaccgacttgaaaccaaatgaaacccatgttaatccttcatcaaagtccctgacagattttgcattggcagctaaggggatattaaattcaccccccatatcttcaaataggagagcatgcttcttgaatattttacagagggctctagcaagagctttgtcataaacattattaaagcccttgtggaaatcctcatcagcgatgaccaaattgaaaggattgcacaatgacaccgtaccagaaagggggcaagcatgagattctgtaccaagatatcgaacangaatgtttgcacccagagaccaaccaacagcgtatagattagcttctgggtatctagcaccaacatgtctcactacttcata

SEQ ID NO: 1556 - DNA, 437 bp, Gossypium hirsutum
  Clone ID: LIB3083-030-Q1-L1-E7
cctcaagttattgatctattctgttaaataaataaaattcagtaataataataataataataaacatattcaagtattacaaatattccatcgactggcatcccaaatacatctaaaaaaagagaattttacaagaaaaataccataaaataaaaatacagtccatcttaaaaaataatattatatgaaaacaaggcacttgaaccacattagaatcaatataactcatatatatatatataacctacaaaacaatatacagttcacattaatggtaaaaagaagaccatattttcatgactcaacagagatgtttccgctactcggattcgtgatttacggagcagtaactttcattgatgtcggtaccggttatgatcgatctttcaccataccagctccgatactgctctgcccaacaacccgacccttacttt

SEQ ID NO: 1557 - DNA, 430 bp, Gossypium hirsutum
  Clone ID: LIB3083-030-Q1-L1-E8
tcgagttatttttctgttctgttggtttttttttttttgttttttttttttttttttttttttttttattgggaatatcaaaaaatacgataggaagaatttaaatgtatgaattttcatcatgacatatcatgtgataataataacaataataaaccaaatactatgtgatacaaaaaaaaaaaaaaaaaccccttccaaattattaaaaatccagtaatgatgtgcaccaaactgttgacatatttaacctcaaatgaatatgctaatttatcactggtaaagtttgcaaacccggcctaggcaacaaccttttcagtttttggggtgaaaacaactttaacggccttaaacacctttcctatgggctttgcagtttcaatctttcaaacttttcccttgaccttatagtactcgattacaggaaagc

SEQ ID NO: 1558 - DNA, 411 bp, Gossypium hirsutum
  Clone ID: LIB3083-030-Q1-L1-F1
cattcatgactgcatccatggcaaactattgcctgagatggtttctggctaccacactatccaccacactaggtatggtcataactatggccggtacaccatcaggatggatgggatgcttgcaaccctacgtgaccctagtgacgaagaaagcgagacggtcaccgacttaccttcgagctcatcttgacatctcctgcgcgagtcgtaatacattctctctctgatgaatatgttcgcatgtatcatcgaggctgatatcatggcgtagactgcggtgcaacagtaagatcttaaacgatgctacactggtaacactggctctccattaagctacattggtgactattatgggagctcggagctcctgaattcttgagtcataaatcaagaagctgctattggcacttg

SEQ ID NO: 1559 - DNA, 477 bp, Gossypium hirsutum
  Clone ID: LIB3083-030-Q1-L1-F2
ttttctgttaataaccacatgaatccattatacctgttgggcatttacattttcccttaacaatttacttccaatacagagaacgaaaatatcaagtttcaacccaaacacaaataaaacatgaaaaagcataacatacagtaaaccatttcaagtctttaacaagcttcaaagaatagaagcttgcataacacggaagcaacaggtaataaaagacatcatacgcacactcaatcacaggtacttcttagtactcatcatcttcaccctcatcaccctcagccgactcagcaccaacttcttcataatccttctccaatgcagcaagatcctcacgagcctctgagaattctccttcttccataccctcaccaacataccagtgaatgaaagcacgtttggcatacataagatcaaacttatggtcaatgcgagagaagacttcagcaacactggtggagttagaaatcatgcaaa

SEQ ID NO: 1560 - DNA, 477 bp, Gossypium hirsutum
  Clone ID: LIB3083-030-Q1-L1-F4
agtttatttatttttctggttaaggccaatttcaaaagattcaagcaattaatttaaatattcatattaaacaaaaattcaaaattctgagagctcagtaacatcttaaaatcatagatatttatgagaaaaaaacgaaaatccagtttatttggccaaacaaaccctgaaatttcatcaacggtaactcttctggaaccttgccctagcacctcttccaccgaatttcttcggctcacacctccttggatcagccaccagcaaagtccggtcgtacgtcaccaaaacatccttaatatccttcttgctttgctcgtcgacatacttttggtagaaggcaacgagggctttcgctatgctttgacggatagcgtatatctgagaagtgtgacctccgcctttgactcggattctcatgtcgacgccggcgaaacggtggcggcctaagagaaggatcggttcgacagctttgaatcg

SEQ ID NO: 1561 - DNA, 460 bp, Gossypium hirsutum
  Clone ID: LIB3083-030-Q1-L1-F5
atgaagttcctaatttgtttctccttctgatgcaaatcatttcataccaaacgttgcagtatgaacaaagggcgaaggtgttgattgaggcttaagctcagaaaggcattggtggcaccctagcccgcattatcaacataagtaaacgattaaaaactatataaacttgtaaatgctttagatcgttaagcattcatgtgagacagtcatctctgccctgtacaacttggaaaatttgccttcaaaagaataaaactagtagccaaaaagaaattaatgttaactattattgcagtttaatcgttacaaacaaagatgggggagaaagatttgaagattggagctgattgatcatcaatggtaggactcttgaaacaacggagatgcagctagaaataacctttagtgattgcttcttctagttccttgaactcccatgcatccttcgatgaatattccc

SEQ ID NO: 1562 - DNA, 486 bp, Gossypium hirsutum
  Clone ID: LIB3083-030-Q1-L1-F6
ccctcaagtttttttttttttttgttttttttttttttttttaaattatatacactgtttatttacttttcctgtcgaataatctatatagtgtaaaaaattaatttcgggatattatcattgggacagatagataggaagtctttttcaactgtacctattaaaatctgggacagtttcatattcctttcagacaaatataacctgacggtccatatttcacctgatccagaattccaaattccccaccgttcgttttgtctgtagtgaatgcggtgggttcagactgttggagacctcctcaagtttcgtgggttaaactgaattttgatgcagccatggcaatatctttgatgcgttcttggcagaagctatagccaactttcaagggcttctttttgctaaagagaccgggtttaccaaagtggaggtagaaagggactctaggacggtaattgagaaaatcaaccatgaaggttttgatcc

SEQ ID NO: 1563 - DNA, 461 bp, Gossypium hirsutum
  Clone ID: LIB3083-030-Q1-L1-F7
ctgtcagaattttacggtatatgggaaaagaaatcccagctgaatgaattacatatttttgaggaccaaggccagaattatatcaaaattttacctgaaccccattagatttctgcatagcaggctgcgtgaacaaactccgagaactcattaggcacactgatattctccattttactgttttgcccttccttcgtttccaccgtgtaaaacccaagcgcaccacatccatactccgacccggtaaccaaatgcctccctccacatgctctgacccgaacgcccgggttgatctctgcccaattcagcaatttcccatcttcccctatccccacacacgatcttgggcatcgacccggttcccaaaccccttccacccgtctccattgttccgacttgaacccgtacacgtcagcgctcccatcaaattgaccttggctctccgttctgtatccactcac

SEQ ID NO: 1564 - DNA, 480 bp, Gossypium hirsutum
  Clone ID: LIB3083-030-Q1-L1-G1
gttaactttttttctgtttaaacctaaaaaacaactaaaagcgtttataaaaagcaattatttttacttgtaagcttcccctgcctagtggcgcagctcacatcagcatacgacccacaaacataacaaacttaacacatcaacaataactggacaggtgttcggcacaacacttaaaaccaccgcggaggcgaaggaccaggtgcaaagtggattccttctggatgttgtaatctgcaagggtcctcccatcttcaagttgcttcccagcaaaaatcagcctctgctggtctggtgggattccttccttatcctggatcttggccttaacattatcaatcgtgtctgagctctcaacttccagggtgatggtctttccagtcagggtcttcacgaaaatttgcatcccaccacggagacggagaaccaagtggagggtggactccttctggatgttgtaatctgcaagggtcctcccat

SEQ ID NO: 1565 - DNA, 477 bp, Gossypium hirsutum
  Clone ID: LIB3083-030-Q1-L1-G2
agtttatttttttttctgtttgtttagagcatgaaagtgtaatgtatgtatttgcacttgcaatcttatcacagtagctcaaatatatagcgattgtacgaatgaaacattgctttgttttcaaatgaaagcacatatacttaatttataatacatcaacataaaatctccaaagaattatgataagaagaataaaaggattcaagaaatggaaaaggtgaattagcaaatatatgcaaccattagctaacttcaacaagcgcaccctactctctgctcaacttctgaagtagtctctgatatacctcggaaataaatgtcatgttgttcatgttcactggctagtgcagcatttgctacacataaaaatgcttcatcaacgttgtaatcctctttcgctgaagtctcacagtaaggtatatttacccttgaggcacaccaatccctagcttttttcttagaaaccattcggctatt

SEQ ID NO: 1566 - DNA, 478 bp, Gossypium hirsutum
  Clone ID: LIB3083-030-Q1-L1-G3
gtttattttttttttctgttgttcttagaccatcagtatccatgtattattaatttaatccttaaaaaacctcaaaataataataataaggttcggcaaattatgtttagaaaatgtaaaatgtctctctttcatgctcagctaatgtgaaagcagaaattttaaatcaataattctaagcttgagcaccaagttcaaggagaagagtgtggctaacagcattggaagatggtccaacaaattgaatgggaccaggactaatgtagcagttcttaagtgcccaatcctccctcacggaagcaaatttcttgaatggagcaccttcaagctctaccattgccttcttgataacaggtttgaatttaccatgcctcctctcgacatccattaacgatgtaagagcagtcccttcgacagtccattcttcaaccggtgctcccaagtttcctaccgatgatatcaacccagtttttccact

SEQ ID NO: 1567 - DNA, 288 bp, Gossypium hirsutum
  Clone ID: LIB3083-030-Q1-L1-G4
ctaataatagggtctgtatatacttgaataaatactttttattttccacattctgtaaccataaatgatgtgttaaattttacatcacactccccataaaacattatattatatgacctatatatatatactgcacattattttaactgatttttaattatatacatcaacatcataattctttcattcccaccttttctattaacttatcattttattccacacatctctacatcttatccactaactctaatttctaattcatcaatccttacccacatcatatat

SEQ ID NO: 1568 - DNA, 465 bp, Gossypium hirsutum
  Clone ID: LIB3083-030-Q1-L1-G5
atgtaggatcaaaacccttgtatatctatgatatataagaaaatcacaccaattacattacaaaatcaaggttaggtcactaatgtaacatgatatatatagagatatctaaaactttagagaaattgaaaattgataacacccaaatattatctcggagaagattagaggctactcccctcatcaccagtgagagtgaaattaagggtagccaatgtcataaagtcttgaaaagctttgaattcaatgcaccaagagagcaattaaagagaccaacatggaagagcataagaagacagcggaaaccggcaaagcagagcctgctccggtagccattgcaggagaaggagcaatatcctgtgccatggtcccggacacaacaaacatggccacagcaaatattgccaacacaatgtgagctgcaaaggtcccaatccgagccattggcactaattacaacactat

SEQ ID NO: 1569 - DNA, 482 bp, Gossypium hirsutum
  Clone ID: LIB3083-030-Q1-L1-G6
ctcagtttttttttgtttccgtttgggacatcacactgttgtgactattcatggtaaaacacattttcctgttcatggacattatgaggtaatgatcaattttcaaactgatgataaatatcacaaaatcttactttgtgtaaattcagaaatctcaacaacaaaacaccatatccaacttaagatgcagcaacagctgccttcttccttggaattgcttgagtgccttctctaaaaccagttttgaaccttcgctgcagatgacggacgtacctcatgcggcctgtcccactcgtctttcttctaatagccttcacactccagctatattttcggatgctgctgccatggtagccacaagcactgcaacggctcttctggacatggaagctacggcgcccacatcgaacgcaaagtgtgtgggtcttattccttcgctttccaaagctttcagttccttttcccatttcttttgtcggagc

SEQ ID NO: 1570 - DNA, 412 bp, Gossypium hirsutum
  Clone ID: LIB3083-030-Q1-L1-G7
taaacttcaaacagataatgcttgaaatctgatttatttaatcggtatatgaccttacatttggtaagtgaaaattaaaaatccaatttcacactcaaattttatcaccaaaaccatattaaaaaattcatcaatctggacaacctttataccttgtctcaaaacatccatttacatatcttgatactagagatcaaccttacattttacacccaatacattgtccgccgacgacaacttacctttcgggacaacccctttaatcccatcgcacgtaattcttatcctaactttcctcttgccaaattcctatacccctggcgatccactcattctatatacaccgccacctcgatggaactacaacttttgatccctttactgcagattaatttccagcttgccttaatca

SEQ ID NO: 1571 - DNA, 466 bp, Gossypium hirsutum
  Clone ID: LIB3083-030-Q1-L1-G8
ctgttattcaaccacccaaagaaaaattattattacaaaatgcaaatcaaagcaaactgcataatatgaatgcaaaagaaataggatcaatacccttatatatctatgatatataagaaaatcacaccaattacattacaaaatcaaatttatgtcactaatgtaacatgatatatatagagatatctaaaactttagagaaattgaaaattgataacacccaaatattatctcggagaagattagaggctactcccctcatcaccagtgagagtgaaattaagggtagccaatgtcataaagtcttgaaaagctttgaattcaatgcaccaagagagcaattaaagagaccaacatggaagagcataagaagacagcggaaaccggcaaagcagagcctgctccggtagccattgcaggagaaggagcaatatcctgtgccatggtcccggacacaacaaacatg

SEQ ID NO: 1572 - DNA, 464 bp, Gossypium hirsutum
  Clone ID: LIB3083-030-Q1-L1-H1
ttttctgtgaagtataaagacaatgtatatatgagtgtttattagaagcattgcatgatcttatgattatatcatggaggcccgaccttacacaattcttaatagcatcgtcatagaagcagatcaaggatggatacgtgataatagaggattgcggtgacaatttcatattgttatgccttgatgacaatggccatgggtgctgctacttgtttacctgctaacttgatcatttctgcgaatatgttgcacgaaaatagcgcatacttcttgttgtactccttgattttcacttttaagactcggtactccaattccacatccctattatcagggtcgatctccatggctttattgatatcagccttctgccaaatccaagtcaacatgttgcatatacgctagagctcttctgtagagtgctttcacaatgccgctatcaagctccaataccttagttcaca

SEQ ID NO: 1573 - DNA, 271 bp, Gossypium hirsutum
  unsure (1)..(271): unsure at all n locations; Clone ID: LIB3083-030-Q1-L1-H2
ttttctttaaatcaaatcaacggttcttatatagtaagaagattacttttaaactcaacagcaggaagtttcatgaaagaatggtgaggtagccatggattatttggcaatgcatgtagcattaacctaataagattcatagttaaaaattatgaccaccctgtgtctaaattaccaggagaaaattaggggtaccatcttaaatacccatgagaaccaaggaataattaaaacanaacangacaacctttgtttgaaaatttgaaggtgc

SEQ ID NO: 1574 - DNA, 475 bp, Gossypium hirsutum
  unsure (1)..(475): unsure at all n locations; Clone ID: LIB3083-030-Q1-L1-H3
tcatcggacaaattcatttcagattccatgaaaatggcaatcatcatttgcttaacttcttctcgctcaataaaacctgtttgtcgcangtcatacaatctaaatgcaaaatcaattttatcttctaaaggggcacatggatgaaacacgttcagtgcatggacaaattcctcaaattcgatgacaccatttctcttttcatcaaaaagatcaaaaaccctgtcaagaaagagattgctgcctatgggtgtctggaacaaggctaactgaagctcttccttgtgaattaatccatcatcgattattgagctactcagcttcttgaagagttcgtacaatgcctctatttcattcaccgaaaatcgggattcatgagcgagccgggtaagatcagtgaactcatagatgcatttcttgggtcggngccggtatccaaagcaattagacgttgcataaatcaagaaatcgatcacta

SEQ ID NO: 1575 - DNA, 469 bp, Gossypium hirsutum
  Clone ID: LIB3083-030-Q1-L1-H4
tataagattattatcagtttggccattaatggactgaagaatgcagttaaagtttatttaggattgccaaaggcaaagtgaagcctcttagcaaacctgtcattgaaagcatattcaagacgcagaagtcctaaaggcgagttcagtcggatgccaatcccgtatccgtatccactcccacacttattcctcgcaccggctggattccctggcacattggggcctgaccatagatcatgtccataatcagaaaaaataactccttccacaggccctagcatttttaaagaaacttcactggagccaactacgtaagatcgaccagagcctaaggcaccttctttataacctctcacgctgttcgttcccccaatagcaaaagcttcatgaagaggaaaattacccactacatgtccacccgacaatcttagaagaagacaggcaggaccaagtttaacacttttactcg

SEQ ID NO: 1576 - DNA, 218 bp, Gossypium hirsutum
  Clone ID: LIB3083-030-Q1-L1-H5
aaacttgaccttgatcttttattgtctcttatttataaccttcctacgggtgggttgcatcagaattacgcattggccgattctacctacctagacactataagtaactattctcttgtgacaactttattacttccagtcctaactctgaataccattgcagtgaccagtttctaccaggcttaaccaccatttgctaccacatactccagatcata

SEQ ID NO: 1577 - DNA, 471 bp, Gossypium hirsutum
  Clone ID: LIB3083-030-Q1-L1-H6
tttccgtttttggttttttttgggagcatgtactagccaaatttattgtctatgatacaaaatatcaaagccaaatcacgaacagtgcagaacaagcgaagtggcacaataccctcaaccctaaatgaatttgcattcacaagtaggaataattgatacttccctacacattattacaaaaattaataatatatgaacaaagtttcatcacatctgcagcaaacacatcaaactgagactgcccaatgatttcctagcggcacaaaatctaatactcttatcaactacaacctgctaattttacacttacaaaagctaccggctgcaccaaggactctgccacctccacttctcatgaagctacgtgaattgttacagaagatccacaccaggtgtggcagcaagttaccaaaatattaatgcaagtagcagaagaatgagaaaacccaggatcttataggtaatttaatc

SEQ ID NO: 1578 - DNA, 478 bp, Gossypium hirsutum
  unsure (1)..(478): unsure at all n locations; Clone ID: LIB3083-030-Q1-L1-H7
tcgagttnttttacgtgtctgtttttgagaataaaaatggtattccattaatgatacacttcgtttatgaaatttcaacattctacacaggacgagagttactgatcgaactcaatttaagttttctaacatacgacaagaattaatggcacaacgcaaagccttttacatcttcattatgatggtcaaattccaattatgttttagctgggggaaaaacaatgttcaacacaactattcatctgaaactgaaatcagtaggcatgaatcaaactgacccggacttcatatgtaatccatcgacatttatgctactgcacgcatgttcttgaaccatggatccagtgtcttaccaattgagtacactatgaaaccaatctccctcagctcattcacgttcacgatgttccttgcatcgaaaacaaaagcctgcttttgcatgttgactgatatcctcttgaagtcaagtttcttgaat

SEQ ID NO: 1579 - DNA, 374 bp, Gossypium hirsutum
  unsure (1)..(374): unsure at all n locations; Clone ID: LIB3083-031-Q1-L1-A1
gccaactactctcaaatctattgcagtccatatagtcttgaacaaagcttanaaaatcgggtgctcacaatanaataagggaagcacacgataaaaggaaacaaatcattgggtagcaaaatgcaagccctccactcaaacattacttatttagtactcatcttcaccttcctcatcaccctcgcctgactcagcaccgacttcttcataatccttctcaagtgcagcaaggtcctcacgagcttccgagaattctccttcttccataccctcacccacgtaccagtgaacaaaggcacgcttggcatacatgagatcaaacttgtggtcaatgcgggagaacacctcagcaacgctggttgagttggaaatca

SEQ ID NO: 1580 - DNA, 207 bp, Gossypium hirsutum
  unsure (1)..(207): unsure at all n locations; Clone ID: LIB3083-031-Q1-L1-A10
aaaaaaacganatttcaaaccatcatcaatctcttttcttcctacaatattcacttaaaaacacggcggcttttataaagatagttggccacacacataaaaccatatattcttattttcaatccattactgaaacttctcccattatgaactatacaccatattacaaacctaccacacatctaataaaactcactccaatatcta

SEQ ID NO: 1581 - DNA, 408 bp, Gossypium hirsutum
  unsure (1)..(408): unsure at all n locations; Clone ID: LIB3083-031-Q1-L1-A2
aaggcattgatcatataatacacaaaattttaatgaatacaaacatagatatacgtattacatgtctattttcggatatagtatgcattactctctcaaatanaaaccaaaaaaagcaaactcgtgaaagggaaaaatagggaaaagacactttcattactcattacatacaaatccactcgaatcacatacctgtatatgctgcattaccgacaacttcgtttggttttcgctttcatcacatgtgttcttcatccaaatcttcctcatcctcatattcgccttcctcggcagcggtagcgtcctggtattgttgatactcggacacgagatcgttcatgttgctctcagcctcggtgaactccatctcgtccataccttcaccggtgtaccaatgcaagaaagctt

SEQ ID NO: 1582 - DNA, 354 bp, Gossypium hirsutum
  Clone ID: LIB3083-031-Q1-L1-A3
aattattattataaaattttaaataatatatataaaaggatttcccaggccaagcggggggaatatactatatttaaggcaaacgcaccttaaatcaaataaaaaaaaggaaaaataaaccaaaaatcatcataattgtcaactcactccatcttttttctgacaccgtttaaaaacaaatggacttcaacaataaataaacctccaaatctcgaaatcccatgcaaaacccctaaactattgaagcaaatccacctggtaatacaactaaaaacactgccgctgtaacaaccaatatcgcctccgtggaacccacccaattgtgaccaacctttattccacttcatttgctat

SEQ ID NO: 1583 - DNA, 324 bp, Gossypium hirsutum
  Clone ID: LIB3083-031-Q1-L1-A4
caaattttgtaactttgcaagcaacataataagtccacaaaggcgatggatcaatcaaaataaagcgatcacatttgacgtccaatcttttgaaatgtttaaaaaaaaaaaacaaaaaactaattaggaatagtacttgtgtttgtaactaatggtactaaatccttcccaggaaaataccatggtaataggcaatgcaatttgaaatcgaaaccttgagcaaaaacaaaaaagaatagggcaaggaaacaaccatggtaaatgtgttgtaagcaattaggctgctgttgcctctggttccccaacagtttggcccttggtggg

SEQ ID NO: 1584 - DNA, 334 bp, Gossypium hirsutum
  Clone ID: LIB3083-031-Q1-L1-A5
aaaggaaaaagcatctactttaacattaatcatgaaaacaatcaaccttcaacttaatcgttttagacagccttgaagatgcgtcatgagttcataactcagtttccaaatcaaacataaagatgcatcagattttcatttcaactcctagtggggtcatcgatgttcttctcgtaccataaaatgtttccacaaagcataaaatgatggcgacgtctaccatgatcctacagcaccctgagtaggattctcaaaaacagagaactcccagtaggtctttaacgaatatggcggggaaatcgtcatgccttcttaagtgatcttagctatctga

SEQ ID NO: 1585 - DNA, 386 bp, Gossypium hirsutum
  Clone ID: LIB3083-031-Q1-L1-A6
aaagtaaaaaaatctccattcaaaatcacattctaatacacacacatgacctcatacaccgcgttttcttaagaccaaaagcaggccaaccaaaccaaaccaaaacacaacataccaacttctaccagttggcatttccccctccccatctgactacaacgttagcattacctccaagcttcaaaaagctcggctctcgtatttatcagccccacaatcctcgttcccctgttcttctgaacagctcctgttacattaccaactgcctgttcgtttgccttctttgctcccttccttaaacctgaagcacctgattgatcacttctgctctttccacatttacttcccatgctgtcatttgctaaacatttcactttaaaaactaa

SEQ ID NO: 1586 - DNA, 350 bp, Gossypium hirsutum
  Clone ID: LIB3083-031-Q1-L1-A7
ccgaaactagaattcatattatctatctatatcattacaagtacataaaatgggtcacttgagggcaagaagatcaaagatatgctgatgaaattccacaaattaactgaaaaaaagaaagaaagaaggaactgcctttcacaagcaaagcctggtagttggaaagaaaataagagataaatacatcaaacccccataatgtcgttatgattagttttacatttagagtgactgtgaagccgaaccttccatttcgaatctgcaggccttttttttgttcgctttatccacagcaacccgacttttgagcagcttgactagctgctgccgagtcttgcttattaattttg

SEQ ID NO: 1587 - DNA, 307 bp, Gossypium hirsutum
  unsure (1)..(307): unsure at all n locations; Clone ID: LIB3083-031-Q1-L1-A8
aaacccaaaattaattaataagttgatgttccaatcacatactaacgcaacatcattcatacagtacgccttccctttatttaatggtgatttaatatagcancagctgccgccgctcacggccgggatcttgaatgacataaggtcatcgaccaccctgcgctgccgcttactcttttaaacatcttacttactactactacttaattgacccattgaagaacttttaaaaaggacgatatatatatttacatgcaaatcctgctccttcagtagctgcaaccttctgctagtggttttgctacca

SEQ ID NO: 1588 - DNA, 402 bp, Gossypium hirsutum
  unsure (1)..(402): unsure at all n locations; Clone ID: LIB3083-031-Q1-L1-A9
aacacgaactaatgcattanaaataaaatctttaaattccacaaaacttttaggaactacagtcgcgtacgtgattattacaaatttcgtactctttataaaaacttctctcaacctccaaaatagatcaaggatccttgcacataaactaaaatctcagaccgctaaatcaacaaatatcatgtctagttcattctcctaattagctcgttgatgtaattttcgcggttgccagcatctcctccttcaacatagtggattctcttcttcttcagacctcccaatggtgcctttatcttaaatggccaaagaaagttgttggcctccttaaaatgaagccccacactcattatctcatggatgacatctttcacacataatactccaaacttgcccaaaacc

SEQ ID NO: 1589 - DNA, 389 bp, Gossypium hirsutum
  unsure (1)..(389): unsure at all n locations; Clone ID: LIB3083-031-Q1-L1-B1
aattaangattaaaactccaagattgaaacatttgtcaacaacacaaaaagaagagagaatggaagccaaaaaagaaaaaaaaacaagatccagggcctttgagatttcatcttcctctactaacctacattaaccggtgcaataagaaacaaatatgatctcaaacccctgatgtttttactaagaaatggccataataagtaaacctaaaaaatagaaagaaacaacatagcaaaacccacaatgcattatcccctcaatgttttttgccattgaatacaagctctttttggatcatatcaccaaaatatctccctttagcccttatttgcaacatcccttccatatttcataatcctaatatgaaatacgaaccatgaactgatct

SEQ ID NO: 1590 - DNA, 384 bp, Gossypium hirsutum
  Clone ID: LIB3083-031-Q1-L1-B10
aagaaaaatactttattatatatctcatcttttaacactaattaaattcaatcactggttgtttttaaaaaaagcgcccccccactcaaatctctaatataaaatattttaatttttatattcattcccataacataaatcataatacaaaatatatttcatatatataacatctttattatataaaactatattcataacctattcaacaacattttataataaataatttattccaaataccttaaaacacatcccaacaccatattaccccattatcatatctaaccttcttcatctaacttctcctctcttatatatacccaactcttttcttataatatctactcccaccctaatatcctcctattctcatattatccc

SEQ ID NO: 1591 - DNA, 394 bp, Gossypium hirsutum
  Clone ID: LIB3083-031-Q1-L1-B11
aagaaagctataaatatgctttatatatatccaatgaaacagtccgtaccgtatcaaacgtgggttatataatacattaagaaagctttcctagccgggtttaaaactcaataaaatctcaaaacataagtaaagatggatacaataggcaaccatatgctatagatgaaagcaggatgcaccttcactgctaaaaaaaagcctctcctaaatcttatgcttaagaactcaaattaaaccatcatatatagcctggcttgctccagcaacacccactcccattgctgcttgcttcaaaagatgctgtccctgaaggttcattataacattaacgccacccattttgctcatggcaagttgcctttcataagctaataggtcaatcccttaaaag

SEQ ID NO: 1592 - DNA, 402 bp, Gossypium hirsutum
  unsure (1)..(402): unsure at all n locations; Clone ID: LIB3083-031-Q1-L1-B12
accacaaaagttcatcaacattccaatcctaactttatttctatcaaataatttacccaaaaaanagcaggagatcacagcaaagccatatcaaaggaaaataactttacagtcaaagctactttgtatttctaaaataagacccacatattttatcttacttttctaagtgctcccgccagggtagatgcaattactataagtaggattttgggatgttagtgttgccgtctgcgagaaatcacagttccacggattcttggcggaattctggtaataaaggttcatggcataagcaccctgagatgctatggtatttggttctaaacaagcacctcccggttggatgggacttcaatcgatgccttggccacatgcataatctaaactcgaatgcaattt

SEQ ID NO: 1593 - DNA, 406 bp, Gossypium hirsutum
  Clone ID: LIB3083-031-Q1-L1-B2
aaaaaaccgtttacttaaggtgtacttgaaattacttataagatgaatcaacaagcaatacaagaacgtatactctgtaagctgtgaggacaaaactaaagtcgacacaatcaacaacacagtgatccaaagacccaaaacaggcagtgagaaattgcaccaacacactccacaagcccaatccaaaacacaacaaaaaacatccaaattattccattagattttaagcctctgcctcgtattcctcctcttcctcgtactcttcatcatctgcagttgcatcctggtattgttggtactcagaaaccaagtcattcatgttactctccgcttctgtgaactccatctcatccatcccttctccagtataccaatgcaagaaagctttcctacggaacatggcagt

SEQ ID NO: 1594 - DNA, 380 bp, Gossypium hirsutum
  Clone ID: LIB3083-031-Q1-L1-B3
acaataaccacaaatttattgtcaatggatattttgtgtttcaaataatacaacattaagatgtacatgcactccgtctgtctgtataccacaaaatccaaatagacttcatatacaaattatcaatgtttgaatgcttctctgactctccaatctgacagccaaacaccacgagttttgtccaggttgtctcatatcactcatctcctgtcttgcctttttgcgttacttacacttccaaggtcatttacgtaccaaaaactaattccaaaatcatcagactgtaagtcacacatggacagaagaaagatcaaaacgttttcatggtttccaaagtgccggaggtggtggtggtgtaagaaacattggtggaactgcag

SEQ ID NO: 1595 - DNA, 401 bp, Gossypium hirsutum
  unsure (1)..(401): unsure at all n locations; Clone ID: LIB3083-031-Q1-L1-B4
aaagncgttgaatccaaattttatagaagcaatcttgaatttcagaaaccctaaaattccccaataaaaagaaatccgcctgtacaaaaacatgattgggtgtaaatgtaaaggggcccgggggtggggggtaccggggaaaaaaagaatatggaaaagggatcacatccaagctccccatccaggaaacatctgacataatctctcaggatcaatggcatattgaatcagttgctgaacctgcccgtggacacttctcatttcaccttcttcatatccatctaacttttgttttacacgcaggagagcacgtgcagcatccttattaccttcataatcatcttgggaaccttctatgcttgtatccaaatcgtaatctgtttccttttgacgctgcaaag

SEQ ID NO: 1596 - DNA, 420 bp, Gossypium hirsutum
  unsure (1)..(420): unsure at all n locations; Clone ID: LIB3083-031-Q1-L1-B5
tgaggacttatggcgtaacgagcagttttgggtcattggtggcgtttcagcccatctctttgccggcttgcatggtttccttaagatgcttgcggncattgacaccaactttactgtcactgccaaagcagctgatgatgcagattttggtgagctctacattgtgaaatggactacacttctaatccctccaacaacactcctcatcgtcaacatggttggtgtcgttgccggattctccgatgccctcaacaaagggtacgaagcttgtggaccactctttggcaaagtgttcttttccttctgggtcatcctccatctttatccattcctcaaaggtcttatgggacgccaaaacaggacaccaaccattgttgtcctttggtcagtgttgttggcttttggcttctctcttgtttg

SEQ ID NO: 1597 - DNA, 210 bp, Gossypium hirsutum
  Clone ID: LIB3083-031-Q1-L1-B6
ttatttgtgttacttgttgctattcgatatctattaaatcattatttgtcacagaacatttttgttgtgacaaaatcaccaaagaaaagttacaagattgaaagaaatacattcccccttatcttatattctaaaactatagcctttacatcaaaagcatgcatcttcttgcccaccaaacttgtctccccacaataattctcttcaatc

SEQ ID NO: 1598 - DNA, 254 bp, Gossypium hirsutum
  unsure (1)..(254): unsure at all n locations; Clone ID: LIB3083-031-Q1-L1-B7
aaagacaacanaacacaaacattattattttatatccactccaaaaaaaaaatacacccgctcgttttatataaacgtgactccaccaaacaaaccatacaccctatcatctatccttaactcacaactaacccatattaccatccataatacataacaacatctaccaaactcttttcctaatactaactattaaaactttcttcacccatccaacctatatactactcaaattatcccatatctttaatact

SEQ ID NO: 1599 - DNA, 358 bp, Gossypium hirsutum
  unsure (1)..(358): unsure at all n locations; Clone ID: LIB3083-031-Q1-L1-B9
actttttcnangnttntaattatacattttatttttaggacttattgagggcttctgctgagggttatataaaaggaactgatggtatttcctataaagcagtgctagaggatgcaacaacagtggtagtgaagaggttgaaggaggttagtgttgggaagcgttagtttgagcaacaaatggaggttgttggaagcattcggcatccaaatgtcatctagctgaaagcatattactactcaaaagatgaaaggctgatggtttatgattattacagtcagggaagcgtttcttccattttacatggtaaaaaaggagagactagaacccctctaaattgggataccagaatgaaaat

SEQ ID NO: 1600 - DNA, 373 bp, Gossypium hirsutum
  unsure (1)..(373): unsure at all n locations; Clone ID: LIB3083-031-Q1-L1-C1
acttnatctactgaaaaaatgctgagaacaggacgaaacttaccaggggggtttaaaacatatatggcttctcaccattctaatattactatggatcaccaatgcatatacattaagaacacaagttgatactacttataataattgcatccacaaaatgaacagcaaaacagcttcaccagcattcaaagccttgcctctcctcccttctactcacttgttctctaacacttctttcactacatcgatgctgcaagtcgggtcagggatcttttgcttatgttgatacagatcaaatggcctcagatttgctagtaggaacccaagaaacttggaatggttgctaagtgtgcaatgccatgaataaattctg

SEQ ID NO: 1601 - DNA, 349 bp, Gossypium hirsutum
  Clone ID: LIB3083-031-Q1-L1-C10
aacaaacaccatttataaaccctaccaaaattaaaatatttccacaaactcttcacattcggcgggatacataagatgattggctatcgcatcataaccaacaaaacaaggcaaaccagatagccttaactatattaaatcacacaacataagctcccagtttcccaccccaatcactgaacatactaaatacacaatctcaccttctatataaaataattcaaatacttttttttttaataaaaaaaatctatttatcttatgacactcccagcctaaacctaaaatcctcccacatcacaaaaagaccctttcgcaacttcattatctgatccaaacctatcaattc

SEQ ID NO: 1602 - DNA, 371 bp, Gossypium hirsutum
  unsure (1)..(371): unsure at all n locations; Clone ID: LIB3083-031-Q1-L1-C11
atgatanntctaccanctaaagcancattatatcttgtaccacatccaataaaaacaggacggtttctaacaagaatagatctaatgaaatctttcaggccacccaaaatcacactcttggctttggtagaacctccacgtttaagtctcccccacattgtggatactaagagattcaagttgctcattaatttctttctgcatataatactcataattgcccttatttatctcctcaacctccatctcaaaaaaatataatccacttctcactaatcatggccaaaaaagttcattgccacatattcctttttcattctcaaatttaataaaaaaaacacctccattcttaaaattaaactacttcacca

SEQ ID NO: 1603 - DNA, 282 bp, Gossypium hirsutum
  unsure (1)..(282): unsure at all n locations; Clone ID: LIB3083-031-Q1-L1-C12
acacanaaaacggcatttattaattattaccataactttatatcttatactatatcacactttatttggcgggtttcacacaaaccagggccctcaacaataattttatccttcccaaacaactatattactccctttctacatttcactcctttactcatcctccccaactccattttcaaatccttcttctcacattcaatccaaattctcacttctcacctcataatttatcatcccaaaaccattataatattccaattcttttaattttattattca

SEQ ID NO: 1604 - DNA, 414 bp, Gossypium hirsutum
  unsure (1)..(414): unsure at all n locations; Clone ID: LIB3083-031-Q1-L1-C2
cctaattatcataataatatgactccacaantacatgaatcatctaatttggagagaataaaactactgaacccttgatgctatactagngcaagtatagatactatgataccaaatggtgacatcatttgaataacaagcaaaaacagaatcaagattgaaagtgaatcaaaagttgaaaccaaattttcatgaccccaattcagatccttcaaatatgacctaaagtgctttgcatctacagagcatatagcgacaaaatcagacaactaccagcaggcagatgctccactacgagagctacaaagtgaccataatttacagagtgactgaaatcaacacacgcaaaacggaaaaaatactgggagctgaggtcgtaagcaaatccacaccaatcaccaaccaacacacaac

SEQ ID NO: 1605 - DNA, 160 bp, Gossypium hirsutum
  Clone ID: LIB3083-031-Q1-L1-C3
ggttaaaaaaatcctctaccacccatacaatggatcaaaaaataaagttcatgaccatctactaaagctacaaacaactaccttcccgaacagccaatgcattgcaaaactcgaatttccttactgataaggaatctattaaattaaccaatacgcataa

SEQ ID NO: 1606 - DNA, 452 bp, Gossypium hirsutum
  unsure (1)..(452): unsure at all n locations; Clone ID: LIB3083-031-Q1-L1-C4
gaactaacctaacgcagatcgtttacaagatcacgctgtaagttctgcaatctcgtctcatttaagatttggtcttgggaagccccatcgttgactcttttcacacctccgcgggtatcataaatatggcagagccgaacaagcagcttcaaatagcaatcaactgcataagtccttccatcacagtcccatttgacacaaggcctacaaacttccaccacttccagagctgtctctgtccagtttaatgcaccatatcctgttccatatgccaaggctccaatcactctactctccatacctgaattcttttgttcaggtaaaggtaatgacaactggaagcaactttcaacaagagttgctaccaactcctctctgaacaagcttttacttgtaacattatgaagatcatcttttacactaggatcctncaaaagagaagctatatcagt

SEQ ID NO: 1607 - DNA, 323 bp, Gossypium hirsutum
  Clone ID: LIB3083-031-Q1-L1-C6
tttgagcctaattgagtacttatgctgtttctggcggtgctcttgttttgcggtcatcaaattctcacttgggcacaaatttatatccctgctgataatattgctctagattgtggttcttcaacttcaggcaattctacagcaccagatggtcgtgaatggaccggagataacatgtcgtggttcgccgagtccggtagccaatcagtgtcggtcagtgtcgaaaagcataacagctctttccatgttgttccttacttgactgctagaatatctaaatccgaattcacctacatgttcccagttactgcttggcaaaaatt

SEQ ID NO: 1608 - DNA, 338 bp, Gossypium hirsutum
  unsure (1)..(338): unsure at all n locations; Clone ID: LIB3083-031-Q1-L1-C7
aaaatattgctcattgaaaaagaaaaagatatagaataagcattcgaatgagtacagccatnagcaacttttctctcttcaagcatgaaaaaaaacattactacattccatacaagaataaaacagaacatcagccggcagttcctcttattataaatactaatttttctagtagctcaattgttgggaatggctagtctatgggagcattctattgaagcttccccaaaagtggatgtcctggatagtgaccgtatggtggctcatgtgccggaggctcataaactggtggtttaagttttggcttttcttcctttggtggttcataaaccggtggc

SEQ ID NO: 1609 - DNA, 407 bp, Gossypium hirsutum
  unsure (1)..(407): unsure at all n locations; Clone ID: LIB3083-031-Q1-L1-C8
aaaccacaaactcatctcaaccataancttattaaatgaaacgattggctcctttcatgaatagacatataaatgttattgtcagatgccatttcaagatgcaggcatcgaaatgacaccggcaaataggaaaaataaaaacaaaattcaattagcaagagggttcttaacaatcagaaacttgaaaacaacagtggagaggagatcaggaaagtggaatagctttatttaaattcaggcttttctgggtatgtgcatccagacctttggatgataacgttggatgcatagcaaccagcccttacgcaatcctcaatggacttcccttgaaccaattgtgaaagaaagcctccaacaaaggcatcacctgcaccatttgtatcaacaagcttttccttgggtaacaa

SEQ ID NO: 1610 - DNA, 354 bp, Gossypium hirsutum
  unsure (1)..(354): unsure at all n locations; Clone ID: LIB3083-031-Q1-L1-C9
aagaaaaaaaaatacaatcttatacccattttctttacaaaatcaattacacacaanattttcgttttttaatttcatgatggacaccaatatatattttcaaggatataacaacttttaaaagacaagttcattccatgtgtcttgaaggcctgacaaacaccaatgtacgcaatcatcataactaactgtattggctagctgctccactcttaatggactccattgcttcttataaatcgatgtctgtgcgtcttttcaataacttgacacttgactgatgtcgataaatgtgacgtgaaacttctatttactgaactcttcttcaatcaccttcattatgcttttcctact

SEQ ID NO: 1611 - DNA, 367 bp, Gossypium hirsutum
  Clone ID: LIB3083-031-Q1-L1-D1
gttccaatcacatactaacgcaacatcattcatacaataccccttccctttatgtgaagggttatttaatatagcagcagctgccgccgctcacggccgggatcttgaatgacataaggtcatcgaccaccctgcgctgccgcttactcttttaaacatcttacttactactactacttaattgacccattgaagaacttttaaaaaggacgatatatatatttacatgcaaatcctgctccttcagtagctgcaaccttctgctagtggttttgctaccatccgccgccgtcagccaccgcctaatcaacggtgatgcttgctccgggtctccccgctgtaaagccagtcataaacagtaggagag

SEQ ID NO: 1612 - DNA, 308 bp, Gossypium hirsutum
  Clone ID: LIB3083-031-Q1-L1-D10
aatctattatccataacgaatctttatttcattttacaaatttaacagggacgattttaaaacaatgacttgaccaacaaaacacacattaacaatttatcgtgtaacacaaattatcaataacattaataatcatatttataactttattaacaaaaattccaattctacccatcatactatacatataatatacattttccttatcacacttatacattctttcttactttctccaatttttaacaataaaccataccaatccaaattaattcccttctttaccactcttttttaaatctaaacca

SEQ ID NO: 1613 - DNA, 386 bp, Gossypium hirsutum
  unsure (1)..(386): unsure at all n locations; Clone ID: LIB3083-031-Q1-L1-D11
aagcaagaaaaaggagcanatatactgataaaatgattgctttctattgtcaaaacataagctaaagtttgagcacttgtatcaaatcgggcaccaagtttattttaatggaaatatactcttagaacttttgaccatttgaaagaagccatcatcacctttacaacctgggtacaacacgaggttcgtcccaatcggcaacaatgtggtttcgtgtgatctcctttagtgagcggcaaccacttaatgccatagtcagctcaaattcatcgcgtagcatctgaagcactttcctaacaccaacttccccttccgcagccaatgaaaacactactggccttccaataaatattcccgatgcacccagagctaatgccttgaagaca

SEQ ID NO: 1614 - DNA, 463 bp, Gossypium hirsutum
  unsure (1)..(463): unsure at all n locations; Clone ID: LIB3083-031-Q1-L1-D12
aggaggaaaaccgtccgcccgagctgaacagaatatgctgccgatgctgatcgatttgtttgtgacttgtcaatatatgcataccgttcgttacctttccagtacagagactatccnatttgtgcaagtatgcgaccagctatcacctagtgcaagagctaattgaaaggaggcttctgtatgcttagtggtcacctgattcaataaaacaaccgccaagctgaatcttttggccaggttcattaactttaaagccattccactgaggacccgggtcctaagggccatatcatcaaaatcttggcggaaatggaatgtaacactattcacaacaatcacctttacatctttatgttctgaaaggaacttgtctaaataatttatcagggccaattgctctttataactacaaatgcggaaaataaaatattttttcaggatattcctgagcacaattttattt

SEQ ID NO: 1615 - DNA, 233 bp, Gossypium hirsutum
  Clone ID: LIB3083-031-Q1-L1-D2
atcaagatgaacagttgcatggaacaccgattaataaaaaacaatgaacgggtcctgattgcaggcaatcacaatccaattgacagagacagcacaattcagcaaaaaccaaaccaacagtgtctatagtttttgaaattaaaaggtgaaataagtaaaaacacgaagcattacatcagggctctataggctctcaagccatcatgccatctttaagcagtgctttatcagtc

SEQ ID NO: 1616 - DNA, 446 bp, Gossypium hirsutum
  unsure (1)..(446): unsure at all n locations; Clone ID: LIB3083-031-Q1-L1-D4
gacttgttaattncaccgagtttgttgtttctgcactacatgtgaatcaaatggaagagcatgattgcaataagtggcgagatgcggttacaggctgctttcgagaaatttgatgtagatagagatggatatataactccggaggaactacgaatgcatacgggattaagaggttccatcgaccctttacttgaggaggctgacattgacaaagatggaaaaataagcctttcagaattccgacggcttttacgaactgctagcatgggttcacggaacgtatctagtccatccggtaatcggaatactcagaagttgttgattaaaaaatgaaaacgagagcaagaaaaatggagcatttccccgattnttgtgcttgcctggtatctataccggaccccgagcgtgtctacatctaccagtcaccaagcattgtaggacccttt

SEQ ID NO: 1617 - DNA, 425 bp, Gossypium hirsutum
  Clone ID: LIB3083-031-Q1-L1-D5
ttggaaaaaaaactcatttcattcatcaatcaacacaatttccatacacaagctgttaaggaggtcacccaaaaaaaaaaagtacaaattccaatacattgaagcagaattaaaaactttaccttttttctctctttctttttttctaaataaattatcaaacctttcatcctgaagtttcggttgtagtgtaatgtttcatccagcatcctcacccttccttaacgttgtaattataatgcttggaagtgcttccactgttgcttctattcttacgaggtttccctcctcaaaacaaataaaagccagccgacaaacatccccataatgtcaaacttgggaagcaacaagaatcacctcaacccttttataatacctaagaattgcatcatttgactgttttcaccagaaaaaatgaaattgtt

SEQ ID NO: 1618 - DNA, 435 bp, Gossypium hirsutum
  Clone ID: LIB3083-031-Q1-L1-D7
aaaccagagacattatattaactataatttcaaatttaaccttcaacattaaatattttagcattaataaaaaaataaatgttaaaggctaaatttaacactaactgtaacagttgaacaggtctatctgagatcaatctggaaaactttagcgtctctaattctgaattacatttttctgaaattttagattttaagaagcggacaactatatagaaagcaagcaactgggaagggctatcccaaatgccatacgggagatgagtggccatcggagtcccgatagcaattgtgggcagctgccaatgtgatcccaccaaggttgtcagtttttgaccttcatccacccatcatgcaaatcacgatccacatgtttctttaccacttaaaacattccactttttaaattaccctttatgactacttcaaaatttg

SEQ ID NO: 1619 - DNA, 333 bp, Gossypium hirsutum
  Clone ID: LIB3083-031-Q1-L1-D8
gaatgatatgtaagcttaatttaattcaataacaaccattgctgattttaacgaggaacggcgaggcatcatcccatctacgagcccatatatgtatttccatatgtaagcttctacacaaaacttcaagaattttaaagaaaaaatttagtacaattgaggaggcctggtgaggcagtgaatttcaaataacacttgcatcagcatcaccacggtttcaagtccccaactggtcctgctgtccagttcaaaatcttttcaccaggcttcaagtatatactcttctgatgtggcaatttacgagctagcccattcaatatttgatggaaagca

SEQ ID NO: 1620 - DNA, 331 bp, Gossypium hirsutum
  unsure (1)..(331): unsure at all n locations; Clone ID: LIB3083-031-Q1-L1-D9
gataaactatcaaattcccgttagtttatttaatacggtacggccacactataatanaacagtaacaactaccataaatgctggtagaactcattattagcggcatttctccttcctcccaaacagtagcatcgaagcatagcagaaccagaaatgtaaatgaaataactcatccgtcatgaattatatcataggaagaagcatcagtccttcaacacacagcaacaacatatagcagccaaacagccttgcaagaaagataaacagccagaatcagactgtttctggtaatggtagaggtcatagtggtggtagtgttgatattgatgat

SEQ ID NO: 1621 - DNA, 394 bp, Gossypium hirsutum
  unsure (1)..(394): unsure at all n locations; Clone ID: LIB3083-031-Q1-L1-E1
aacgnatgtaactatatatattatcatgaaattttttgtcccttttctcacaccgacatagacgatggttttacaacaacctaggtgcccagctctcttattaaattacccttcattgacaactacattttaacaatgaaattggctgaaccaaagattaggaagcactggcagcaggtggagctggggttgggttgaatgctttctgctcggcacagcttagctcctcgtgtggccctgcttcctctcgcccgacacctagtaagtcaaggtaatgaaggtaatgggagatgatgatgttcatgggatcaatatcgccttgcccgcaagtgtaatcttcgtagagaacgttcatggtggagccaaaagtaggaccccgtttttctctgtgtcg

SEQ ID NO: 1622 - DNA, 373 bp, Gossypium hirsutum
  unsure (1)..(373): unsure at all n locations; Clone ID: LIB3083-031-Q1-L1-E10
caaaggggtgattgcttcnatttcaaaccatttggttttccttacaccttaacaacaaagtcgccaggttaaacaaaaagaggggactagtttatttacaagcatgaagccagtagggggttcctctatagaatatagacctcaacaacaatcaacaaaaaagcaaccatctggaagtgaaagaggaagggaaaagaaacaaaataatcctaaggaatggaattatgcaggacataattcccatcgcatccacttcccattcttagtacggccaccaatctacaccgccgggttttttcacgagcaattgattgtattcaggccgcgatgtctgcaacccaattcaactcgagatctttgaagatgataaaag

SEQ ID NO: 1623 - DNA, 335 bp, Gossypium hirsutum
  unsure (1)..(335): unsure at all n locations; Clone ID: LIB3083-031-Q1-L1-E11
taacacagatcctatanacttataccttcacaatttatttatctttataacccttcattcaatagttggatacatttcacacgtgggtgcggcaaaatacccccttcaattaataaaacctatcagattcaccctgtacactttttttcccctttttttccctttcattctgcttccccccactctcttacagtgtatataccctatcccaacatgcacaaacttattccgaaaatataccacctatcatcctaccaaacaatagatatactaactcatcatcatataaaataacatctcttatctactctatatcttattaattaactatcata

SEQ ID NO: 1624 - DNA, 181 bp, Gossypium hirsutum
  Clone ID: LIB3083-031-Q1-L1-E12
tcctaaaaaaaataaatacaacaacaacatgcttcaaactaactttaatctcatatcatccttgctatcatctaaacttatgtgcaaccaccaattctaaacccaatcattcctctattaccatcatatactacttccaatgtctcctgctattctttcccctatatcatcacatctaaat

SEQ ID NO: 1625 - DNA, 349 bp, Gossypium hirsutum
  unsure (1)..(349): unsure at all n locations; Clone ID: LIB3083-031-Q1-L1-E2
aagtaagnctacattccacatatgtgttaagcatgaatgttcctcaaaaaaaagtggtggatcacataaagagaagggaggaaagaaaaaggaaaagaagctgttctcaaatatacatgctagtcgatttcctcccaaaaaaacactagaacttaaacaaggttttcagattttggtatcaagactatcagtcaaatttaatatcagagataggaagagagattgagggagggaactacaatatctcaaagcatcattgtggtttgtaacacgcagtatgatcgacaaactccttttttgcgtttagcttagctcccaaaaacgccaaactaggatgaggatgatgatc

SEQ ID NO: 1626 - DNA, 391 bp, Gossypium hirsutum
  unsure (1)..(391): unsure at all n locations; Clone ID: LIB3083-031-Q1-L1-E3
atttgccatccctacttgccttggcttttatcacaaaggataattaaaaagataggaggaatcaaaatcacagaggattttgaaaaaccttcttttcaaatccccacagttaatgagtgtttcaagctccccacatgcagcaaatgttgtcccaatgctacttttcggcttccaagttcatcaaccacactcaaatccttacaaacatccaccttaaacctcaccaatgtctctgatttccctgttaatgaaactttctcaaatcccaacaaatgcttttggggcgagttgtgcactgatgggggactcgaaaacaagaacaccgtgtggcttccgccgtattttcctctgttttgaactctcacatgaatgtcgaatgctangtttttac

SEQ ID NO: 1627 - DNA, 448 bp, Gossypium hirsutum
  unsure (1)..(448): unsure at all n locations; Clone ID: LIB3083-031-Q1-L1-E4
aaaaacataagcatgatttgattctcgaatgaaaattacaagacaagtaacagttgttcataatctgcaaactctgaataaataaataaaaacccatataattcaaaacaccacaaatgggtaacacttaatgactggccgatggattagtcagcaattcaagtgatttctttaagtgctcaactgccgtcgacacttcatcaaatgctaaggccccaaccgcaaaccgagcagccttgtgcgcctcagcgattttctccggtggcggttggtaattgctgtcgtattggtatttctcagaagtaggtggtgaaggttccgcgattttcccgtttctgctacttgaagagtattgagcggttgttgatgaatagcttgttgtcggaagagctgactggggaggaatgtaaggagtctcgnaaccttgataggatgatggatagtgaga

SEQ ID NO: 1628 - DNA, 414 bp, Gossypium hirsutum
  Clone ID: LIB3083-031-Q1-L1-E5
ggttatgtttgtaaattatagcaattaaagatgatgatgatgatggagatacattattgaaagccggcatcttgttggcaactatccgcatcaatacatttaatatattcggctcagggatggattattggtagcaacattgatcgtttgaaggtttagcaccttcaggggctgccacagtgttatcaaatatctatcatgttgaaatacttgaattagttgagttaaagcaaacacttgatggcctgtaaattttggggtgaatcgggatcaaccttccaatgtgggaacctgtacatcttggatagctctcaggattgctttgccgccgtactccactggcaaagcttcttcacctatatcctctataaagattttcttctcatcgtcattggtcacaattacaatcttttc

SEQ ID NO: 1629 - DNA, 328 bp, Gossypium hirsutum
  Clone ID: LIB3083-031-Q1-L1-E7
cctgctctcgctccttctgaaaaaaagaatcatagcattttttatcaatcaggttcatgatataataaccgcttatttcatatctgattggtggaggacaaaaaaaggttcaatgtcatggatctaacatcaatgatgcactgtgttccaaaaatgttatcaactcttaaaagctgacaccatactgaaatgtttaggctctcattattcagaagggtacatgtatataaagattcatcactctttgtttactgtcttgtattaagcttttgtaatctgctgcttcattttaaaaattggggcttcattactgctttacaaagttttt

SEQ ID NO: 1630 - DNA, 365 bp, Gossypium hirsutum
  unsure (1)..(365): unsure at all n locations; Clone ID: LIB3083-031-Q1-L1-E8
aaccttnttaagaaaaaaaaaagggaaatttattaatttatcatcatcatcatcgtggggaagtacataaagcagtacaggggagatcatcaacgtcatccaacggtggaaaattgagatcaaaaggcaacattctccgacgtgaagatgatgcgataaccccatcatcaactaccgacgacgacgaatcgcagtcgctgtgacaatcctccggcgccaaaggcggagtcctcggacgatacttcctggtcgaaaccgccgcgaaatccgtcgacttctgtggcggtagttgagccggtctcggcccactaaaagattccaccgtgctactcatgctacttcttgtcggtctttgcgggttcact

SEQ ID NO: 1631 - DNA, 263 bp, Gossypium hirsutum
  Clone ID: LIB3083-031-Q1-L1-E9
aacagcaccttcttgttttcctggatattgatactcccgggtgtatactttataaaagccagaggggtcatacatcatttgatgaatgcgctagctcggattgtttaagctcaatggaatgcatgcaaggagctgcagtctagcctaattttctggatttcactgtaatggattttggttctgtttacggaatgatgagagcattttattgaacgctatataaagacactttgcaacttttattttatctttatccattcttt

SEQ ID NO: 1632 - DNA, 341 bp, Gossypium hirsutum
  unsure (1)..(341): unsure at all n locations; Clone ID: LIB3083-031-Q1-L1-F1
gcaaacattgaatngtatttttcatgacccaatcttttattacatcatgaacccaataagcggatggtcttttttaacaaagtcgggtggcaacagtacaaactgagtttgcttatttaggctaccagtgccagccataatccatagaaattccaactaaactgatattgtggaaacagtacctgcaaggtacagggttctattaatgaaatgctactgcagaacaaggcattgttgtgtcccagccaccatagcatggtgggaagtttcggtgatgccattctctttttcaatagattgagctttggtatcaggctcctcaacattttcaattgcatctt

SEQ ID NO: 1633 - DNA, 375 bp, Gossypium hirsutum
  unsure (1)..(375): unsure at all n locations; Clone ID: LIB3083-031-Q1-L1-F10
ggagaaaagagaaaaaaacaatgtcaggtcctcagtttctttcgaatccaccaacattggattctncaggtngttcttgtcacgttgagaatcttgctggtctcaacacttatgtttctgggtctcttcaatctaagcttgctgtttttcttatctctgatattttcggatatgaggctccaaactttataaaactcgcggacaaggttgcagcctctgggttctatgtggtggctcctgacttcttttatggagaaccctatgaccctaataaccctgatagacctttatctgtttggataaaggatcatggaccggataaaggttatgaagatgcaaaacttgtaattgactctttgaaaagaaaggattttc

SEQ ID NO: 1634 - DNA, 436 bp, Gossypium hirsutum
  unsure (1)..(436): unsure at all n locations; Clone ID: LIB3083-031-Q1-L1-F2
cggaccttggtccctcggnagaaaaaaaaaattgaaccgttttatttcccaaaaccaaaattccaattcctggggagttttgttatttcctttaaaaccaattctttggtggtttttgggttttgcttctatggctgcagttgttgacaattcaggtgaagcagtggaagctgctaaaaacaacgatttggaagtggaaacaaccaaatcagaatcaaaggaattcaatgtgcaaaacctggttgatatgttcacaaagttgaaccctttggccaaagaatttttcccatcatattttcatcataatcagaccaaaaaatcagataattttaatcaggttcctgttaagcaatcagctggcaatgagaatttttccaacanaaggggtagaaataacgtcaaccagggtagaaggaggcttaatggtagagctttt

SEQ ID NO: 1635 - DNA, 353 bp, Gossypium hirsutum
  Clone ID: LIB3083-031-Q1-L1-F3
acaaaaaaattttatcattgtattttattatctttaattgctcactttcatgtgctgattttttttagaacaaggaatcaataaacaaaatttttacctaaaaggatcgaaaagagaatcagatcttgaattttggcatagtagaaggactaaaaatgaaattataccttggaaaaaacctgtagaatgtggatcatataattgattttaaatcaaaaggctgatactaatcggccaccatttttcatcatcgtcttgaattcatcgaaattcaccatcccatcgccgtcgatatcaactttccgtatcatcgctttacaatcttcgatcttatcaccttcttttattcccaa

SEQ ID NO: 1636 - DNA, 298 bp, Gossypium hirsutum
  unsure (1)..(298): unsure at all n locations; Clone ID: LIB3083-031-Q1-L1-F4
aggggtgggcggttttttttccnaaaaaaacccccccccccccccttatttttttttttggaaaaaaaaaaataaagggttttttttttttcccccccccctgaaaagcccaaaccctaaacccctttcccgggggggggggggggaaaacccggggaaaatggatttcaaaaggggggaaaaaaaaattttttctttttaaaacctttttttttaattttaaaaaatttaaaaaaaaaaaagcctccccttgttttttggggttttgtttttaaaatcccacccccctttttttaaa

SEQ ID NO: 1637 - DNA, 445 bp, Gossypium hirsutum
  Clone ID: LIB3083-031-Q1-L1-F6
gcaaaaagccttgtctattttcaaaggtaattaagataacattacagtggacaaattacaattgtgagtttaaatataaaaccataaataaaaataaaggggaaaaaaatgataacaaaggtgaagatacctttggaaatttctcagcacaactttatgacagcaaaatttgttcattattgctacaaattgtaagtggctgagattatgacaattttttggacccactaatttaataataataataataataataattataatgtactcccccaaaaaatctttaattaattaattaattaatttttcttcccctcttcaccgccttcttccaagtaagccttctttctcctatcaacaccagcaaacaaacaaatcacaaggaaaaacgtggcgtacatcccatggacctttcaattagtcttaggcggttgatgcaaaaaca

SEQ ID NO: 1638 - DNA, 390 bp, Gossypium hirsutum
  Clone ID: LIB3083-031-Q1-L1-F7
aaaaaatattaatatatatatcaaagtctatattaaacaaaacaaaatatagaaataccttaaagacgatgaaataaataaataaatataaaaacactccaatgttaaatccatttcgaacattgagtgtttatcatgttttgggttattttcaatttaacccctgaaaataaataatttaaaacatgcaagtgtatttggttctcttggctcaaaagcaagatacaatacaaaacattgttatatacatggcaatatatatatgtatatatatattgttacatatgtaatggagggagatgattaaatgcagcttgtaaactcaataatgtgactgaagcgccatctaaatgagcccataaaattgccatatacatccacacatacaca

SEQ ID NO: 1639 - DNA, 218 bp, Gossypium hirsutum
  Clone ID: LIB3083-031-Q1-L1-F8
aaattaatgacacaaacacacgccgtcattttaaaaaatcccggcctcccctacaaaaatttttcaatatcaattattaaattattaccattttcaatttaataacaaccttaacctcatttaatttctaatttttttaaacaaaaacacttatatcttctttcacaatattctttttcacttaaaattcaaacctaaaaacttcccatcccatatat

SEQ ID NO: 1640 - DNA, 415 bp, Gossypium hirsutum
  Clone ID: LIB3083-031-Q1-L1-F9
aaaaaacatctctttctttcattcttttataaacaaaaaaaaaagttttggatccccaacatggcagatcttattaagctgtagggggctcacaaatgaggccgaatccaaaggggaagagtggatcataatgtggatccccaacattcatcggcagttgatcaactgttttaaaccaagtacgaggaagcttgcctgaaaaaccatagtcaccaaatagaacatcagccacaccatgaccctcgcttcctggcaaccatgccgcaaccagagcatccacggagtcaatatcaggttctatcacaacggggcgacccgacattaagatgacaacacatttcaaagctccacatacatttctgattgtgggtggaccgggttctggaatcgcaagattcatgctgccaccttttgt

SEQ ID NO: 1641 - DNA, 335 bp, Gossypium hirsutum
  Clone ID: LIB3083-031-Q1-L1-G1
ggttcgatcttttaaaacaagcataaaatgtaggcaggggcgataataatagtccaaatgcattcaattgatactaatacagaagtaaaatgaagtttatttatgcaaggatttgctcaagaggcttggtttccagttcgggcttcttggtcgactccatctgctgctccttggccagtttctttagcatggcaagctcaagatccttgctcatcttcctcctgtacatctcagcaaatgtgatgggctcctcaagtataggtttctctccttctcttatcttcaggggatacactgttgcatcgggtgctgggttttggaatgtggctattgac

SEQ ID NO: 1642 - DNA, 378 bp, Gossypium hirsutum
  Clone ID: LIB3083-031-Q1-L1-G10
aaaaaatggctttattattttatatttatactatatttttcttccctttacaatataatttttgctgtttttttaaaaaagaaccccaccccaccccttaaaaaaaaaaaataaatccaattttaacgaaaaaaccctttttaaaaataaaccaaattttccaaaaattccctaaaaaaaaaaaaaacccaaattccctttttaaaacaatttatttttttaaaaataaactctcaacctttaatcttaaaaaccttaaaatttccaaaattctttccccataacacccctcttgaacaacccccaccccattctatattttttttccaaccaatcccctaaaaccactaatttatcccccccaacctcttcttttaa

SEQ ID NO: 1643 - DNA, 315 bp, Gossypium hirsutum
  unsure (1)..(315): unsure at all n locations; Clone ID: LIB3083-031-Q1-L1-G11
taccttctaagctttctttantatttttttttaaaaattttacaactcaagttcagacagtattataaacttgggagcgaccacacttacaaattttcatagaaacgagggggaaaacctgaaaatcccacaaacacacctaaatgcatatcaacctttcttcctgaacaataaacaaaatttaatataccttggaggcaaaacacagccttaatctaatgcctgctttcccctgtaaagaatatgtggatctatccctcaaaagctacccgaattcccaaacccctaattctgaaatgtcatactcgtgaatgg

SEQ ID NO: 1644 - DNA, 368 bp, Gossypium hirsutum
  Clone ID: LIB3083-031-Q1-L1-G12
gccaaaagggcaagtaaattgcagtcccccggttgtgtaaccaaaaattcgaacgttttaaacaggcataaaaatggaaagaaaaaaattaaaattacaaaaacagaaatccagatatgccgcctattttaccaaaacttgcgttctaacaaccaattatcgtttatgcaaataactatgattttctcttcttgcttgttgatttcgaaccatgctcatttttacctttctttttcccacttttattcgattggacttcgctccttctggatttcacactgatgacaccgcctgaaagcaccttttcaccaccattttccaaagcattctccagttcaccttctctgcctttaatcgcaaattgttgg

SEQ ID NO: 1645 - DNA, 297 bp, Gossypium hirsutum
  Clone ID: LIB3083-031-Q1-L1-G2
ttcactttcaatgatttttatgtctcagatcacaatctttcctttgtgttctggctggctccatgtttagtgtttagatagactctcttttccagtcctttcggctgttccttgcttggctgcttctgcttctctctttatacacatatgctaaccaatatatatatcctctggttttaaatcttgcttcaattgacagtcgtagaaggattgcgatctatgttaactaatttatttagtatttaaggcttcctgtaatttcttttatcaaaaaaaaaaaatgttttgaacattttt

SEQ ID NO: 1646 - DNA, 358 bp, Gossypium hirsutum
  Clone ID: LIB3083-031-Q1-L1-G3
gaagaaagctcttcttattagattgcacacatatcatccaaatcgagttcttgaatacaccgcaagtttacagaaattggaatctctcaagccacaagtaacttttaagtacaaaaggctcacctatgttacaatctgcatatccaattagtctcccaacacacaggcaaataaaaaaccaggaaatcgcaaagaaaaatggagtttcatcgttcatgtaggaagcgtaaggacttgtttgattactcttttaaaccctgctgttttctggtaaaggcaacacaccatcgaagaaatcaccaaagtagccacgcggttcgtgtactaaccttgaaatgatgtctctaagtgtgatcac

SEQ ID NO: 1647 - DNA, 326 bp, Gossypium hirsutum
  Clone ID: LIB3083-031-Q1-L1-G4
acattccattaagctcatgaaactttaaacaacatttcttacacgtatgtcaacggacggcttaataaatgtactagaaaccacatatcgacattttatttgatttttatactttagatgctattagtattaagcatcggcagaagcagaagattgctgtcgttgagctcgagctgtaaaaccagcaaaccaagcaaccctcatgagttgcacaccaaggatcagtacccaccaacagaccaggcccctgatagtgtgcatcatccatgctggtgcactgagttcaaccccgagtttcaatcccctcattagctgtagcacacggt

SEQ ID NO: 1648 - DNA, 250 bp, Gossypium hirsutum
  Clone ID: LIB3083-031-Q1-L1-G6
aaaaaggcggttttattaaaacgtgccacaacacacaaatccatttttccacataactcatattttaaaagccaaccaaaacaatttttgtcaaaatcattataaaccccttttattcccaaccaataacaacatgggcccacacattaatatgaacaccattttttttttcttgatgaacttccacattccacacatcctaagttactcccacttctacttgattaccctaatttccttcttggacacc

SEQ ID NO: 1649 - DNA, 367 bp, Gossypium hirsutum
  Clone ID: LIB3083-031-Q1-L1-G7
attttattaatagattgcaaaaaattgactgaacaaataaaaacaaaatgggggctaatctttgactcaaacagccccacggacaccttatatgtgtgaataacgatggaacttctaacattatgagtaccatctgaccatatcaatgttccagacaccattgatgtctcacccaaagctttgccagaaacaataacattgtaagacttctgttctgttagagacttgaaagacaagacttgaggaaccactttgatttcgggttccgacagggtagtgattgtcgcattgtaagtagatcttgctataccaacatttgttactgttctatggaaattaacaatgaatggcttgcctgctggtacta

SEQ ID NO: 1650 - DNA, 397 bp, Gossypium hirsutum
  Clone ID: LIB3083-031-Q1-L1-G8
gcgaatagccaagtctaaagaacaattatatttggttctcctcaaaatccgggaaaattattcagaggtgggagaaatatcaactggctgcagctgcaattattccagttacaaaaacaacactaacaatgccctcaaagtccaaggcaaggaaaagcaaaattctgtaacaaaccttcggcattatctaataaaattataaaacttacgaaaacccaaaggaacgctaccaattcttaaccgataagcagtttgctctcatccaagaaggtgtaagtgggtacttccaggttgtatggtgctggacccttgcgaatcctgccagagacatcataatgggaaccatggcaagggcaaaaccatccaccataatcaccagcatttggcaagggaatgc

SEQ ID NO: 1651 - DNA, 362 bp, Gossypium hirsutum
  Clone ID: LIB3083-031-Q1-L1-G9
aaaaaaatgatcataatgttaaataaaccatttattttttcctgatgaaaagaccacaataggtggtttatatatcacaaaggctggtttcctggaacagtaacaggaataattgtcaaagctacatagatcacttacaccactaaagatcatcaatggttgtttctattcctagctagctcccgagccatctcccttaattcctccggtgatggaggtcgtggtccctctggaggatacactatatacgaacgatttcccattaatttctggagattcttggtgttctttgcgaaagtgtatataagaactatagggatcgtaacatataaaccgaatttggcgattttaagaacaccctt

SEQ ID NO: 1652 - DNA, 196 bp, Gossypium hirsutum
  Clone ID: LIB3083-031-Q1-L1-H10
aagcgggtgttaatcaggtgatcagatccataacatcacacgaccatgaccaaatgttaggccataatgaagctgattccgtcttcacccaacacaacgaaagaaaatattgtttaacactacataaattcgcttaaaaataaacctagacaccttactgatcacctaactgaagcagtactccattatactgaaa

SEQ ID NO: 1653 - DNA, 297 bp, Gossypium hirsutum
  Clone ID: LIB3083-031-Q1-L1-H11
aaaaaaaatccacattacattcaagaactgtcgtaccatagtacggacgagtaataatacaaaagatatgagcaaactttggcattagatcgaaaccaatgtatggttaaaaggtgtgacacacataaaatcatacatgcaatacatgaagaatttattgttttcaaacttgcacaatatgtgtcaataatcacttactatgaatcgacaatttggggtttttatagtgaatccagatcaggcagctgccttgagcttctttgggatgccagctatgtacttaccttggaggaaagc

SEQ ID NO: 1654 - DNA, 324 bp, Gossypium hirsutum
  unsure (1)..(324): unsure at all n locations; Clone ID: LIB3083-031-Q1-L1-H12
aaactttttgtggcaattttcatttcttatgtcaccgttgctgaaaatttaagactacgggggcgttttatcagcaggactttttgccananccacacaataaaaaaacacccactttgaccccacactcgaccttcatcaccattcatcaagtaaaaacaacgccctaaatagtttttaaaccccctaaaagcgtttcaccaattccccaacccttgtttaaaaccacctttgttttccacataggatcgcccctttctcgattcttacaatatttctttacacctatgaactggtatttatcgtcgttacacaacatattta

SEQ ID NO: 1655 - DNA, 434 bp, Gossypium hirsutum
  unsure (1)..(434): unsure at all n locations; Clone ID: LIB3083-031-Q1-L1-H2
aaggaggttgttgaggttctattggaaccgtttgttttaatcttggggaaagtgggtgataggggggtggttggaaagataaggagcaatgtctttgatgtgcttgttaagacgggaaggagattgctggagcttaagcagtccggtgatgaggttgatgaaagcgatgatgtagttgtgttcgggacgattggtttagtgatggggttctctacaaagttctatgaattgggttcttcagtagattgctgtcagggtaataaaaaggctgtgttggcattacatgaggaattcttgaagttggagaaggatttgacgtcattgngtattgatatttcgattcccgaaggtaatgaaggcaatgaagaaaatgaggtacctgaattgatacctgttggtggtgagacagatgcgaatgtttcaaatgatgtttt

SEQ ID NO: 1656 - DNA, 406 bp, Gossypium hirsutum
  Clone ID: LIB3083-031-Q1-L1-H3
aaaaaatgtaaccttacctctcataaaacctaaaattaagttgcatcattaattataagtatagggcaagtaaaattctttcctaataaaagctcctaccacacccaacattatatttacatgcaaattatcattagatactaaatcccactctcttatttttataagagtaatacttagcactgcatattatacataccaaaggggtttaaatgttgaacagtgattactttatgcagcctctgcaaatccaatgtgcatgtttccatagtcgaaaaccgtatggaacttgcccataaacacgtcgcccaagatccagagtggtccgcgaggcggtggtacatcaagagcaccgaatccgctaatgcattgagctagctctccgtcaccaacttttagaatgtac

SEQ ID NO: 1657 - DNA, 301 bp, Gossypium hirsutum
  Clone ID: LIB3083-031-Q1-L1-H4
gtttttgaccctgcttaactatctttttttttaactgcctaaaataataaaacggtggcgctttctaagtatacaaaagttaggaatgaccaatacaaaggagaggatagaagaagcaattgacaattctttaaatggatctccttcggatttggctgcacattcaatttgcttcaactgtctgtcaatctttggaagttataaccaacaaccccaatgctccaataagaatatacttgataattggcttttcagtcatgattatagggacccaaccaacatacggcaagaacccaacagc

SEQ ID NO: 1658 - DNA, 268 bp, Gossypium hirsutum
  Clone ID: LIB3083-031-Q1-L1-H5
ataaatcggcatatttttcaacccacaactctggaattttaagatcgatatttattctggagctatcgctattttggcttccactagctggtgaactttccatgccaaaacttcacttgacgctgttgcagtcagtgctagggctgatcttgtaagggatgttgacaccgcacttgcctgggagtccgcttgcaataccatagttgatgccagaaatgccggcggccgcacttttgatgcatttgcaagctgcttgccggtctggtgt

SEQ ID NO: 1659 - DNA, 303 bp, Gossypium hirsutum
  Clone ID: LIB3083-031-Q1-L1-H6
aaaaaactctaaatcttatatataaatgcataattacaccatttaaatttacaaattagcgtcggttatacaattttaaataaatatctcaaattttttacatatgatattcaaatctagaaaactaaatagctatatataaactacaacaaaagcttttaaaaaaacccattcaattcaaaactgtcttatttcacccatgaattttatttccacttcttaattcatgagttggtaaatcagtttgttggtgaaccgaactgcggtggccgtgaccaggtggagggatcgaagtgtgtgttt

SEQ ID NO: 1660 - DNA, 399 bp, Gossypium hirsutum
  Clone ID: LIB3083-031-Q1-L1-H7
gcatcgatggaatttgcaactttttattgaattttcatacaagtttgaaaacaaaagtaatgaggggttggattcgtgaatcgaagtgtgtttctaatgacaacaaaagatacttcaaaatgaatatattcgcccccaaataaaaaaagcgaatgatggtgaaagtttttttttttctcccatttaaaattctaccaaaattagtacagtattatctcatttcactaaacacttaacagtatcaatcttttttccgtggcagcagccatcgaagatgtttgttttagagttcatcatgtgaatcatcctcttcttcatttgatgcagcactgccgggccctccaccagatctttgatatacagccgtgatgataggaatgcaaacaggctcaacttttt

SEQ ID NO: 1661 - DNA, 444 bp, Gossypium hirsutum
  unsure (1)..(444): unsure at all n locations; Clone ID: LIB3083-031-Q1-L1-H8
aagaaaaacttgtctatcaataataagcaatttagacaatttggagataataataatactgggaaaggcgcggttgaatgcaactctccctcacaatactcaaaaccgcgaaaaaaactctcaacaacatgcaatgtatgtaaacatgactcggtgtttgaacaaacctcaacactcacacctaatgacacgcaaaggaactcaaaccattccagcttataaacatactgacccatctagtttcctctgcaggagatgaatatgcaagacatgggaggtgactaatctcaccatatatcccaaaaagcatatggcacagaaaacaaacacaacccaacccctttttttaagttgatgctggctccccatctttcttctcactatcatctacttttttgtatcctcctttgtttccgnttcttcctttgctttaacatccttctc

SEQ ID NO: 1662 - DNA, 417 bp, Gossypium hirsutum
  unsure (1)..(417): unsure at all n locations; Clone ID: LIB3083-031-Q1-L1-H9
aaaatgaaatttttataacattaataaataaataagtcatagacaaattgataaacaaattgtngtcattatcataaataaaccaaatacacatctattcgtgttcgttcattaaacaaacataaaaaatttgttcatgctcgtttatttagcttaataaacaaacattataccaataattcacgaacagttcatcgctctgtttatctacacccctacacccctatgataagatttgaccgtaccatcccattaaaaaacctcttaaaatctatttgaacatgtctttttcattattataataagagtgaattaaacaaagactccatcagcccgcttaaaatccacttctaaccgctgaataccgttaacatgcgtagacacttaaacgtttgntattaatatattatctctttt

SEQ ID NO: 1663 - DNA, 396 bp, Gossypium hirsutum
  Clone ID: LIB3083-037-Q1-G1-A1
aagaaaagaaatcggacccaacattgaataaggatgaacagtagtgaacggaagttgaaatcatcgagttccgaattggatttggatcgacccaacatcgaggattatctcccttctggatcttccattcaagaaccacatggcaagcttcgcctgcgggatttgcttgatatttctcccgctttaactgaagctgctggtgctattgttgatgattcattcacacggtgttttaagtcgaatcccccggaaccgtggaactggaatgtgtatctgtttcctctctggtgttgtggtgtggtatttcggtacttgattttgttccctatgagggctttagttttgacaatacgatggataatatttctgtcatgcttcattcctgtgcactttcct

SEQ ID NO: 1664 - DNA, 407 bp, Gossypium hirsutum
  unsure (1)..(407): unsure at all n locations; Clone ID: LIB3083-037-Q1-G1-A11
ctcaccaaaactcttctctatgtctatcctcttcctttttgccctcttctccatgcaaatccatgctagagagtacttcagcaaattcccaagagttaacatcaatgagaaagagacaacaaccagagagcaaaagcacgagaccttcgttccccagaccacccaaaagccagaagaacaagagccaaggttcattcctgaaacccaaaatggttatggcctttacggccacgagtcaggctcaggctcaggctcaggctcaggctcaagccggcccagtttcaccaccaaagaaacctatgaaccctatgtcacccctgttagattccaccctgatgagccctataacagcatccccgaatcctccaacantaaagacacttactactacaacaagaattgctacg

SEQ ID NO: 1665 - DNA, 289 bp, Gossypium hirsutum
  Clone ID: LIB3083-037-Q1-G1-A12
ctctctcttgttgtaagctagaaaaagaggctcgattttcgattcctttttctcttaattttctttagagaaagagagagatggcttcctttgatgcgtaaggaatggaaggagaagaggttcatgcaggtgcagcacctaataaccatcctttcgatgtatacgacgacgagagctaatctaactacggctcttagtctaacttcagcgacaatcagcaattcccggtcgactgtggtgatgtggcagtggattacttgggttcgtctcgtgagatcctcgggttcgg

SEQ ID NO: 1666 - DNA, 402 bp, Gossypium hirsutum
  Clone ID: LIB3083-037-Q1-G1-A2
gagaaactcaacaacgccactattcttgaacaacttggagccaggctttcctttcgcactattacggatacgaaaataatggaaaaagttggattcaattgtcaactgctcctatcggaaatacgattgactacggattcgagccatatacacatggtttcataaaaccgtacgattctcccgatctaaatcaagcaggttttacatgaacaacgtttgcctcaacatgttctattcgatactagtatgacaagcggtattcttacaaaaatagacaaatcagaagcaagttaagatcacaccgatcagccccttcttcttgcgccaaagatcctaccatttccgaaggaactggagttacatcccttttcagtttcattcaagagttcctatgggtttcca

SEQ ID NO: 1667 - DNA, 92 bp, Gossypium hirsutum
  Clone ID: LIB3083-037-Q1-G1-A3
cgcatcccaacatgaacaaggagttattttccaatgaaaacattctaggattgaaggaccctaatagggctttccccaatggttctgctggg

SEQ ID NO: 1668 - DNA, 422 bp, Gossypium hirsutum
  Clone ID: LIB3083-037-Q1-G1-A4
gttcatcaaatgtgtcactgttggtgacggtgccgtcggcaagacttgcatgctcatctcctacaccagcaatactttccctactgattatgtgccaactgtctttgacaactttagcgcaaatgtggttgtggacggcaacactgttaatcttggattgtgggatactgctggccaggaagactacaatagattaagacctttgagctatcgtggagcagatgtcttcttgttggcattctctctcattagcacagccagctacgaaaatgtttctaagaaatggattccggagttgaggcattatgcacctggtgttccaattaatcttgttggggacaagcttgatcttcgggatgataagcagttcttcgtagattaccctggagcagtgcccattaccacagcccagggggaggaat

SEQ ID NO: 1669 - DNA, 301 bp, Gossypium hirsutum
  Clone ID: LIB3083-037-Q1-G1-A5
cttcctttttttaattccaataaccatacaagaaactctccttcgctctatcgactcgtttcctcatttgcaattacacaagggacattaggtgtctctcgagaccattactgcaagcacctgagaccgggtttaaatctttggacacctgcccagttcagtgatatggaagtatgtctgacctgttggcaacacatgatgtattaaagcagcgcactttgcatccatagatgcatttttaggggtatgatatgtttaatggcgttccactcaatcggctttaagttgctatcatacttag

SEQ ID NO: 1670 - DNA, 397 bp, Gossypium hirsutum
  Clone ID: LIB3083-037-Q1-G1-A6
tctgtttgagatcaagaaagtaagtgacatcgaaccgtcgttaaaacgacaactgcttatctccaccgttctcatgactgccgggattgctgtcgttagcttctttgcattgccgtcagaattcactctcttcaattttggaactgaaaaggaagtgaagaattggcacttgttcttctgtgttgctatcggattgtgggctggactcattatcggttatactacagaatattatactagcaatgcttacagtccggtgcaggatgtagcagatgcttgcaggacaggagctgcaacaaatgtgatttttgggttggctctgggatacaaatcggtcattatccccatatttgccattgccatcgctatttacgtgagctttagcttgggtgcaatg

SEQ ID NO: 1671 - DNA, 419 bp, Gossypium hirsutum
  Clone ID: LIB3083-037-Q1-G1-A7
acaacacaagctctttgtgatctggcccttcgatttggtgaaggagatgaagaatcgatgtcccggccgtttggtgtatcacttctcattgctggtcatgatgagaacgggcctagcttatactatactgatccatctggcacattttggcaatgcaatgcaaaagctataggctctggttctgaaggtgcagatagctctttgcaagagcaatacaacaaggacctaactcttcaagaagctgaaacaattgctctgtccattttaaagcaagtaatggaagaaaaggtgactcccaacaatgttgatattgccaaagtagcaccgatataccatctgtacaccccttcagaggtggaagcagtcatcagtcggctatgagagaaatgctttgttatacactatcatcccatgcagca

SEQ ID NO: 1672 - DNA, 377 bp, Gossypium hirsutum
  Clone ID: LIB3083-037-Q1-G1-A8
aatttcttgtttacgaatatatacccaatggaagcgtttccagtcacttgtacggagttggtcaagtctcatcgcacaatatatgattcaagcatagacgttcactagctctaggtgcaacgaaaggcttggctcaactccactctttaagtcctcgattggtacagatatatttcaaaccggcaaatgttcttgtagatgaaaattttacagcaaacgctgcggttgcatgactgcgtaattttctgggaataattgatgttgctgggccttcttcgcaagtgacagcagatgagatatttcttgctcctgaggtgagggagtttagacgtttttccgacaaaagtgatgtgtatagtttcggcataatccttttg

SEQ ID NO: 1673 - DNA, 107 bp, Gossypium hirsutum
  Clone ID: LIB3083-037-Q1-G1-A9
tttttcattattgtccggctcaacggctatcactctacagaattactcacgaatcttggcatcaccaggctagattcagctgcaccagactcgggtgctcccacatc

SEQ ID NO: 1674 - DNA, 379 bp, Gossypium hirsutum
  Clone ID: LIB3083-037-Q1-G1-B1
ctgtagtgaagatttagagcccagtatgattgaatgtaagaaatgggaaccgtcttgggaggacatagagggtgaatactggaggatagttgagcaggggaaagatgaggttgaggtatattatggagctgacttggaaacaggaacatttggcagtggctttcctaagttgtcttctgtgttgactggaaatgatgcagataaatatgcaacgtcaggttggaacctaaataatttcccacgcctacaaggttcagtgttatcctttgaacgatgcgatatatctggagttctagtgccatggctctatgtcgggatgtgcttcccatcattttgtcggcatgtttaagaccaccatctgttttccctaaactatatg

SEQ ID NO: 1675 - DNA, 327 bp, Gossypium hirsutum
  Clone ID: LIB3083-037-Q1-G1-B12
ccaaggcacccatggttgaaaacaagatcagagaagaaataaagagacacttatcattgaaacaagtgcagggaatcttgcaaatgcgatccaactacgacgagttgagtaagctaacatatcttcatgcagcgttgtgcgataccctaacgctatatccaccgattccgatcgaattaagaacatgtataaagcacgactttcttccgagcggtcatcgggtggatcagaacaccctaatcataatcggaatacatgcaatgggaacgatggaaagctcattgggagaagattgctatcagttcaagccagaaacatggattactc

SEQ ID NO: 1676 - DNA, 437 bp, Gossypium hirsutum
  unsure (1)..(437): unsure at all n locations; Clone ID: LIB3083-037-Q1-G1-B3
aacatcaggcctaattctctaaggaagtttggagaaactgccgagaaatgtttagctgattttggtgtcgacaggccctccatgggagatgttttatggaacctggagtatgctcttcaacttcaggaggccgttgttcaaggcgatctcgaagaaaacagtacaaacatgattggtgagctttctccacaaatcaacaatttcagtcagcttgatcccactggttcagcaaaatttgaggtgtcaagtgtggatgacctctccggtgtttcaatgagtaaagtgttctcacagctggtgaagtcttaacgaaggtgatttccaacggaccgaaaatccaatgaattaagtctctcttttgacaatgcatacactgttttatccgatccaatacagcttgccanattttgagtagataaactgtctttcctttcctt

SEQ ID NO: 1677 - DNA, 423 bp, Gossypium hirsutum
  Clone ID: LIB3083-037-Q1-G1-B4
tttacttccaataattcatcattctcctaatcctctctgtattcaagctggcaacaccctctccttcctcttcttcttctcatctcagattttccatggaccctaaatctaaattcccgtttctatgaccaacaattctccaatccccatgctttaacacaaaattccttgtgagaacccctccccaaaatgatgattcctttaattgtttccacatgtattcaccttgttttcatcttcgcggctgtcagctgccagaaagattctatttacgatatcctaaaggcccatgggctgcccatggggttgcttccgaagggtatatcccgatttgacatcgacgatacgggccgcttcgaggtccatttggattatgcctgtaatgccaagtttgaaagccagttgcattttgataccaatgtg

SEQ ID NO: 1678 - DNA, 426 bp, Gossypium hirsutum
  Clone ID: LIB3083-037-Q1-G1-B6
atagcagtaatgttaaccagagtttgagagccgaaactccggttccagttccagttccggcaaagtctaatgagctagaaagtccgaaacaggtggatggtactgttgttcatgaagtcaagctgccatccaggagacttgtgattgttgttacaccaaccagcacaaaagatcagtttcaaggtgtgttcttgaggaggctagcgaatactattcggctggttcctcaaccattgttgtggatcgtcgtggaagggcaatcggattcgaacgagctatccgaaatacttaggaaaacacgcattatgtataggcatttggtgttcaaggagaatttcacagatcctgaagcagagctaaatcatcaacgaaatgttgcattgaagcacattgagcaacacaagctgagtgggaaagttcatttcg

SEQ ID NO: 1679 - DNA, 414 bp, Gossypium hirsutum
  Clone ID: LIB3083-037-Q1-G1-B7
cgaggaagaaggcaaagcacagccaaaatgtcgtcgtttttgcaatcacttttggatccgaagaagagctggttagcttctttgcatatgagggcccttaccacacgcctccgcaaatacggccttcgttacgacgatctgtacgatccttactatgacttggatatcaaggaggcgttgaatcggctgccccgtgagattgtcgatgctcgtaaccaacgccttaagcgtgcaatggatctctccatgaagcacgagtatctcccagaagatcttcagaaaatgcagacaccatttaggagctatcttcaagatatgcttgctcttgtgaagaacgagagagcagagcgagaagcattgggagctttgcctctgtatcagcgaaccattccttaagggttttcatgccgtatc

SEQ ID NO: 1680 - DNA, 425 bp, Gossypium hirsutum
  Clone ID: LIB3083-037-Q1-G1-B8
cttggacaggaaggaaggggctcaaaattcaagaaaaactgatttgatctctaatgaagaggagtggtcaattgttcaaggagccttgcagatactcactgttgcagactgtctaacaagcaggtcttcggtctttgaagcatccttgagagctactctggctagattgggcgcaactttgtcactttcggtatttggttcaagtttggataataaccagctacatgttgcaaatgacgatggaaatggggagccaccattaggtggaagagctgccttagatgtcgcagctgtgcggcttgttgatgttcctgagaaggcccagaaactgtttaaccttttagatcagtctaaagatccccgattccatgcacttcctcctgcatcccaaagggtcgctgcatttgctgaagcagtgaatgaac

SEQ ID NO: 1681 - DNA, 115 bp, Gossypium hirsutum
  Clone ID: LIB3083-037-Q1-G1-B9
ctgtgatcgtaattttcattggcttctactatgcgctgaagtatttgaactccattaaacaaatccacaaggataggtttctctctctctcgatatgtatcacagtcagcttttt

SEQ ID NO: 1682 - DNA, 249 bp, Gossypium hirsutum
  Clone ID: LIB3083-037-Q1-G1-C10
ggactatttattaaggacctctgtgtagctctccctaacgtactaggcttcatcttggggatgctccagatgcttctctacgccatttacagacacagtgaaaaggttaacatagaggacaagaagctaccagctgaataaatgaacagcatcaatgtcgtccttaccacattacgtgcctctgaagttcaccccgtagttttggacattcacactgatgatacaaaggacagatgattataacaacaa

SEQ ID NO: 1683 - DNA, 320 bp, Gossypium hirsutum
  Clone ID: LIB3083-037-Q1-G1-C11
gacgaacaaaatcccaaggcaaatcccagagcaagcttggtatatgaacccgacattctctattctgatcggaggaatacttccatttggagctgttttcatcgagctgttcttcattctcacctcaatctggctgaaccagttctactacatctttggtttcctgttcttggtattcattatcctccttatcacttgtgctgaaataaccattgtgctttgctacttccaattatgcagtgaagattatttgtggtggtggagatcatatctcacatccggctcctcggctttgtaccccttcctctacgctacatttt

SEQ ID NO: 1684 - DNA, 238 bp, Gossypium hirsutum
  Clone ID: LIB3083-037-Q1-G1-C3
caggcgctctcttgacattgagcgacccacttacaccaatcttaaccgtcttgtctcccaggtgatctcctctttgactgcttcacttaggttcgatggtgccgtgaacgtggatgtaacagaattccagaccaacttggtcccttacccaagaatacacttcatgctttcttcatacgctccagtcatctctgctgagaacgcttaccatgaacacctatcagttgctgaaatcacc

SEQ ID NO: 1685 - DNA, 345 bp, Gossypium hirsutum
  Clone ID: LIB3083-037-Q1-G1-C4
cagtcttatcgataccgtctacctctagggggggaccggaaaccatatcttcaggtacagattcgtgatacatatcactggatctccaatgacatgttcgtggctaggatgaccattacgtttcacaagcaaaacccgcttgtacagaacacccgttcgacagcaggaatgtcattgaacaggttcgcctcaatgtccatactgcaggattacggaaactgaaacgagactccgatattgttagcatcagaagggggataaaattccactcaaatgatggataaggcaacggaaattttacccaaccagacaaaatcgatagtatgccttagccctcatcatacc

SEQ ID NO: 1686 - DNA, 170 bp, Gossypium hirsutum
  Clone ID: LIB3083-037-Q1-G1-C5
taaagctgttattgctactaacattatgtatgtggctggacaatatccaaggtttttaagggcgcactggaagttccctaaaactgttgtggggtaaggtgttcgaattcatgcatgaaacacatccaggagttcacgatatggtctgtcactacattcctgaacattgt

SEQ ID NO: 1687 - DNA, 407 bp, Gossypium hirsutum
  Clone ID: LIB3083-037-Q1-G1-C6
gacggaccagctgagcgaacctggcgcgccggagcaaatcatatattaccatataatcccagagtaccagacggaggaaagtatgtacaatggggtgaggagatttgggaaagtgtcgtacgatacattgaggttgccgcataaagtgttggctcaagaagctgatgggtctgtcagattcgggcacagcgatggatctgcgtatttgttcgatcccgacatttataccgacggcaggatctccgttcagggtatccacggcgtccttttcccgccggaagagaaagctaatgaataaaacaaccccatcaaagttgccaccgtgaaatccagaagagggaacttgcttgcagctgcattccgaatgcctgtggctatctggcaagattcacgtttcacccctttcc

SEQ ID NO: 1688 - DNA, 201 bp, Gossypium hirsutum
  Clone ID: LIB3083-037-Q1-G1-C7
ttcagacctgggccatggagaataacatcatatttgccatctggaggcccatttgttcgaatggatacccatgtttatcctgattatctagggcctcggggctattattcagtacttggacagcttatcctatgggctccaaccacggaacacgcaattgaccgcatcaacacggttcttgatgacactgttattacacgg

SEQ ID NO: 1689 - DNA, 429 bp, Gossypium hirsutum
  Clone ID: LIB3083-037-Q1-G1-C8
ggcaattagcgtgtgatttcaaccaaacgtcaatgcaatccacgtggaaggcatgcgagcaaactgggagtgttcgaacgtattcattgtcgtcgaacgccaatagacatacggcacagtctttggggctgttgttgggtctattttttgaagtatagagggaaagcggcagggttttgatggcagagtcatcaagaccgtaaggggaaagagggagatcgaagggatcagaaggtggaagagagtcaaggtcggtcgtggtggatggaaggaagcgacgacggcggcggcggcggcggaagaagctcagtagacggagaattacagggacgagccgttttgagatgagacgccaatacgtaacgactaaaaatgctgcagcaactactaccaccattgcgataaacggttggctgaagtcaactggaa

SEQ ID NO: 1690 - DNA, 254 bp, Gossypium hirsutum
  Clone ID: LIB3083-037-Q1-G1-C9
cacctgtgggcactgaccaaatacagctcggtctgcccatgctcatggccgtgtccctttcgtctagtattttcgataatcttcgaaaaccatggtttatagatttgtttattggagtacgtgtggttctctttgtcagatcttgtttcggttgtattggagcttcgatcacggaatttatgccgtttgagttgttattcactgttggtggtcttgttgatcttggtggagctcggatgtgctgctttcatatt

SEQ ID NO: 1691 - DNA, 353 bp, Gossypium hirsutum
  Clone ID: LIB3083-037-Q1-G1-D11
gaaaagcctaaagggcacgagaaacataaagttgaatatccgaaaatacacgagtacaaagaaaaacaagatgagggtaaggaacataaacatgagttcccaaagcatgaaaaagaagtggagaaaaaacccgagaaaaaggccgagtaccctgagtgggctaaaatgcctgaatggccgaagtccatgtttattcaatctggctcggtcactaagccttgaaccatatgacactggtgcatgtgccatcatcatgcagtaatttcatgatatatagtaattatatagttaataaaaaagatggtgagcgggaactgtgtgtgcgcattcctccatgcaccaatggtgaatct

SEQ ID NO: 1692 - DNA, 246 bp, Gossypium hirsutum
  Clone ID: LIB3083-037-Q1-G1-D12
gcacctccccgtaagcaaaccacaaaggaaagcttgtagagagacccaaaaacaatgtctaatgaagttactgaagaacgacagggtcgtaaggactatgtggaccctccaccggcacctccgattgacatggctgaactcaagtcatggtctttttacacagccctcatagctgagttcatagccactctcctcttcctctatgtcaccgttgctcctgttattggtcacaagaatcaacaagat

SEQ ID NO: 1693 - DNA, 158 bp, Gossypium hirsutum
  Clone ID: LIB3083-037-Q1-G1-D3
ttcataatcatgttgccatttcaagaatactgtcatcctaggtctggtatccttaaccctgccgtcaacttaccataatctcttctcaaaccacacgtgggccgggaaccacatattgcctaaggggttgctcaacatcttgcaacatcggactctct

SEQ ID NO: 1694 - DNA, 90 bp, Gossypium hirsutum
  Clone ID: LIB3083-037-Q1-G1-D4
cgttaatcccaaagctgctgaatctttggccgatcctggacagtatcttaacttgtttgaggattgtgagctttctccttctcttgagtc

SEQ ID NO: 1695 - DNA, 347 bp, Gossypium hirsutum
  Clone ID: LIB3083-037-Q1-G1-D5
aaaaatcgagacaagtagcagagaatcagcgccacccatacaatacatagtctttgatccacctaaagcttttccttagagaccctttcatcgggccgggaaccgcgtaaaccttgtaaccagcaacccttttcttcctctgcagctccggatcattgaagctccatgattttgaagaagacccaaaagtgcttttgcttttcttcatcttaatttccttgcccagctgatttggtggttgaacagagttgggataattggcactgtagcactcgaggtcctgcatgttccctggccctccttctttagcttgatagcagtagctatccatctggatctcaccatcc

SEQ ID NO: 1696 - DNA, 285 bp, Gossypium hirsutum
  Clone ID: LIB3083-037-Q1-G1-D6
gctgagttattatatgccattgggaaaatgtaaacgatgaatggcaaatgtctattcaagcacgccatctgtggggagtgaggacaaacaagaaaatgaacagtttgtgctgactgctgccgagtcaatctcgacaattttcaaacataactcatcatgaacaataacatgtaaacatccatatttctatatgtgaattggcttgtcatatgtggccattgcaacttccttcaatgccttactcattgtacgatgtgcatcgcacactctaccgatgtcctcact

SEQ ID NO: 1697 - DNA, 418 bp, Gossypium hirsutum
  Clone ID: LIB3083-037-Q1-G1-D7
ctgatgcttcaaatgcatggagaactgctgcatgggtcagaattccgtaccctttacagtggggtgtccctatcttccatttccggacgtcggtgatgaggatcattgtgtcacttgttgcatcggtagattcggtcggaacatatcactctgcctctttgctagtcagttcgaagcctccaactcctggagtagttagcagaggcattgctttggaaggtttctgtagcctgcttgctggaatttggggttcgggtactggctcaacaactttgacagagaatacacatacgatacacataacaaagatggcaagccgaatagctttggtatttggggcacttttcttgatcctctcctcacttgtaggaaaagtgggtgcaattcgtgcttcaataccactgtccttggctgctgc

SEQ ID NO: 1698 - DNA, 382 bp, Gossypium hirsutum
  Clone ID: LIB3083-037-Q1-G1-D8
tcgattcacatcggtcaggccggtatccaggtcggaaacgcctgctgggagctttactgcctcgagcatggaatccagcctgatggtcagatgccaagtgacaaaactgtcggaggaggtgatgatgcttttaacacctttttcagtgaaactggtgctgggaagcacgtccctcgtgccgtctttgtggatcttgaacccactgttattgatgaagtgagaactggtgcttaccgccagctcttccacccagaacaactcatcagcggcaaggaagacgcagctaacaactttgcccgtggtcactacactattggcaaggagattgttgacctctgtttggaccgcatcatgaaacttgctgataactgcactggtcctc

SEQ ID NO: 1699 - DNA, 280 bp, Gossypium hirsutum
  Clone ID: LIB3083-037-Q1-G1-E10
gctttttagaatttttcttaatcgaaaatgagagagtgcatttcgatccacatcggtcaggccggtatccacgtcggcaacgcttgctgggagctttactgtctcgagcatggcatccagcctgatggtcacatgccaagtgacaatactgtcggaggaggtgacgatgcttttaacacctttttcagtgcaactggtgccgggaagcaggtccctcgtgccgtcttcgtcgctcttgaacccactgctattgaccaagttagacccggtgcctaccgcc

SEQ ID NO: 1700 - DNA, 355 bp, Gossypium hirsutum
  Clone ID: LIB3083-037-Q1-G1-E11
gcagagtaagcatttgcagagaatgagttcccaatagcacaaactcccagtttcttcctcaagaaatgtcaactcaaaatcagggaagtgcttatagccaaacaacacagccaggtatctatggtcaacaggcacaatcaagtgctaatatgtacagccaaccgacacagccaagtgctaatccatacggccaacctgcacagcctggtgctaacgcatatgaccaagttggacaacctagttctaatgcatatagccaatctgtgcagccgagtgttaacctttatagccaaccgccacagctgggtgctaatccctacagccaacctgcacagtttaactctgggaacctctc

SEQ ID NO: 1701 - DNA, 220 bp, Gossypium hirsutum
  Clone ID: LIB3083-037-Q1-G1-E12
gcagagtacacatttgctgataatcatttcccattaccacaaacgcgtagtttcttcctcacgagttgtcatcctcatgctcacggaagtgcgtgtatccatgcaatatagccaggtatctatggtcaacaggcacaatcagttgctacatatgtacagtcaatcgacatagccatgtgctaatccatacggccaagctgtacatgctgatgctaacgca

SEQ ID NO: 1702 - DNA, 409 bp, Gossypium hirsutum
  Clone ID: LIB3083-037-Q1-G1-E2
gtggagagttcagacaccattgataatgtgaaggctaagatccaagataaggaagggatcccaccggatcagcagaggcttatatttgctggcaaacagcttgaggatggccgcacgctagccgactacaacattcagaaagaatccacccttcacttggttcttcgacttcgtggcggcatgcaaatctttgtcaagactctcactggaaagacaattaccttggaggttgaaagctctgacacaattgataatgtaaaggcaaagatccaagacaaggaatggatcccaccagatcagcagaggcttatctttgccggaaagcagcttgaagatggtcgcaccttacctgattacaatatccacaaagagtccaccctccacctggtacttcgtcttcaaagtggca

SEQ ID NO: 1703 - DNA, 343 bp, Gossypium hirsutum
  Clone ID: LIB3083-037-Q1-G1-E4
attacttgactgtcacaattggtatggttagaattgttaaagcacttctttgggttggttttgcgttgctttttagaggtgtaagaaggaacatcggggatgagatcatcgccatggaagaggaagatcaagacaaggtataaacataaaactcgagatgagagatttgaattaaatttgttaaatttctttttcctaaaaggataaatcaattgaattaagacacagatgtcaagttgaagctgtcttgattctccttttctgttgtcgtctctttttcccaccaacacctgggttcgtttactgctgtcggatcaacggtgactttccccttagaccgacc

SEQ ID NO: 1704 - DNA, 246 bp, Gossypium hirsutum
  Clone ID: LIB3083-037-Q1-G1-E5
cacgagattttgtgcctatttacctcctcatcctcgcttttttttgtcctgctggtgcccttgcgttggccgttcttcatatctacacgtcatctttgggtcttgggcctctccctatttttcagagcctcctcctcctgcatcctcttcatggttctggtttatgcccttctgtcgttcccgtctcttgttctctccctccgtttcctctattctctctttccatccggtatcgctctccctctt

SEQ ID NO: 1705 - DNA, 403 bp, Gossypium hirsutum
  Clone ID: LIB3083-037-Q1-G1-E7
aaagcagagcagagatttataataattatgaaatgatgaaatattctgtacatatagaactaaagagagaactataggctagaaaatcagtttaaattcccccttgaataaatacattcattacccttacacttttcacatgtaagaaaaataacagcttgtatcatgatcactcagcatctgcttcgtaaactcaccaaaaatattgccaactgcaaaccaatttagcacccaacaccgacaaatgcagcagatggacactttacacaagcaaagtaaaaggcctatgaatctcaattcaacatttagttacaaacttcgaagtgtgtccactcgatcgatgacatccaatgccttgatccggttgataacaaagtcaatgaaaggaactgaggatagcctc

SEQ ID NO: 1706 - DNA, 264 bp, Gossypium hirsutum
  Clone ID: LIB3083-037-Q1-G1-E8
tatggctcaggccactggaaaagtgtgtgtgacaggagccggcggctaccttggctcttgggttgtcaagcatcttctctccaacaactaggggttcgagggcaccgttagacaacctggggatgccaaatatgcccatttcaatcaacttgacagagcatctcacaacctccacctcttcaaggctgatgttctggattacgattctctttgttccgccactacaggctgcaccggtgtcttcaatgttgcctctcccgttcc

SEQ ID NO: 1707 - DNA, 297 bp, Gossypium hirsutum
  Clone ID: LIB3083-037-Q1-G1-E9
gtgcataaatctttgcatacttagaaagcatcaggtttcaaagcatataacaccatttcaattactaaaatacttgcactattaaaaacaaaaaatacaggactaccaaaacacaacaatgttttgagaatcttactctcaaatgttctttctttttttttttaaccacagtacattccatcgccaaaaaccaccgtctgtgtctcggacattcggcttttttttatcattgctgagcgcattgtactctctgcgtaccaccattcatgtcctcatcgtcatcataagcttcttgtt

SEQ ID NO: 1708 - DNA, 318 bp, Gossypium hirsutum
  Clone ID: LIB3083-037-Q1-G1-F10
gctgacgaagagatacgctactgcctggaaggcagtgggtattttgatgttagggacaaggatgaccgatggattcggatttggatcaaaggaggagatcttattatattgcctgctggaatctaccatcggttcactctcgacaccagcaactatgtcaagttgatgaggttgtttttgggagaaccggtttggacagcgtataatcggccccaggaggaccaccctgcaaggaaagagtacattaaaagcttgactgagaaagtttgggtgccattagctgctcattaaagcctattgttacattaaatttcccct

SEQ ID NO: 1709 - DNA, 319 bp, Gossypium hirsutum
  Clone ID: LIB3083-037-Q1-G1-F11
ggattcccggaatgctggtgttctgcacgtggctccccgtgcgctcctcttctgcctggcttgcggtgggtactttggtgttcgggatctggctggccgctggcttcggctttggttccttggcggcgatcttattatcttgcctgctggtttctaccatcggttcactctcgtcgccagcaactatgtcaagttgatgaggttgtttttgggagaatcggtttggacagtgtataatcgtgccccaggaggactaccctgcaaggaacacctccattaacggcttgactgagaaagttggcgtgcccttacctgctca

SEQ ID NO: 1710 - DNA, 295 bp, Gossypium hirsutum
  Clone ID: LIB3083-037-Q1-G1-F12
tagccccagaccacccaaaatgccagaagagcaagagccaaggttcatccctgaaacccaaaatggttatggcctttactgccacgagtcatgctcaggctcatgctcaggctcaagccggcccagtttcaccaccatatgaaatcctatgcaccctatgtcacccctgttagattccaccctgattaaccctataccagcatccccgaatccaccaacactaaagacacttactacctacctcaccaatgcttacaactcctctactcaacaaaactttggctacggcattttc

SEQ ID NO: 1711 - DNA, 369 bp, Gossypium hirsutum
  Clone ID: LIB3083-037-Q1-G1-F2
gaagaagccatattagaggcagaggaaaaaggtgttagagtgttgagtctaggcctcatgaaccaggctgaagagctgaacatgtatggtggggtgtggagacgggaacatccccagcttaaagtgaagttggtacatgggagtagcttggcagttgcagttgtgttaaatagcatacccaagggaactacacaagtagtccttacaggcaagctgactaaagttgcttgtgctcttgcctttacgctatgccaaaagcgcattcaagtctctgtattacctgaggatgaatacgacaagcctgatacattacctggcagcaagtctgacggtcaattggttctctcacaaagttacacttgtgagaca

SEQ ID NO: 1712 - DNA, 426 bp, Gossypium hirsutum
  Clone ID: LIB3083-037-Q1-G1-F6
agtttctgatttctctggtgaagcaaagaggtagaagaaaaagagagatccaaagatggcaccagaagcagaagacgagatcaaggacgagaaaaacccacgacctctcgacgaagatgatatcgcccttctcaaaacctatggattaggaccttattcaaccagcataaagaaagttgaaaaggagatcaaggagatggcaaagaaagtaaacgatttatgtggcatcaaggagtcagacactgggttagctgcacccagccagtgggaccttgtctctgacaagcaaatgatgcaggaggagcaaccacttcaggtggcaagatgcacaaagataattaatccacacacagaagatgccaagtatgttatcaatgttaagcaaattgctaagtttgttgttgggctgggcgacaaagtttcccc

SEQ ID NO: 1713 - DNA, 172 bp, Gossypium hirsutum
  Clone ID: LIB3083-037-Q1-G1-H10
cagaattttggggagccatttttccttgttattcatgaaactgagggattacctgaagtttcagtgcgagttcacaaaagatttcaagttccatccggggaatttgcagagtgtaagtttgcacttcgatgactgcgtcgtcccaactatcatcaggacacttctattgcgt

SEQ ID NO: 1714 - DNA, 446 bp, Gossypium hirsutum
  unsure (1)..(446): unsure at all n locations; Clone ID: LIB3083-040-Q1-G1-A1
atcaagtagaaaatcaataatggagaaggtggaaaaatggatactagctcgtgatgaggagcggtggctggaagaatatagcatggatgagaatagatattcggtcagcaggggcgctcacagaaacctgagacgtgcagaaagggcccgagtaacggtcaacaaaatcccagcattggtggattcactcatggcaaaaaccaagagttgggaagaagaaagaaggaaagttttcctgtatgatgaggtacctcttttggcaatgttggaagagtacaacctgtctaggcaagaaagagaagaagaaaagcaaaggcaacggatgaagaaggtccaaagccaggttgtagttgagcaagaaaacttcactacatctaggccatccnacagtaatcggcgcctttcaaacaagagcttaaatggaggttttggcaatgcaagccctt

SEQ ID NO: 1715 - DNA, 397 bp, Gossypium hirsutum
  Clone ID: LIB3083-040-Q1-G1-A2
agaatctgcattgggcttaacaaagcgtcttgcccagacagctcaggagacctttggtgattttgaagaagcagttgaaaaagatgcgacaaaaactgctgtcctggatggaactgtccatcctttaaccagctatgtgatcaattatgtaaagtttttatttgactaccaatcaacactgacacaacttttccaggaatttgaaactggtgatggtacagtatctcagttggcttctgtaacaatgagaattatgcaggctcttcaaacaaatttggatggaaaatccaaacagtatagagatcctgctttgactcacttatttctgatgaataacattcactatatggtgagatctgtgcgcaggtctgaaaccaaagacctgttaggggatgat

SEQ ID NO: 1716 - DNA, 442 bp, Gossypium hirsutum
  Clone ID: LIB3083-040-Q1-G1-A3
caggaaccaccgtggtctgaggcactactggggccttcgtgtacgtggtcagcacaccaagactactggtcgccgaggaaagactgttggtgtgtctaagaagcgttgaattcttcataacataatctatagtatgacgaggcagatatttatttctttgcttttaagcgatgtttgcatcaaagacaaaattttggatttggttttgttgttttagttggttttttaaaccttgcagacaagtagtgtttctcttttaatcgattgtttgatctttttatcaattgagattaaggatacctgctttgatagataaagattacacatgttttcttcacctcaagtccaagtcctgaagaattggtggcgtccatgaccagattgggttattcacatatgggtattaacctcacatggttgttcatgttgggtgctcatattt

SEQ ID NO: 1717 - DNA, 429 bp, Gossypium hirsutum
  Clone ID: LIB3083-040-Q1-G1-A4
tgaactacctcctaaaatacccagtatctcccaaaattggccttcttttcctcatgacaagatgccttccatggcaaacttctttccctccaccatcaccaaccacccttcatgggtggacgagttcctcgacttctcctccgcccgtcgcggcgctcaccgtcgttccatgagcgactccatagccttccttgaacaaccattggtggaggaagaatgcagggactccaatgccacgcccatgatgactaccacgacggtatcaaatttacatatgttcgatcgtcttgaccatgaccagctcatgtcgttattctccgacgatgtcgccgtcaccatggcagcgcctgctccaacggtatccttcgtccaatccatcgacgccgacgtctagcaacattgatgatgaaaatagcaccctcaacggat

SEQ ID NO: 1718 - DNA, 439 bp, Gossypium hirsutum
  Clone ID: LIB3083-040-Q1-G1-A5
gacccgcagcctcatcatctgaccaagtgggtggcttctattttattccgtctggtacatcaggccgtaactttcaagaggcagaaaatcctttgtcaactcggttccatccttgggaaagagatcatctttctccattttcgctaaaccaggttgacagagaatcgggttggaatacattccatcaatctgctactggtgcaccagatcccggcataagatccagcagtttccgccagaagtacgggtctgagaggatgcaatcacaacatcattcgtaccttatatcttcgccctttaaacccttattgggtgaagcgaactaccctactatgaatgaaaccaaacatgttttatgtatgctttgagagacgatatatggtgcttgagactgtcaatcttggcatgctggcaaactgagggtggccccgaatagaaa

SEQ ID NO: 1719 - DNA, 342 bp, Gossypium hirsutum
  Clone ID: LIB3083-040-Q1-G1-A6
ctgaggagtgtgagtgatgctgatatccgaaagtaccaagcattcgcacaaacgttgcagcaatcgagggggtttggaagcgaattcaagtttgcagaaaccggttccagggctgcaacatctgatccttttgcaactacagcaggtggagctgatgaagatgatctttacagttaaaattgctttcatttgagggtttcttttttaaaagaattttaatttaatccactatggtaacaattattgaactaaacgagcctttgcttgtggcttacgcatcggagtccaaaataacagtttttgttgtttttggaactgagaattttacaattgtctattttt

SEQ ID NO: 1720 - DNA, 298 bp, Gossypium hirsutum
  Clone ID: LIB3083-040-Q1-G1-B1
tgctaactgctacaactctgatcatttgaagaagcctgataattgggcgttggttgagaaggccacgtacttctacattgctggatttttccttactgtagctccggaatccatacagcttgttgctgaacacgcacgccgcaaaaaacaaggtgttctcacctcatctttctgctccatttatttgcgagttcttcaatggtgcacaagacaaaccactatcgtatatggactttgtctttggcaactatactgaagcatgaactttctcaaaggttcacggccgggacactgatca

SEQ ID NO: 1721 - DNA, 381 bp, Gossypium hirsutum
  Clone ID: LIB3083-040-Q1-G1-B3
gaacgtcttgcaacaagattggctgctcttaggattgaactttgcccaggatatatgagtgagggttgcttttggaagatctattttgtacgtcttcgtcggcgactaaataaacaagatgcagaacttctgtctacttcccaaatagttgaagcaagagcaatgttaatgcaagggatacacaaccgatctaaggctaagatggaagatcattctgaaagtggcacttcaaatataaaggctgatttaccacatgaagagtttccttctgtgccttctcccgctcaatctaagctaacatcatttaatgaatctcgaaatgacgcagccgatactgctgtagctgttgactcttcaacacaaaaaccacctagtccagac

SEQ ID NO: 1722 - DNA, 434 bp, Gossypium hirsutum
  Clone ID: LIB3083-040-Q1-G1-B4
atttttaaagacatgggttaatttgcctatggctgttgggttcatgttgttatacacaaagttggccaatgagttgtcaaagaaggctcttttcgacagtgttattcttccttttatagccttttttggtgcatttgggtttccattgtatcctctcagcaatcacatccaccctgaagcacttgctgataagcttcttgcggtgcctggacccagatttcttggtcctcttgctattatgaggatatggagtttctgtttgttccatgtcacggctgaactttggggcagcgtggtcatttctgttttattttgggggtttgccaatcagataactactgtagaggaagcaacaagattctaccctctgttcggtcctgcgaccaaaaaatccctcaattctctcggtaaaaatgttaacatccttctccaac

SEQ ID NO: 1723 - DNA, 157 bp, Gossypium hirsutum
  Clone ID: LIB3083-040-Q1-G1-B5
aatgtccacaaataatctcttcttggggtggattccgacaagttaatcaactgttggacatccacattgggttggggactcacatctttacgggaacctacatcacaaagagagtttcacctgtttcggccattcaatgattttacgacgaaacatt

SEQ ID NO: 1724 - DNA, 243 bp, Gossypium hirsutum
  Clone ID: LIB3083-040-Q1-G1-C1
cagcgcatgcacagagcacattgtatggtttgcatgcacctgatactacgatgtttaccgcgcgaccccatttcacaccgctgtaccaactggctgcggaagcgaatacgacagaactcattgctaggttgagacaactgcatacaccgactagggcatgtggcacccgtggtgacattgacgaacctgtccatcgatacactccatcagggtgtacacggtgtacggtgggggaacggtatt

SEQ ID NO: 1725 - DNA, 433 bp, Gossypium hirsutum
  Clone ID: LIB3083-040-Q1-G1-C4
gtggcaacagcaaccgaatgtagaccatatcacagggaataaaatccggaatagttttatgttttcgagggggaagcttcctggtcctcttaggcaacttcaaatggatttgagaaaattgatgcttccttataccgctctcaaactcaaggagaagaaaaggaacaatttgaaagactttttgaatgttgcagggccaatgggtgtaacccatttcctcgttttatctaaaatcaaaacttcgcctgtccttagggttgcaaagacccctcaaggccctactctcaattgccccctcgttgcccgcatgatcttttcaagaatcctcctttgattgttctgtttggttttgcagcagcagatgaacaattaacggctcacactatggtgttaaaggacatctttccggaaattgatatcaacactgttaaac

SEQ ID NO: 1726 - DNA, 236 bp, Gossypium hirsutum
  Clone ID: LIB3083-040-Q1-G1-C5
cccaaatacaccaaacatgaacaacaccatctctttaactctgcttcacattgcattttgcttcactttagtttcattcactcttatttcagccgtggaggtgcacggaactggtgccaatatggtcgaaacaacctgccaaaagacacccttttacaatctacgcgtctcggctcttaagtccgatcctcgaagttccggtgcccatatagccgggctagcccaaatcggaactg

SEQ ID NO: 1727 - DNA, 192 bp, Gossypium hirsutum
  Clone ID: LIB3083-040-Q1-G1-D1
tcctccggaatgtacgaattctgcaacactcggtcccggctctccttgtcttaaaccgcttctgcaatccgccattttcatgtatacacggaataccccgttttgtaaccactactgtagagacgaccagatggggctggtcgaaccaagagacaacgcgtggaagtcgcctatatctcttagaacgtcaca

SEQ ID NO: 1728 - DNA, 379 bp, Gossypium hirsutum
  Clone ID: LIB3083-040-Q1-G1-D2
cacgtttatgcaccagagttgttggtaccctgttcggatatcggcgtggtcacgtcgactttgcatttcaagaaaaagcagcagtaaatccagcattttgaatccaccttgcagcaccgactagtgttttagttcgggaaagtggcttctggattgggtcgaattgccttacagtgtgaaaagaatatggggaagaaaggggtgaacttgctgaatgagcctgtttgggggacttactgcactggaaataaatgtgggttcgcaatgaggcgctagtgcggatcccatgattggcacctgttacaggcggtggagccaatttcattgggtgcgggtgtgctaccaggacattgcaatgagactggacctgggtccgaag

SEQ ID NO: 1729 - DNA, 422 bp, Gossypium hirsutum
  Clone ID: LIB3083-040-Q1-G1-D4
cttcagtctctttgttctctgtcgccgctacccatcacttctaaaacccttaagctatttcccgcctcaccggccaccgctgccgttgctcctcacctgcgccttcataagtcaacgtcttttattgggaagatgatggcggaagaggaaggacagtcattgccgtacgtatcagagatagtattgaagaaaaggataataagagatgagttagcgattacgaggaggacccagttggagttgggtaaatacggagccaataagagcaagaagcaatccgatgtttctgacatcaaaagacctgaacaattaattaaagagttcagagacaatgaattggacttgatcagaacgaaacaaacggcaaagaggccaaaatcaatgactccaacgataaaatcaaagttgcctttcattatccg

SEQ ID NO: 1730 - DNA, 419 bp, Gossypium hirsutum
  Clone ID: LIB3083-040-Q1-G1-D5
ggaatgctgtgaattgctgaatgaggtggtggatgacagtgaccctgacctggatgaacctcaaattcagcacctcttgcagtcggttgaagctattagggaagattatcctaatgaagattggctgcatttgactgccctcattcatgatcttgggaaggttcttcttctacctaaatttggagggcttccacaatgggctgttgttggagacacatttccgcttgggtgtgcttttgatgacgccaatattcatcacacgtatttcaaggaaaacccagattacagcactccctcttataacactatgaatcggcatttactgggatggctgtcgccctgaaaatgttacaatttcatgggggcatgatgattacatgtttttggtagccaaggaaaatgaactaatctaacttcag

SEQ ID NO: 1731 - DNA, 220 bp, Gossypium hirsutum
  Clone ID: LIB3083-040-Q1-G1-D6
ctcaaagcgacaggtgtcccaagttgaatcgaaccttggaagaaatgactactgccttccaagccaaagaaaagcacctttcatcttatacggagcaggggaaggaaaactttgcgaacttactcttacgtgacgatatgttcggtggagggaagggagtttcaccagcttcagcacggtctaacggccattcacaagcttgctgctcccgtgtttggtg

SEQ ID NO: 1732 - DNA, 337 bp, Gossypium hirsutum
  Clone ID: LIB3083-040-Q1-G1-E2
ctcatgtcgctgaattccgccagctgatgagtgtgcagagcggccagggtttaagcagaacaatgttcttgggggaaaaaaaaattctgtttcccaggtgtttgatgatgaccctctcggcagtgaatttgtgcaccacatcggcacacgggcacattacatagaccacacaccaggtatcatctgcctcagcagcaccggaaacgacagtggtatacacacatatcaatgatgtacacacagtggtaggtctacaccagaagttcgtaggcaactacgagtcaactaaggttatcccacacgttccaagacgacaaacatacaacacggttgaacg

SEQ ID NO: 1733 - DNA, 437 bp, Gossypium hirsutum
  Clone ID: LIB3083-040-Q1-G1-E3
cttctgctgaaatgctttgctttctagtttctagacagaaattcgatcagctctagtagtttaataagttatataaagaagaaagatctccttgaattttatttttgaagtaagaaggtgaatatgggtgcttcggaggagaacagtgccttgttcccaatctttgtgttcacgataatggctctgccattagtgccagacactatagttaagatattaaacacattctcgaacaaggcaatgactatccattgccagtgttctgtgtgttctccgtctgggaagtatacgaaatcaattttcaaacggatctcgaacttctcaagttgtagtaatctgacccctgtgcttccctggattgtcatggcggtgctgatatacgatatcaagcatacaagttatgaggttaaagtatttgagccaatcagtattcttgg

SEQ ID NO: 1734 - DNA, 346 bp, Gossypium hirsutum
  Clone ID: LIB3083-040-Q1-G1-E4
cagatgaacaatggggttggtaccagcctccaaagcaatgaagttcaacatggaaatacaaataatatttactgctctaccaaaaataacggtaataaggtgtgctgagagccaatttgtttttgagtatgtatgtttgtacgtatgtaatcccgtcccgttgcaggtatgtctatggttttcagtttcacgtttatatgtatgtttgcatgtacgtaatccctttgggggctatgtcaatggcattgaatctcgtttatatgtatattctacattacattttggctgacctgtttggaatgtaagttgcgaatgcatgttacctaaaaaaaaaaaaacaaccgca

SEQ ID NO: 1735 - DNA, 415 bp, Gossypium hirsutum
  Clone ID: LIB3083-040-Q1-G1-E5
ctgggccacactccattattggaagagctgtcgttgtccatgctgatccggatgaccttggcaagggggggcatgagcttagcaaaagcaccggaaatgctggtggtagagtaccttgcggtattatcggtctgcaagggtgaaatttcagtcctggtgagcgggaataatacattgagtggagatgcaatggcctaagagcaaactctgtatgtgaactacgaagtttgtgaataaaagtaaaacaacccttgttttgtgttggttttcagactcaaaggagtgtggtctcttaaccggatccttaacccatttatagtaagctgtcttttgctgacatgcttaactttggtgctttacttcctggtaagggtcccatgattcatgaatgcttcaagccactttcatgggtaat

SEQ ID NO: 1736 - DNA, 450 bp, Gossypium hirsutum
  unsure (1)..(450): unsure at all n locations; Clone ID: LIB3083-040-Q1-G1-F2
ataagcattctgaatctggctctcatcggtcaattgatgaatccaggcatcaaaatgaatcacttgcgcatacaaacatgataggaagagatttgggtctgaatcttactgatgatattgaactgttgggattcggaaatgcagattcagaggagagattaagtgatatatctgatggtgatctatcaatgggggctacagatactgatggctcaatctgtagtgccgtggagtttactcttttcccggaagtttcaaaacctcctgataaaccagagaaggttgagaaagcaagcaaatctgaaaaatctgataatattgggaagtctatcgccccatcactcccgtctaagcttccaaagctatctcagaaagtgttgcanacaaaacctactgctcgattgtcactgtcccggagcacctccaagatccatcaagttctaagaaaat

SEQ ID NO: 1737 - DNA, 439 bp, Gossypium hirsutum
  Clone ID: LIB3083-040-Q1-G1-F3
tcttgagacatcagcgctggaagcaaccaacattgagaaggcattccaaactatattgactgagatctaccatatcataagcaaaaaggcattggcagcccaggaagcagctgctagtaccgcaattcccggccaaggaactaccattaatgtcactgatacatcaggaaacactaagagaggatgctgttctacttagaaaggtaataggttacatttgatgctgttctacttaaaaaggtgataggttacatttgagaaggtaaaaaatatttgctaggaagtacgcccttttcatgtctttgtcaatttttggctgagagagagacatgtaaaatacatatatatattttacttgaattgtgataataagcttgtgatgttttaaacaaccataaattgttggtacaaatagaatggaacgcctggttttacttat

SEQ ID NO: 1738 - DNA, 409 bp, Gossypium hirsutum
  unsure (1)..(409): unsure at all n locations; Clone ID: LIB3083-040-Q1-G1-F4
ggangataacagcatgtataccgtgttattattgtttatcacaacggcatttggcaacaggctcccatatgccatacaacaacatttaacagccaaaatctgatgaatgttataaagaagataactgggttttgcatatattacccactagcattctcaccggaggcatcattcgcctcattctcaccatgctgtagttccgcaatttcagcctgcgctctctccatgatctgcctcttctgcatttccaactccctgtgaaaatccattctcatcttctccaattccaacatctgctgccttttactattctcaattttttcatatatgtcgctgaatttctggatagaatctgcaagcaatttgactgaagaatcgtcgccagattgcctcccaaatctcctctttt

SEQ ID NO: 1739 - DNA, 355 bp, Gossypium hirsutum
  unsure (1)..(355): unsure at all n locations; Clone ID: LIB3083-040-Q1-G1-F5
cttccctgactgatgcgacattcatcaagggtcccagcctgaacggtttgactcttgctgttgaaaaacccggcttcttcatcatcgactacgatgtcgccaaaaaggatttttggtttcagttcatgaactcagttagggttgcggagaagccgttgaagcttacttacattcacggcagaggggacaaccggaccgtgttggacgggacactcaccttanactctgccaacaaggtgtcggctaattacatgtttggtacgaggaactgtaaggtcaagtacagttactcgcacggaggggctacgacttttgagccatgctatgatttcgggaaaaatgcgtgggattttgc

SEQ ID NO: 1740 - DNA, 457 bp, Gossypium hirsutum
  Clone ID: LIB3083-040-Q1-G1-F6
cccttttgtttacagggctatagtccagtacaagagcggaaaagaagatcacgttttagcaacatggttcaacgagtcaccctcggcttcttacatgagactccccaccggagattctgatcgcttccaaatatccgatgatcgaatctttgaatcagataattatgggaagttttccacttcatcatcatcatcatcatcatcttccatggttgctccttctgctagtactaagattattttatcaaccggagttcaatcccctgctgtctgtcgtttgactcctcgccgcgtcgttacatgaaaccatcgcaatacttatgggttaatctagggtctgggaatttcatgtatgtagaaaaaaaacaggtatttccgtttacgttaatcattacgtatgggtacttaataagcgtatgaaaaatcccaaatggggatgcataccctcaaatgttag

SEQ ID NO: 1741 - DNA, 391 bp, Gossypium hirsutum
  Clone ID: LIB3083-040-Q1-G1-F7
tctaagtcggcggaaacttacgaatatcgtgtcggtgaaacatgcaacgtaagaccagagaaagctccagcagataaggaagccaaaccacagcaccagaggaaccgatccatcactctcggatcagctaaagaattcaattttgacaaccccgatggaggtgatgtccataacaagcccattgttagttccgattggtgggccaacgagaaagtagccggaaacgacgatggcattcccaagaattggtcctttttccccatgctgcaacctggtgtaagttaaaaaactggtaagcattttagtggggtgccttctgattttccacattattttaggaacttaggtgtggcttgggttggggattcaaacaatttggtaacaacaacag

SEQ ID NO: 1742 - DNA, 195 bp, Gossypium hirsutum
  Clone ID: LIB3083-040-Q1-G1-G1
tcgagttttttttttttttttttttaagttgaattttagaaaaaataataatcaccttaattttccattgcctcatcttcataatcttcatcattgtgagctgggggagcatcttgatattgctgatactccgaaaccatatcattcatgttactttccgcttccgtaaactccatttcatccattccttcccct

SEQ ID NO: 1743 - DNA, 432 bp, Gossypium hirsutum
  Clone ID: LIB3083-040-Q1-G1-G2
ggatattccttcaccaccacagccgaacgggaaattgtgagagatgttaaggaaaagctgtcttacattgcccttgactatgaacaggagctagagacctcaaaaacaagttcatcagtagagaagagctatgagttacctgatggtcaggttattaccattggtgctgaacgtttcagatgccccgaagtgcttttccaaccatccttgattggtatggaagctgcaggcatccatgagactacatacaattcaataatgaagtgtgatgtggatatcaggaaggacttgtatggtaacattgtccttagtggtggtacaaccatgttcccgggtattgcggacagaatgagcaaggagctttctgcactcgctcctagcagcatgaagatcaaggttgtcgctccacctgagcgaaagtacagtgtctgg

SEQ ID NO: 1744 - DNA, 454 bp, Gossypium hirsutum
  Clone ID: LIB3083-040-Q1-G1-G3
caaaaccaaacttcaaacaaaagggaattttcttgtcataattttctgaggaattcatcgatggcaaccaaagtgtatattgtatactattccatgtatggacatgtggaaaaactagcagaggagataaagaaaggggcggcatctgttgaaggtgttgaagcgaaactatggcaggtccctgagactctgtcagatgagattcttggaaagatgagtgcaccaccaaaaagtgatgtaccgatcattacaccacatgaccttcctgaggctgatgggtttatttttggcttcccaacaagatttggcatgatgtctgcccaattcaaagcatttatggatgcaactggtggtctatggagaactcagcaacttgctggaaaacctgctgggatattctatagcactggatctcaaggtggcggacaagaaactacaccgttgactgcaatca

SEQ ID NO: 1745 - DNA, 245 bp, Gossypium hirsutum
  unsure (1)..(245): unsure at all n locations; Clone ID: LIB3083-040-Q1-G1-G4
gtggccactgtttcttcttcttcttcttcccagaaagccatataattttcatcaaaggaagacagtagagagaaagagaggacataattagtgattaggagaactatgatttattttttattttttttacatgtttacttgtgtgttgatttgaagattaatttattctaagttgaagatatatatatatcatttttcattttcattttcaaannnngnnaacnngggggcgcaaaatcacggtc

SEQ ID NO: 1746 - DNA, 346 bp, Gossypium hirsutum
  Clone ID: LIB3083-040-Q1-G1-G5
tcgacgtcatccttgaaaaaaaaaggatcagtgttgctttctgctcgtgtaataggcggggtttggttagtgccgcttttctgtggattactatgagcttcaccggtccttcggttggccctggtggtagaactgctagaagggcacttgagtttggaagaacctatgtggtcaggccaaaaggtacgcaccaagctaccatagtttggctacatggtcttggtgataatggttcgagctggtcccatctcctggagacgctccctcttccaaatactaaatggatatgtccaactgcgcctactcaaccaataagcatattggtggctttccaccaattgcttgg

SEQ ID NO: 1747 - DNA, 304 bp, Gossypium hirsutum
  Clone ID: LIB3083-040-Q1-G1-G6
gtcctctcacatccactcagatctcgaatcgtctcattggcaatctcaaaaatacacatcatgtgacataaatcttttgcccccactggaatagctttcgccgcccacataactggtgccgtgaattcattcaacggtcatcaatgggttcatctggtgagaattcacatcatctcatcatagagaacattttcccatttccacacaattaacagccctatcagaacactagccggaaatagcagcaacggttagttccctatcatcgtcacaacttcttcaaacacattggtttcaaacaagg

SEQ ID NO: 1748 - DNA, 446 bp, Gossypium hirsutum
  Clone ID: LIB3083-040-Q1-G1-G7
tggaaactttgttgttcaagcattaatttcccatgcaagaacaaaagatcaaatggagctgatctgggaagagcttgggttgaaatttgcagatcttttcggaatggggagatcaggagttattgcttcccttattgctgcttgtcaaaggcttcaaactcatgaatataagtgttgcgaggcacttgctactgctgttggttcaaaaaatgagacttccaagttcattgttcctcggatactgtttcttgagagttacttcagctatgaagataagtctagttggagctggcctggcggagctaagatgcatgttatgggttctttgattctgcacgctatttttaaattccaaagtgaatggatacagccttatattctgagtattacatccatggacgctgagcatgttcttgaggcacctcaagattctcgagggggggccc

SEQ ID NO: 1749 - DNA, 201 bp, Gossypium hirsutum
  Clone ID: LIB3083-040-Q1-G1-H10
gatccaaaaactgtcccaccaaagcgcacttacattccaccacagcaaacgccttacaatcccgataagacccctgagtttgtcatggggatgggacaggttcttgttcccctcttgatcctgggtttggctattgccgtacgtcactataccaagaaagagtagcttattactatccatgagtttacctgttacgaggga

SEQ ID NO: 1750 - DNA, 440 bp, Gossypium hirsutum
  unsure (1)..(440): unsure at all n locations; Clone ID: LIB3083-040-Q1-G1-H2
accatatagaaattaaattgaaccaacaaaatcataggagactttttacaaacaagataaatcccttttagaatcacagcaaatcaacagtagtggcaaaaagggaaaataaaataataagaaaggtttgtaaaacaccatttagcactccacgccacattgtttaagaactggacctgtttgtttgggcaagaagggatcgatccgtacccaaaccagtgagaaaatcgatgccaaaagtatggaccaaagcacaacaatggtgggcgtcctgttttgtctccccatcaaacctttgaggaatgggtaaagatgaagaatgacccagaatgcgaagaacagtttgccgaacaatggaccccatgaaccatagccgttgttgattgcgtctgaaactccggccacgactccgnacatgttcagtattatcagagttgtgg

SEQ ID NO: 1751 - DNA, 427 bp, Gossypium hirsutum
  unsure (1)..(427): unsure at all n locations; Clone ID: LIB3083-040-Q1-G1-H4
ccaacattgacttcaagcaaatggtggcctggtggattgggtaaagtatccacacatgctgtggtctatgcacgtcttataacaggtgctcaagaccatggagtgcatggttttattgtccagctgcgtagtttggatgatcactcacctcttccaggcataacagtaggtgatattggaatgaaatttggaagtggggcatataacagcatggacaatggtcttctgagatttgatcatgtgcgcattccaaggaaccaaatgctaatgcgtgtttcacaggttacaagagaagggaaatttgtgcaatctgatgtgcctcgccagctggtttatggcaccatggtctatgtccgacanacaattgtatctgatgcttcttgtgctttagctagagcagtttgtattgcaacaaggtacagtgctg

SEQ ID NO: 1752 - DNA, 425 bp, Gossypium hirsutum
  unsure (1)..(425): unsure at all n locations; Clone ID: LIB3083-040-Q1-G1-H5
gaaatggctacatctcagctaacagcgtcgccagtgacagcatcagctaggaacttggcttcattacaagggcttaagctgtccactatcaaattctcttccattggaacattaaagcctggggctttgaccagcaggtccttcaaaggtttggttgttaaagcagctaccgttgttgcccctaagtacacttcagttaagcccttgggtgacagagtgttggtgaagatcaaagaaacagaggagaagactgagggtggcattttgcttccaacaactgctcaatcaaagcctcaaggangtgangtggttgctgttggtgaagggaanacaattgggaatacgaaatcggaaagttctgtgaagactggtgctcaggtcatatattccaagtatactgggatggaggtcgagttcaatggtgc

SEQ ID NO: 1753 - DNA, 327 bp, Gossypium hirsutum
  Clone ID: LIB3083-040-Q1-G1-H6
caatcagaataaatcatcattacttgtatgtctcattcattgactggtaaagaacgaagtttaccgattcaaacaaaaatggaaggaaagaaaaagaaaggggcaagagatgagggaaaaaggtagggtaacaggggggttgaaacacatgtaacaacaatttctcaacgtgtttgatccaattcaatttagtataaaaataacattaagaaccaaagcatgctaaatttcctatagccacctacttaatgtactgagaaaccacttgaaaccatctccatagaccattttacgaacaatgctacacatgaatacctcgaggggggg

SEQ ID NO: 1754 - DNA, 448 bp, Gossypium hirsutum
  Clone ID: LIB3083-040-Q1-G1-H7
caaagaattaaagttggaaaacgaaaacatggcaagggatctttctcaatgcactgaaaatctggagatgaccaagtctcagttacacgaaaccgagcagcttctagcagaagctaaatctcaattggcttatgctcaaaggtcaaacagcttggctgagacacagctcaagtgcatgacagaatcttatagatcacttgaaacacgtgctgaagagttagagaccgaggtgaaccgtctccaggtaaaaatagaagctcttgaaaatgatcttcaagatgaaaagagaagtcatcaagatgcttttgcccgatgtaaggaactagaagagcaattgcaaaggaatgagacctgttctgtatgttcttcagcagccaagaatgacctcaagaacaagcaggagaaagaattaccagagaaactagcggaatgtcaagaaaccatattc

SEQ ID NO: 1755 - DNA, 283 bp, Gossypium hirsutum
  Clone ID: LIB3083-040-Q1-G1-H9
gcataccggtctgcatagacacgagttccgaccccgcttccgcacaattcatttcctaactcccatccgtgaatggtatacttcttgtcaacagtgtagtgcatacaagattcggcattggtgtgtctccaagcacctacggctgaaccatcaggggctcacgcctcgaccagcatgtgcatttaacccaaaaataaccttagctcctgctttttgaaaaaagggattaaggtcatcccagctactcagcggcaaacatccttgtgtcaaaccaaacagtctc

SEQ ID NO: 1756 - DNA, 191 bp, Gossypium hirsutum
  Clone ID: LIB3083-041-Q1-G1-A11
ttatcactggagtggttgatatcttcacggagatatttttctccagtattccatcatccatgaacaacttcacggaatacgtgctcagggaagcggtgcgaccatcacgaccagctggtttcatcagtctacttatgtgcaatgctgtggaccatacagaactgggtccgaacacagtgtggggtgatatt

SEQ ID NO: 1757 - DNA, 135 bp, Gossypium hirsutum
  Clone ID: LIB3083-041-Q1-G1-B9
ttcatcatcctcgtctgccatcatcatccactcaaaaggggcatgggttccgtctatcataccgattcacctggaactccgcccgtcaattgtctcactctactctctcacccatgcgttctttttcctattccc

SEQ ID NO: 1758 - DNA, 342 bp, Gossypium hirsutum
  Clone ID: LIB3083-041-Q1-G1-C12
tttacagggagaactgcctgctggtgcattttttaacaccatatcgcccacggctgtctctgggaatccatcactttgtggctctgcagttaacaaatcttgccctgctgttcttcctaaacccattgtgttaaatcctaactcctcttctgattccatttccgaggaactgcctacgactgtcggtcataacaggataattctcactatctctgccgtaattgctattggtgcatctgctgtaaatgttgttggagtcattgccatcactgttcttaatctccgtgtcacgtcatcaacattccggtctgcagccgcccttactttttccgccggggatta

SEQ ID NO: 1759 - DNA, 185 bp, Gossypium hirsutum
  Clone ID: LIB3083-041-Q1-G1-D10
caaccacgcattttccttacaactttgttcttcttgtggttaatcgatatcgctagctcaatgtcccttaagcttgtatgtctggccgtgttgtgcatggtggtgggtgtaccccttgcctcaaggggctgtaacctgtggtcatctcacaagctccttcgcaccctggcattggctacctcatc

SEQ ID NO: 1760 - DNA, 267 bp, Gossypium hirsutum
  Clone ID: LIB3083-041-Q1-G1-D12
cggaatcaatggatttggaacgatcgggcgtttggttgcgagagttgctctccaaagcgatgatattgagctcgttgctgttaacgatcctttcatcaccactgaatacatgacgtacatgtttaagtacgacagtgttcacggtcaatggaagcatcatgagcttaaggtgaaggactcaaagacccttctctttggggaaaagcctgtcacagttttcggtatcagaacccctgaggaaatcccatgggctgaaggtggagctga

SEQ ID NO: 1761 - DNA, 199 bp, Gossypium hirsutum
  Clone ID: LIB3083-041-Q1-G1-E10
cagctcgtgccgcgagttttttttttttttttttcttctactttccctttgccttacttaccactgacaacaatgacagagtccaagcatgaggctttcacactctctttcaccctgcttctcatgctgctgggtttggcatccactgatgtgaaccaatacaaatcggcatgcactgatcagctattccggcttgctc

SEQ ID NO: 1762 - DNA, 294 bp, Gossypium hirsutum
  Clone ID: LIB3083-041-Q1-G1-E12
aaaaaaaaaaagatcaattttatatgataaaagtataaaaataacagcatcctaaacaaatctgtctcatggtgtttatatagaacccaaatattaataaacagatgatgcctaaaacttaatccaaggccctctgccacccacatgcatcaacaatttgctagctgacaatttaaggcacttctccaattcctgctaaatatctaacaaaaatcatagaatattttctatgacagaatggaaggaaatgaaaaataacctgtcactcgcatttgatacacctgtatatgtgac

SEQ ID NO: 1763 - DNA, 221 bp, Gossypium hirsutum
  Clone ID: LIB3083-041-Q1-G1-G10
gtcagttaattttactcttaaaaactaaaacgaaaattcccctttgcaaatctttcatttccctccttttcctctctctctcagaccgtctcggacccttttcccttcctctctgctactcgatcccacactgcaacataatttccctttcaaagagaagacaaccaaaggacgacaagtatcaccccgggttatggactgtggtgttccgtacaacccac

SEQ ID NO: 1764 - DNA, 391 bp, Gossypium hirsutum
  Clone ID: LIB3083-041-Q1-G1-G12
gttaatatgcttgtttgggatgatagaacttctgttggattgctgaagaaggatgggttaatggccacccatgatgaggaaactgaacaattcttcaaggatactgatgtcaactgtgtcttatgccctcgtaatccagatgatggtggaagttttgtgcaggaattacaaatatctacaatgttcactcatcaccagaagattgttgtagtggatgctgcaatgcctaatggagatccagagaaaaggagaattgtgagctttgttggacgtattgatccttgtgatgggagatatgacacacctttccatttccctgttcaggaccttggaccacgctcaccatgatgatttccaatcagcaaacttcaatgatgcttcaatcaccaaa

SEQ ID NO: 1765 - DNA, 401 bp, Gossypium hirsutum
  Clone ID: LIB3083-041-Q1-G1-H10
ctctctctcttgttgtaagctaaaaaaaaggctccattttcgattcctttttctcttaattttctttagagaaagagagagatggcttcctttgatgcgtacggaatggaaggagaagagattcatgcagctgcagcacctaataaccatcctttcgatgtagacgacgacgagagctattccaattacggctcttactctaacttcaccgacaatcagcaattcccggccgacggtggtgatgtggcggtggatcacttggcttcttctcctgagatcttcggcttcggatcttccgatccgccctcttctttctcgcaatctcctttcggtactacgattcctgttgaaaaaggaaaccgaacgaatggatttagcggtgggaacgacgatgttttcag

SEQ ID NO: 1766 - DNA, 354 bp, Gossypium hirsutum
  Clone ID: LIB3083-041-Q1-G1-H12
taacaccccaaaatagaaaaccacccaagaccaccgacacctccgccgatcatccaccgccgaccaccactacttccattcacttccctactggaaagatctttgggttttatttttaaatgtgttttttaatttcaattaatcatcatatcattctttgattcctcagttttagggaattttgggggtccttaaaaagaccaaaaaggggctcatttaaaaaaaggcttagatcaaatcttaaaaaaatggggattattcggtggatttaggattttgagggggcttttgggttttgtaagggttttttttttaaatgagagatgtctgatgcttcagggattaatgaatctg

SEQ ID NO: 1767 - DNA, 203 bp, Gossypium hirsutum
  Clone ID: LIB3083-042-Q1-G1-A11
taacacacgagtggctgatcacttcaacgagatatttttctccagtattccatcatccacgaacaacttcacggaaaaggtgcccaccgaacgggtgctggcaacacgagcaggtggctttatgagtccaccatatggggaacgctgtggccgacacagaaatgcgtaggaagacagtgtggcgtcacactggcgctggcacc

SEQ ID NO: 1768 - DNA, 149 bp, Gossypium hirsutum
  Clone ID: LIB3083-042-Q1-G1-A8
cgaggagtcggtttgtgaaccgggttgtttcctcaatgttgaggagagtttcagggaagaggattgcgattctcggatttgctttcaagaaggagaccggtgacagtcgggagagcgcagggagcgatgtatgcaaagggctgttgggc

SEQ ID NO: 1769 - DNA, 249 bp, Gossypium hirsutum
  Clone ID: LIB3083-042-Q1-G1-A9
tgagaatgctggaaaggcctctggtaatgtccatgatgcaatgtgttctgtttgtgacatggcagtcatatgggtgcaaagccaacttaaacagaaccagactcaggagcgtatacttgattacgtcaatgagctctgtgaccggttgcctagtccaatgggagaatcagttgttgactgttacagcctatctgctatgcctagtgtcgccttcacaattggtggaaagcatcttgagccttaccctga

SEQ ID NO: 1770 - DNA, 341 bp, Gossypium hirsutum
  Clone ID: LIB3083-042-Q1-G1-B11
ggatctcccggaatgcaggtttcagtttggattgggacgaccgtttcactgaagacgtgatccgactaatggatgccattgaagccactcctcctcctcctcctccttcatcttctagcaagaggcgcaagtccgccgtccatcatcaagataacctcaaaaccggccgccaattgcctcattctattctctcacccccgcgttcttttccgtcttccttcgctcgttgtcaatctaatagaaggattacatatccgccgttgagatttggaggtcatactttgtatagctttacggaagattaggtagaaaatgctgcaatggagctattcaaaattgtt

SEQ ID NO: 1771 - DNA, 168 bp, Gossypium hirsutum
  Clone ID: LIB3083-042-Q1-G1-B6
aattcggccggataggagtccgcatccttacataccattactgtataagatagatctcgttgtgaaggatcgattacggcaaaatttaccggtatagccgaacggtgtgaactgtacaagttaccacttaaaggaaggaatgaactccggtggatatagacgagctca

SEQ ID NO: 1772 - DNA, 278 bp, Gossypium hirsutum
  Clone ID: LIB3083-042-Q1-G1-B9
tatacgtcgagcaacgcttgtttctgagaatgcgcagggaactgatggatttacaatcagcacaactgcgggtgaaattgactcacgccatagtggtttgcttacggaatcacgtctggcagctgctgctgaacagaccgaactacatgcatttgccactgaccctgctcatgttcatcatctcactcatagatgcttgccacatgcttcacattatccactgctggaggagtctgacttcagtaaccgacagtgttaaccccgaccttgacatggca

SEQ ID NO: 1773 - DNA, 94 bp, Gossypium hirsutum
  Clone ID: LIB3083-042-Q1-G1-C10
cagcagcacgctatcacatggctccaacaatggccgcaccaccaagaacagctcaggaagaggaaccactagttagacacggaattgggggaca

SEQ ID NO: 1774 - DNA, 244 bp, Gossypium hirsutum
  Clone ID: LIB3083-042-Q1-G1-C11
gtttctgtagctgaagaaactcttcaatggctgaaaagagcaaggttttgatcatcggcggaactggatacctgggaaagttcattgtggaagccagtgcaaacgagggtcatcccacttttgtttttgtaagggagtccaccgtctccgaacctgttaagggaaaacttgtcgacaacttcaagaacttaggggtccatttgttgttaggggatatgtacgaccatcgatagtttggtcaaag

SEQ ID NO: 1775 - DNA, 246 bp, Gossypium hirsutum
  Clone ID: LIB3083-042-Q1-G1-C9
cttccatgtcttaaggaactgtcattggattcttcccatcatgtctgcgctgctttggcttcagttgtgatgggaatggctcctgtccttgggaacgatgcatcattcgaccagcttcttccaatatttctctcccttttgaaggatgaattccctgatgtgcggatcaacataatcaccatacttgatcaagtgaatcaagttattgggattgatctattgtcccaatctttaccactacccatt

SEQ ID NO: 1776 - DNA, 336 bp, Gossypium hirsutum
  Clone ID: LIB3083-042-Q1-G1-D11
aatcagccaagttgaggcagcagattcaaatgctacagaattctagcaggcatctaatgggagattcgttgagttccttgacagtgaaggagttaaagcagctagagaatagacttgaacgagggattactagaatcagatcaaagaagcacgaaatgctgctagctgaaattgaatattttcagaaaagggaagttgagctggaaaatgaaagtgtatgtctccgagctaagattgcagagatagagagggttgaggaagcacacatggtaacaggagcagagctgaatgctattcaagccttggtatctcgcaatttcttcactccaaatgtga

SEQ ID NO: 1777 - DNA, 178 bp, Gossypium hirsutum
  Clone ID: LIB3083-042-Q1-G1-D6
agaggaggcaacggaagcattagagaggattgtcgaatccgcggtatgtgcacgggatcgaacttgtgccatcaccgaagcgcattgctctcagtgaagaagatcggaagaaatggattgagcgtaccggaagggatttaaacttcacgattccactcgaggctagtgagtttaggtc

SEQ ID NO: 1778 - DNA, 249 bp, Gossypium hirsutum
  Clone ID: LIB3083-042-Q1-G1-E6
ccatttccagagatccaaagcagtaaatatccctcttttttaggaagatgatgaggatgaggactaaagcgacaggactgtcaccggcggtggcaaatggagaatcaggttttgtcggtggcggtgaaccgactgctcatgattgggagcttagacccggtggcatgttggttcagaagcgagacctcgacaggggtcgtccccctatcgcaccgccgacaattagggtcagagtcaaatagaagtcaa

SEQ ID NO: 1779 - DNA, 141 bp, Gossypium hirsutum
  Clone ID: LIB3083-042-Q1-G1-E7
ccacgaacagatcgtcagtgatcgatgtcctccatgacaaccagcgtgacgatggagaacacctcaggggcgtcctcctcgtcgtcgcagactcaagaggccctcgtccgcgaactcggccctaggaagaagaaggtgacg

SEQ ID NO: 1780 - DNA, 341 bp, Gossypium hirsutum
  Clone ID: LIB3083-042-Q1-G1-F11
cacgaaacggccgtacagaggagtggggagaggcgcacgtgaaagaggccgtgcggggaaactgctcgtgggagcccgacccctggcactgttctggcatgttccagaagcttctggtgttctcggctgctgagattcctttcgggtttgggccttttataaattgggctagggattttgggtattgtcctggtctttgagcttaagtatatgtttgggctgttcgggtattacgccaaatgtaattgggttggatttgtttttttatatttgggttagtataagtttggtatttattgaacgttgtaagtggacgatttgggccaatttaattttgggct

SEQ ID NO: 1781 - DNA, 165 bp, Gossypium hirsutum
  Clone ID: LIB3083-042-Q1-G1-F2
acgggacaagcatgggaacgcgccaggtggcggctattgatgtctgtagtcagcatgtacaagagaaaacgaagcattctggtaggaaagatgacaagtgttctgatttcattcctttcgagagtggtgcaggcataaaggcaagaaatgataaaatgacccagg

SEQ ID NO: 1782 - DNA, 359 bp, Gossypium hirsutum
  Clone ID: LIB3083-042-Q1-G1-F6
aaaccagcaccctgtaggtcgagagctcggacaccgttgacagggtgaaagcgaaaattcaggacaaggaggggattcctccagaccagcagaggttgatttttgctggaaagcagcttgacggtgggaggacacttgcagactataacatccaaaaggaatcgaccctgcatctagttttacgacttcgaggagggatgcagatattcgtgaagaccttggccgggaaaacaatcaccctggaggtggagagctcagacacgatggacaatgtgaaagcgaggattcatgacaaggaggggattccaccagagcaccacatgttgatatttgctgggaagcacttggaggatggtcga

SEQ ID NO: 1783 - DNA, 251 bp, Gossypium hirsutum
  Clone ID: LIB3083-042-Q1-G1-F7
ctcgtgccgtcgtggtcgagatgggctgcatacggtgtcttgcataagccagacttgaggaatatggccctcaagtttataaaacaactcggacatgcactgcattctgtggcatcaacaaggaatcccaagcaacaattgcagttggtatatgttgtaggtccaccacattcagatgcgctccagcagcattgattttggaccagctgatcttcagagcgtgagtgggtctgtggatggtttttcactta

SEQ ID NO: 1784 - DNA, 375 bp, Gossypium hirsutum
  Clone ID: LIB3083-042-Q1-G1-F8
cagctcaggaaacacctgatgaaggatggacaatgcaagatggaacttcttggccaggaaataacccgcgtgatcaccctggcatgattcaggtttgccttggatatagtggtgctcgtgacatcgaaggaaatgaacttcctccactggtttacgtctctagagagaagagacctggctaccagcaccacaaagaggctggtgctgaaaatgctttggttagggtgtctgcagttcttacaaatgctcccttcatccgcaatcgtgacgtgtgaccaggatgttaacaatagcaacgcagttagggaggcaatgtgcttcatgatggacccacaagttggtcgagatgtatgctatgtgcagtttccgcagaga

SEQ ID NO: 1785 - DNA, 260 bp, Gossypium hirsutum
  Clone ID: LIB3083-042-Q1-G1-F9
gatggacggcattactttgtaaccattgtcaacttgtgggcaaatttaataagtcgcaatccaccaaatttgccgctcatacatgctcgaaaggaatgctgtcatgaaaagacgtacattttccaggagtttcacagcataggtcgcactgaatgaagtttctggattgtaatcagggttgccccagtactagaattttacgttggaaagaaaatgcagtaactctttgggttatccagaatccgatgtggtgcaaggtg

SEQ ID NO: 1786 - DNA, 275 bp, Gossypium hirsutum
  Clone ID: LIB3083-042-Q1-G1-G11
gaactagtctccagtttttttttcttctttctttttttttctatcaaactttcctttttcatgccttcaattctcgactttctctgatgaacaggaaaagataaacaaaaattcccgactttcccgaggttttgcaactttacataatccttacacacatttacgttctgggaatctccttcaagccgcggtttcatttgacggaaccagcactgcctcatcagtccaaggaattccagttttctttacatgttctcccttgccaactgctccag

SEQ ID NO: 1787 - DNA, 364 bp, Gossypium hirsutum
  Clone ID: LIB3083-042-Q1-G1-G2
gtcacatccagggcaactgatgacgaggagttcggggaattgtatactttcaaatggacaacccttctaattcctcctactaccgtcttaatcatcaatttagtcggtgtcgttgcaggcatctcggatgccataaacaatggataccaatcatggggacctctttttgggaagctcttcttctctttctgggtgattggccatctctatccattcctcaaaggtttaatggggagacaaaaccggagaccaaccattgtgtgttataggggcagtgctagtggcttcaagcttctccttgctttgggtccgaattgatccatttgtgatgaaaaccaaaggaccagacactacaatgtgtggg

SEQ ID NO: 1788 - DNA, 153 bp, Gossypium hirsutum
  Clone ID: LIB3083-042-Q1-G1-G4
aatggttttacggcttcttttttctccttttctgttcttatctgtttctgccaacactcataccaaagtaaccgacaaccctgcgaatcaattggtgggtgcgcttaatgccaatatgacagctcacaagtcatcggctctcaccgagaaccc

SEQ ID NO: 1789 - DNA, 161 bp, Gossypium hirsutum
  Clone ID: LIB3083-042-Q1-G1-G6
taagagtctcaaaaaatatggctcctggggtcttattactggaccaactgatggtatcggcaaaggatttgcctttcagctggctaggaaagggcttaatcttgtcttggtgggccgtaatcctgataaactcaaagacgtttccgattcaatcgttggca

SEQ ID NO: 1790 - DNA, 257 bp, Gossypium hirsutum
  Clone ID: LIB3083-042-Q1-G1-G8
aaactatgaccatgggttctgcagacaagagggaggaagttattcaggcatggtacatggatgatagtgatgaagatcagaggcttcctcatcagcgtgaacctaaggaatatgtatccttggataaacttgctgagcttggagtactcagctggcgattggatgctgataactatgaaaatgatgaagagttgaagaaaattcgtgaagaacgacgttactcctacatggacttctgcgaggtttgccctgagaag

SEQ ID NO: 1791 - DNA, 347 bp, Gossypium hirsutum
  Clone ID: LIB3083-042-Q1-G1-H11
gctactcggaatgtttggggaaatgtaggccttagcaatgctacaaatgcttccagtcctgctagttacttagggtctggaaatggtagtttcggttctttaggaaatagtggggcaaattggagaccttctcttcctgctcgaagcggagggaacgcttctggttataccggtgggagtgccgatgacaactacagtttgggagggggaggatatggaagaaacatcggcattgttgcagcaccaccatcatcatttgctgggtcaactggtaatattgaatgttcctatggagattcttaccgtaatgcttcagtttatggtgactcaacttggaaatttgcatc

SEQ ID NO: 1792 - DNA, 245 bp, Gossypium hirsutum
  Clone ID: LIB3083-042-Q1-G1-H12
tacatcacggatgcttctcactaccaccatgaacggaactcttggttacctcgatgaagacttggtctcaaccgaccttgtcggttatagcaagtgaggcatctttgatgctaaagccggcatcgccttgcatgacacctttactaagcttgttgcgtggcatgataatcacctggggttacagttctcgagtgatcgacttggttcgaccaatggcttcttgccagctgtgtgaggttttagct

SEQ ID NO: 1793 - DNA, 373 bp, Gossypium hirsutum
  Clone ID: LIB3083-042-Q1-G1-H2
gagggaaccatcttaatctctttacccttttttttaatcttattttgtttttgtttgctaggcattctctaatttctctttctcttttcatttttcgcgcagtattatttatttatttatttatttttcgcttttgaatcgagattgtttttagggggctttaattttctttatgcttctttcctccctctttatctcgttttctcgcgctttttttttcggatctcttcaattatttcatcaattgtaagttgaaaaaaccttcggctttttttgttgttttcaattccttcgtttctgtgaccgttatttcttaagccatataatcgtaattttaaacgcattagaatctgaatagatcgtttttttgggt

SEQ ID NO: 1794 - DNA, 257 bp, Gossypium hirsutum
  Clone ID: LIB3083-042-Q1-G1-H3
gaaagtcgattgcctgaatagccttttctctaagctgcaaaaccaatcaatcattttctgcaactcggtcaatcgagtggagctgttggccaagaaaattacggaacttggctattcttgcttttaggttcatgcgaaaatgctccaagaccatcgtaacagagtatttcatgatttccgcaacggtgcatggacgaaccttgtttgtactgatctttttacaatgggtatacatatccaaagctgtgaaatgttgt

SEQ ID NO: 1795 - DNA, 215 bp, Gossypium hirsutum
  Clone ID: LIB3083-042-Q1-G1-H4
aaatgcatggggagaaaatcataagcttttcattcagtggaagcacattgaagctaaggctattgcatactatcttcacggattaatcctcgaagaagggaacacatctgctggcatagctgcagctgctctgcaagcagcagaagagtatctcaaagaaagcaaaatggcctgcgattctttccatgtgacactcccttcggtgagtaatccac

SEQ ID NO: 1796 - DNA, 256 bp, Gossypium hirsutum
  Clone ID: LIB3083-042-Q1-G1-H6
ttcagcgagaatttcttgtagagtattagagtagcagtttttttgcacttctaatcatggagacgggatctatagatccagcacttaggaaggaatttaatccggttacctttgttacccaaaaggtggtgacttttatagatggtaatacttttctcgcttgggagcagcatgttcttcttagcatcaagacgcagcatcttcagtcgtagatcgatggctcaattgtggtcccaactcaggggattcttgggga

SEQ ID NO: 1797 - DNA, 352 bp, Gossypium hirsutum
  Clone ID: LIB3083-042-Q1-G1-H7
aattggtatcatgagagcacttgcagagagagatgacccatcagttaaggaagtggatgattttatgatacggagattccttacagctcgtgatttggatatagagaaagcaaacaccatgtgattgaagtatttgagttggagaagaacgtttttgcctaaaggattcgtatctgaatcggagatttcaaagcagttggctgataataagctttgtatggaaagagttgataaacaaggtcgacctattgtcgttgctttgtggtgtagacagaggcctaggaaagggaaccttgaagaggttaaacgctttgttgtcgatggtttacagaaaatttgtgccagaatgcca

SEQ ID NO: 1798 - DNA, 355 bp, Gossypium hirsutum
  Clone ID: LIB3083-042-Q1-G1-H8
ctcatctgggttgtcgtttctatagctgaagaaactcttcaatggctgaaaagagcaaggttttgatcatcggaggaactggatatctgggaaagttcattgtggaagccagtgcaaaagagggtcatcccactttcgtttttgtaagggagtccaccgtctccgaccctgttaagggaaaacttgtcgacaacttcaagaacttaagggtccatttgttgttaggggatatgtacgaccatgagaatttggtcaaggcaataaagcaagttgatgtggggatttcggttggtgggtcaatgcagttagcagatcaagttaagatcattgctgctaataaagaagctgggaatgt

SEQ ID NO: 1799 - DNA, 464 bp, Gossypium hirsutum
  Clone ID: LIB3083-046-Q1-G1-A12
cggtccgaaattccggggcgacccacgcgtccgcagcgttgcagcgacgagcacaaaaagaaaaaggaaattcctctcaacatcaccagaccacgacctccctgccgagctccctccctctccgttggtgatggcatctcagagctccaagaccgcggacaccgccgcgcctccgccggaggttgcagccaccggagaggcggctccgggcgcggcttcttcaacaccggcacaaaaccctaacgctgctgcaaccgcagtggccggggccacggatctagagaagaagatgcgccgcgcggagcggtttgggatgccagtactgatgtcagaggaggaaaagcgcagcaagtcgccgccgtagaggatgtttttggggggactggctcttcaagtgtaaaggaggaagagaagaagaagtccagggctgagacgtttggccttgcctcgccctcttcttcaga

SEQ ID NO: 1800 - DNA, 198 bp, Gossypium hirsutum
  Clone ID: LIB3083-046-Q1-G1-A2
gctacgcattatggctacagcctgcttatcggattccatgttagtaatctggcatttgatgttaaagatttgttgagtgcatcatcatgacgtgcttgggagagagacatttgtcgtgagatagcttccaggcttgtgtgaagccagtaatgcaccacttacgacgttgtgattattaacatcacctgcaccgaagtt

SEQ ID NO: 1801 - DNA, 162 bp, Gossypium hirsutum
  Clone ID: LIB3083-046-Q1-G1-A4
gttatcctatgctggtgatattggttacagcagcttccctttgaaaacaccacttcggggaactccgttcatagtgtaacacgttttaaaagcaccagtgtttccggtactaatgacattgctggccagcttgctgtatatggatcgatcacattctatcac

SEQ ID NO: 1802 - DNA, 113 bp, Gossypium hirsutum
  Clone ID: LIB3083-046-Q1-G1-A5
gaagaaatcccatacaatgaagtagattcacattttaacgtgtgactgatcgccatcgtcatggcatcttaacctgacaaggatcgtgatccgcttctgattacgatgacatt

SEQ ID NO: 1803 - DNA, 320 bp, Gossypium hirsutum
  Clone ID: LIB3083-046-Q1-G1-A6
caagtaggggctccagcctgatggtcagatgccaagtgacagcatcgtccgctgatgtgatgatgcttttaacaccctttacattgaccctggtgatgggaagcatatctctcgtgccgtcttcgtagatcttgataccactgttattgacggagtgcgacatggtgcctaccgccagctcatctacccataacaactcatcatcagaattgaatacgcatcaaacaactttgcacgtggtcactacaccattggcaaggagattgtcgacctctgtttggaccgcatcaggaaacttgctgacaactgcactggccttc

SEQ ID NO: 1804 - DNA, 358 bp, Gossypium hirsutum
  Clone ID: LIB3083-046-Q1-G1-A7
ccgagaacgtcccgaagagcagaatctttttcatcgcatggtctcccgacacgtcaaggatcaggagcaagatgatttacgccagctccaaagacagattcaagcgagaactggacggaattcaggtggaattgcaagcaacagatccaactgagatgggtctcgatgtgttcaaaagccgtgctaactgaatacggttcttttaggcatctgcaaccgggaagcttccttccttcctacctacagtatgtctttacttaagtgaaatgtttataggtttcgaaacggcaaactcgggatttccgagttatgccataagacttttatcagtctccatgatgataaacccgtactttcg

SEQ ID NO: 1805 - DNA, 372 bp, Gossypium hirsutum
  Clone ID: LIB3083-046-Q1-G1-A8
ggcaggcaaaggaagcctgaaaagactaactgggtgatgcatcaatatcacctcggaagcaatgaagaagagaaagatggagagttagtaatttccaaagttttttaccaaactcaacctagacaatgcggtcacagtagagtcatgtatacgcacggccgaaagcttatcacccaaagcccgctgcaccaaaatgcaaatcctatggctaagagcagtgacagccggggtcttgttgagtataacaatccagcttttattccatacgatgatgggagtcacgataatagggaaagctcaccgcagctcaacacagatttggatgttcaaagtgatggatccacgtttattcgattaacctctgatacaagc

SEQ ID NO: 1806 - DNA, 182 bp, Gossypium hirsutum
  Clone ID: LIB3083-046-Q1-G1-B1
cacgaactcggcacgagcccagatcgtccccatgagcacaatctcttttcactcgcatggtctcccgacacatccacgatcatgagcacgatcatttacgccagctccaaagggagattcgagcgagaactggaccgaactccagtggaattgcaaccaccagattcacactgagatgggtc

SEQ ID NO: 1807 - DNA, 399 bp, Gossypium hirsutum
  Clone ID: LIB3083-046-Q1-G1-B11
cggggcgaccacgcgtccgaaagaaattgcattctggttgatggataaggatatgtatgatttcatggctctggacaggccttcaacgcctcgcatcgatcgtgggatagcattacataaaatgattacgcttgtcacaatgggtttaggaggtgaaggctatctaaatttcatgggaaatgagtttgggcatcctgaatggatagattttccaagaggtcctcaaagtcttccaaatggctccgtcattcctgggaataacaatagctttgataaatgccgccgtatatttgaccttggagatgcagattatcttagatatcgtggtatgcaaagagttttgaccaaagcaaattgggccagcaccttgagggaaaatataattctgacatctgatac

SEQ ID NO: 1808 - DNA, 405 bp, Gossypium hirsutum
  unsure (1)..(405): unsure at all n locations; Clone ID: LIB3083-046-Q1-G1-B2
atcatcggccctgcattgattggaaaggacccaaccgagcagactgcaattgacaatttcatggttcaacaactggatggaacccaaaatgagtggggttggtgcaaacaaaagctcggtgcaaatgccattcttgccgtgtcacttgctgtttgcaaagctggagctgaagtcaagaaacttcccctttacaagcacattgctaaccttgccggtaacagcaagttggttcatcctgtcnctgctttcaatgtcatcaatggtggttcacatgcangaaacaaacttgctatgcangagttcatgattcttcctgtangagcatcatccttttaagatgctatgaaaatgggtgttgaagtctatcatcattttgaagtctgtgattaagaagaagtatggtca

SEQ ID NO: 1809 - DNA, 54 bp, Gossypium hirsutum
  Clone ID: LIB3083-046-Q1-G1-B4
ctccattacaattctcacaatcttcctctcggcacatactctccttgtttttgt

SEQ ID NO: 1810 - DNA, 348 bp, Gossypium hirsutum
  Clone ID: LIB3083-046-Q1-G1-B5
cttgaatctaagtctcagttggaattcatgtttgatactcaaagtcgcagatagcagcagatggttccatagggtttgcaggtaacactacgataaccaactacggtccgtcttgcacaacaaactgataatgctccttattagctgggaaaccttgaccatgacaatgcagtcataattcaaaacatttacgtctttcaatcacactctaacgggaatgaatatgctggcgaacatgttagaaatggtttgtcacacattcttgtacaccatgatccacttgccgggcaactaaccatcagctccgaagggactctcatattggactgcaccgaggaaggcgctgtt

SEQ ID NO: 1811 - DNA, 441 bp, Gossypium hirsutum
  unsure (1)..(441): unsure at all n locations; Clone ID: LIB3083-046-Q1-G1-B6
ggtgaaggggaaataatggatatgatggaagttgctgatcctgatgctgttcatgctgttcgaaccttcattagaaaggagcttgcctcacaactaaaatcagagtttttaagcacagttgagaacaatagaagctcagaggagtatgtatttgaccatcctaatatgtccggacgtgccctcaagaatactgctcttgcatatcttggttcccttgaagatacagagataactgagcttgcactgcatgagtacaaaactgcaacaaatatgacagaccaatttgctgctttgtctgccatttcncagaaaccaggtaaaactcgtgatgacgttttggccgacttctatacaaagtggcaacataactacctggttgtaaacaaatggtttgcccttcaagccatgtctaacattcccggtaacgtcgagaatgttcgc

SEQ ID NO: 1812 - DNA, 278 bp, Gossypium hirsutum
  Clone ID: LIB3083-046-Q1-G1-B7
atgataccacgcctcctgcaatcactgccattgcggcccttctgatctcagaggaattgatggctctttcgttacttgtttcatggctcgcgccatgccgtctccttgattaccgtcttcagtcagtctaatagaatctttcatgagtaagggcaagaggaatcatcagtgatttcacgaagatgattctgtgatcaggtgtgccatcactgcttgttttaatgcaactcagtgtttaacagtcaagtatcgattattacatagacaggcatattcct

SEQ ID NO: 1813 - DNA, 220 bp, Gossypium hirsutum
  Clone ID: LIB3083-046-Q1-G1-B8
aattgagttgggggtattttctttgtttacatttacgtttaacccttttgtaaggataagacatagagagggctgaatatagtggcgtgaatgttgacaattgatttacacacataactactactccaatgaagacgttagatcagttttcttgcttcattttcaagaaatcacactcttttagctgacagatcaccctcttcattcgtcttctaaaatc

SEQ ID NO: 1814 - DNA, 330 bp, Gossypium hirsutum
  Clone ID: LIB3083-046-Q1-G1-B9
acgcgtccgcaacattgcagcgacgagcacaagtcgaaaaaggaaattcctctcaacatcaccagaccacgacctccgtgccgagctccctccctctccgttggtgatggcatctcagagctccaagggggcgggcagcgccgcgcctccgccggaggttgcagccaccggagaggcggctcctggcgcggcttcttcaacaccggcacagaaccctaacgctgctgcaagcgcagtggccggggccacggctctagagaagatgatgcgccgcgcggagctgtttgggatgccagtactgatgtcagacgaggaaaaacgcaagcagtc

SEQ ID NO: 1815 - DNA, 441 bp, Gossypium hirsutum
  Clone ID: LIB3083-046-Q1-G1-C1
gggaaatggaaggtcttatcccttttgtttacagggctatagtccagtacaagagcggaaaagaagatcacgttttagcaacatggttcaacgagtcaggctcgggttcttacatgagactccccaccggagattctgatcgcttccaaatatccgatgatcgaatctttgaatcagataattatgggaagttttccacttcatcatcatcatcatcatcatcttccatggttgctccttctgctagtactaagattattttatcaaccggagttcaatctcctgctgtctgtcgtttgactcctcgccgcgtcgttacatgaaaccatcgcatacttatgggttaatctatggtctgggaatttcatggtagtagaaaatatagatgtagttccgtttacgttaatcagtaggtttgggtacctaagaagcgtatgaaaa

SEQ ID NO: 1816 - DNA, 486 bp, Gossypium hirsutum
  unsure (1)..(486): unsure at all n locations; Clone ID: LIB3083-046-Q1-G1-C10
tacggtccgaaaatcncgggcggccaagccggtatccaagtcggaaacgcgtgctgggagctttactgcctcgagcatggcattcaggctgatggtcagatgcccggtgacaagaccattgggggtggtgatgatgctttcaacaccttcttcagtgagactggtgctgggaagcacgtccctcgtgctgtttttgttgaccttgaaccaactgtcatcgatgaggtgaggactggcacctaccgccagctcttccaccctgagcagcttatcagtggcaaggaggatgcagccaacaacttcgcccgtggtcactacaccattggcaaggagattggttgacctgtgccctttgatcnngcatcaggannagncccctttgccgacaactgcactggtctccagggcttcctcgtcttcaacgctgttggtggaggaacaggctctggccttggttccctcctcctggagcgtctgtctgttgac

SEQ ID NO: 1817 - DNA, 493 bp, Gossypium hirsutum
  unsure (1)..(493): unsure at all n locations; Clone ID: LIB3083-046-Q1-G1-C12
cggtcgtgacttccggggcgtgcagccgtatgttattgctgaccctgaaatcaaggaggaggtggtcgacagctccctcgaattcctcatccttgctagcgacggactctgggatgttgtcactaatgaggaagctgttgccatggtcaagcctatccaggacccccaggaagcagcaaacaagcttctcgaagaagcttcccgaaggggaagctccgataacatcacagttatcatcgtccgcttcatagacggaactaccggtgagaaatcaggcgacgacaaagagaccaccaacgaccaacactcctagctgtctcgtgtagggatccatcngtgctgtgtgttccttcctggctggttgnntaccnnttgggatgctcagagtagacactggctgctgctccgcaaggaaactgactcccccgaccgccgttcatgctcctggctggctcgctggccgcctcgacgggaacgctgccgcagaatgacg

SEQ ID NO: 1818 - DNA, 309 bp, Gossypium hirsutum
  Clone ID: LIB3083-046-Q1-G1-C2
caaacagaccttttgttcctacacctattcttatatttaaatgtttttttcagtttcagctccatactccaaatcataatttgccttgctttgttttgttttcattgttttgctaaataatgcctctggaaacattcaagcctgaccattcctctggtgaacgagataagcatactagattacttgataaagaagtcaaagacatggtctccaccattactcgccgtgttgttggtattcataaatcgggatcgagccacgtcagagacgatggtgatgacgatctgcatggtgttggtatcatcacgc

SEQ ID NO: 1819 - DNA, 281 bp, Gossypium hirsutum
  Clone ID: LIB3083-046-Q1-G1-C3
cacgaattctgatcggcttaaaatgtcctggtgagcatgttttaggaagtcctcattcacgattcaatacccgatatcaatgttatgggaatcaacattgggggaaaaggcacacggtttcctgttcaaccccattaagccattgtttgtcccaatggttttgctcactaaagtggtattcaccaagatgggatgctcaatcacacacgttcatatcgaattaactcccccgaagatattgcccctcaccggtccaattaagcctggaatgtccttgggaa

SEQ ID NO: 1820 - DNA, 388 bp, Gossypium hirsutum
  unsure (1)..(388): unsure at all n locations; Clone ID: LIB3083-046-Q1-G1-C4
cacagattgatgatggtgatgttgctgttgggaaggatatacaggataatcaaacacagattgatcagcaatatcccctgtactatttgtcctcgaggcagcctcaagcttacaacatgcctgtccagcaacctagcattaatgaagcccccacagggatcccatcgagccggccgcagactccttccaatcctaccatggctcctactcatgtagcatacaaccctatgagaaatgctcctcttgctaaacctgaaatgactgctgctgctggtgtatacagaacaacanatactggtaacccacaactggttcaagtgcanaacagccagcatcaacaacaatatgcgggttattctcagattcatcatgcatcacaatctgttgc

SEQ ID NO: 1821 - DNA, 128 bp, Gossypium hirsutum
  Clone ID: LIB3083-046-Q1-G1-C5
ggaaagcttactcaatggctgccgacgaggacaccgtagactttcaccaccgctagcttcattgcccataacattaaactcgtccacaactttgtggactgcgcccttcaggcttcatgttcagcccc

SEQ ID NO: 1822 - DNA, 390 bp, Gossypium hirsutum
  Clone ID: LIB3083-046-Q1-G1-C6
tttgtgcctatcaccttccttgcatgggcggtcctagtgccggttaattacactaataaaacattggagttgcagctgaagaatgttacttcaagtgatattgataagctctcgatttcaaacgttccagatggatcggataggttttggacacatatagtaatggcttatgcttttaccttttggacatgctatgtgttgctaaaagagtatgagaaagttgcgaatatgcggttgcaatttcttgtatcagaaaaacgccggcctgatcagtttactgtgcttgtgagaaacgtaccaccagattcagatgaatctgtaagtgagactgtggagcactttttcctggttaatcaccctgaatactatcttacacatcaggtagtatgc

SEQ ID NO: 1823 - DNA, 436 bp, Gossypium hirsutum
  Clone ID: LIB3083-046-Q1-G1-C7
tcgtgatggccttaaaatgtcgtggtgagcatgtattaggaggtcttcatacaggaatcaatacccgacacattgtaatggcaagcaaaatggtagaagaatacacagggttacatgttcagccgcataaagccattgttggagccaatgctttcgctcatgaaagtggtattcaccaggatggaatgctaaagcacaaaggtacatatgaaattatatcccctgaagatattggacttgagcggtccaatgaagctggcattgtccttggaaaactcagtggacgtcatgctttgagcgaccgattgaaagagcttggttatgagcttgacgatgttcagcttgggaacatattctggcgcttcaaagaagtagctgaacaaaagaagagagtcactgatgctgatctagtagcattggtttcagatgaagtttt

SEQ ID NO: 1824 - DNA, 327 bp, Gossypium hirsutum
  unsure (1)..(327): unsure at all n locations; Clone ID: LIB3083-046-Q1-G1-C8
gaaataccagaaaaacccatgtttaaacctgaatttcctcctcaagaagcagaaccttctgttgtcattgtggatgaagaagggaaacctactgatagagttgaatcagcccttaagtgtcttcctcattatgatcctgctagttgctggagtggggatacacttccatcgttccggtactggaagattcgtgactttgcttatgcttatcgatcaaaacttgtgacaccttctaagatagcagaacanatcatcacacttgttgaggggtgtaaatatcataaggccccaacaccattattgatttcatttgatgctgaggatatc

SEQ ID NO: 1825 - DNA, 424 bp, Gossypium hirsutum
  Clone ID: LIB3083-046-Q1-G1-C9
ccgggtcgacccacgcgtccgaaataaaccagcacatctgggccgtctatgtattgatttgtcattccagttctgatttgttctcagcattctgaagattgcccatttgctggttaaatcagtatttctccgggttggaatgcttgatcctttagtggcttactactagtacttgtagtcaataagtagctataatgtggagtagcagtatcttgcagaatgcttttattaatttctacatttagctttatctatctgtgtgctttgccatgagtggagtttcaggttccttcatctctagttataagctagagtagcttgactgcttatggacacaaatttatctaagtttgtaacccccctctattctacagatcatacattcgtgtttgatggtagtatttatgctggatattgtacctct

SEQ ID NO: 1826 - DNA, 205 bp, Gossypium hirsutum
  Clone ID: LIB3083-046-Q1-G1-D1
ccaatcgttctggccttaaaacgtcctggcgagcatggattcaggaggtcctcctaccaggaccaattcccgccacattgtcatcggcaagcaaaattggggaaggagacacaaggtttcctgttcaaccgccgaaagccactgctgggaccaatgctttcgctcatgaaagtgggcttcaccaagatggcatgctaaagcacaa

SEQ ID NO: 1827 - DNA, 253 bp, Gossypium hirsutum
  Clone ID: LIB3083-046-Q1-G1-D2
agctacttaagcatggcttctaaaccatgaatcctcagtgactggccatggaagcctcttggaagctttaagtatatactcctacttcctttgacaagggtacacatatactcgtttatggataaagatgattatatagacgtgtccatgctggtattattcccatttatgttatggcgaatgcttcatcaccagctatggagtaacctttctcgttatctaacgtgccaaaggcagcaacatgattgtggac

SEQ ID NO: 1828 - DNA, 245 bp, Gossypium hirsutum
  Clone ID: LIB3083-046-Q1-G1-D3
ctgccctgacatcactaaacctggggaatgcaagattggaattatgcctggatacattcacaaaccaggtcgtgtaggaattgtttctcgatcaggcacctttacatatgaagcacttttccaaacaactgcagtatgtccggggcaatcaacccgtgtaagaattggcggggattgctttaaggggaccaacttcgatgattgtgtgacaaaattcctttccggatccacagacagaatggatc

SEQ ID NO: 1829 - DNA, 283 bp, Gossypium hirsutum
  Clone ID: LIB3083-046-Q1-G1-D4
attcttccggccttccctttgaatattgttatgacctaagtgcaaatcaaaccagctttgagtaccccattgtgaatctgacaatgaaaggtggagactatttttttgttaatgatccaataatagtgatttccttgcagggtggagatgtatactgtttaggtattgtgaaaagtgacaatgtgaatattattggacaaaatttcatgaccggttatcggatagtttttgatcgtgagaggatggtgctgggctggaaagcatcctactgtaatgatttaga

SEQ ID NO: 1830 - DNA, 356 bp, Gossypium hirsutum
  Clone ID: LIB3083-046-Q1-G1-D5
aacacctcattttcctgagaaaaaaaaaaacaaaaaagaagcgtacgtgaagaaggagaagaagaaaaaagaaaatggcggaccagcttaccgatgagcagatctctgagttcaaggaggcctttagcctctttgacaaggatggcgatggttgcattactaccaaggaactgggtactgtaatgcggtcactcggacagaagcctactgaggcagaactccaagatatgattaatgaagttgccgctgacggaaatgggaccatcgatttccctgaatttctcaaccttatggtaaggaaaatgaaagataccgattctgatgaggaacttaaaaaagctttcatggtgttcgat

SEQ ID NO: 1831 - DNA, 123 bp, Gossypium hirsutum
  Clone ID: LIB3083-046-Q1-G1-D7
ctgccctgacatcattaaacctggggaatgcaagattggaattatgcctggatacattcacaaaccaagtcctgtaagaattggttccccattagggaccttaacataagaagcaattttcca

SEQ ID NO: 1832 - DNA, 300 bp, Gossypium hirsutum
  Clone ID: LIB3083-046-Q1-G1-D8
ctctttgctcacgtgcctcaaccactctgacattccagcaacacccaaaggcgtgccccatgttacagtttgcatccacattgttcatactggtatcatgcaggtctctgcagctgaaatcatgactggtcatacaaccaagattacgatcacaaacgacaacggtcggttgatctatgatcaaatctagaagatggttcatgaagcggcgaagtatatgtcctacgatgaagatcactcgaataaggttgaagccaaggacacattggagaattatgcctacaacatgaagaacactgt

SEQ ID NO: 1833 - DNA, 437 bp, Gossypium hirsutum
  Clone ID: LIB3083-046-Q1-G1-D9
cttttttttttttatggttttttttttttgtttttttttttcttttttttcttttttctttttttgggggtttgtgggtttctttttttttttatatttggtgttttctttttttttttttttttttttcttttcttttttttttttttctttctttttttctttctttttctttttctttttttttttttgttatttttttttttttttttttcttttttctttttctttttttttgttgttttttctttttttttctttttctgttttttttttttttttctccttttttttctttttttcttttttttctttcttcttgtttcttgctttttttttttctttttttctttttttttcttctgttttctctttcttttttctttttttcttttctttttctttttcttttttttctctttttctttttttttttt

SEQ ID NO: 1834 - DNA, 460 bp, Gossypium hirsutum
  unsure (1)..(460): unsure at all n locations; Clone ID: LIB3083-046-Q1-G1-E10
acggtccgacaatccgggggcgatagcgcgggcggagaggggaaggagacaagtgaactcagagaagaactagcgcggcgggcgagcattgcaagccgagctgcaggggcccggagcggagaccggaggagggagacgtcgcttgcgatgtcaccggcagcatccgccgccgaaaccgccgtcgtcgtcgtcgtcgcaagcgtcccgagccagcagcagagcagccaccgcgccgcggcgccgtccgtcccgtcgtcctacgccgtctgggagaaggagcggtaaggcggctgcagctttacgacgtcgtcgtcgtcgtctgccacctgcctactggctgctgctgctgccaaggggaaaggannaaaagggaanaaaaccggaaagggggaaggcatggaggtggaggcggccaagtgcgagtgctgcgggttcacggangagtgcacgccggcgtaca

SEQ ID NO: 1835 - DNA, 223 bp, Gossypium hirsutum
  Clone ID: LIB3083-046-Q1-G1-E12
atatcgggttcttttctttttttttcttctttctcttttctcctttcttttttccttcttttttttctttttttttctttttctttttttttttttttctttttctcttttttctttccttctctctttcctctttttccttcttctttcttttttttccttcttcttcctctctttcttcttttcttttctcctttttttcttttctcttttttttccttct

SEQ ID NO: 1836 - DNA, 320 bp, Gossypium hirsutum
  Clone ID: LIB3083-046-Q1-G1-E2
tgaagatcttgtgtgctcctttgagatattgataccagctgataataaatcgttaccaagcggttctaagcccctgaagaagccaccaaagatggggaatgtttgatgttccatgaatagggattgctatggatgtcattctgctcatacccaatacatgatgagctgaattgacaaatgttccgattacttcattgtacgagtaaacttccataagattgttgcttgcaaacgaaatcatctgaacagtctgtagattaactacccattttctcatctgtgcagtaacacatttgtttttgcattggaaaaaacagctg

SEQ ID NO: 1837 - DNA, 294 bp, Gossypium hirsutum
  Clone ID: LIB3083-046-Q1-G1-E4
caatgcagatcgcttaagatcatcacggaatttgacaagtaccaatctcatactttatcaagaaatgactgattaatacagcagctcaaagcaggtataccttatctcttatagggatggggagggtcatttatgatacacgcagccttcaccatgcataatttgcaccaaaaactgtttctgcagctcgaacatgtaaaccaaccattgctacatggaaacattttttctttttgagattaaccaagcttctaaatggcgaaagacaattctccatgttccaaaggtttgact

SEQ ID NO: 1838 - DNA, 282 bp, Gossypium hirsutum
  Clone ID: LIB3083-046-Q1-G1-E5
atcgcagacaattcggagcgaagttttacaatggtacaaccagtggcagtgtcaagtggccatgaatcactgaagccactcgtgaagatacctactcgcacaatactttgtaatgcacggcgcgaatgtggaaggtggtcacaattttgattgtgaccaaaccaattctgattacatccaaacttagcagcttgacaatcttttcgccatgcgtaatacatccatggcacataccgttggggtctggtattaccaatccttcattatcgcagctggtcatta

SEQ ID NO: 1839 - DNA, 393 bp, Gossypium hirsutum
  Clone ID: LIB3083-046-Q1-G1-E6
ctccccccctttttctcttttcttctaggggtttgaaacccatcatcgccgccatcgtcatgcccccttgaagccaccgtggtttccactgtagacggtgatcgggaccacgtgaaatcgggtttttaaccccttttgaagcgagctcgacggcgagggtttcccagaccgaagaagatccataagaagaggaacccccacgacctctttgggccgaatccgacactggagaagtggtcttcgatgacggagttgcgtggattcgggtgtcaatggtgcatgatggctggtggtacgcacgcggtggcggcagtcagacatgcgtggagggaaacagcggctgcagctctttaggaggttttgggtttttttttttgctttctgaaaaatgat

SEQ ID NO: 1840 - DNA, 392 bp, Gossypium hirsutum
  Clone ID: LIB3083-046-Q1-G1-E7
agaatatgaggactaatgatatattaaccactatatggatatgatatgtcattaatccgtagattcgtcctaaatttgatatttactaaaagagttgagtgcatatggtaacttcacgagatttcatgacgacaagctgacgcgtgtccactcgtcatccctaggcggcttcttcgacaccttacccgagatcaccacggctcatttaaacgtcacttcactttcagctgtttggtacttgagaaaataccagtaactcaacagtcccatcaaaacaactgtaagattcgtttcttactactattttctttcattccattcaatttctgcagatgatatagttagcttttcgacacaggatgttagcatcgtcatgaatcctagcgaccatc

SEQ ID NO: 1841 - DNA, 264 bp, Gossypium hirsutum
  Clone ID: LIB3083-046-Q1-G1-E8
cttagaggttaatgttgagaaagatatacagactgagcaatagattactttcccacgagaatctgataatcgctcgataccgatactggggacattgtattcgtcctgcactataaggatcatcctaaatttattcgactcggtaattacttaattgtagagcatacattggcacttatcgaggccctttgtggatttcagttcatactgactcacttagctgccacagaacttctcactaaaatccaccctgcgtaagtcatt

SEQ ID NO: 1842 - DNA, 254 bp, Gossypium hirsutum
  Clone ID: LIB3083-046-Q1-G1-F1
gcgacatcgaataagcacaagcatcactccagtcaaagcctaagctcacaatccagaggtttcaaactcactgtccttctccttctcagacgtctcgagggactgagagatgattgtgactgccaaaacagttggcgttcctgtaacaattgctcacagtggatctgccactaccgtcagtgctacagagcatatgcctctatttgcaccatctgtgggaatgttccggtttaggtctttctgtaagcttcact

SEQ ID NO: 1843 - DNA, 440 bp, Gossypium hirsutum
  Clone ID: LIB3083-046-Q1-G1-F10
cacgcgtccgtgatgatcgtatgcgcagataacatgtccgaggtagacgatcgacgatgccccaaagtagcactttgaccacttcatgtggaggtcatgtgcgcggagggcgtcaaggacgagcatgaatcgacagaagggtataaggacgtcattcatgagcgtctagaacatgaccgatgcattgaagaggtcgaagggcatgacgaggaactcaatgggtgtggtgggtatgaaacaccgtcttctcgatgtcctcaagatgcatccgcacttggtgatagccgaattgcaagtctagcttggtgaagtacttagcaccaatggaggtccatccgaggaaattttcccaattgaccacaaggatggggaacttgtcatgggatgtcctgtcgtttaacatgcggtaatcaatgcagaacctccaggagccctctgcc

SEQ ID NO: 1844 - DNA, 246 bp, Gossypium hirsutum
  Clone ID: LIB3083-046-Q1-G1-F11
tgtgaatggattgcgattccaatcccttgattttaagatttcagggttccctctcatagatgcccttgttcgccattctgtggcatatcaattcggcgtttatggcgataacaaactgattccttttaacctcttggaggatatcaatcgttgtgaatatgttgatttgcccatttttatagtttaatatccagctatacccggcttttcaaattggtttgtggaccataacgggatatccgacaa

SEQ ID NO: 1845 - DNA, 295 bp, Gossypium hirsutum
  Clone ID: LIB3083-046-Q1-G1-F2
caaaggatgctgccagcttcacctctcaggtcatcatcatgaaccaccctgggcagattggaaacggatatgccccaatccttgactgccatacggcggagattgctgtgaaattttcccaattgctgaccaagattcactggcgatctggaccggatcttgataacgagtccaagttcttgagcaatggtgattcacggattataaagatggttctcaccaaacctatgggtctggatactttcgctgagtacccagtacttggaccgtttgctttcatggacatcagtccaac

SEQ ID NO: 1846 - DNA, 329 bp, Gossypium hirsutum
  unsure (1)..(329): unsure at all n locations; Clone ID: LIB3083-046-Q1-G1-F4
gaagggtcacctttttcacctcaatctgataatgaaaacgatgattttgacccttatggcggcttatttgatgatgagcaaaaaagggttcttgagattaaagagcgtcttgaactacctgatcagtcagaagatactttagttgatttgcttcaaagtttggcagatatggatataacatttcaagctctcaaggagaccgatattggaagacatgtgaacaaattgaggaagcattcatcaaatgatgttagaagattagtgaaacatcttgtcaganaatggaaagatattgtagatgaatgggtaagggtgaatcaacctggaga

SEQ ID NO: 1847 - DNA, 423 bp, Gossypium hirsutum
  Clone ID: LIB3083-046-Q1-G1-F5
ctggaactacatctaagactactgatcttaagaaggaaattgcagagaatgaggtttcaaacaggctttccaagatccctgatgtcaatgataaaaccatcaatgattctaaagaactaccatctgttgaacttgggttgaagagacttagaggtgttaaagatgctgggactgtagttagggatgagcggaatgttttgagacgatcagactcttcagccttctcaaggtataatactgcatcaaatgcaaataaggttcccgttgtcaacattggaagctcgtctgcacttgatagtaatttagaattgacaagaaaaggatcagtatgcaataacgaatctcatttggttaatgaacttcccaatcaaagctcaaatgtcggtagcaataacattgatatgggctccacaactaacaatg

SEQ ID NO: 1848 - DNA, 416 bp, Gossypium hirsutum
  Clone ID: LIB3083-046-Q1-G1-F7
attttatgctggaacaggtaacttgttgtgtaagtctgaggatacagtatgtatatttgatctccagcacaggcttattcttggcgatcttcaaaccccttttgtgaagtatgttgtttggtctaatgacatggagagtgttgctttgctcagcaagcataccattgtcattactaacaagaagcttgtgcatcagtgcactcttcatgacacaatacgtgttaagagtggagcttgtgacgagaatggtgtttttatttacaccaccttaaaccatgtaaaatactgccttcccaatggagatagtggaatcatccgaacgcttgaggttcctatatacataactaacgtttctggcaatactatactttgcctggatcgtgatgggaagactaagactatcgtcattgaaggta

SEQ ID NO: 1849 - DNA, 366 bp, Gossypium hirsutum
  Clone ID: LIB3083-046-Q1-G1-F8
gctttttatcatttatttatttatttttatcaacgaagaactttattgactctcgcaacaggtcaagttagcagtgacaccataaacaggtcatctttaccagtgatgtcttacgctcaactcattttccgccgcatcgtgttttaattcaccagcgacatatatgcaacacatgcactcacctatcacacacattacacgtatgatttacagtcaatatactttagggaatatataccccaatcatctagcgcttgtagctataagtactcatatattcgcggatcgactctctgcactatcaatcatcccagtcaccttgatgctgacttctgccaccattcttgcacgaatcgattcatcatc

SEQ ID NO: 1850 - DNA, 192 bp, Gossypium hirsutum
  Clone ID: LIB3083-046-Q1-G1-F9
tgatttctgcactatgtgatcggattggcattccaagccgctcattttaacatttcagggttctatctcatacatccccttgtcggccattctctcgcatatcaattcgggggttaggtcgataacaaattgattccttttaagctcttccacgatgtaaatccttggtaatatgttgattttcccattttt

SEQ ID NO: 1851 - DNA, 388 bp, Gossypium hirsutum
  Clone ID: LIB3083-046-Q1-G1-G1
gtaatgtgaaggttcttgtgtttgatgaagctgatcacatgctggctgaggatgggtttaaagatgactccttgagaataatgagggatattgaaaagatgagttctcactgccaggttcttctgttttctgccacatttagcgacactgtgacgaattttgtctcaaagatagtcaagagagatcacaatcaactttttgtcaagaaggaagaactatctttggagtctgtgaagcaatacaagggtgaatgttccagatgaactttccaaagttttggtgaataaagatagaatttttgaaattggagaacgcctatggcagactataatatttgtacgcacaaaggatatccgaagcatgtttgcaaaaaacacttgtttaattt

SEQ ID NO: 1852 - DNA, 85 bp, Gossypium hirsutum
  Clone ID: LIB3083-046-Q1-G1-G11
catggttgtactcaagtcatggcctttttacatttccctcataccctagttcatatccactctcctcttcctctatctcactgtt

SEQ ID NO: 1853 - DNA, 328 bp, Gossypium hirsutum
  unsure (1)..(328): unsure at all n locations; Clone ID: LIB3083-046-Q1-G1-G12
cggggccnccacgcgtccgcacacgcgtccgcaccgaattccctgcgattcctctcccctcgcctcctcgtctccccctaagggatcgtcggagaggaatcgcaaagagggccgtctcatccgagttaaggaagccatggagcacaaggaggctgggtgccaggcccccgagggacccatcctctgcatcaataactgtggcttcttcggcagcgcggcgaccatgaacatgtgctctaagtgccacaaggagatgataacgaagcaggatcaggccaagctggctgcctcctctatcgacagcatcgtgaacggcagcgacggccgt

SEQ ID NO: 1854 - DNA, 367 bp, Gossypium hirsutum
  Clone ID: LIB3083-046-Q1-G1-G2
atgactttcacttcttaaaactgtgtcaatggagctctccctcttctcttaccatcaaaacagcttcagtctcctccacaaacctttcttctcacttcccatttcagggaagagagttccaaagagagatccatttctattgcaatgtcactgcacgttgtcatcatcttctaatgatgatgataatataaaagcagcaattgtgtctttgcagcatgagggaagaatggtagtgcttggttctctcctcatagctgctgctgcaatgtatatctctgatgtggctgaagcagctagtacaagttgaaaagctcctaagggagctaaaataccttagactgaattcaaaactcttcccaatgggccc

SEQ ID NO: 1855 - DNA, 374 bp, Gossypium hirsutum
  Clone ID: LIB3083-046-Q1-G1-G4
tttatcaatggcggagaagagtttcaagtacgtcatcctcggtggtggtgtcgctgccgggtatgcggcgagggagtttgccaagcagggagttcagcctggtgagctagccattatttccaaggaaacggttgctccatatgaacgtcctgctctgagtaaggcgtatctcttccctgagggagctgcaagacttcctggtttccatgtctgtgttggaagtggtggagagagattgcttcctgagtggtacaatgaaaaagggattcagttgatccttagcactgaaatagtgaaagcagatcttcctggcaagactctagtaagcgcagctggagaaacgttcagatatcaaattttgatcattgcaactg

SEQ ID NO: 1856 - DNA, 308 bp, Gossypium hirsutum
  Clone ID: LIB3083-046-Q1-G1-G5
aaaaatcaagagaatcaaatgacaaaaaggaaaaagaattataggcattaccattacaatgagaaatatccaaaattatgggcatcattgcaaaattatcataacttcaaacctttttctttcttccatccagaaaatgaaaatgtattttaggggataagcacacaattacttcgtaggtgaatgcagtatgcataacagtacttcagtatatagcagacacatattcataactatgtaatataacatagagacggaatgctatgaacaactatcgccttaagctctccacaatgtaatccgcgtac

SEQ ID NO: 1857 - DNA, 358 bp, Gossypium hirsutum
  unsure (1)..(358): unsure at all n locations; Clone ID: LIB3083-046-Q1-G1-G6
caaagtctcacactttggcagagaaaaaacaaaaacaaaaacctaaaaacccaaagttcataatggatgtaattaaaacccagcagatttcatctcgacccatagagaaggtaatagttcatcctttggttcttttaagtatcgtcgataactacaatcgcgtcgctaaagacacgcgcaagcgcgtcgtcggagtcctccttggttcttccttcaaaggcaccgtcgatgtctccaacagctacgcagtgcctttcgaggaagatgagaaggactcgagcatatggtttctcgaccacaactaccatgaatcaatgtnttcgatgttcacgaggattaaatgcaaggagcatgttgt

SEQ ID NO: 1858 - DNA, 414 bp, Gossypium hirsutum
  Clone ID: LIB3083-046-Q1-G1-G7
gctacccctcgtttacaggatagtaagcgagtgacctcggagttacctgacacacgtttgaaagggaattttccggaagaagagatgcagataatggcttacctagcaaaagagtgcttgctgttggaccccgatgctcgaccaacaatgagcgaggttgtgcaaatcctctcaactattgctccagataaattgaaacgaagaagtattcctgtaaacttttaccagatgccatccgcctacaaaacgaataatgaagcttttctcgaaagacatcaaaccgtaatcgaggatttatatgacgcagaggaacacatgccaagtacatcgaagtcagcagagagctcgcggccatcaagcatgaatgatattagaatcgccggcaaacaaatagttacctgcctgcgagtgcat

SEQ ID NO: 1859 - DNA, 311 bp, Gossypium hirsutum
  Clone ID: LIB3083-046-Q1-G1-G8
cctcagtcccctttcaagaccaagctcatcctcatctgtgcttctgttgttgtcttcgtcttcggtctcattaccaccacctctgcctttgggaggcggcgatttcacaatcctagctcgccaaggccacacaccctgtcgatgacagtgagccatcggcactatattgcccagccctacccttgacgccatcatggaccaaagctcgaccttcgctagtcaatgcactcattcactatgctacgagcaacatcacccgggatccaattctctgggaaatcttgggtttcgccagagtgtttagcaagaaa

SEQ ID NO: 1860 - DNA, 211 bp, Gossypium hirsutum
  Clone ID: LIB3083-046-Q1-G1-H1
aacttccagtttagctctatcatctgccactcattctgtaagtcatatgcatccgttacgggatcatagctaagctcgacgctcagacgggttgacgcatgttggatttcccatacgcactccatatcaacgtcaccatttgcttccaatggaggtaactactcctaaactacttctccggaagatctacaacgggatgctactcccgttt

SEQ ID NO: 1861 - DNA, 384 bp, Gossypium hirsutum
  Clone ID: LIB3083-046-Q1-G1-H10
cggggccgccacgcgtccgcacacacgtccgtgcaaaatgtataggtaatcgtatagtagccggcaaagtcatcaaggaaagttatggtaaacaaaaacagcaacacactttcacgattcaagtgttttggagcaaaggacctgggaaattaccacctttgcatctgttgcttgtcaaagggcgcaacctatacagaatgatgacttttcgtcagccttgggcaaatgaagcagaaaggctgaagattctagaagagaagcacaacagaggggatgatgcaaggcgtgttcgtgcattgaatagacctaattctgctggaaacactcttaaaggcaagaaaaaattgcacaaagggggaaacacagtccgatctgaaaccacgc

SEQ ID NO: 1862 - DNA, 175 bp, Gossypium hirsutum
  Clone ID: LIB3083-046-Q1-G1-H12
aggattccggacgagaataagcttgctggtgctcaggtgcttctgagccgattgagattgtttttgagtcctgggtatccatatgaggaaatattgagtacgtttcatagtgcagacagcataagtatgtgctcattccttccgggtttcacgaactttaatagaacaaaaggag

SEQ ID NO: 1863 - DNA, 230 bp, Gossypium hirsutum
  Clone ID: LIB3083-046-Q1-G1-H2
aatggctgtgcatgatgattgcaagttgaacttcatggacctcagggcaaacccaacccaccgcttcagtgtttgcaaaattgaggagaagcaggagcaggtgtagctgtggataagcttggcgaagcaaccggatagctatgaggatttgacgagatgtctccccgctgatgaacgtccatatgcgagtgtgcgactttgattttctaaccgccgagaatcgttccgtc

SEQ ID NO: 1864 - DNA, 254 bp, Gossypium hirsutum
  Clone ID: LIB3083-046-Q1-G1-H4
cacgaatcgtctagatttaagacattcttcctgagttatgatatgcatagcctaacaactctgtaatgggttcataaaagctctttagctacttttaatggcatctgaagtttcactgctgacgaacggtctaagatggaaagggtcgaagggcgcagttgagaaatcatctacacattgcttgccagagtggcacacatgggctatgatgaatgccataatggtgacgcactatggcttcattcctctggtga

SEQ ID NO: 1865 - DNA, 217 bp, Gossypium hirsutum
  Clone ID: LIB3083-046-Q1-G1-H5
tccatgctatatcttgagccggaaaagacataccgtatacattacatttttctatagcctatataatcagatcacccaatttgcaagcagatgagggcccgagaaggataggacacaagtttacacatcttcacaacgataccaaatggactcttagataatacagaagaaagctttttcgtctccattggttcgcttctcaaaatattcgcgtcga

SEQ ID NO: 1866 - DNA, 401 bp, Gossypium hirsutum
  Clone ID: LIB3083-046-Q1-G1-H6
tttttcttttataagtctcaaagaaacttagaccccttcgtattctccgctcataccccaaatccccataccccttctgttcaacagcaaagatggcaactgtgcgagttacctcctctagtatcgttcaagcttcgatcccgaaccgattcacgagtgccattgtcaaggccccgacttctcttggatcttttaagaacatctccaaaccttttggcttgaaatgttcctccaatcacaaaacatttatggcagcttataagattaagcttgtaggaccggatggtgaggtgagcgagtttgaagcccctgacgatcaatacattttagatgcagccgacgaagcaggagttgaactgccatactcttgccgagctggagcttgctccacatgtgccggg

SEQ ID NO: 1867 - DNA, 423 bp, Gossypium hirsutum
  Clone ID: LIB3083-046-Q1-G1-H7
cgatttagatgttaatcaagcaatatcaatagggacagatgttgtgcagtttaatgaaacaattgaagatattcaaatacaacatttatatgaatgcacacaaggagatccctcaaccagttctgaattacatgcagatgctgatcgtggctccaaggatgttgaggaagaaacaatgcagcagcttaaaactgcaacatttgagagtgagactagtgaccaaccaatgaaaaaccatctatcattatcttcagagcttaatgatattgaggaagataaagttccggatacaccgacttccatcgacagtctccatctgttgcacaagaaattgttattgcttgacagaaaagaatccggaaccgaagattccttggatgtaagtgtttcagtgacattgagggtggtaatggggtactgact

SEQ ID NO: 1868 - DNA, 413 bp, Gossypium hirsutum
  unsure (1)..(413): unsure at all n locations; Clone ID: LIB3083-046-Q1-G1-H8
caggacccgacccggtaggatcaagtaggtcaagagaattttcctcactcagcttagcgtacatccttgtcctcaagtctctcccggattccactctctccattgcaggttcctcaaacgcattattactttcccagagctcaaacttactgagtacggaccgagtcggtgtacgagttggagtgagaggagagccaggtcggagcatggagctccttggagaaacaaaacatgatccccgagaacaagtagttcccattttagctttaccaatctgtagattacgtacggaagaggtgagttcacttaccgagttaaatgagccgctcggcgacgtaagtggtgagtcagaaggtggggatattggaggcgaagccaaaatggaagttggtganaaacataatctaaacgat

SEQ ID NO: 1869 - DNA, 245 bp, Gossypium hirsutum
  Clone ID: LIB3083-046-Q1-G1-H9
ctgctcaaacctaactttcgttgctgcgtcctctggagtcttggtatactgctggttcctgaacaacacgtctaccgaggcgacaaggtggaaccatatacccatttagtttccattggcctccactaaacccatcactaacatcacggtccgcacaagttggcctaccactaaccttcttgttctcacacataacactatccacgttcccatcacttacacatctcttgaatcgcggttgacat

SEQ ID NO: 1870 - DNA, 243 bp, Gossypium hirsutum
  Clone ID: LIB3083-047-Q1-G1-A2
gaggattcgagaggtctagcgtccgccatggctggtttgcaaagatcagcggtgtctttgaggaggctacggtcttcgaggcatgtttgggagggacggtttttgtctgagttgattcaatggagatcggaggaccttcaataagaatgacacactaatcagctgcagaatcaggaaccagatgcatttgcagaatagtcgtgctccatatatctttgacgatgttaatggtgttgcccccat

SEQ ID NO: 1871 - DNA, 222 bp, Gossypium hirsutum
  Clone ID: LIB3083-047-Q1-G1-A3
attcggcactagtattatttcactcacacactctgccaaagcttcagatatcaactgtggtccatacaaccaacttcctattggcgatacttcacaatgaaacagggattcgaatgatgtcatagtatcattgccaatggaaccatcatcatcctatctgattcaactcactgacattgttcttcatctccttgctattccttattctcacactatcctact

SEQ ID NO: 1872 - DNA, 342 bp, Gossypium hirsutum
  Clone ID: LIB3083-047-Q1-G1-B1
cccggactgaaggtttaaatggaacggttgtacaaatatcctgtctcgaccaatgcttgcagccgattttagcctttccgttccggttgagttttgagtgttaggagatcctggagggttctgcttgctagtttctatacaggcaggcgccaaaggtatggctccgaaggacccgaattctacaagcctgtctggctgatccatcgagccattggcattaggggataatgctttttcagaaccagagtgacggagttctgaagacctggattttccaccaccctgatttattgactgcatttgtgccagatcacggttgcttctctctggtgaatttggctc

SEQ ID NO: 1873 - DNA, 56 bp, Gossypium hirsutum
  Clone ID: LIB3083-047-Q1-G1-B4
ctcttgtgtttttttttatttcttttctttttctctttttttttcttgtttgtttt

SEQ ID NO: 1874 - DNA, 158 bp, Gossypium hirsutum
  Clone ID: LIB3083-047-Q1-G1-B7
ttcggcactagtttagttctgacactttatttttacgttttttgaataattacaattcttttctttttgaattcaggttttattttttggggataggggaggttgtgattatttattagtaatatattgtcttgttcttgatttatttgttttttttt

SEQ ID NO: 1875 - DNA, 97 bp, Gossypium hirsutum
  Clone ID: LIB3083-047-Q1-G1-B8
ggatgaactactacgcatgtctatccttgttgtctctcttaattcctacacctttcgccgttgccgtacagggaccatacatctggggggcacgatg

SEQ ID NO: 1876 - DNA, 312 bp, Gossypium hirsutum
  Clone ID: LIB3083-047-Q1-G1-C1
cagacttttgtggcatttgagaagccagagggggtcccagctgttggaaaattctcaaatatgctgaggttcattgtaaaagaggttgatggaagtactggtgaggctgatgatgatggagtagaggatgagtaccaactacaggagcttgaagttgttgccgctgattacatgttgaaagtgggtgtctcaaatttcaggaatgcatgggaaagcatgggtccagactgtgagcgtgtagatgaatatcaccttggcccaagggaaaacctgtctgaagctgttaatgccgtcataaatcttcttggcatg

SEQ ID NO: 1877 - DNA, 261 bp, Gossypium hirsutum
  Clone ID: LIB3083-047-Q1-G1-C2
gacatgtctaagatttctatgttttgcagaaatctagggtttttgtatctcataatttgaccacataaatactcaaacccccacactcaggtctcccctcttttcagctttgcttcaaatttcgatctcatttcccctaaattccgtcttttttcttcaaattccccacaaatggtcgtcactttcccagatttccacaccgaatccggccttaaacctcttaatgacttcctcaccagcacatctttacatctctgggga

SEQ ID NO: 1878 - DNA, 147 bp, Gossypium hirsutum
  Clone ID: LIB3083-047-Q1-G1-C3
gttgttggttttttttgggtttgtgttttttgttgttttgtttttttttttttgttgtggtgttttttttttttttttttttttttgtttttgttttttgtttttttttttttttttgttttttttttttttgttttttgttttttt

SEQ ID NO: 1879 - DNA, 257 bp, Gossypium hirsutum
  Clone ID: LIB3083-047-Q1-G1-C4
gggtgttgttgggtgtgtttttgttgtttttttattttttggggtgtgtgttttttttttttttttgttttgttttttttgtgttttttttttgtttgtttttttttttttttttttgtttttttgttgtttttgtttttttttttttttttgttttgtttttttttttttttttttttttttttgtgtgttttttgttttttttttttttttttttgttttttttttttgttttttgttttttttttttgtgtgtt

SEQ ID NO: 1880 - DNA, 76 bp, Gossypium hirsutum
  Clone ID: LIB3083-047-Q1-G1-C7
tttttttttttgggttttgtttctttttttttcttttgttttgtttttttttttgtgtttgtgttttgtttttttt

SEQ ID NO: 1881 - DNA, 76 bp, Gossypium hirsutum
  Clone ID: LIB3083-047-Q1-G1-C8
gagggcgagatttgttcagccatccagggcattcgcgatacacatggttcgtggtttctgccactcttctataccc

SEQ ID NO: 1882 - DNA, 249 bp, Gossypium hirsutum
  Clone ID: LIB3083-047-Q1-G1-D2
gtggcaggtcacatgactggactgagtgtccgtacgctcaccccggggagaaagcccggaggagatacccgaggaagtttcattactcgggtacagcttgccctgatttccgtaaaggaatctgcaaaaaacgcgattcgtgtcagttcgctcatggtgttttcgagtgttggctgcacccatcacggtaccggactcagccgtgtaaggatggtaccagttgctacaggagggtctgttttttcgctc

SEQ ID NO: 1883 - DNA, 373 bp, Gossypium hirsutum
  unsure (1)..(373): unsure at all n locations; Clone ID: LIB3083-047-Q1-G1-E1
tttttnttttgtttttttttttttttttttttgtttttttttttttttgttttttttttttttttntttgttttttttgttttttttttggggggggttttggtgttttgttttttttttttttgtgtggttgtttgtttttttttgtttttttgttttttggtttgttggtttttgttttttttttttttttttgttgttttttttttgttttttgttttgttttgtttgttttttttttttttgttttttttttttgtgtttttttttttttttgttgtttgttttttgtttgtttttttttttttttgtttttttggttttttgttttgttgtttgttttttgtttttttttttttttttttgttttttt

SEQ ID NO: 1884 - DNA, 374 bp, Gossypium hirsutum
  Clone ID: LIB3083-047-Q1-G1-E2
gaacatctatatgcaaacattccggaggctcaagagaaactccaaaagttaagagaaatcgagctagaaacacaattgacctcatctgaaattagaaaaagggaggaggaacacttgaaacttgccgcagacctcaagaagcagcccgaggtggcatctcggagatcctatattgagcggataaaagagattacaaaaaacagtggcaaactcgattctgacatagaacgaatcttaagagatactaggacactccaattagaaagcaattccattcaggagagccttcatcgcacctatgctgtcatagatgaaattgtcttcagagaagcaaagaaagacacaaaacggggacaagcttatatactgctcac

SEQ ID NO: 1885 - DNA, 219 bp, Gossypium hirsutum
  Clone ID: LIB3083-047-Q1-G1-E4
tcggcactagagtactaagaagtacctgtgattgagtgtgcgtatgatgtcttttattacctgttgcttccgtgttatgcaagcttctattccttcaagggtgtgggagacttgaaatggtttactgtatgtgaggctttttcatgtttcatttgtgtttgggttgaatcttgatactcttgttgtctgtattggaagttcattgttaacggaacttgt

SEQ ID NO: 1886 - DNA, 303 bp, Gossypium hirsutum
  Clone ID: LIB3083-047-Q1-G1-F1
attggaccttttacatcactttatcatatattacaggtgttatattgagctcatttactttgttaggggaactttagtaaaatgcaataacaatagtatggcgcagtttcatttaaattctttagtagttgttactatcatgcatggtactgctggtttttacgttgtgtttgtaacatttcttggagctactttataccatttacttggggatttgtaatataatctatgcacagttcacatttttatttgctctaactttgtttaagtgtgttggtccaattacagtttttggtccttttt

SEQ ID NO: 1887 - DNA, 235 bp, Gossypium hirsutum
  Clone ID: LIB3083-047-Q1-G1-F2
caaacaaataatgctggaaatctgattgatagaattggtatatgacgttacattttttaaatgagaacaaaaaatccaatttcacgcgcaaatttcaacaccaaaaccataataaagaattcatcaaaatggaaaacctttatccctcgtctcaaaacgtccatttccagatcttgatacggagatcaaccttacatttggcgccggagacattggccgccgccggcaacttacc

SEQ ID NO: 1888 - DNA, 207 bp, Gossypium hirsutum
  Clone ID: LIB3083-047-Q1-G1-F3
acaagaactaataacatatcatattaaaaaattaatcgtattaattacactattttactgtattcatactagttgcggacaattgaccaatgaatcatgaaatagggaattggttaagataatctacgcatacgtgaagctatatatatatccttaagtaacttggccattgattctagacttaggagagaccatgagtatctattt

SEQ ID NO: 1889 - DNA, 256 bp, Gossypium hirsutum
  Clone ID: LIB3083-047-Q1-G1-F4
ggtcggttcatctttttttaactcagaatctcgcccttcttttcctgtttttttctttgcttttttcttttccttatacaaaaaatcccaatttttgcgcgtcatcatcgtcgagtctccgaatccgagaggcgcttctttttccggcaagaagaacgcggatgcaggcagctagggctaagtcgccaatagcaagctaggatgcaacaacgctttatcctatcatcgcagtcgcttgcttggtcctcagctagag

SEQ ID NO: 1890 - DNA, 218 bp, Gossypium hirsutum
  Clone ID: LIB3083-047-Q1-G1-F6
agagagtcttgctcgggaagaactctcggattactgctaggagagccgtacgctccgaacctgaatttattcccgtatcgccggatgatgtgcctgagagggatgagtaatattagcaattaacggggattcatcatgtacgtgatacatccgttgctatgtgttctatacctgttgttatacttattattaatattgtttgtactactggtctttca

SEQ ID NO: 1891 - DNA, 367 bp, Gossypium hirsutum
  Clone ID: LIB3083-047-Q1-G1-F7
atgaaataattctctctgaattggataccattggggacttcaatctcaggaaaactgatttaccatagggatctcatattgccaatacggaatctgcagtcttaccggaggatacgaagaccaaggccaatgttgatcagcctgttcttgaagcaagatcagtacaagatattgatttggctttcaagcaactttatgaatggatcgatgttgatgaagtaattcatccaagtatgattgacgatccacatgatcaagcagattacaatccaaaattacctgttgttgacgtaagatctctagacgatacctgtaaccttttcaacaatcccggaatccaaattagccaaaactgccataattcttc

SEQ ID NO: 1892 - DNA, 246 bp, Gossypium hirsutum
  Clone ID: LIB3083-047-Q1-G1-G1
gacccaggccggatcttttttttagtcggtgtcgaaattgaataacagagattcaataataacaacataggggtcgttcaggataaatctctcaaatcagggaggcacatcagagatgaaattcaagcaaaaagattattataaagaaaagagaaagaagtagcccatatacgagagatctagaattcgcagcagttaacgcaatcgggattcttaagcctctcaactcgctgattgaactgttcg

SEQ ID NO: 1893 - DNA, 342 bp, Gossypium hirsutum
  Clone ID: LIB3083-047-Q1-G1-G2
aaatgaaataattaaaataattgctgcctaaggtatcattaagtctccaaatggtgaacaatgggataagtcaaacaaacttaggatcatgccttcccatttttaccttaatttgctacgaaaaaagctttcaacatcctaacaggaatgtcgaatagattaaatcacccctaaaaagttgcattttgcttatattatctcacaaaatgaagagcaatccatcctaccataaagaacttaaaagaatacgaattcagtaccgtacattttggctgtgcaataactccaacacagcagacactactccctttccttcaacagatatatcacatccaggttctt

SEQ ID NO: 1894 - DNA, 297 bp, Gossypium hirsutum
  Clone ID: LIB3083-047-Q1-G1-G3
tcctccgaggattatgttggaagctacggtgttgctaatagacagtcgagtagaggaattgctgcctagggggggggggactgtgatttggatagcagaagtcatgaagtagggtgaataaacaggtgaaggatttgtgaattcgatatacaactgccttattacaatgtcagcttacaaggaaattgatgttataacactaatgagggatattgatttgagagtgagcagttacaaggggaggttttgtgtaaggtttgagattccatttgtttgtttgttcgtttgttttgtcta

SEQ ID NO: 1895 - DNA, 90 bp, Gossypium hirsutum
  Clone ID: LIB3083-047-Q1-G1-G4
cgtcgagttttcttgtttttttttttgtgcattcacgcgttcccttgtcgctttacgttccggtgccccccgcgtcgttgtcccgtttct

SEQ ID NO: 1896 - DNA, 101 bp, Gossypium hirsutum
  Clone ID: LIB3083-047-Q1-G1-G5
gcatgaattcggctctatgctgcttcatgtgtattcatggagggtgtattattaatccatcaatctatatatcatatgaacgtaaactctactgctgttat

SEQ ID NO: 1897 - DNA, 287 bp, Gossypium hirsutum
  unsure (1)..(287): unsure at all n locations; Clone ID: LIB3083-047-Q1-G1-G6
tggataaccgaactgcaggtttttttttttttttcagtgancagatttaagactttttctcagacttgtttgccatgcataatgtataacaaaaaggtctttcaagatttttcaatctctgagcactgtaaatccattatcagatagaggtcagcaggtcaccaatcattgctctttcgccctctttcgtgccagaaatcgttctctagcggctgcaacagcattcagaactccttttatgatggtaatttttgggttgatcaattgatggttgtttctctaaattg

SEQ ID NO: 1898 - DNA, 370 bp, Gossypium hirsutum
  Clone ID: LIB3083-047-Q1-G1-G7
gtgttgttttgcttgaaatcattactggaaggaaagctatcgacaattcgagagctggtggtgagcaaaatctagttgcctgggctcgtcgtttgttgaaagatataaggaaattcgcgcaaagtggcagagccattacttcaaggacaatatccggtaagaggtttgtactaagctcaagctgtggctgctctgtgtgttcaagaatagccgaatattctaccacttagacccgatatagtcactgccctcacctatcctgcatctcagaagtatgatccaggaattcagaccgtttaaggatcacgtaccggttcttctactccgagaatgaaactggaatactttcaggtaacggaaagtaaccatt

SEQ ID NO: 1899 - DNA, 227 bp, Gossypium hirsutum
  Clone ID: LIB3083-047-Q1-G1-G8
gcatgaattctgcactatggagctggattcattggctcccatttagtggataaattgatggagaatgaactgaatgaggttattgtcgtcgacaactactttagcggcacaaaggacaatctctataaatggattggacatccgatattcgagcttattcgtcacgatgtcatcgatccgttgctcatttatgttgatcagatttatcatcctgttttccctgcttc

SEQ ID NO: 1900 - DNA, 293 bp, Gossypium hirsutum
  Clone ID: LIB3083-047-Q1-G1-H1
agcttaaaaatttccttgcataatgcctgataatgttacaaagtccaacaataacaagcttacacactgtgaaacgtacgtatgaagtatgaaaaaacaaatttgggtgaaaaatgaaaagcagaaacagaagaactacaattagactgcacctttaatcaaatttatgtgacttgggaacagtttcttcccgcaaagtgtgttagtgatggaacctacagcccaaacctggagacagctcgtgttgaaacctgaacagtatttcgctcaagcatcacgactgacaccctctc

SEQ ID NO: 1901 - DNA, 357 bp, Gossypium hirsutum
  Clone ID: LIB3083-047-Q1-G1-H2
gagattttacagcaatttgattgggaagttccagattgggtcattgttcccggtggaaatcttgggaatatttatgctttttacaaaggattttcaatgtgcaaagagttgggacttgttgataagattccaaggttggtctgcgcccaagctgcgaatgcgaatccgttgtatttgtatttcaagtctggttggaaagactttcagcctgtgaaagcgaaaacaacatttgcctctgccatccagattggtgatccagtttccattgatagagcagtatatgccttgaagaattcaaatgggattgttgaggaaaccaaagacgaagagttaatggatgccatggcacaagctgat

SEQ ID NO: 1902 - DNA, 360 bp, Gossypium hirsutum
  Clone ID: LIB3083-047-Q1-G1-H3
gaagcgagaggtaccagcgtccgccatggctggtttgcaaagatcagcggtgtcttttaggaggcaagggtcttcggggcttgtttgggatgacaagtttttgtcggagttgaatcaagggaaaccagaagagcagcaacaagaatgagacacgaaacagctgcagaaagaggaaccaaggcagttgcaagacagtcgtaacccagaaaagtttgacgatgttaagggtgttgcccccaccaacaccatccaaagaaaccgatcacatggtgaaagactaggttaccggactggtggtaaggtatcccctgctattgacccgcctttctcaaaggtttcagcttgtggtttctgcagtgc

SEQ ID NO: 1903 - DNA, 369 bp, Gossypium hirsutum
  Clone ID: LIB3083-047-Q1-G1-H5
gtggctatgaggagaagactgcatgggggaaagagattggatggatatatggttcagtcactgaggatatcttaaccggcttcaaaatgcactgccgaggatggagatcgatttactgcatgcccttaaggccaacattcagatgatctgcacccatcaatctgtctgatcggttgcaccaggttcttcgatgggctcttggatctgttgaaattttcctaagcaggcattgccctctatggtatggctttggaggtggtcgtcttaaatggcttcaaagactagcatatataaacaccattgtctatcctttcacatcccttccactcattgcctattgttcactaccagcaatctgtcttctcacag

SEQ ID NO: 1904 - DNA, 289 bp, Gossypium hirsutum
  Clone ID: LIB3083-047-Q1-G1-H6
gaatttatttgcatggggcttgttaagaaagagaagataaatatggcagatgataacacagctacgtgcgtagatatcctcttagggatcattttgcctcatctcggtgtcttcctcaagtttggttgccacgtggagttctggaattgtcttgtagtcaccctgtttgggtacatccctggtattatttatgctatctatgctatcatcaaattgtcctctaaacgcatccttctcatctgtagagatttggacttcgactctggttctgtttgaatacgtttccgtt

SEQ ID NO: 1905 - DNA, 364 bp, Gossypium hirsutum
  Clone ID: LIB3083-047-Q1-G1-H7
gtgagaagtaggaaaagcaagtgcaaggaagagaagaaagatgagcagcattggaactggttacgatctctcagtcaccactttctctcccgacggccgcgtttttcagatcgagtacgcctccaaggccgtcgataacagtggaactgtaattggaataaaatgcaaagatgggatcgttatgggagtggagaagctgatagcatcaaaaatgatgttacctggctctaatcgtagaatcctttccgttcatcgtcattccggcatggcagtagctggattagcagctgacggcagacaaattgtggcccgtgctaaatctgaagctactagttatcaaagtgtgtatggtgaacccattcct

SEQ ID NO: 1906 - DNA, 257 bp, Gossypium hirsutum
  Clone ID: LIB3083-048-Q1-G1-A1
gcataactcggtactttcctgccaaggaaagcctgccaatggcaaagagctttatagcgacatactattggggattcccttccctgtaaacccagcttctctgcaataatccgatgtaataagacacaacaatgtatacggcaccttcaccggtcgaactctgttcttcaatttactatcactgtttctttccacaattccactcccacattccaacactttcttcacgaatctttcaaattcggctaacggttcat

SEQ ID NO: 1907 - DNA, 272 bp, Gossypium hirsutum
  Clone ID: LIB3083-048-Q1-G1-A12
gttaacagaactcacaccacttgtggagtccagcatttgccacagaagtaaacattgtggacaactcagtctgtgtgctttttccttaaacaacatgtggacacttaagattgccaaagggggtgttcgatatagtgggggatggctaatgactttgaccaatcatgaacgatctcaagtctgggaattctgccctgaatcaggaaccccggaagatctttctaaggtggaaatgggtcgtcagagttttcgggataaccgtttccacaaaa

SEQ ID NO: 1908 - DNA, 314 bp, Gossypium hirsutum
  Clone ID: LIB3083-048-Q1-G1-C3
cgcttcgctccaaggataagatcaagttctcatggttcttatcacgtgggagagcgggcctgtcaatcactttggggattgaaaagggtcttgcaaacaaccggtttgggcaaaggccagagactcttgttccaaggaaagagatagtgatgaagaatgtttgcactggtaggagtaaaagacatgtcacaggtggtacttttagaggacccagctcgcaaagagaggaagcttgtggcgatgaatagcacccaaagtgtgctaaacgcctgtgaagacgttgccaaggtcaggtcacaggttgataaactctc

SEQ ID NO: 1909 - DNA, 87 bp, Gossypium hirsutum
  unsure (1)..(87): unsure at all n locations; Clone ID: LIB3083-048-Q1-G1-C7
gtcttgnctttcttttttctcatctctccgtcgttgtgttggcgcttccttttccctgtcgtgccgctccctcctcgttcgtcttct

SEQ ID NO: 1910 - DNA, 273 bp, Gossypium hirsutum
  Clone ID: LIB3083-048-Q1-G1-C9
ccccgggcactaaaattcgggccgatgactctcatcttgtccgtgactattttgctaacagactggtgccccactttgttcaatactttaacataaacaccattaacgatattcttcctctctccacagcgctgaggaggttgaggactgcctgctcaaacggcacacagaactttatcttccactgctcaaccaaccactcatcttcgacccttgtaagacggtacccatttttactccagcattacccaagccacgttttactaacttatc

SEQ ID NO: 1911 - DNA, 355 bp, Gossypium hirsutum
  unsure (1)..(355): unsure at all n locations; Clone ID: LIB3083-048-Q1-G1-D1
gggctgcaaaaatcagcacnagactgtctctatatttctcctcagatctctctttttttctttcacccaaataaagcattcgctcttttttctctccatttctctctcaatttccctcttgccaaacagggttgacagagtgcattctatttgctttcaagctagtggagttcctggatcgaattacattttcgattcttgttctcctgctttagctatatccaaaccgatcaatctccgtttctgcggacttagaaaagaagccttcggtttctctggtttgactcactcgagttctggccgagttcatttctcgagttctggatattctaaaaaagtctctgcttctgctgaa

SEQ ID NO: 1912 - DNA, 157 bp, Gossypium hirsutum
  unsure (1)..(157): unsure at all n locations; Clone ID: LIB3083-048-Q1-G1-D10
cccccgggnaancaaaattcngcacgagcatctagctgttccctttctaaattgatgattacgagacaacatttgatctcgcttttccttacttcatttctcttgtttttccatccccattgatcaataacttgaggggagggtgccgttcattctc

SEQ ID NO: 1913 - DNA, 274 bp, Gossypium hirsutum
  Clone ID: LIB3083-048-Q1-G1-D2
gtggaccctccaccggcacctctgattgatatggctgaactcacatcatggtgcttttagagagccctcatacttgactttagaggcactctcctcttcctctatgtcactgtttgcactgtaattggtcacacgaaaaaagaagatgcatctgatggtgttgggcccttgggtattgcatgggctttccgtggcatgatacttatccttgtttactgtactgccggtatcttcacgtggacacattaacctcgcggtgatctttgggttgttt

SEQ ID NO: 1914 - DNA, 337 bp, Gossypium hirsutum
  Clone ID: LIB3083-048-Q1-G1-D3
ggagtgtaggttcaccagttgttgctagggagaaatcaaaatggggccaggtggaccaggaggacctccgggatggggcggtcctcctcccggaccgggtttttccggtggcatttgtgacttcattggttcttgtttgagctttctgtgttgctgctggctgcttggacactgttttggtggtccaatgggtccaccagggccacctggaccacctggatttggacctccaccaccctagttatatgtctaccatcttcatattccaacacaaaaattggcggcttttctagcttctatctgggtttcaacttagctatctaaaatacatatttat

SEQ ID NO: 1915 - DNA, 352 bp, Gossypium hirsutum
  Clone ID: LIB3083-048-Q1-G1-D5
ctacacatttggaagaccttaataaaagatataaagatccttacacagatatgatactggttgatggtattactcttcaatgcaaccacttgcagttagttgtttcatggcacatgaaggcccccaccatgtgtgaatattccaaggaggaatttttcactgggttgcacgcacaacgtaaacattctttggagaaatttcgtgagaggataccatttatgccttctgagctgaaagatgaacaaaaattccgtgagatatataactttgcatttggctgcgcagcagaaagggtcagacatcttttggaatggatactgcaaatggtatgtgggaatttgctgtccgctga

SEQ ID NO: 1916 - DNA, 85 bp, Gossypium hirsutum
  Clone ID: LIB3083-048-Q1-G1-D8
gggagtcctgctgtgacattcttccgatctctcattgcgatggtgatggcttatatcacctcctcacatctaccttttattggtg

SEQ ID NO: 1917 - DNA, 360 bp, Gossypium hirsutum
  unsure (1)..(360): unsure at all n locations; Clone ID: LIB3083-048-Q1-G1-E1
gggctgcaaaaattnacacgagtcagcattacagggggaaccttctgtattgcattatggcgtggaacacaagttgctgtgaaaagggttggggatgaagtttttaccgatgacgataaactgacggcatttcgagatgagcttgcattatttcacaaaattcgacatccaaatgtacttcaatttcttggtgcaataactcaaagtagtcctatgatgattgtgacagaatatttacccaagggagatttacgagccttcttgaagagaaaaggagccttgacaccaatgacagctctgacacttgcacttgatattgccaggggaatgaattatttacatgagaacaaaccggcacca

SEQ ID NO: 1918 - DNA, 381 bp, Gossypium hirsutum
  unsure (1)..(381): unsure at all n locations; Clone ID: LIB3083-048-Q1-G1-E3
agagaactagaaggacattagtggtaaccccagagctcttaggaggttgaggactgcttgtgaaatggcaaagagaactttatcgtccactgctcaaacaaccatcnaaattgactccttgtatganggtatccatttttactctaccattacccgagccaggtttgaagaacttaacatggatctattcagaaagtgtatggaaccagttgagaaatgtttgagggatgctaagatggacaagagcactgtccatgatgttgttcttgttggtggttccactaaaatttcaaaagtccaacaacttttacaagattttttcaatgggaacgagctttgccagaacatcaacccctgataggccgttgcatgtggtgctgc

SEQ ID NO: 1919 - DNA, 97 bp, Gossypium hirsutum
  Clone ID: LIB3083-048-Q1-G1-E7
gctgctctctgtctcatgcgatgcccaacaacgtttctattccgtactacgttgggtcgatttcagactgaggacgcctaattttctatggctgaca

SEQ ID NO: 1920 - DNA, 182 bp, Gossypium hirsutum
  Clone ID: LIB3083-048-Q1-G1-E9
gagacgttttatgatggataacacatctaccatgatatttgaaccatgtcatcaccatttgtttccacatatctcacattaccatttactacacgttattggggtggcgagggcatttctctgctactattatcgagagcctttatcattcctctttttctctttctacctcatctgtagtt

SEQ ID NO: 1921 - DNA, 262 bp, Gossypium hirsutum
  Clone ID: LIB3083-048-Q1-G1-F2
gggcaagcccacttgtgctgacccaaacttacttaaacgcaccattctgtggcaatggcaccttaatgggtatattgtatcacattgtgattccgttggtgtaatgtaggagagtcagcatttcactgttacaccaacaagagtctgctgcagctactattaaagcaggtttggatttggattgccggccgtttttggccatatatacggatttggctataacggagggtttgttaactgtaacctgatttgacatggcttt

SEQ ID NO: 1922 - DNA, 357 bp, Gossypium hirsutum
  unsure (1)..(357): unsure at all n locations; Clone ID: LIB3083-048-Q1-G1-F3
acaaagcaatcaaaagcagaggaggtgatttccgctatccactttcctatggtcttttctttccttttactagtatttgctcacatctttcatcgatatatttcaaaaaaaaataaacacaagagaaggaaaagcgaaagaaatctttctttctatcagtatttaccttgcgaatccgtcttcgatcctctgtcgtttcgtcgaaatcgaagctagggggttttgaggtcnaanaacactacgccaaaacccgaaacacaaaacgtcgttctcgatggcgatttggtgtttgaggacgcactttacggtttggctaaaggaaacggataccaaagagtgggagaaggtgggtatggt

SEQ ID NO: 1923 - DNA, 350 bp, Gossypium hirsutum
  Clone ID: LIB3083-048-Q1-G1-F6
acaagcctagatcctcttcatctgccgcatctcagtacctccgcagttcactgagaaatggatgaggaagtttaaggctgtggttcctgagtcactcttgaagaaacaaaagagggctgaggaatgggagcttgccacaaagcacgagcgttaagttgcaaagaataacaaagtcgagaaccgcaagctgatttacactacggctaagcactatgcacaggagtacgacgctcacgaaaaagagctgattcacttgaagcgggaggcacagttgagaggaggattctatgtagatcaagacacaaaactcttgttcatcatccgaacccgtggtatcaatgccatgcacc

SEQ ID NO: 1924 - DNA, 458 bp, Gossypium hirsutum
  Clone ID: LIB3083-048-Q1-G1-F7
ccccgggcacaagaattcgacgaggaagacgcagctaaactttgcccgtggcacacaccattggcaagagattgtcgacctctgtttggcgcatcaggaaacttgctgataactgcactggtcttcaaggattccttgttttcaacgctgttggtggaggtaccggatcaggtcttggttctctccttttggagcgtttgtctgtcgattatggcaagaaatccaagttgggtttcactgtctacccatctcctcaagtctccacttctgttgttgagccttacaacagtgttctctcaactcactcccttttggagcacactgatgtggctgttctccttgacaatgaagctatctacgacatttgcaggcgttctcttgacattgagccggccacctacaacaatccttaacgtcttgtctcccacgtcatttcctccctgactgcctcactgagg

SEQ ID NO: 1925 - DNA, 154 bp, Gossypium hirsutum
  Clone ID: LIB3083-048-Q1-G1-F8
agcaagctctcttcctactttgttgagtggattcctaacaatgtgcaatcaacattttgtgatattctacgcacacgtctcaagacgggctccacatttatctgggggtcagcgtcgactcacgatatctttaggcgtgtgagtgaccagttta

SEQ ID NO: 1926 - DNA, 203 bp, Gossypium hirsutum
  Clone ID: LIB3083-048-Q1-G1-F9
gttatggtgggtaccgaggaccatgttaatctatgagcaaacaatttctcagagagatatgctattgggacatcagcctagacagacaatgactatggggaggcacgagcaccacccttctttgatctggtggactcaaatcatggtctttttacagacctggtattgccgagtttgtagccacttttttgttcctttacatc

SEQ ID NO: 1927 - DNA, 216 bp, Gossypium hirsutum
  Clone ID: LIB3083-048-Q1-G1-G11
agtatagtttaaagatgtcaaaagtcacctctctcagtcaaaatttttaacttgtgaagatatggaatctcttagcatgcatgatggatttcttctgggagcttgggtagaaagtgctaaaaacttgtacaaggtgaagaagaagagaaacagttcgagtggaatgcatgaactcaaataatcatgtggtttgacaacacagaggatgaagctagt

SEQ ID NO: 1928 - DNA, 212 bp, Gossypium hirsutum
  Clone ID: LIB3083-048-Q1-G1-G12
gaggccattacgcctggaaaggtgtcttttcttttaggaattcttcctgttttattgcatggatatattcacagtttctacaatagaagagatctgcatctcattcggagagtcgatgcagaccatactctggttgaatcaggagattccaaaattatcgaagatgaccgggctcttttgcttgacggaggtctcactacatcaacatctgt

SEQ ID NO: 1929 - DNA, 260 bp, Gossypium hirsutum
  Clone ID: LIB3083-048-Q1-G1-G2
gaaacgctaatgttaatgagatttctaacaccatcaccgaaagatggatgaacaacatgttagcacaacgactcaaggatttcttgacccgactggttagagaccatgaaagcattgatctggaatggttaacacatgtccccgctgataaagcacaagattatcttttaagcatacggggattggggctgaacagcgtggagtgtgtacggcttttaactcttcaccatcttgcttttccacttgacacacatgttggc

SEQ ID NO: 1930 - DNA, 242 bp, Gossypium hirsutum
  Clone ID: LIB3083-048-Q1-G1-G3
gccttttcatcgaatgtagtgctaaaacacgcgttaatgtacagcagtgcttcgacgagcttgttctgaagatcctaaatactccgacccttttggctgagggttccaaaggtgggaaaaagaacatctttaaacaaaagccaccagaactcgatgcatcggcaagcggctgttgctaataccaaatctcaagcgcggtgattcttacccacttctgaccattatttacagtatggtttttc

SEQ ID NO: 1931 - DNA, 383 bp, Gossypium hirsutum
  Clone ID: LIB3083-048-Q1-G1-G4
ggaagaagtcaaattcctaccctcgggggaaaagagagagataggcatactcttccatgggtctttgcacctccaaaccctccccaaacccttctgattctacaaatgcctctatcaatacccggaataacgatatccaccgcaagcctaactctgtttcggcttctcctttacctgatggtgtaaactccaaggaagatcaaggtaaacaaggagaagaagaaaaagaaagctccaattccaacaatgaaggcaagaaatcgccgtttttcccgttttatagtcccagtccagctcaatacttgttttccaaaaagtctccggcgagatcttcaaccaattccactccaaaacggtttttcaagagggcattccctccgccg

SEQ ID NO: 1932 - DNA, 310 bp, Gossypium hirsutum
  Clone ID: LIB3083-048-Q1-G1-G5
caatctgatatgtttgatcagcggcttcaggctaagattctgaatgtggttgatgtctcttatggaggagagaatggtttcaaccaggcaattgagctttcctctgagatactggcgaatgtgaaattcatacaggagaagcgcttaatacggaaatactttgaggagatcagtcaagatactgcgaagtatgttttcggagtggatgacacactgaacgccttggagatgggagccgttgagacacttatagtgtgggaaaatctggacataaatcggtatcacctgaagaatagcactactggtgaaa

SEQ ID NO: 1933 - DNA, 226 bp, Gossypium hirsutum
  unsure (1)..(226): unsure at all n locations; Clone ID: LIB3083-048-Q1-G1-G6
tcccgttttccantcttttttgagaaatcggtaccgaaaaatgtcgtcgtcggggaggaacatcacccttaagagctcagacggcgaatcattctaggttgaggaagcggtggcgttggcgtcccacacgattaagcatatgatcgaggacgattgcgctgataacgggataccgttgcctaatgttacgagcacgatcttacccaaggtgatcgagtactgcaag

SEQ ID NO: 1934 - DNA, 430 bp, Gossypium hirsutum
  Clone ID: LIB3083-048-Q1-G1-G7
ggcgagcggagggaaagtgtcttttaaagtcactcttacctctgatcctaagctccctttcaaagtgtttagcgtgcctgaagcagccccttttacagccgtcttgaaattcgcagccgaggaattcaaagtccctcctcaaaccagtgctatcatcaccaatgatggcgtgggaatcaatcctcagcaagtgcaggaaatgtgttcctcaaacatggatcggaacttcgcttgattccccgtgacagggtgggagccttttgaaataacaaaaacttcatttgttatctctgagtgagaagactggttatgactttgtttggttatgggtcctttgttttggtatgtatgtttaaacttttacttgatgtagaacatgacggatagcaacttccttttttcctacagaaaatatataagagcaatataa

SEQ ID NO: 1935 - DNA, 370 bp, Gossypium hirsutum
  Clone ID: LIB3083-048-Q1-G1-G8
gaaaaatacagcaatggagataagcaaggcgatgatgatggcagtggcagctgtcggattggctttagtgctaatggtgcctcaggccgatgctacaacgtacattggtggagggggaggcatcggttggactactaatgtcaattacactgtctgggctcgaggaaagcacttctacaatggcgactggctttattttgtatatgatcggacccacatcaatgtgctacatgtgaacaccactgcctacgagtcatgcaatgccgatcactcccttcacaactggaccaaccggatctggaaaggatgtggttccgcctaatgtgactccccactactatttcaatagtggcacaagcttcctgctacg

SEQ ID NO: 1936 - DNA, 418 bp, Gossypium hirsutum
  Clone ID: LIB3083-048-Q1-G1-H1
cgagatttgattaaccatggctcatagcattcgtcaccctttcttccttttccaacttttactcataagtgtctcactagtgaccggtagccacactgtttcggcagcggctcgacgtttattcgagacacaagcaacctcatcagagctcccacaattggcttcaaaatacgaaaagcacgaagagtctgaatacgaaaagccagaatacaaacagccaaagtatcacgaagagtactcaaaacttgagaagcctgaaatgcaaaaggaggaaaaacaaaaaccctgcaaacagcatgaagagtaccacgagtcacacgaatcaaaggagcaaaaagagtacgagaaagaaaatctccagttccccaaatgggaaaaagctaaagagcacgagaaacacgaggtcgaatatccgaaa

SEQ ID NO: 1937 - DNA, 474 bp, Gossypium hirsutum
  Clone ID: LIB3083-048-Q1-G1-H10
aaatatcatgcatttttggcctctgaatctgtcatcaaacagatcccccgtctcttgggtcctggtctcaacaaagcagggaaattcccaacccttgttactcaccaggaatctttggagtccaaagtgaatgagacaaaggcaatggtgaagttccaattgaagaaagttctttgcatgggagtcgccgttgggaatgtagcaatggaggaaaagcagatcttccaaaacgtgcaaatgagcgtcaatttccttgtttcattgttgaagaaaaactggcaaaatgtgaggtggctttacttgaagagtaccaagggaccttcaaacaggatcttttgaattatgcatggagtgaaatcatttttttaattgagaatgttcaaaaattatgttatttgatgttggaatcacgaattttttagacattgaaagtttttgtttgcattcaaaaaaaaaaaaaaaaaaaggggggcc

SEQ ID NO: 1938 - DNA, 274 bp, Gossypium hirsutum
  Clone ID: LIB3083-048-Q1-G1-H11
ttgaagtagtaatatctatagcatacagagatggagaggcaaagaagcaagcaggtttgtttgttgatgtgggttttggttgctgcctttttctcccacaatagggtcattgcagtgacctccactggccttggtgagcagaaaaactactatccagctcctgaccctcatgctggaactcccccttcaggttcacatggcacaccaccatcttcaggaggtggatcacctccctctcatggaaccccgtcacatggaggtggttacacccttc

SEQ ID NO: 1939 - DNA, 274 bp, Gossypium hirsutum
  Clone ID: LIB3083-048-Q1-G1-H12
gtgtgggcttctcgccacatatggatacagaatgctgcagccacgtcagctgattttgcacagcatttacgctggatgacccactgccgcttgagcattccacaacacgcactctttctgcatttaccagcctggctgaagaaaaggatgcgatgatcactgatcgggagatccacccacttgtgattgttacacagcatagtgggaaaactgagcgatcaaaggccggtgcacaacattcaaccggcatacctagtgagcttgctgctatgat

SEQ ID NO: 1940 - DNA, 355 bp, Gossypium hirsutum
  Clone ID: LIB3083-048-Q1-G1-H2
ataatgcacaaggaaaaagggagtccaatgaggtcacagtagcattgccaatggaaccagcaccatccaaagcaactcaacctactgacattgttgatgatttcaaggacattcaagaattgcagactaacccaatcgaaaagaccgaaggaaatgcaactttgaaaccaaacccgtcgggggaagaccaaagctcaaatgccaaaatggttaccgtaaataagccaatgcaattagatcatgtacaaggtgatgaagaatttataatgccaactaaagttgtttctgaagataacatagcaccagaaggatttggtaaagatattcctgagacaacggtccatcctgtgccgcc

SEQ ID NO: 1941 - DNA, 301 bp, Gossypium hirsutum
  Clone ID: LIB3083-048-Q1-G1-H3
attcattcagtgaggtgaagaaaaatgtcttgctgtggtggaaactgcggttgcggctccggttgcaattgcggcggcggcggcggctgcggctgcggcggttgcaagatgtaccctgagatgaactttgctgagcaaaccacaactgagacacttgttcttggcgtggcaccccggaaagtgaactttgatggagctgaaatggaaactggggctgaaaatggctgcaaatgtggagataactgcacttgcaaccccttgcattgtaaatgaagggaaaaaaaaaaccgaagcatattat

SEQ ID NO: 1942 - DNA, 407 bp, Gossypium hirsutum
  Clone ID: LIB3083-048-Q1-G1-H4
atcactaaaattaagttaaatttcatgctacaaaaatcactaaaattaagttcagatttcatgctacaaagcaaatgcacaacatgcagtctcgtggggaaacagataattcaaacaggcatagataaagctcaatcaaatgataaaaacatattaacccacaatttcaacagattgaaaacctttctccatcgacgccttcacagcattcaagaacaattgtgtcttccggctgattgtcggccactttttatccggttgtgctccattctttttaatatttgcaaccaagctggcaaactctctcaccatgcaggctttctgaggtaaatctacagtgacagtgtgctcactcggaagttgcacccatccggttacaagttcgttaaatccaggttttgcggacg

SEQ ID NO: 1943 - DNA, 397 bp, Gossypium hirsutum
  Clone ID: LIB3083-048-Q1-G1-H5
gaaaaaatggttctgctagacaaaatgtgggacgatgtagtagctgggcctcaacctgaacgtggtctcggcaggcttaagaagatcaccacccagcctttgtccatcaaagatgaaggagaaaagaaaaagtaccagaggtcgttgtcgctgccgaatagtccagtgtcaggtccgacacccgtgacaccgacgactccgacggcgcgtaaggagaacgtgtggaggagtgtgttccatccgggtagcaacctaaccaccaaaagtatatgttctgatgttttcgacaagccacaaaccaactctcctaccgtctatgactggctttacagtggggagaccaagagcaagcatccctgagagggtggggactgacaggccgctatcacgctgctct

SEQ ID NO: 1944 - DNA, 387 bp, Gossypium hirsutum
  unsure (1)..(387): unsure at all n locations; Clone ID: LIB3083-048-Q1-G1-H6
caggacagtgaatagctcagctgagaagatgagacaagagacagctacagtaaatggctcggctgagaagatgaagaaagagacggccttgacagtaaagagctcgaacgagaaggtgaagaaagaaacagccttgacagtaaataactcggctgagaaggttaanaaagagatcgcttcaacagtgaatggctcagctgagaagatgaaaaaagagaccactgtggcagtttcgaaatcacctgacattgaaactatgctggggccattanggatgaatgagacatcagatttatttcatgcagattcttttgttgctgattcacagccttcgatagatagtatcgttaaggatgaaaataatcccatagcaaacgtggagctgaa

SEQ ID NO: 1945 - DNA, 353 bp, Gossypium hirsutum
  Clone ID: LIB3083-048-Q1-G1-H7
gagagacacacctcaaaaaggatctagaaaagagaatatctccttttattttcatttcgtcttcatttcatctcaaatccatcatcgaaattacttgtagttatcagaatggggacaataggcaaaactactacggccactatttttctttgtcttcttctgtttcctattgtcttttccacgcctaatgacagatttgttagaattggactcaaaaagagaaagattgaccgaaacaatcggatggctgcacaccttgaatccaaggaggaaaaggcatctgaagcttttcttagaaagtatcgtcttcatgggaacttgggggaatcagaggacattgatattgtggcact

SEQ ID NO: 1946 - DNA, 393 bp, Gossypium hirsutum
  Clone ID: LIB3083-048-Q1-G1-H8
acagaaaggcactcaaagcataggtactatagataacaaatcacatatacccgaaactacgggtttatcatcatcgagactgataaaagtctttatggaaaaacttggaaatcggtaattgtccaagttttgccatttcgaaacctataaacatttcacttaagtaaaagacatactgtaggaaggaaggaagcttccccgttgcaaaagcctaaaagaactgtattcagttagcacggcttttgaagacatcgagacccatctcggttggatctgttgcttgcaattccacttggattccatccagttctcgcttgaatctgtctttggagctaccgtatatcattttgctcctgattcttgatgtatcgggagacaagcaatgaaaaagat

SEQ ID NO: 1947 - DNA, 256 bp, Gossypium hirsutum
  Clone ID: LIB3083-048-Q1-G1-H9
ctagtctcgagttttttttttattttttttattgaccgcacaaagcaaaaatcattgtaactcaagatgtctgtcaaaaagcatcagttaaaactgaagaccaaagatgaatcaacctaaacatgatcctctaccactcataaaaaaacatgctttccatattacaacatgctccaattttgctgccaatcctaataatacacagccgttgccaatacaaaaccaaaaagatgcacattacacatacactttcaca

SEQ ID NO: 1948 - DNA, 283 bp, Gossypium hirsutum
  Clone ID: LIB3083-049-Q1-L1-G10
caacacacaacttaatgcatgagatggccctagtccctgggcgatcgcatgggcgatagggagcatgatctttatccttaccttacattcactgccaatatctgagctcgacacattcaccctgcaagaacccttgtttcgttattggcccaagccttaatatctcattaaacacgtagcttacattgcgtcacaacccttgtgcactgtaatagcaaataggattaattaacattttcatgaagagtgcctccagttacactaattgtaagatcaccaccag

SEQ ID NO: 1949 - DNA, 393 bp, Gossypium hirsutum
  Clone ID: LIB3083-049-Q1-L1-G11
cggagttgatggatttgaggacgggtgaatggagacgaagtgaggaagcttggaaggcgagccagtgtcctagatcttgcgtgggtgttgggaaagagaagaaactcttctactggggcgactgtgactcggcgatacgagtgggagcatgtgctgtacctttgggagaagggacacttgtgtctggatcagcttaccaaggtggtccacaggggttctttttggtggaaggtcacggtgaaagatttaagagaatcgatgttccaccccagttttctgggtttgtacaatctggttgttccctggatatctaattccttttgtaatgaagttggtcggctgagctgatggccgctttatgatgaagtaaatctaagatcaggaaggataata

SEQ ID NO: 1950 - DNA, 386 bp, Gossypium hirsutum
  Clone ID: LIB3083-049-Q1-L1-G12
ctcagaagcgccattccttcgtctctgcctcctctcagagtctctaatagtgcccccgtgacaccaccactttcttctccaacctccagaaatcctaagcccattcccaactgggaggcccttgccaaagagtccatggcctcttttaactaccctttttatgctgtctctgcaccagctagtccaacccatcgtcatttccatgcccctgctactatacccgaatgtgatgaatcagacacgtccacagttgaatctggtcaatggataagctttcaaaagtttgcaccttctacatctcaagtgccgacttcgccaacattcaatcttgtaaaacctttggctccacaaagtttgcccaccggttttattggagagcaagggcg

SEQ ID NO: 1951 - DNA, 242 bp, Gossypium hirsutum
  Clone ID: LIB3083-049-Q1-L1-G6
aaaccttcttattaaacgccgcgaaggacttctctctcgacagcaacatccggagcgacggcggctgctctcttccgtcgtcgggtccgagaaaaagttagaaagtcttcccgccatggttgcgggtgtttggacagatgacaggaatatgcagcttgaggcaacaactcaattcaaaaagctgctatcaatagaacgtattccttcgatcaacgaagttgcacagacaggtgttattcctc

SEQ ID NO: 1952 - DNA, 271 bp, Gossypium hirsutum
  Clone ID: LIB3083-049-Q1-L1-H10
cagtaaattgacaatccaactccatctttttactatgcgggcggtcactgcaagagcggctaaccttaccacttctttacctcaactacaacgagcataacctcccttgttacatgagactcaccacaggcgattctcatcgctttcaacttccgaagatcgaatgtgtgaatcacataattatgcgaccggctccacttcatcataatcataatcatcatccaacatggatgcctgcttctgctagtactaatattattttatgcaccgc

SEQ ID NO: 1953 - DNA, 397 bp, Gossypium hirsutum
  Clone ID: LIB3083-049-Q1-L1-H11
tcgagttttttttttttttttttaaagtctaaaaaagcatttatttgagccgggaaaacaaataaaaaattcactactacatacattccatgcatttacagaatacaaagatgatccacagcaactttaatggcaactcattcttccaagattacaatatctaggtggtgaggtgcaggaagtgttgtgacctatatagatattttgctgggattctagagcagtatcgtaataaacactatgtttacaaacattcctcaaaaccgaactcgaaacagatgaactattggaacaaacttgcataaaataatccttagtagaggaatttaaacgagtgagtgcgtcactcaggatctgcatgatggtagagtgatgccaccacagcaagcaacaatta

SEQ ID NO: 1954 - DNA, 407 bp, Gossypium hirsutum
  Clone ID: LIB3083-049-Q1-L1-H12
tttggctttattgtgatggatggcaatggaactctttgtgggacattaagtggtaacaccagggaggtacttcataagttcagtgttgatcttccaaagaagcatgggagaggtggacaatcagcccttcgttttgctcgacttcgaatggaaaagcgccacaactatgtgaggaagacagctgaacttgctactcaattttttatcaacccttccaccagccagcctaatgtatctggattaatattggctggatcagctgatttcaaaactgagctgagtcaatctgatatgtttgatcagcggcttcaggctaagattctgaatgtggttgatgtctcttatggaggagagaatggtttcaaccaggcaattgagctttcctcttaaatactggcgaatgtgaa

SEQ ID NO: 1955 - DNA, 307 bp, Gossypium hirsutum
  Clone ID: LIB3083-049-Q1-L1-H4
caactagatctttaaattttgtagccgggtaccgtcacgggaaactggactccctgctccattacctccactacaataaccataagtcctcccgttgattctaattcatcaaattcccatcaacatctccttcaacttcacaagcatcacatgttgcaacaacatcatcatcaacctgctacaactttatcaaagcaaatattatacaaccaacaccattcctacatcttctattgctactaaaatttctaccaccgctaccatatacacgcatactgttccccaaatcaaccctgctgcacaatca

SEQ ID NO: 1956 - DNA, 397 bp, Gossypium hirsutum
  Clone ID: LIB3083-049-Q1-L1-H5
gggaaatggaaggtcttatcccttttgtttacagggctggggtccattacaagagcggaaaagaagatcacgttttaacaacatggttcaacgagtcaccctcggcttcttacatgagactccccaccggagattctgatcgcttccaaatatccgatgatcgaatctttgaatcagataattatgggaagttttccacttcatcatcatcatcatcatcatcttccatggttgctccttctgctagtactaagattattttatcaaccggagttcaatctcctgctgtctgtcgtttgactcctcgccgcgtcgttacatgaaaccatcgcatacttatgggttaatctagggtctgggaatttcatgtatgtagaaaatatatatgtatttctgg

SEQ ID NO: 1957 - DNA, 343 bp, Gossypium hirsutum
  Clone ID: LIB3083-049-Q1-L1-H6
gtggctttctatatataacgggtgcatcccactgcctgaattcttcactacaaaaaacccatttttctgtcatcactatcgattccatatggcggctatattaaacaatggcaccactcatcatactttccaatcattcacaaaataacaaagccattcctcaacatatttaaaggcaacaaactttttgataaatactgtgaatgtaaagggtggtcacagttttgttgtaaccaaaccatttctgattatttcctaacttatcaatttgagaaccttttcgctaaacgttatacacctgttgcacataccgtttggttcttaaaataccattctttcatta

SEQ ID NO: 1958 - DNA, 333 bp, Gossypium hirsutum
  unsure (1)..(333): unsure at all n locations; Clone ID: LIB3083-050-Q1-L1-A1
cggcacgaggaaaaatggttctgctagagaaactttgggatgatgtagtggccggacctcaaccggaacgtggccttggccggctgaggaagatcacaaccaccccacccttgtccaccaaagatgaggcttcatcaatggcgatgccgacgagtccgacgacacctgggacaccgtcgacgccggtgtcggctcgtagggacaacgtgtggaggagcgtgttcaatccaggtagcaaccttgcaaccaaaggtattggcgctgaagttttcgacaagcctcaacctaactctnctactggttatgactggctttacaagcgggagaccccga

SEQ ID NO: 1959 - DNA, 310 bp, Gossypium hirsutum
  Clone ID: LIB3083-050-Q1-L1-A10
tacgttgccacccggacggacgcttcgggaaccagatcaggcctctatggccgtttacccacgcgtccgaaaactcgggaaccggttctagatctacagcaaccaggggctgagacaacttcagatgacacaagcgtgattgctgaagataccatttataaccatgacaactacaatcaactatcataaatggacttatatgctcactactgacctaacctgacctagactactcaccactgcactgagctgagctgaactgttctgaactctaatgacgtggggagagctaagctgaactgagctgagc

SEQ ID NO: 1960 - DNA, 367 bp, Gossypium hirsutum
  Clone ID: LIB3083-050-Q1-L1-A2
gattgccttattctctatctgtgaatcagtttgctgatttgacatgggatgagtttcgaaaacacaggcttggagctgctcaaaactgctctgccaccagaaagggcaatcaccagctcactgatgtcgtccttcctgaatcgaaagactggagggaatcaggcatagttagcccggtcaaaaatcaggggtcctgtggatcttgctgggcattcagtactactggagctcttgaagctgcttaccatcaggcatttgggaaaggaatctctctttcggagcagcagcttgtggactgtgctggagcctttaacaactttgggtgcaatggtggtttgccatcccaagcctttgagtatatcaaata

SEQ ID NO: 1961 - DNA, 378 bp, Gossypium hirsutum
  Clone ID: LIB3083-050-Q1-L1-A3
ctgtttattaaattttcggcaggaattgtactagattcatgccatgaatctaacagatctcatctcgttgccaagcttgtatttctggaccaactctgtgacatttcaccataccttccaagaagctctcttgaggcccatgttccttatgctattctccgttcaatatatagccagtactacgcaaactctcctttgatgccaatggcattattaagtgcttcaccacgccattcacctgctgtatcattggcccatgcgtcccctataatgaggcaaccccgtggagattcgactccacagtacagtgctaatgattcaggttattttaaaggttcatcatcacacagccaagagcagctttatgatgctgaaagt

SEQ ID NO: 1962 - DNA, 323 bp, Gossypium hirsutum
  Clone ID: LIB3083-050-Q1-L1-A4
gacgatatgccattgatgcctcaattgtacgtatcatgaagagtcggaaagttctgggtcaccagcagttggttatggagtgtgttgagcaattgggccgcatgttcaagccggatttcaaggccattaaaaagcgaatagaagacctgattactcgagactatcttgagagggacaaagataaccccaatacattccggtatttggcatgataacctagtcattatcccgtaatgaagcggtgactgttgccgctgcaaataactcgaagcggctggatatgatcggttcgtgacgaaagttgcatacacataatgagatgc

SEQ ID NO: 1963 - DNA, 363 bp, Gossypium hirsutum
  Clone ID: LIB3083-050-Q1-L1-A5
tttagacaaaaaacacaaacgtagaacttgaatttattaagttatacgtcacgaaattacacacaatgtttttaatagcaaattcagaatgaaactagagcatcaaatcatcccaactatcacaatagaaacaagagacatcagcataatagatgttttaatcccaagacaggactcgataagttcggtttagctcgggtttttaagaaactcatttcttgccactcttcttaagaccagaaccaccaaatgatcccttttgtgatgcctttgctctcagctctctaagggccttctcttcttctttctttttctgaatgttagccaaatcatgctcgtcgtattctttcttctcagctttgg

SEQ ID NO: 1964 - DNA, 321 bp, Gossypium hirsutum
  Clone ID: LIB3083-050-Q1-L1-A6
aaacaccgacaggtcctgcttttcctatgcaaataaaagttcagacacggaatgatatcgtcctaatctcgtacattcaaatcgaaaaacgaaaatgtttctaccgagcccacaattcagcacagttttgacacatttctcaagtctctggagaaaaaagaacttaactcggctagaaatcggctcacacatcgattgttagaaggaatgtagatcttcacttgtcatctttgggttgttcatcttcttctttcttttcttgcggctcaaattggcttggcaaagatgctagcaaatcttttacttttggatcggtcgggt

SEQ ID NO: 1965 - DNA, 444 bp, Gossypium hirsutum
  Clone ID: LIB3083-050-Q1-L1-A7
gaaaagcccatagagcacgagaaacatgaagtcgagtatgggaaaatacccgagtacaaggaaaaacaagatgagggcaaggaacataaacatgatgagtgccacgagtcacacgaatcgaaggagcacgaagagtacgagaaagaaaaacccaatttccccaaaggggaaaagcctaaagagcatgagaaacacgaagtcgaatatccgaaaatacccgaatacaaggaaaaacaagatgagggtaaggaacataaacatgagttccaaaagcatgaaaaagaagaagagaaaaaacctgagaaaaaggcagagtactctgagtggccaaagtacatgtttactcaatctggctcgggcactaagcctttgaccatatgacactggtgcatgtgccaatatcatgccataatttcatggtatatcttaattatatgggtaatt

SEQ ID NO: 1966 - DNA, 396 bp, Gossypium hirsutum
  Clone ID: LIB3083-050-Q1-L1-A8
atattcaagggaagggaataagaaagcactggccattttgatgcgagctagaatgagacctaatcatctcaccaacttcgccctttctcccatttccaatgagttgaatcaaattctgtcaaattctcatggaaaccgatccggtgaaaacggggagcatcatgccatggaacatggaaaagaaacgctcaatcatcaaagatcatttgaagttgtacgagaatcaatgcactccgtgatatcaatgaataaaactgaagttggtgattctgtacttaatgagtttttggaaggttattggagcctttcttttgagaaccggaggaaattattgctcacacttgccaaagagtattatctcaacaaggcacaaattcgtgagcttattaaacaata

SEQ ID NO: 1967 - DNA, 373 bp, Gossypium hirsutum
  Clone ID: LIB3083-050-Q1-L1-A9
aaccaaagtaagatattataaatgggtatcagctagcaatgtgggattataattatattgttggtgattcacatttcatctacaagctggatatcttgcctcatgccattgtaataatgctataccatgccagtgtaaacagtcaaacaacaaatttgttttttcacaacatagctaagcatatgcacaactcttgacattacttgaatgtcaagaaactaaacataaaaatgcaaatgcctatgcagttccttgatccttaaggaacatgtattaacttgagatttagattgagatgctgtttgggattcccttgcctgtgagtccaccttcttttgagtaatctgaagtgttggggaaaagcaatgtgtat

SEQ ID NO: 1968 - DNA, 303 bp, Gossypium hirsutum
  Clone ID: LIB3083-050-Q1-L1-B10
cagtcaaaagcgctttttcagttaaacagataataattatgactaagaagctgccaagtctataagcattattaccaaccctgatcaatggaaacaatcactaacaaaatgctctatacctatctctctcactaattatttaactgagaatcttaatctagctaactacaacacattcacaacatatggtacacaatatcctttgcttcaagcattttccaagctcaaaattgacaactgacaaaacttcacaagttcttttttcctttgcttcaagatataaaacgtgttcttcatgcaacg

SEQ ID NO: 1969 - DNA, 386 bp, Gossypium hirsutum
  Clone ID: LIB3083-050-Q1-L1-B11
gttcacaccttatctcattagggcgaatacagtgatctggaggacggtgctactgttcacactgaaactcagcacggtgaacacagtgatctgaattctcaacaggatagaaatcctgtcgatgggatcacagaaatggaaattgacaaagataatgctgaagctgttaatgcatcaaatcactttgctctaaatgagtttggggtgtcattcccaactaatcttggtactgagtttttgttggaagaaagtaaagccaatacatcagctgatggtagtatagcagaatgctttgcacctattgaaaatgggactaattctattgtcactttacaaactgctgagtctgtgaatggatctcaaaatgcatatgaagctgaaaatga

SEQ ID NO: 1970 - DNA, 304 bp, Gossypium hirsutum
  Clone ID: LIB3083-050-Q1-L1-B2
agaaacgggggtatgatgctttggtatttaccagctctaactaaaatatcatcatgtaatagaaaaacaactccaattcaagacttctgttaaaaggaaaaaaagaatccgaaacatgtgaagccggcagtcttgaaattctccgtatgtatgttcagtttttttgtgttaacatttgttgtcatccgaaaaggagggggaaaatggcaaaatacatcagtatcacacacacctatagacaaacattcccttttcaatttcttatagatgtagcatttgagtcctcatgcttttgactactttg

SEQ ID NO: 1971 - DNA, 395 bp, Gossypium hirsutum
  Clone ID: LIB3083-050-Q1-L1-B3
ctcaagctcatagctgttgattggttcaaagtcgataaaggaacagataaaattgcattgcatccaaagagtctagctcagtctgatgccggaaaaaatcttccatttatccttgtgattaatctcgagattcctgcgaaaccaaactatagtttggtcctctactatgctgctgaaaggccagtgaggaaagattctttactggaaaagtttgcagatggaacggatcaatttcgtgatgcaagatttaaactgataccaagcattgttgaagggtattggatggtcaagcgtgcaattggaacaaaagcttgcctacttgggaaagctgttacatgcaaatacttcaggcaagacaattttctggagattgacgtggacattgggtcatcatc

SEQ ID NO: 1972 - DNA, 320 bp, Gossypium hirsutum
  Clone ID: LIB3083-050-Q1-L1-B4
tcttaaccgtcttgtctcccaggtcatttcctccttgactgcgctcactgaggtttgatggtgccttgaatgtcgatgtgactgaattccaaaccaacttggttccctacccaagaatccacttcatgctttcctcgtatgctccagtcatctctgctgagaaggcttaccacgagcagctctcagttgctgaaatcaccaatagtgcctttgagccctcatctatgatggctaagtgcgatccacgccatggaaagtacatggcttgctgtttgatgtaccgtggtgatgttgttcccaaggacgtcaatgctgcagtc

SEQ ID NO: 1973 - DNA, 444 bp, Gossypium hirsutum
  Clone ID: LIB3083-050-Q1-L1-B5
gttggctcatgaagctgatgggtctgttagatttgggcacggcgatggatctgcgtatttgttcgatcccgacatttataccgacggaaggatctccgttcagggtattgacggcgtccttttcccgctggaagagaaagctaaggaagaaaagaaaaccatcaaagttgccactgtgaaacccagaagagggaagttgcttgaggctgcatgccgaatgcttgtggctattggacaagattcacgtttcacctcttgccgactatgaacacaacaattacttcccccatatcataaacaaatcttcaaacaacaaaaaaaggtgaaccagcatagtataaaagcctggaatgatggtttgctctcttgattaggattttaagtttctttttttcttctttccccttttttggtctatattctatcggtcataaggcaacaaaa

SEQ ID NO: 1974 - DNA, 365 bp, Gossypium hirsutum
  Clone ID: LIB3083-050-Q1-L1-B6
ccactccagttatttacctgaacctgaccttgagaagcaaggaaacaaccaggtgttgcctcaggatgaaggactgccaggctcagttaggggttcagcctgtgagtccagtcccacattgttaaccatcgtagtaacgaagggtgagtctcatgtaactcagcagccgatagctcaattaaaagttatggaatgcgttttggaggaattgcctcgtgtggctcctcaaaagggctattttttgaggaacagttgttctgatgaggaatgcagagtttgtcaacaggagaaggaagaaagtcttatagatcttgggtgccaatgtaaaagtggtcttgcaaaagctcatcgatcttgcattgaca

SEQ ID NO: 1975 - DNA, 365 bp, Gossypium hirsutum
  Clone ID: LIB3083-050-Q1-L1-B7
gttccaccgagttcggcttggtgatggttcaatgggatcactactggatctcaaaaattctgagccagaccctgaacctgaaccattagataacaagtttgatagtagccaaaactcaactggagcactgcctgtacggggggtatggaagaagggaggaagtaaaaagctctttttataacaggcaatcagccaaactcttactggagaaatggtgtttgacaacatttcttgtttagaaattatcttaatagtgccgtcaaaaagtgatcgagttttgctatgagctcgaaaagctgtcaatagatggagaagattctatatatggcctggggtttttttttgggttagccactaatacattt

SEQ ID NO: 1976 - DNA, 378 bp, Gossypium hirsutum
  Clone ID: LIB3083-050-Q1-L1-B8
gaaaagtttatcgccggatacaattgatactaacgaagttgaagatggagaactcaatgaacctcaggttgctacaaatgaagagggtgatgctacagacgaacttctaatgtactcgaacgaggatgaatatgaagaattcaacttacgaattgttcataggaaaaacaggaccggattcgaagaaaacaaggacctgcctattgtgctaaatagtgtcattgctggaagatattacgtaacagaatacctaggttcagctgcttttagtaaggtcgttcaagcgcatgatcttcttacgggaatcgacgtttgtttgaagatcattaaaaatgacaaagattttttcgaccaaagtttggatgaaatcaaactttt

SEQ ID NO: 1977 - DNA, 452 bp, Gossypium hirsutum
  Clone ID: LIB3083-050-Q1-L1-B9
caaaagcgcatgtccttgtctgctgataagagttctccgtgagactccagctcatgatagtgcagcaagaactagcactgaacaattgcccaaagatcagaaaaatggaaaaatacgcaattctcttggttcaaaaagacctgagaacatagatgacgagccaagagatagtgacaacagtacttctcttccccatttcatgcaagccacggaatctgcaagagctaaggttaatgcaaagaactcaccaagatcaagtccagatgtgcaagacagagacatttacatcaagaagagacatcccttacctgctgctaatgggaggcagggttctccaagaatcacgcgatcagtggctaaagcccagcagggtgcaaaagaaaatggtagtaccaatcctattcatgaaaaatggcaaggtgacgggttactcggagcaacaatatgccatg

SEQ ID NO: 1978 - DNA, 403 bp, Gossypium hirsutum
  Clone ID: LIB3083-050-Q1-L1-C1
agaaaaaacctagtattctgtcatcactatggaggccaaatggctgctatgttttacaatggcagcactaatggcagtgtcaaatggccaggaatcagtgaagccattggtgaagatagttaaaggcaagaaactttgtgataaagggtgggaatgtaaagggtggtcacagttttgttgtaaccaaaccatttctgattatttccgaacttatcaatttgagaaccttttcgctaaacgtaatacaccggtggcacatgcggttgggttctgggattaccattctttcattacggcggcggctcagtatcagcctcatggttttggtaccaccggcggtaagctccagagcatgaaggaattggcagcttttcttggacatgtcggcagcaagacttcatgt

SEQ ID NO: 1979 - DNA, 434 bp, Gossypium hirsutum
  Clone ID: LIB3083-050-Q1-L1-C10
tacgttgccacccgcatgaccctttgggaccagatcatgcctcgttgaccattatacgattcgtgctgaaccaccggtccaggggtccctagtctcggtgtgatttcaccatcttgctcaatcacatcgttcttggttgcatgtttgttcgctcttctgtaaacaaggtttgtattgccaaactgattgtacttgctggcgatatcaatatttagggtgaggagcaaaagatactggatgtgctttcaaatgaagactatatcaaagctttattgagcagtggcagaactcgcatccttatctcggaagacgatgaacatgctattatcgccgagccctcaaagtgcgtaaggtactgtgcatctctcaattcgctacaccggtcattcaacattgattgcattgtttatcttgaaacaatttttgggctttac

SEQ ID NO: 1980 - DNA, 302 bp, Gossypium hirsutum
  Clone ID: LIB3083-050-Q1-L1-C11
ctctggttctttaacattcatgcggtatacaccacacgaggtattgggcgatacgtactcgtgaggccattaaaacaaacccaggtcattataatgctctactcatctctaccaacttatatcattcacatgcaattatcatcgataaatctccacactgaaccgacagaacgaccaacgtcgaccctgttcaataaaccaggattatgcttctaagcatactgatactctgcttcttggccatatttacaggctcataaccactcattaggtgattaacggattgtatgcaatgaaacatt

SEQ ID NO: 1981 - DNA, 382 bp, Gossypium hirsutum
  Clone ID: LIB3083-050-Q1-L1-C12
acgaaccaggcctcgatggccgtttacccacgcgtacgggaccttcgggacagcgaggacacatggatgaacccggatattccatgaatattaacatgagttcttgcaacggaccactcccagttaaaagaggaccaccaccaagaagtgggggtcctgctactaaagatctgcacactcaggaccagttcgcattaacagaggaatgggcagaagacctgctgtatcacgtactagagatagctatggacgtccacctggacaggaaccgttgtcctctcgtacagatgtttatatgtgcccaaaagatgaagggtattactctacagacagcatattccgcagaaatgacccaagctctggagatactagagattatgca

SEQ ID NO: 1982 - DNA, 357 bp, Gossypium hirsutum
  Clone ID: LIB3083-050-Q1-L1-C2
aaaactccgtcgccatgtccagctccgatcccaacaagctgatctggaaagccgacaaactaacaaagctaagtcttacaaggtggagtgcagattggaaaagtgctactcttttatatgaacaagctgcaaatggatttcgagtttcaaaggattatgagaaagcaaagttggcattcgagaaagcttccaaaggacaagagatgctagcttctccctgggatgctgctaaacacatggagtctgctgctgctttagcaaaggaactacgcaactggactgaagttatcgatttttacagaagggcatctgagctatacatgcagtgtgacagaccacaacctgcatctgattcac

SEQ ID NO: 1983 - DNA, 454 bp, Gossypium hirsutum
  Clone ID: LIB3083-050-Q1-L1-C3
gaggacccttaagggtgctttttatggcaactataaaccaggcactgatattcccatggttgtcgacaaatatttgaacaaggagctggggctggatatggacaagttcatcacacactctgtgccttttgccgatattaacaaggcattcgactacatgctccagggtataggtctgagatgcatgattcatttggatgcttaaggaaatgttgctgctgtatatttgcccatccaaggatcaaaactctaatgttttgtcctactatgtgttatattatgtgcctacttaagctacctttcccggttatcaagagtgcctatatagaactctctctctcaaaaaaaaaaaaaaagagaaaagagttctttatatggagttttatattatatgctgagagaataaattatcttgtaaaagcatgcttttgtaatgaaataaatttctattact

SEQ ID NO: 1984 - DNA, 367 bp, Gossypium hirsutum
  Clone ID: LIB3083-050-Q1-L1-C4
atggaccattttaagttcatgaaatcatcattacaaacgagacgacgccatcacaacaaatgactcccataatgcaggaccaacaagaaaatctagttatcgacaccaacgctacacattccatcaccaaagctattaatggcgattatactctcaccgactctatgagcctaaatgagacaatcatgaattcatgagcactataccgagataagatcccgaagaaaattggctactctaagacaagggaaagtattgtagaggccaacttggacctaccacctaacataccatctatcaaactgattgtaaaaaagaatacccataattggcattccaactagttatcagagaacatcatgaaatg

SEQ ID NO: 1985 - DNA, 358 bp, Gossypium hirsutum
  Clone ID: LIB3083-050-Q1-L1-C5
agaagaagccggaaaaacccaaagaagctgagaagaaaccggaaaaacccaaagaagcagctgagaagaaaccggaaaaacccaaagaagctgagaagaaaccggaaaagcccaaagacggtgagaagaaaccggagaagcctaaagaggcggcggcggagaaaaagcctgataaaccgaaagaggcagcggctgcgccgccacagaaggttgcggaacctgctgcagctgctcctttaccaccgatggcgtatgcagttgggtatacttgctccgaaagttattataatggctatggtggaagacctagctattatggtggaccaccccaacaaccgttcccatgttacgagactta

SEQ ID NO: 1986 - DNA, 56 bp, Gossypium hirsutum
  Clone ID: LIB3083-050-Q1-L1-C6
aaaataaaatttaaaaaaaaaaaaaaaaaaaaaagagaaaagaaaaaaaaaaaaaa

SEQ ID NO: 1987 - DNA, 322 bp, Gossypium hirsutum
  Clone ID: LIB3083-050-Q1-L1-C7
aattaaaatggttgcggcctaaggtatcattaagtctccaaatggtgaacaatgggataagtcaaacaaacttaggatcatgccttcccatttttaccttaatttgctacgaaaaaagctttcaacatcctaacaggaatgtcgaatagattaaatcacccctaaaaagttgcattttgcttatattatctcacaaaatgaagagcaatccatcctaccataaagaacttaaaagaatacgaattcagtaccgtacattttggctgtgcaataactcaaccacagcagacactactccctttccttcaacagatatatcaaa

SEQ ID NO: 1988 - DNA, 306 bp, Gossypium hirsutum
  Clone ID: LIB3083-050-Q1-L1-C8
cacctacatttagagagagacctaccgagatatccggagacatagagacagatagagatagacccttttttttcttctccttcttctccttctttttttttatcccctttttttccacctccacctccaccaccttcttctccttctcatctttcttctccaccaccctcgcttccttttttagtatcaagcataccaccaataccaccttcttctccaccccaaccaaatgcacattcttcaacccaccttcagtagcatttgatccagagttgcattctccatgttctcctttgccaccacctc

SEQ ID NO: 1989 - DNA, 376 bp, Gossypium hirsutum
  Clone ID: LIB3083-050-Q1-L1-C9
ggctctgagtatgcctgtaagtctatatccaaaaggcaggggatctggaaagacgatgtggaggatgtacggagggagattcagataatgcaccatttggctgggcataagaatattgtgaccattaaaggtgcatacgatgatactacgtatgtgcatattgtgatggaactatgctctggaggtgaattgtttgatccgattatgcacagggggcattacttcgagaggaaagcaactgaattgactaagatcattgatgctgttgtcgaggcttgacattcactcggggatatgcatagagatttaaagcctgagaatctgttgatagttaacaacgatgatgatttctctctgaatgccattgagtttggac

SEQ ID NO: 1990 - DNA, 448 bp, Gossypium hirsutum
  unsure (1)..(448): unsure at all n locations; Clone ID: LIB3083-050-Q1-L1-D1
ctcataacggtcgaattgcatctttgattttcgttaaagagtgtaagtcanggtcgccaatcgaagactcgcaacaaatcgacaaaattgaagcacgtttaaggaatgttttgaaaggagataacgatattcgtagcgcgaaaaccacggtttctatggccgtaactcataccgaaagaaggttgcatcaaatgatgttcgcagatcgtgattacgaacggaaaccgattttggaacataagtcggagttgtcggctgtcaccgtgcaaaactgggtggaaaggggttattctgttgtgaatgttcaatgcaaggaccgaactaaactcctgtttgatgttgtttgcacattgacagatatgcaatatgtngtgtttcatgccactatcaaaacatcaggccgataagcatattttgaattttatattaagcacagagaccgaatact

SEQ ID NO: 1991 - DNA, 201 bp, Gossypium hirsutum
  Clone ID: LIB3083-050-Q1-L1-D10
acgttgcacccccatgacccttcgtgagccgaatcaggcctctttggccttttacccacacatccgatacatccggtacctgcgggattcatcaatcaccatggaccttcacctccttctcaaccgtattctacatattaaccgatgactccacttccactagctgctcctaacactaatcaatctccccacactaccact

SEQ ID NO: 1992 - DNA, 408 bp, Gossypium hirsutum
  Clone ID: LIB3083-050-Q1-L1-D11
atcatctcctttttctcccattctcctctctctgtttctactattcagttgtgtcgtgtcagctcaaacggctcccgcccctgccccctctggccccttgaatttcactggaatccttgacaaaaatggccaatacacctacttccttcagcttttggcacagactcaagttgcgagccaagtacacactcaactgaaaaccaccactgaaggctttaccgtctgtgctcccacagataatgccttcaacaacctcaaacctggtaccgtcaataacctgtacccacaacagaaagtacaactagttctataccacgttatttccaaatactactcctagaacgatctccaatttgttagcatccccgttagaacccaatctggtcaggatttccgcctaacgtcact

SEQ ID NO: 1993 - DNA, 194 bp, Gossypium hirsutum
  Clone ID: LIB3083-050-Q1-L1-D12
taccaccgaccaggaagaacaaaattccatactctatctgaaatccaaactgtaccgatttgataaacacactaatcaatgtaaagagagacacactaatactgtaaaactcttcaaccacaaaaagaccacaaaagttcaactttttattaagcaatctaaaactctcaaaatctgcaccaatcattatatgt

SEQ ID NO: 1994 - DNA, 349 bp, Gossypium hirsutum
  unsure (1)..(349): unsure at all n locations; Clone ID: LIB3083-050-Q1-L1-D3
aagagatggctgtgagcgcaacggtgatcggagcacttctgggactgggcacccagatgtactccaacgctctccgcaagctcccttatatgcgacatccgtgggagcacctgttggggatgggtctgggagccgtgttcgttaaccagcttgtgaattgggacgctcagctccaacgggaccttgacaatatgctcgaaaaggccaaggctgccaacgagcgccgctactttgatggagatgatgattaatgctttcgccctatcatcagataagacattcatgcgccaagctactgtggtcataaaccggttcagattgtgagtgggtaactttggactnctttttt

SEQ ID NO: 1995 - DNA, 329 bp, Gossypium hirsutum
  Clone ID: LIB3083-050-Q1-L1-D4
ggggaagtcaatgtcgttgacgaacaccgggtttcgttgcgggagggtcccaaactggtggagaagcggttcaagttcccaactttggaagtgcccggtggagtttcctttgaggatttgggtcaccatgctgggtattacaagcttcctaattctcatgatgccagaatgttctacttcttcttcgaatcacgcaatagcaaaaaggaccctgttgtaatctggttgactggagggccaggttgtagcagtgaattggctttgttttatgaaaatggccctttcaccattgctgataacatgtctctggtttgaaatgattatggttg

SEQ ID NO: 1996 - DNA, 443 bp, Gossypium hirsutum
  unsure (1)..(443): unsure at all n locations; Clone ID: LIB3083-050-Q1-L1-D5
acacaattgtagaagctcatgaatgcatattgcgaccgacgatctgtggatttcaactcgattgccttcttgttcgatggtcgccgcctgcgaggtgagcaaaactcctgacgagcttgagatggaggatggtgatgagatcgatgctatgcttcaccaaaccggtggtactgtgtgaagcgagtactactttgccacatttagtatttgatgagttagttatggtctgattatgtagatgtttccaatgtttttatatacgatcttattgccatgttatgaagacttgtggaccttgttttgagtcatcttgctcttatagaagagcttgagtttctagtgtttacaaagtgagatggaactcgggactttgttccgatatgcactcngtttgaaggcttgttaacagtcactatctataagtattgatttctgggttgctt

SEQ ID NO: 1997 - DNA, 328 bp, Gossypium hirsutum
  Clone ID: LIB3083-050-Q1-L1-D6
ctcgtgccgtatcggcacgaggtttttttttttttggtttgttataaaaccatatgcatccgtacgagtctagtatctactgatgtaaagatgttcgtaaacaaaaatacataagccaggaaacaacatttctaacacccaaacaaggtattcaggttgaaagaacagaaacattttccaaaacgttaagaaagcaaacagtaagaaacacacactactactattcctggagttcctcctcctcatcctcctcctcctcataatcatactcctcatcagctgttgcatcttgatattgttggtactctgaaaccagatcgttcatgtt

SEQ ID NO: 1998 - DNA, 424 bp, Gossypium hirsutum
  Clone ID: LIB3083-050-Q1-L1-D7
tctgcctattggagattacagcaaaaggcttttctgtttttgtttttgttttattttttatttatttataattttacaagtgtaaaaatccccttggggaatgcagagagatgagacgttcatcgttggcaaggcctgagctttcttaccaccgtaagcgctccattggcggccgaaattgtcaccgaaaacacgtcgaagacgggtgattcagtttgaagggtttcagttttaaatatacatatatttctcacttctattgtaaatagacagtaattcagatcaaagggtatccgtttcttttcttatttttcgttttaatttctcgagcttttacggttcaaaaatggcggacaaagcttaaaccgaaaacccatcttttcttcatggaaaatacgagcttggccgtatggtgggtcatgga

SEQ ID NO: 1999 - DNA, 427 bp, Gossypium hirsutum
  Clone ID: LIB3083-050-Q1-L1-D9
ggtattcaaggcattgcttggtcttttggtggcatgatctttgctcttgtgggctggggtgccggcatttcaggtggtcatattaaccctgctgtgacctttggattgtttctagcaaggaaactgtcacttacaagggcattgctctatatgatcatgcagtgcctgggtgctatctgtggagctagtgtggtgaagggattccaaggagataaccgatatgagatgttgggtggtggagctaatgttgtgaaccatgtctacactaacgatgatggtctaggtgctgagataattgggacttttgtgcttgtttacactgttttctctgctactgatgctaagagaaatgccagagactcccatgatcctatcttggctccactttcgattgggtttgcaatgttcttgggtcatttggacacca

SEQ ID NO: 2000 - DNA, 114 bp, Gossypium hirsutum
  Clone ID: LIB3083-050-Q1-L1-E1
tcgaattccttcatttcgctcatatcatgtactgtataatgggtgccatcttgtagatgaacatcaattttttttttttttgtgttctactctattcttatgtttgaatgataa

SEQ ID NO: 2001 - DNA, 400 bp, Gossypium hirsutum
  Clone ID: LIB3083-050-Q1-L1-E11
ccccgactgtttgtcatttaaacaccgcatctcattcaggaggtacctgttggattcaccctgtctctgacaccaccaacgatattcagctttatgccacacttatatcatcaacccatagttttccaacatacgatctccgacgatcatggtattagagagaccacaccgaccacaacgactactcccatcaggcataacccaagaccataccctggccaatgtagcacacgaagctctctatgatacaaccatctcatggtccccattccatgacacttatgaattcattatctcatgtcatcctgttgtcactgatgaacaacccttacagttcacggttcctacaacttataccagtgccactctgacaggcctcaccagtggtgccatctacaac

SEQ ID NO: 2002 - DNA, 305 bp, Gossypium hirsutum
  Clone ID: LIB3083-050-Q1-L1-E2
cgggctggaggttcgagtaaaaatcacacgaatttcaacttaaatgatattaaaagattttgatgttgatgatcaaattttctggttctgatccaccagtccagtcagagtgttgaagtattgaagctgtctggtgtttcgtttgctttttgaaatctgatgtctccgccgcttcttggcgtggaggaagggggtcagaacaatgtgactttactgggttcttctggctctattgatagtgcgtgccagaataatgctggattgaacgagcgccattacatgggcttgactgattgctcttctat

SEQ ID NO: 2003 - DNA, 324 bp, Gossypium hirsutum
  Clone ID: LIB3083-050-Q1-L1-E3
catggatgaaatggaatttaccgaagcagagagtaatatgagatgatttggtatcagagtatcaacagtatcaagatgcaacagttgatgaagaagaagagtatgaagaagaaggagctgaatatgaatgagaaaattaatatttgaacttattaaatataatttccagtttctgttttttttaattaattattgcgaaagaaattagttattttgatgtgtatggagtttcatggtaatggccagtttcaatatgaagcaaaagggattgtattattgttcaaaagcctttgaaaaacagatttaagaaatcaaagtacttac

SEQ ID NO: 2004 - DNA, 423 bp, Gossypium hirsutum
  Clone ID: LIB3083-050-Q1-L1-E4
gttttaactagataaacaaatcttataaaacattaatcaagctaggctgaaataaagccaagagtcgctccataattcaattttctagaacatgcaaggctccatagatacaagtgcctggtgcatatcaagttgtaattatggcaacattgttgtgcaaccctttgtcatgaaagctgtaatatttaaagatacatcatcccgaatttcttaaataaaggccaacatttaacttgagcaaattagaagacatctaaaatataatgcactgccccgtactccatggcttccaaaaacggaaaagaagtaatctctctactctttcccaaaatcagtactgtagtgtgcactagattccagtttcttggcttcgtccaactttcttactgccttcatgaaatcttcatggattacataatcacg

SEQ ID NO: 2005 - DNA, 463 bp, Gossypium hirsutum
  Clone ID: LIB3083-050-Q1-L1-E5
aaattttgctccttttcttgtgtttcttcagaaggaagaagatcccatcccttatttgctctttattttcgcatcttacttcttaaggagaaaaacaaacacgatcattgtcggctacactcccaaacactcaactctccttcctctcataaacaatttttgcccaattcttcaagaaaaagaaaccctagctaaacatggctgttcccaaactagaaatgagacctctcggaaacacgggcctcaagctcagcagcgtgggcttcggagcttctcctctcggcagcgtcttcggttccgtttccgaaagcgacgctgtcgccttcgtcctcgaagccttccgcctcggaatcaacttcttcgacacctctccgtattatggagcgacattgtcagagaagatgctgggtaaaggaacttaaagctcttggagttcctagaagtgaatatatagtttcgacaa

SEQ ID NO: 2006 - DNA, 405 bp, Gossypium hirsutum
  Clone ID: LIB3083-050-Q1-L1-E6
cacaccctattgagacaatgagaaagctgctagccgttgcgtttcttttcttcttcttttgggataaaacattagctcaaatagctccggcgccgccgttaaaggtggacaacatcacttccatcctcgaaaaaggtggccaattcaccactttcatcaagctattgaaagccacacaggtggctgatcaactaaacaaccagctaagcacaccggaccctaacgacgggataacggtgtttgcaccgagtgacaacgcgttctccggactcaaacccgggacgttaaactcactttcgaccaagagaagcttcagttggttcagttccatatactcccgacgttaatgtcgacgtcgcagtttcaaaccgcgagtaaccctttgagaacccaagcttgggatgt

SEQ ID NO: 2007 - DNA, 352 bp, Gossypium hirsutum
  Clone ID: LIB3083-050-Q1-L1-E7
aaattttctttgcctagaagcagccgaagatgacagggagttattgatgtcccacatgaactttgaaaagaaatttggacaatcagccatttttgtaacttcaacactgatggaacaaggtggtgtccctccttcttcaagccctgcagctttgctcaaagaagccattcatgtaattagttgtggttatgaagacaaaaccgaatggggaagcgagcttggctggatttacggctcgattacagaagatatcttaacaggattcaagatgcattgccgtggatggagatcaatatacttgatgccaaagttgcctgcattcaaaggttcaagttccatcaatctatcggat

SEQ ID NO: 2008 - DNA, 404 bp, Gossypium hirsutum
  Clone ID: LIB3083-050-Q1-L1-E8
gtcttgagttttttttttttttttttgaagaaacagatgggatatggtatttccaacaaaagagttgggcacaatttgttctaagtaaacagacgttctaagcacatatttaaatgcaatagtgtaagaccctgttcttcgtaatcctcttgtctactaacaataacagtcatcagggaaaaaaatgaatgaaaaattaaatcaatctctgctcagatctactttaagcacccttttaagaaaattttacaaaaccaaggtttatgatgaaatcgaaaccccggccgcatcatttaaacaatctgacttcagattagtgtgatcatcctagcttgagcaagaaccttcctttttcatagctgacacgtctttacccacatcgattttctcttcctttgatggga

SEQ ID NO: 2009 - DNA, 430 bp, Gossypium hirsutum
  Clone ID: LIB3083-050-Q1-L1-E9
gtcttaataaacgccttcgatttaccttcgatttccatttggttctcgattgctacgtttttgaatttttagtgagcgaaaatgagagagtgcatttcagtccacatcggtcaggctggtattcaagtcggaaatgcctgctgggaactttactgccttgaacatggaatccagcctgatggccagatgccaagtgacaagactgtcggaggaggtgatgatgcttttaacacctttttcagtgaaactggtgctggaaagcacgtccctcgtgctgtctttgtggatcttgagcctactgttattgatgaagtgaggactggtacttaccgtcagcttttccaccctgagcaactcatcagcggcaaggaagacgctgtcaacaacttcgctcgtggccactacactattggcaaagagatcgttgact

SEQ ID NO: 2010 - DNA, 434 bp, Gossypium hirsutum
  Clone ID: LIB3083-050-Q1-L1-F1
ggaaaacgtcttcgtctttgggcttgatcgtgccgtcatagactctgaccccaagttccggttcagcaaaaaggaggtgtctacggcggtggaggtgacgggttctagtgctgggaacaccatttgttcgatatgtttgtgtgagtatagagaatcagagatgttgaggatgatgcctgaatgtaggcattgttttcatgtaacttgtattgatgcttggctgaaacttaatgggtcttgtcctgtttgtcggaactcaccgcttccgacaccgatttctacgcctttgtcggaagttgtacctttgtctcagtacgatgctgatcggaggtggtggtgacttttggcttttgggttaccatctttttcattttttttttcttcaatttttttcctgtgtggaaaatttgttttttggcatggatgcttttttt

SEQ ID NO: 2011 - DNA, 153 bp, Gossypium hirsutum
  Clone ID: LIB3083-050-Q1-L1-F10
ccctccgtcagccttatcattcctcttttgccttctacccacgcgtcctgtacattagtgcatagtcacctttaaaaggcatataatctataaatacattttcattaacaaaacaaccattgaaaaattttctaaagcatatgataaaattaa

SEQ ID NO: 2012 - DNA, 406 bp, Gossypium hirsutum
  unsure (1)..(406): unsure at all n locations; Clone ID: LIB3083-050-Q1-L1-F11
cagagaagaattatggcctccattgatgttcctgaacagggtgctnntggttgcacatgcagaagctcttagaaaggcttgtaaaggatgggggacagatgagaaggcaataatttcagtgttgggtcacagaaatgcacttcaaaggacgcaaatcatgcttgcttatgaagacctttaccaggaagatctcatcaagcgtcttgaatcaaagctttctggtgatttctagaaagcagtgtatcgttggatattggatccagcagaccgagatgccgcgttagctaatgttgccataaagaaattaagccctgatcaccatgtgatcgttgaaatttcatgcaccagatcccctgaaaagctcttggctgtgaagagagcttatcatgctcgatacaagcattcc

SEQ ID NO: 2013 - DNA, 413 bp, Gossypium hirsutum
  Clone ID: LIB3083-050-Q1-L1-F2
ctcctctcgaggtctctctttttctcctatttctggttttgtcagcttatgtcttcaattacaatgaatctacccaaatttaaagtcgctttcttgatttgaaggtaaatgaatctttagaactggttccattggtggacgaaaagatggtgaagatgatgatgtttaatgaaagcagaagaaagttggggactttccagatatgtgctgcttgtacatgctgtggtggaccgaaaggtgtttgcttgccatccccttgttgctatgccttcaattgcaacattccaaacagaccttttggtttctgctccttcactcccaagacctgtaattgcttttgatgccatctctagtttcaaagtttattttatctatatttcgtaattttggcttggttttaactaaggagttcc

SEQ ID NO: 2014 - DNA, 353 bp, Gossypium hirsutum
  Clone ID: LIB3083-050-Q1-L1-F3
tttctatctctcttcctaacaattgagcaattttcagttatggtctgtctcgacaaacaatggaagcattctttgaatcgcgatcgagaagcaactggagttacgatacactcaagaatttccgtcagatttctcccgtcgttcaatctcatctcaaaagggtttatttgaccttatgttgtgccctggttgcctctgcttttggggcttatcttcatatcttatggaacattgggggttacctcacatcattcgcatgcttcggaaccatgatttggctcctctctatccctccttatcaggaacaaaagagagtttctcttcttttggcatccgcagtgttcgaaggggct

SEQ ID NO: 2015 - DNA, 363 bp, Gossypium hirsutum
  Clone ID: LIB3083-050-Q1-L1-F4
tcgagttttttttttttttttttttttttttttaacacacaataacattctttgtatagtaacacacagtaacatacatatgaaagaaaatggggtctaaaaatcacagtaaattgagaaccccataacataaaattataacatctcagaaaaatagaaccagccatccacctaagaatgccaaaaccagcagagtccaaatgcccgagttcatcatgatcctaggtgaggatgaacccgaagacgaaggctttgatgaggaaccagtttcttcggattttgctgctgatggagtgtcagctgatgggctaataccaagagccggggcaagtgcaagtgtcggaggtatgtcggtcccgaaaa

SEQ ID NO: 2016 - DNA, 340 bp, Gossypium hirsutum
  Clone ID: LIB3083-050-Q1-L1-F5
gatgatgaatgaacaaagattgaccctgttggcagaagtcgggtttttgaaaagaaggcacaagttcctgatgcaagaccaatcttcaaaaccccaagcggaacgacattttttgcaaccacaggatattgtgattagaagcaaatcaaatatgaaagcaaagaaatccactggaaagggtacatcgtcgaaccgagctatggcttttcatctgaaccaaaagggaaagacaaatagtgtaaagggaacctgtttcactcatcctgcccttatgttggacgtaaaccggaagcagcagaaaatttccagtggaaaggaagttactttgcgaagttcttta

SEQ ID NO: 2017 - DNA, 388 bp, Gossypium hirsutum
  unsure (1)..(388): unsure at all n locations; Clone ID: LIB3083-050-Q1-L1-F6
tgagagcaatgagcatacttggtttttccaaagnggaaatccagtaccgaggtgtcaaggcttgtgacatntccataaaancgagnntaccttcagtgttgatgttcaatattnctgatgnntgagtgatttgcaggccccggcaaagatcagtacatacatgattggtcctttcccaacattaagaagtgaaaaaccaaaattgaaggtcaaagttcgtttgaatttgcatggaattgtgtctgttgagtcagctacactcttggaagaggaagaagttgaagttccagtttcaaaagagccggcaaaagaagatgctaagatggagacagatgaaaagcctaatgatacttctgcccctggtgccaacgagacagatgttaatatg

SEQ ID NO: 2018 - DNA, 392 bp, Gossypium hirsutum
  Clone ID: LIB3083-050-Q1-L1-F7
accatataagaactagggcaggttagtcttggaattcctaaataaatcaatgtctgtagcaagatatataagataagttcaccatgctattgcttcgagccatgagacaaaacacagaactaataccaggctgtttaaactgatggttgatagagttttaacatttgaacctatcacactccaaggcaaagttctaaaggctctcctcaagcaactaaagatacacaagatataagaggcgttgtcattgcgtgtgcgtccaaccatagaacaaacttatatattgcgaggtatactagacaaaagcagcactgatttcaagcaataccctttttgcaaaattgcgaaagctaagaagcacaagcattccttcagtcaaaggctaagcttac

SEQ ID NO: 2019 - DNA, 396 bp, Gossypium hirsutum
  Clone ID: LIB3083-050-Q1-L1-F8
tggaaatcggaaaccatgaaaccggtgatgctcatcctttgctgagagggggggggagaaaaactacatacacccatggtttctcttcagctcaaatccgatcacttgctgccacctgtgaagctttaatccctcctctcccacttgattcagcccaccaggcttcttcccttgatgctttctacaaagcttctggggctgagcctccacttcctgatgaggtagcagagatgatggtgaagagggtggttgaacccagggtactctcgtttgtgaaagtagtattggcagttatatcgtttagattgggcgcattgttgctttgcgggtgggattgctgtgactggaaatggccattcattcacaaagtttcggaactgccaatggagaagagag

SEQ ID NO: 2020 - DNA, 430 bp, Gossypium hirsutum
  Clone ID: LIB3083-050-Q1-L1-F9
ctttcgaaccctatcctgcatcttttaccctttaccaacgcctccgcttcaactggcccctgttgtactcaccctgactatgacactgtcaatggtattcaatttcatgccactcctgttcatcaacccagcgttgggcaacaaatgatctttgacgaacatcttcttaggctgaccacaccgtccacaactgccacccccataatgcatacgccaagaccatacccgacgcatgtacgactagaaactctctctcagacaaccatctcatatgccccattccaggacacttctgagtacatcatttcatgtcatcctgttggcactgatgaagaacccttacagttcagggttcctggaacttctaccagtgccactctgacaggcctcaccaaatgtgccacctacaacatcatattggacgcactta

SEQ ID NO: 2021 - DNA, 358 bp, Gossypium hirsutum
  Clone ID: LIB3083-050-Q1-L1-G1
ctttacggtatctgctgagtagatgttgcaggagaaaaagtgcagttcatctagaccgttaaatgttgcagctgagaaggaccgattgagaagggacctagaaattgcacaaagcaagcatgatgatgcagaggttgagaggattaagaagagactgcagcaactagaggccttccggcagtcacaggagaaagatgccaaggctgttaggttggctgagatgaaccgaaagaacagggttgagaatttcaaaaatgcatctggattgaaacctgtaaatactggtttaaaagcaagggaagcttggtatgatccattttcgaggaggtggactagatcaaggaactactataatgca

SEQ ID NO: 2022 - DNA, 417 bp, Gossypium hirsutum
  Clone ID: LIB3083-050-Q1-L1-G11
gggaggatgattaaaggggacagggtttggcaaatagcttggggaaggggattcaagtgtaacagtgcagtatggaagtgcaacagaaccatcaaaacaccaaaagatggaccatgggcggattgcattcagaggtacccagctcatatccctgaagttgtcaagctgtaggctaatagcaacaaacaaatatggttgattcatggctttgtcaaactcagatccttctggatctctgcatttatttatatttctactggtaactttttctctactcattttgtttctgtcatactgtatcccttttccattttcttttcaaaatcatgagtttgcataggtacccgatatggtgctctttgtatttgctaattaatgtacaccctgctggggaaaataacaagtgtggaaaaacaa

SEQ ID NO: 2023 - DNA, 378 bp, Gossypium hirsutum
  Clone ID: LIB3083-050-Q1-L1-G2
ataatatcattattagccagtcaaagctatgggagattacgtttgagacaaaaaccggaagtctcaatagttggaaggttgaaggcgtccctataatgaaaaatggcctgttcccatgcttttggcgagcaccaacagacaatgacaaacggggaggtctgagcagttatcagactaagtggaaagctgcctgcattgatgagatagtttttcttactgaaagctgttctatacaaaataagacggacaatgttgtgtaaatagcggttgtttaccttggcttcatttacggcgaggatggcactatagatgagtcgaagaaagcaagagctctattcaaagttgacatgctttacacaatccatgcgtctggtgaca

SEQ ID NO: 2024 - DNA, 351 bp, Gossypium hirsutum
  Clone ID: LIB3083-050-Q1-L1-G3
catcagccctgacacagtctgagattcgtgacatcatcctgggagctgagattactccaccctctcaacagaggcagcagatagcagagattgagaaacaggcgaaggaggcaagccagctaacagctgtgacaactaggactacaaacgtgcatggagatgagctcattgtcaccaccacaagtccctatgaacaagcagcatttgggtccaagacggattggcgtgttagagcaatatcagctactaatctttatcttcgagtgaatcatatatatgtgaactcagaagacataaaggaaactgggtacacatatatcatgccaaagaacattttaaagaaggtcatct

SEQ ID NO: 2025 - DNA, 261 bp, Gossypium hirsutum
  Clone ID: LIB3083-050-Q1-L1-G4
gaaatggctgccatgaagagggacgctgagcattattcacgccaggagcatatggaactagagaaacgctaccgtgaactaactgacctactgtactacaagcaaacacagttagaaaccatggctagtgaaaaagctgcagctgagttccagctggagaaggaaataaagcgtcttcaagaagctcaggttgaagtagagagaagtagagttcctcgtcgcgcgtcatcttcctgggaggaagacacagatatcaaatct

SEQ ID NO: 2026 - DNA, 329 bp, Gossypium hirsutum
  Clone ID: LIB3083-050-Q1-L1-G5
cttcttatggtcctaattacattgtaccagacattgcggaagggcgatataagtgcaccaggagcggatatattggctgcatattcaccggtagcttgaccatcgataactacaaccgatccaaggcgagtttaatactacatactatcatgaacctcaacgtcttgtcctcatgatgctggtgtatctgcatacgttaagacttttcacccgcattggtctccctaaaccattaaatgtgcttttatgactactgcttgtgcgatagatgcaccgacgaatcaaagagctgaatatgcttatggatcatgacatatgaaccctgtcaa

SEQ ID NO: 2027 - DNA, 345 bp, Gossypium hirsutum
  Clone ID: LIB3083-050-Q1-L1-G6
tttctctgtgttcccttcccctaaggtgtctgacactgggggcgaaccttacaatgctactctctctgttcaccagcttgttgagaatgctgatgaatgtatggttttggacaatgaagctttatatgatatttgcttccgtactctgaagctcactactccaagctttggagacttgaaccacttgatttctgccaccatgagtggtgtgacatgctgccttcgtttccctggtcaattaaactcagatctacgcaagcttgccgtcaatctcattccattccctcgcctgcatttctttatggttggctttgctccacttacttctcgagggtcacagcaata

SEQ ID NO: 2028 - DNA, 318 bp, Gossypium hirsutum
  unsure (1)..(318): unsure at all n locations; Clone ID: LIB3083-050-Q1-L1-G7
catcagccctttcctattctgagattcgngacatcatccttgcaacgtttattactccaccctttcaacacaagcagcagatatcagagattgagaaacaggcgaaagaagcaagccagctaacagctgtgacaacttttactactaacgttcatggagatgagctcattgtcaccaccacaagttcctatgaacaattcagcattgggtccaaaactgattggcgttttaaaacaatatcagctactaatctttatcttccaatgaatcatatatatgtgaactcagaggacattaaagaaactgggtacacatata

SEQ ID NO: 2029 - DNA, 299 bp, Gossypium hirsutum
  Clone ID: LIB3083-050-Q1-L1-G8
aatttcatttttgaagaaaaccagtctacctcccgggagagcgcatatcgaacttcatctacgcctccggctactatacagaactactgtactcacagcgcacacaaactataaccatggaaggtgaaatagctccagctaatttccaaatcaggacagcaatagagcatattccaacacctcaggtgaaggatatcagaggtgagatcactatgcggcttaatctttccgtgagaaccactctgatgtcacatctcttaatgcatcaacacataaccaattacccctattatcagtcc

SEQ ID NO: 2030 - DNA, 151 bp, Gossypium hirsutum
  Clone ID: LIB3083-050-Q1-L1-G9
atctatcatgattaaacctttccatacttatcatacacctttgagaactgtattcttctataacacctcatgataaaacttcaacagatccatcaaaacaccaaaacacttaccatcatcatattgcattcagaggtccccacctcatata

SEQ ID NO: 2031 - DNA, 342 bp, Gossypium hirsutum
  Clone ID: LIB3083-050-Q1-L1-H1
tggttatgaataaaaaactgagtggggcacagagatcggatggatttatgggtcggtgacggaggatattctaacaggtttcaagatgcattgtagagggtggaaatcggtttattgtgtaccgaaaagaccggcattcaaagggttcgctccaatcaatctctcagatcggttgcaccaagttttgagatgggcacttggctctgtagaaattctccttatgtcgcactgtccactttggtatggttattgcggaaaactgaaatggctcgagaggcttgcttatatcaacaccattgattaccctttcacctcgatgcctttactcgactattgtactat

SEQ ID NO: 2032 - DNA, 322 bp, Gossypium hirsutum
  Clone ID: LIB3083-050-Q1-L1-H11
tgacactaatcaaatcacttttaactttttcaccataacgaacttgaatagttcatggtaaaaaatctccggcattacccacaacatacatcaactaatcccaacccaccctaaacattaaacactcactccctataaaaatgcaaatatatagcatccctcttacaaaaaaacatgtaagcatagaaatcacaatatcactatatatttctctatcttaaaacactccttttaaaaaaccctgactcttaaaaataaacccatcttctaaagccatgcaaaaagatagctttaacaatccaaaaattacgacccgaataac

SEQ ID NO: 2033 - DNA, 333 bp, Gossypium hirsutum
  Clone ID: LIB3083-050-Q1-L1-H12
tgtggattgttgccctactggattcaagtgcggtatcaactgccagcggccaactgttgttccaggaggggaccttgccaaggttcagagagctgtctgcatgatctccaactcaaccagcgttgcggaagtgttttcccgcattgatcataaatttgatctcatgtatgccaagcgtgcatttgtgcactggtatgttggtgagggcatggaggaaggagagttttctgaggcacgtgaagatctcgctgcactggaaaaagattatgaagaagttggcgctgagtctggtgaaggagacgaaggggatgaggaggagtattgagggatgta

SEQ ID NO: 2034 - DNA, 367 bp, Gossypium hirsutum
  Clone ID: LIB3083-050-Q1-L1-H2
cagaaaatctaacacatgggaaaaaatgagagagatccttcatgttcggggtggacaatgtgggaaccaaatcggttccaagttttgggaggttgtttgcgatgagcacggcatagatccaactggaaggtacattggttcctcggatctgcagttggagcgtgttaatgtttactataacgaggcttcatgtggtcgctttgttcctcgtgctgtgctcatggacttggagcctggtacgatggacagtgtccgaactggtccttacggccagattttcaggccagacaactttgtttttggacaatccggtgctggaaacaattgggccaagggccattacactgaaggagccgagcttatcgat

SEQ ID NO: 2035 - DNA, 79 bp, Gossypium hirsutum
  Clone ID: LIB3083-050-Q1-L1-H3
gtcttcacgagctcatcccattttacttcatattctactaactttttcataagatctgtcacaatttaaaccatgacag

SEQ ID NO: 2036 - DNA, 374 bp, Gossypium hirsutum
  Clone ID: LIB3083-050-Q1-L1-H4
gaaagacgaagctttgaagaagcaattgaaaagctgcatcgagttgagggtttaacgcgttcctccttgggtgttagagttgctgctacggaagctcttgttggtctttatttgcagttgggccaggatgatacttcatcagtgctcgcagataaatgcttagattttttgcataaagatgatttaagaagtaatggtgggagcaaagaatctttgattgttcgtgctaaagcagtgaaggggctagttgagcttgtcactggtaaccttgagtcagctgaatcattttttcatggagtccaagatattgaagcttggaatggcacttgctgtttatcttatggagaatttctacatgctacacaacaagtttc

SEQ ID NO: 2037 - DNA, 368 bp, Gossypium hirsutum
  Clone ID: LIB3083-050-Q1-L1-H5
ctcgtgccgaatcggcacgaggaaaacttccgagcactatgcacaggtgaaaaaggtgttggaaagagtgggaaacctctccacttcaaaggaagtgctttccaccggattattccaaacttcatgattcaaggtggtgattttacacttggtgatggaagaggtggagaatcaatctatggtgagaaatttgctgatgagaatttcaagctgaagcacactggacctgggcttttgtcaatggcaaatgctggtcccgacaccaacggctcacaattcttcatcacaaccgtgacaaccagctggttggacggcagacatgttgtgttcggaaaggtgcttgctggaatggacgtggtttacaaagt

SEQ ID NO: 2038 - DNA, 403 bp, Gossypium hirsutum
  Clone ID: LIB3083-050-Q1-L1-H6
ctctcgtctctgggtctcgtaagttggtgaatagtgttgtgattagtgccaatggctcggattgggacctctgcagctcacattgtgttggcaatatttgctgtggccatgtttgttgtgtccgggaccatggcacaggatattgctccttctcctgcaatggctaccggagcaggctctgctttgccggtttccgctgtcttcttatgctcttccatgttggtctctttaattgctctcttggtgcattgaattcaaagcttttcaagactttatgacattggctacccttaatttcactctcactggtgatgaggggagtagcctctaatcttctccgagataatatttgggtggtatcaattttcatttctctaaagtttagatatctctatatatatca

SEQ ID NO: 2039 - DNA, 359 bp, Gossypium hirsutum
  Clone ID: LIB3083-050-Q1-L1-H7
agagaaacaaaaaataataatgataggaaagttaccaagtctataagcattattaccaaccttgatcaatgaaaacaatcaataacaaaatgctctctccctctctctctcactaattatttaacaaagaatcttaatctagctaactacaacacattcacaacatatggtacacaatttccttttcttcaagcatttcccaagctcaaaattcacaactgacaaagtttcacagtttcttttttcctttgcttcaagatataaaacgtgttcttcatgcaacgcatctacataaggccacctgtatatggattgtacgtttgaaccggcatacctgaacttgaaaggtgtacaagggc

SEQ ID NO: 2040 - DNA, 390 bp, Gossypium hirsutum
  Clone ID: LIB3083-050-Q1-L1-H8
gagaatcatgagggtgttatcaacttcgacgagatcttgcgtgagactgatgcatttatggttgcccgtggtgaccttggaatggaaattccggttgagaagatcttcctagcacaaaagatgatgatatacaagtgtaatcttgcaggcaagcctgttgttaccgccactcaaatgcttgaatccatgataaagtctccgaggccaacccgagctgaagcaaccgatgttgctaatgctgtcctggacggtaccgattgtgtcatgctcagtggtgagagtgctgctggagcctatccagagcttgccgtgaagatcatggctcggatttgtattgaggcagaatcttcccttgactatggagcaatcttcaaagaaatgatccgatcg

SEQ ID NO: 2041 - DNA, 360 bp, Gossypium hirsutum
  Clone ID: LIB3083-050-Q1-L1-H9
gagaagcatttttaattctctcatcttttgctcctgggctagttcaagctacttgagcagcatagtagtgaatgttgtgcatcatgtcaccggaggccacggccaccccgactggttgactaatgatattaatgctggcagattggattacttttactacattctagcagtgatgagcgccttcaatttcctttatttcctctatgttgctcatcggtatcgttacaagggccaagcacgaatagaaccgaaatctgaacccgatgtagagctaagttcgatgtaaccatgaaaccaattaagctgttgtagttttaatgtatatcacatgctaccaaataataaaaaacgtactcattt

SEQ ID NO: 2042 - DNA, 415 bp, Gossypium hirsutum
  unsure (1)..(415): unsure at all n locations; Clone ID: LIB3083-051-Q1-L1-A1
tgtgaattaaaattaagtaagcagaagattagttgatattatttatcatcatcgtcgtcgtccatattaaattatacaggatgggtcaccattcttgctgcaatcaacaaaaggttaagagaggcctttggtcccctgaggaagatgaaaagctcattaggttcatcaccactcatggctatggatgttggagtgaagtccctgagaaagctggtcttcagagatgtgggaaaagttgtaggctgagatggattaattatttaaggcctgatataagaagaggaaggtttacacctgaggaagagaagttgatcattaacctccatggggttgtaggaaacaggtgggctcatatagcaagtcacttgcctggaagaacagatnatgagattaaaaactaatggaattcatggat

SEQ ID NO: 2043 - DNA, 382 bp, Gossypium hirsutum
  unsure (1)..(382): unsure at all n locations; Clone ID: LIB3083-051-Q1-L1-A10
ctctttctaagaacatgatggcagtactgttgggatatcttggatttatggtgtttggaataatttctcttcgttttctctatcgtttcatagacaacaatggcctccctcgaaactggctatttgttgggatgattcccacgttacttctcaacatccgtcgccctcatgataaagttgcccaaatcctcagacgaagcaatggtaccttcttttatagaggactttggtttactaacaccagcttcttagccacctccgatcctgagaatgtgcgtcatgtattgagctccagttctgtttatttgaaaggtcctgaatggctgaaacagtttgatatcttncgcgatgcacttttcaattccgacggtgaggcatggaa

SEQ ID NO: 2044 - DNA, 369 bp, Gossypium hirsutum
  Clone ID: LIB3083-051-Q1-L1-A11
gaataggcctggtttcttgcatcacaagaaagggggtgccatgaacgcccttgttcgggtctcgggggtgctcacaaatgctccttttatgttgaacttggattgtgaccattatttaaataacagcaaggctgtaagagaggctatgtgtttcttgatggaccctcaaattggaagaaaggtttgctatgtccaattccctcaacgtttcgatggtattgatagacatgatcgatatgccaatcgtaacacagttttctttgatattaacatgacaggtctagatggtatacaaagccctgtatatgtcgacacgtggtgtgtttacagaaggcaagctctttatgggtatgaacctccaaagggacc

SEQ ID NO: 2045 - DNA, 374 bp, Gossypium hirsutum
  Clone ID: LIB3083-051-Q1-L1-A12
gaatttttgaggatacttatgttaaacactttgctaatggaaatcgtagaaaaggactgaaaactctaagaccacaagctaaaaaagaaaggcataggattacatttctctatggcttcttctctggttgctccattgcactaatagtggccattattgtgagcatacatgctagaaatcttcttaagagtcaaggaagagatcaatacatggtcaatatatttccactttacagcctatttggttacattgtcttgcatatgctcatgtatgctggaaatgtattcttttggaagcgttatcgagtcaacttttcgtttatatttggtttcaagcaaggaacatagttgggatatagagaagtacttcttctt

SEQ ID NO: 2046 - DNA, 333 bp, Gossypium hirsutum
  Clone ID: LIB3083-051-Q1-L1-A2
gttgatattgccattgtagcaccgacataccatctgtacaccgctggagaggtggaagcagtcatcagtcggctatgagagaaatgctttgttataaactatcatcccatgcagcatgagttaaggggattcaaactgtgaacccttattttttggtgtcgtgcaaaattccagtacgtcttcactcggatattttagttacacctcatcaggaaaaggaacctttgattttggatttagtttgcatgtgggttgcctctttcattccttattgctcgcatttgtgaaataacaagaatgattagtatagactaatatattttctaattatct

SEQ ID NO: 2047 - DNA, 431 bp, Gossypium hirsutum
  Clone ID: LIB3083-051-Q1-L1-A3
ttccaacacactttattacaagcgtttctttccttattattctgttaatgttttgggtggccttgataacgaaggaaagggttgtgtcttcacatatgatgctgttggttcctatgagaaggttggatacagttctcaaggttctggttcaacgctcatcatgcctttcttggataaccaactgaaatctcccagtcctcttctattgcctgcccaggatgctgttactccgcttgtggaagctgaagctattgatttggtaaaaactgtttttgcatctgcatccgagagagatatatacactggagacaaactcgaacttgttatcataaatgcagctggtatccgccgggaatacatggaacttaggaaagattgattaatctccattcttcaaacttggttaccacctcttatagatgtgtgagttc

SEQ ID NO: 2048 - DNA, 436 bp, Gossypium hirsutum
  Clone ID: LIB3083-051-Q1-L1-A4
caatgtatgaaccttctaaaaaacctccaatgtatgaacctaggccgccgaagccaccggtttatacacctccaaagaaagaaaaaccagaacccaagccaccaatgtatcaacctcccaacaacccaccaatatatgagccaaaaccacctaagccaccagtttatgcaccaccaaaggaagaaaagccaaaacctaaaccaccagtttatgagccttcggcacatgagccaccatacggtcactatccaggacatccacctttggggaagcctcaatagaatgctcccatcgactagccattcccaacaattgagctactagaaaaattagtatttataataagaagaactgccggctgatgttcatgtttattcttgtatggaatgtagtaatgcttactttcatgtttgaaaagagaccagctgctcatggc

SEQ ID NO: 2049 - DNA, 445 bp, Gossypium hirsutum
  Clone ID: LIB3083-051-Q1-L1-A5
caaagatcaaggaagaataccctgatcggatgatgctggcgttgtcggtttttccgtcgcctaaagcgtctgatacggtggttgagccctataatgcgactctatcagtgcaccagcttgcggaaaatggtgatgaatgcatggtgcttgataatgaagctctctatgatatctgttttagaactctcaagctcactaatcccagctttggtgatttgaatcgattgatttcaacaactatgagtggagctacatgctgccttcgtttcccaggccaactcagctccgatctccgaaaactagccgtaaacttgatcccattcccacgcctgcattttttcatggttggttttgcaccctggacatccagtagctcgcaacagtaccgagccttaacgatccccgagctaactcaacaaatgtgggatgctagaaacatgatgtg

SEQ ID NO: 2050 - DNA, 379 bp, Gossypium hirsutum
  Clone ID: LIB3083-051-Q1-L1-A6
gatctatgcaaatcatgagcctgaacactgattgtacctgggcgcactagtttacggtaaaatacaaccactccataagtacgaccggatgtataatcctacaacttaataagctatatgctacacagcattacttcactccacaaccatcatgctcagaattttactgatcgccataggatgaatatccatcacctagacaacccatatataagccatcaacacacgaccaacatacacccactattcaagacatccacctatagagaatcctccatacaatgcatacatcgactaaccattccaaagcaatgatctactacaaagatgagtatatagacaaagaagaactgccatctgaagttcagacttatcattg

SEQ ID NO: 2051 - DNA, 448 bp, Gossypium hirsutum
  Clone ID: LIB3083-051-Q1-L1-A7
cacaaatcgaatgagcacgaagagtaccagaaagaaaaacccgagttccccaaattggaaaagcctaaagagcacgagaaacacaaagtcgaatatccgaaaatacccgagtacaaggaaaaccaagatgagggtaaggaacataaacatgaagagtaccacgaatcacgcgaatcgaaggagcacgaagagtacgagaaagaaaaacccgagttccccaaattggaaaagcctaaagagcacgagaaacacgaagtcgaatatccggaaatacccgagtacaaggaaaagcaagatgagggtaaggaacataaacatgaggagtgccacgagtcacacgaatcgaaggagcacgaagagtacgagaaagaaaaacccaatttccccaaaggggaaaagcccaaagagcacgagaaacatgaagtcgaatatccgaaaatacccgagt

SEQ ID NO: 2052 - DNA, 439 bp, Gossypium hirsutum
  Clone ID: LIB3083-051-Q1-L1-A8
aaaacatgaaaattcataacatacagtaaaccatttcaagtgtgtaacaagcttcaaagaatagaagcttgcataacacggaagcaacaggtaataaaagacatcatacgcacactcaatcacaggtacttcttagtactcatcatcttcaccctcatcaccctcagccgactcagcaccaacttcttcataatccttctccaatgcagcaagatcctcacgagcctctgagaattctccttcttccataccctcaccaacataccagtgaatgaaggcacgtttggcatacataagatcaaacttatggtcaatgcgagagaagacttcagcaacactggtggagttagaaatcatgcaaacagctctctggaccttggcgagatcaccaccagggacaacagtgggtggttggtagttgataccgcacttgaatcca

SEQ ID NO: 2053 - DNA, 396 bp, Gossypium hirsutum
  unsure (1)..(396): unsure at all n locations; Clone ID: LIB3083-051-Q1-L1-A9
ttgaacttaaaacactgttctgttctccccctttcctcttggtgggcggtttcagttccatctatttgtccatggatcttacacctcagcaacttatccagttcaacggctccgacccatccaagcccatctacgttgcaatcaatggtcgcatctacgatgtcaccgccggcaaatccttctacggtcctggtggtgcctacgccatgttcgccggcaaagatgccagcagagctcttgcaaagatgagcaagaacgaagaagatgtctgtcccaaccttgacggcctctctgaaaaggagatggatgtccttaacgattgggtcaagaaatttgaagctaagtaccctgttgtcggccgcgttgtctcttgaaantttgcaccttttctctatg

SEQ ID NO: 2054 - DNA, 361 bp, Gossypium hirsutum
  Clone ID: LIB3083-051-Q1-L1-B1
ccgaaaaccgaatcaagatcttcgcaatctcatcgagctacaggagggaaaaatggatctcagaatcatgggtttcgattctccgctcttgaatactctccaacacatgatggatctttctgacgatacggagaagatcccgaacgcaccatcaaaggtttacatgcgggatgccaaagccatggctgcaacaccagctgacattaaagagtaccccaagtcttacgtgttcatcgtcgacatgccggggctgaaatcaagggacatcaaagtccaagtggaggacgacaatatgctcttgatcagcggagaaaggaaacgagaggtagagaaagaaggagccaagtacgtgagaatggaa

SEQ ID NO: 2055 - DNA, 380 bp, Gossypium hirsutum
  unsure (1)..(380): unsure at all n locations; Clone ID: LIB3083-051-Q1-L1-B10
ggatactactactgggatcccttataatgttagcaacttggctcatggaaatgcacataaccctggttgggctgggggtcaaagtattcttgcagactcagggactgagcaactagagtttattgctctttctcaaagaacaggagatcccaagtatcaggagaaggtggagaaggttatagttgcccttaataaaacttttccggccgatggtttgcttcccatctatattaatcctgaaactgcaactggttcatactccactataacctttggtgctatgggtgacagcttctatgaatatctgctcaaagcctggatacaggganacaaaacatcatcattaaagctttatagagatatgtgggaaacatcaatga

SEQ ID NO: 2056 - DNA, 328 bp, Gossypium hirsutum
  Clone ID: LIB3083-051-Q1-L1-B11
gagtgagagagagagagagagactccaagcaggcattttccttacaagtttggttttcttgtgattaatcgatatggctagctcaatgtcccttaagcttgcatgtgtggcggtgttgtgcatggtggtgggtgcacccctggctcaaggggccgtaacctgtggtcaagtcacaagctccctcgcaccctgcattggttacttgacagggaatggtgctggtggcgttcccccaggttgctgcggcggcataaaatctctcaactccgccgtccaaacaacaccagaccggcaagcagcttgcaaatgcatcaaaagtgcggccgcc

SEQ ID NO: 2057 - DNA, 384 bp, Gossypium hirsutum
  unsure (1)..(384): unsure at all n locations; Clone ID: LIB3083-051-Q1-L1-B12
gtttttggttgtttaatacgttattgccgaaagaaaagcctagggacagattcttcaacaaatcaattaccaaatggaagaatattcaaaaggaaccctagaggtagaggactcccagaatgaacaagtgcatgaagaagaaaacaaggaagaatttggtgtagttaatggtggggaagatgattccaattcaagtagtagcagttcggacaaggaggataattcagaggagaaactggtttctgagtcagttggggtttctttgacggaagataccgagccatcagttgagaaattgngagactctgatgttgctgaattggatgatanaganacagaagagaatgtttcaccatctttagagttagaccacactaatgctaa

SEQ ID NO: 2058 - DNA, 436 bp, Gossypium hirsutum
  Clone ID: LIB3083-051-Q1-L1-B2
agttgatgtggtgatttcggttgtgggtcaaatgcagctagcggagcaagttaagatcattgctgctattaaagaagctgggaatgtcaagagatttttcccatcggaatttggaatggacgtggacaagaacaatgcggttgagccagcaaaatcgacattcgcaatcaaggctcaaatccgtcgtgctgttgaggctgaagggatcccttacacttatgtgcctgctaactgctttgcaggctattttcttcctacattgtcgcagccaggagccacctctcccccaagagacaaggtggttattctaggtgatggaaatcctaaagctgttttcaaccatgaagctgacatcggaacgtacaccatcaaagctgtcgatgaccccagaacagcgaacaagactctattcatcaagccttccaagaacacctac

SEQ ID NO: 2059 - DNA, 397 bp, Gossypium hirsutum
  Clone ID: LIB3083-051-Q1-L1-B3
atcaagtcgattattgagacagtaaactctagtcagggtggggaactcgaggcacttgacggaatgactcccctagatgtggtggtcaagatcttgaataatcaactaacttctttaatgtggatcgatgagaaggctgaggaattctctggtcgtattcggaagcttgcagcccagggtaatgctgcagatggagaattaattgctgctccaaaatattggatgtcctgacccttccagaagttgctgttgttgagtttagtaactacagagggagtatggttaatttttccaaattattttggcatcagatggattatgtataagacctgactttcagacttggtctaactgattgcttcattaagaaaaattgaagtttcaaggcctgtaaaaa

SEQ ID NO: 2060 - DNA, 436 bp, Gossypium hirsutum
  Clone ID: LIB3083-051-Q1-L1-B4
gagcgattcagcgatggtggcatttccattgctgactacgcggatcgaatccaactacagggcatgcaccattccttacagattcccttccgataatcctcgaaaggctacccctactgaaattgcctggatcgaccttttccgcaattccattccctccttcaagaagagagctgagagcgatactaccgtggttgatgctccaactaaagctgagaaatttgctcaaaggtatgctgatatacttgatgacataaagaaagatccagaaagccatggcgggccacctgattgtactcttctctgccgacttcgggaacaggttcttagagaactggggtttagagatatattcaagaaagtcaaagatgaagagaataccaaagctatctccctatttccggaagtagttcgtcttaatgatgatattgaagat

SEQ ID NO: 2061 - DNA, 444 bp, Gossypium hirsutum
  Clone ID: LIB3083-051-Q1-L1-B5
ctttctttctttcccttgtctgaagtttacttgttagctgaagcttgcagtaaccaaactatgagtagaggtgggagctacggaggcggccaaagttccttgggctacctctttggtgatgatgagcagcaaagtgcaccaactgtgacaccacctatccagcccccatatgggatagatgttaccgcagagatgcccccagctcccagtaaatcaagttcaaagaaccaggaatagaaaaactttagcagcaccaacaattaccaagggctcaaggacagaattcagggaactttataactgatcgcccatcaacaaaagttaaatcggttcctggtggagattcatctctgggttacctgtttggtgagaagtaatgcttcctgctttataagtttaagtatatagcctgattgcctgattgcctgcaggtctcaatagtat

SEQ ID NO: 2062 - DNA, 440 bp, Gossypium hirsutum
  unsure (1)..(440): unsure at all n locations; Clone ID: LIB3083-051-Q1-L1-B6
gaatccaaatggttgnctcctactgagtaaaagagacccttggtgccgctttcatttaaggtgttttcgtaaaggagagacgttatggattgcggaagcggcggcggcggcttaggagcgagtggttccggcggagaccatgattcctccgacctttcacgacggaaaaagccttaccatcgtcacacagctcaccagattcagaggcttgaatcgatgttcaaggaatgtccacacccagacgagaaacaaaggttacagctaagtagggaattgggattagcaccaagacagatcaagttttggtttcaaaataggaggacacaaatgaaggcacaacatgaaagagccgataactctgcacttcgtgctgagaacgataagatccgatgtgaaaacatagccatatgagaagcacttaagaatgtgatttgtccttc

SEQ ID NO: 2063 - DNA, 443 bp, Gossypium hirsutum
  Clone ID: LIB3083-051-Q1-L1-B7
aaaagtggtgctttgcgtcatgatatacactattggcttggtggagacacatcccaggatgaagcaggtgctgatgcactcaagactgttgaacttgatgctgcccttggagggcgtgctgttcaatatcgtgaagtgcaaggccatgaaactgataagttcctttcctattttaagccatgtatcataccccaggaaggtggagtatcatccggattcaaacatgttcaggaagaggaacataagatacgtatgtctgtctgtagaggcatacatgttgtccatgtaaaagaggttccttttgctcgatcctcacttaaccatgatgatatctttatactggatacaaagtctaaaatctttcaattcaatgggtccaattcatccattcaagagagggcaaaagccctagaagttgttcaatacattaaagatacttatca

SEQ ID NO: 2064 - DNA, 432 bp, Gossypium hirsutum
  Clone ID: LIB3083-051-Q1-L1-B8
gatataaaacttgtagttggttacctacaacagccatcattggatagtttccccctataaaagcctcacagttccgccatcactacgattacagcagaaaaagggaagatggcaacatatcttgtcttggttgtagtagctatgctttgtgcaggagccacagctcaatcaggttgcgctagtgtgttgatcggcatgtcaccctgtttgagttacattacagggtcctcatcaaccccatctcaacaatgttgcacacagctagctaatgtcgtgcgttcatcaccgagatgcttgtgccaggtccttaatggtggtggttcatcatttgggatcaacatcaaccagactcaagctttggccttacctgattcatgcaatgttcagactccacctatcagcagttgtaatgctgcttctccagctccagca

SEQ ID NO: 2065 - DNA, 382 bp, Gossypium hirsutum
  Clone ID: LIB3083-051-Q1-L1-B9
ctgtgttggcgattctatagctgaagaaactcttcaatggctgaaaagagcacggttttgatcatcggatgaactggatatctgggaaagttcattgtggaagccagtgcaaaatagggtcatcccactttcgcttttgtaagggagtccaccgtcttcgaccctgttaagggaaaacttgtcgacaacttcaagaacttatgggtccatttgttgctaggggatatgtacgaccatgacagtttggtcaaggcaataaagcaagttgatgtggcgatttcagttgcgggtcaaatgcagttagcagatcatgttaagatcattgctgctattatagcagctgtgaatgtcaacagatttcttccatcggaattttggaatg

SEQ ID NO: 2066 - DNA, 431 bp, Gossypium hirsutum
  Clone ID: LIB3083-051-Q1-L1-C1
cataacgtcacctttcaatacaacccacaatgaggcaacaatgtgtgttcactactctcacgttgctcatcctgttttccctcagttgttcaacaacattagcccaagctccggcactggctccagcaccttctggtccgacaaacgtcaccaagatcctcgaaaaagccggtcaattcaccctcttcattcgtcttctaaagtccactcaagtggccaaccagctgctcggtcagctcaacaattccaacaatggtatgaccgtttttgcaccaacggacaatgctttctccagccttaaatcgggcacattgaattcactcaccgatgaacaaaaagtggagctggtgcaattccacatcgtcccaacatacctcacctcgtctcagttccaaaccattagcaatcctttgagaacccaagctggtgat

SEQ ID NO: 2067 - DNA, 226 bp, Gossypium hirsutum
  Clone ID: LIB3083-051-Q1-L1-C10
aaaacatgaaaaagcataacatacagtaaaccatttcaagtctttaacaagctgcaaagaatagaaccttgcataacacggaagcaacaggtaataaaagacatcatacgcacactcaatcacaggtacttcttagtactcatcatcttcaccctaatcaccctcagccgactcagcaccaacttctacataatccttctccaatgcagcaagatcctcacgagcc

SEQ ID NO: 2068 - DNA, 352 bp, Gossypium hirsutum
  unsure (1)..(352): unsure at all n locations; Clone ID: LIB3083-051-Q1-L1-C11
ctttcacttaaaattgtttgggaatcagatgcgaagcattaatttcctcggaagctcatttggctggagtcctgatgacatcaagcctgaggatattaatgctttgcatctgattcccaaagaactttcacttaaaattgttagcaagatcgaggcaggagaacggtttacagtttatgttgttgtccctatgtggccagaaggaatcccagagagtgcctcagttcaggcaatattagattggcagagaaggacgatggacatgatgtataaggatgtcattcangctctcagagccaagggtagcgacgagaatcccagaaactatttaacatttttctgccttgggaac

SEQ ID NO: 2069 - DNA, 352 bp, Gossypium hirsutum
  Clone ID: LIB3083-051-Q1-L1-C12
gaaagaacaggatttagaggctgttctgtgagtctagatgtcattgcccaactgtgtaattacatgaatgctgatgccaaagaagtccagggaagagagcaattcttcaatcttgcccctgccttattcatgctatgctagacttatacaaacagttgttccactagagagagaacccaaaaatataaacaaatagggaagaagcaatgacacctcatcaaggaaaacacaaattaactacttcaccttcttacataagtctaaatgattaggcagatgatattatcctataacctatacaagctgagtgccaatttttctgtgtcaaaatgtgattcatgttttactacca

SEQ ID NO: 2070 - DNA, 436 bp, Gossypium hirsutum
  unsure (1)..(436): unsure at all n locations; Clone ID: LIB3083-051-Q1-L1-C2
aaaaatttaaagtttgatagtactttattttgataaaaataggaggcgcgatttctcgaattgcagtcgggtctccggccgaagccggccaagcagatgcactcaaggcggctttagccgagttcatttcagtccttatttttgttttcgccggtgaaggctcgggcatggctttcaacaagttgaccgacgatgactcgtcgacaccagcgggtttagtagctgcggcattggctcacgccttggcgttgtttgtggcggtttcggtcggagctaacatttccggcgggcacgtaaaccccgccgtcacgttcggtgctttcgtgggtggccacattacattggtgaggagtattttgtattggatagctcaattgcttggatctngtcgtgcttgcttgcttctcaagttctcaaccggcggaatgacaacatc

SEQ ID NO: 2071 - DNA, 446 bp, Gossypium hirsutum
  Clone ID: LIB3083-051-Q1-L1-C3
gtcagtagtttctctgcctggtggtgatgtccctgctgacactgagtatgtccaagcagccgctttggtgagtcattcggctctttattcctcagagcttgtgaagcaacatccggttggaccagctatggttcatccagctgaaacggcaaagggaccaagttggactgatatctttgaacccggagtcaagcatgctttatttgtagggattggaattcaaatacttcagcagttctctggtataaacggcgttctatactacactccccaaattcttgagcaggcaggagtcggggttcttctttctaacttgggcctcagttcatcttctgcatcgctgcttatcagtggcattacaacctttgtgatgcttccaagtatagctgtcgccatgcggcttatggatatagccggtagaaggagtttgctactcaacacacttc

SEQ ID NO: 2072 - DNA, 439 bp, Gossypium hirsutum
  Clone ID: LIB3083-051-Q1-L1-C4
aaaatctccattttagcagactatcttcgccgcctcctcttggtcgtatctcatagcagccatgatcattccagagaagaaccgccgcgagatctccaagtacctctttcaagagggtgtttgctatgcaaagaaagattacaacttggcgaagcacccagaaatcgatgttcccaatcttcaagtcataaagctgatgcaaagcttcaagtcaaaagaatacgtgcgtgaaacttttgcatggatgcattattactggtaccttaccaatgatggcattgagttccttaggacatatctgaatcttccttctgagattgttcccgctactttgaagaaacaagctaagcctgctggtcgtcccatgggccctcctggtgacctgccacgtggtcctcctcgctttggtgacggtgagaggagatttggtgatagagat

SEQ ID NO: 2073 - DNA, 396 bp, Gossypium hirsutum
  Clone ID: LIB3083-051-Q1-L1-C5
ctaatagaagaaactattttgggtatgacaatgactggtatgtttttacaaaatgatccaagcaccccattgcattttctaagaaaattaagtctacataatatccccaccctacagttcaaactataactacaggtaggggaccacttatttcccttaaaagacaaattacggatggcacacaatttgccatttgtatttagaagctaactacttcttatcaactagtatcactaagctcccgtccattgatatcataggggaagagttggattcaaactatcgacacaactatagcgaccaaaaatagcgctacagctgctgtatgatgacattcattcaccaatcccactgcaacaagaggacataccataccaccaattcttgctatagcac

SEQ ID NO: 2074 - DNA, 392 bp, Gossypium hirsutum
  Clone ID: LIB3083-051-Q1-L1-C6
caaaaatcgccgaggaaaacaagttgtcggggcagcaagaagaagataagaaaccgagcgatcagtccgccgctcacatcaacctcaaagtcaaaggccaggacgggaatgaagttttcttcaggatcaaaagaagcacacagttgaagaagctcatgaatgcatattgcgaccgacattctgtggatctcaactcgattgccttcttgttcgatggtcgccgtctgcgaggtgagcaaactccgtacgagcttgagatggacgatggtgatgagatcgatgctatgctttaccataccgcatgtactgtgtgtagcgagtactactttgtcgcatctagtatttcgatgagttcgtcatggtctgattatcgtagatgcactcaatgtttc

SEQ ID NO: 2075 - DNA, 440 bp, Gossypium hirsutum
  Clone ID: LIB3083-051-Q1-L1-C7
cttgcctgctgtcttccgacaagcttatgaaatgggattggtgagttcagcacaaatggtaaagttcttagcaattaatgccagaccaaccaccagtcgatttatttctcgaacactcccacaagcaatgtctcgggcatttattggcaggatgcttgcagatcctgcctttttatacaggcttcttttagaagaggttgctactattggttcttctgtttggtgggagttgaagaatcgaaaggataggattaagcaagaatgggatctagcacttatgaatgttctcacggtagcagcttgcaatgctcttgtagtttggtctcttgctccttgtcgttcttatggcaacaccttccggtttgacttgcaaaacacattacagaagcttcccaacaatatatttgaaaagagttacccacttatagaatttgacttgc

SEQ ID NO: 2076 - DNA, 383 bp, Gossypium hirsutum
  Clone ID: LIB3083-051-Q1-L1-C8
tcaccactatctttcctctttattttccctcactttcccaataaaatggcggaaatccttcacatgcaaggtggccaatgcaacaatcacataccagccaagttctgggaagtcgtatgtgccaaacatgccatcaattcaacgggtctatattgtttttactcttacctccagcttgagcgaatcaatgtttactacaacgaagccagttttttccgttttgttccccacgcagttttaatggatctggaacccataaccatttatagcgtaagatccagtccttacggacaaattttccgacccgataacttcgttttcggacagtcctgttcatgaaacaattggtctaatggacattacactgaaagatcataacttat

SEQ ID NO: 2077 - DNA, 305 bp, Gossypium hirsutum
  Clone ID: LIB3083-051-Q1-L1-C9
gatctaatggcctgaatcttcgaattcggaggggtggtcatgactatgaaggcctatcatatgtctgttatgacccataagatggtcttgatttcaccaattatcaatcacttaagatcgatctaacgaacaaactcacatggtttcaatatggtgcactcctctatgagttacactcttaaattgctagaaaactttaatccctcgctcatcatgctgatatttgcacacactggctgcggtgatgcttacttaatcggcgaggatatggtttattggtacgaaaatatctgcttgcactggat

SEQ ID NO: 2078 - DNA, 385 bp, Gossypium hirsutum
  Clone ID: LIB3083-051-Q1-L1-D1
cggcacgagtgaatgacaggagtagtcgatctcacagctgctggagagttcacgttcaaggaaaagacctcacatcaggaaacattattcatggctgtatgcatctggttgacctggcaggaagtgaaagggtcgataaatctgaggtgatgggagatcggttaaaagaggcacagcacatcaacaaatccctttctgctttaggtgatgtaattgcggctcttgcttcaaaaggttcacatgttccctatagaaacagtaaactcactcagttgctccaagattcacttggaggacaagccaaaacacttatgtttgttcacattgctcccgagtacgaagcttctggagaaacaattagcacgcttaaaattgcagaaagggt

SEQ ID NO: 2079 - DNA, 321 bp, Gossypium hirsutum
  Clone ID: LIB3083-051-Q1-L1-D10
ctgtctatgatcgtatcaacaagctggtcccggtttgtgaaatggcaataaagctttgcggcactgatggtacaatctcttgcatggcttcatattttgtctgcaataacatattcaatggcatcatggcacttgctggcgatacaaattactatgacgttagaaagaaatgtgaagggagcctttgctatgacttctcaaacatggagtcatttctgaacaagaaatctgttagggatgcccttggtgttgggaacatagatttcttgtcctgcagccctactgtgtatcaggccatgctggttgactggatgaggaatc

SEQ ID NO: 2080 - DNA, 360 bp, Gossypium hirsutum
  unsure (1)..(360): unsure at all n locations; Clone ID: LIB3083-051-Q1-L1-D11
ctttctataaacaacaggatccaattttttcacccagttcgtcctcaacttattccaatgtttcctgctcctcagcagcctgcacttcattgaattctgctacaggtaactcgcctggctgctcatcatcaacttgtgtctatggcatccaatatggagattcatctttctcgattggattgtttgctaaagaaaagctcactttgacatcaaacgttgtgtttgacaactttctatttggttgtggccaaaacaatcaaggcctttttggtggtgctgccggtttgctaggactaggccgaaataaactatcttttccatcacanacagccataaaattcaagaaaatattttcctact

SEQ ID NO: 2081 - DNA, 375 bp, Gossypium hirsutum
  unsure (1)..(375): unsure at all n locations; Clone ID: LIB3083-051-Q1-L1-D12
taataacagcgcagatttctggttgtgagaggaaaggagatatggctgagagtaacgtgaaggtattgggtacatgggcaagcccgttcgtgatgagggtgaaaattgcccttcacctcaaatctgtccgctacgaggacgtggaggaagatttgttggcacccaaaagcgagcttcttcttaaatctaaccctgtttacaagaaaatcccggtcttcttccatgctcataaccctatctgcgagtccctaatcatccttcagtacatcgatgaggtttggaccacctctgcttcttccatcctcccttccgatccctatgaacgttcccaatcccgattntgggctgcctatgtcgacgataagttttttccct

SEQ ID NO: 2082 - DNA, 405 bp, Gossypium hirsutum
  Clone ID: LIB3083-051-Q1-L1-D2
tatttttcctctccaattttccgtcactttcccgagaaaatgagagaaatccttcacatccaaggtggccaatgcggcaatcagataggagccaagttctgggaagtcgtatgtgccgaacatggcatcgattcaacgggtcgatatggtggtgactcggagctccagcttgagcgaatcaatgtttactacaacgaagccagttgtggccgttttgttccccgcgcagttttaatggatctggaacccggaaccatggatagcgtaagatccggtccttacggacaaattttccgacccgataacttcgttttcggacagtccggtgcgggaaacaattgggctaagggacattacactgaaggagcggagcttatcgattccgttctcgacgtggttagaaag

SEQ ID NO: 2083 - DNA, 435 bp, Gossypium hirsutum
  Clone ID: LIB3083-051-Q1-L1-D3
gcagaattggtgataatgggctggttcacttgacaggtcttcggagtttgaaatgtttggagttgtctgatactgaagttggaagcaatggtcttcgctatctttctggtttgtgtaagctggagagtataaacttgtcattcactgttgtttctgatggtggattaagagaactgtctggactaacgtctcttaaatcacttaatctggatgctcgtcaaatcacagatgctggacttgcagctcttacaagtttgactgggctgactcatcttgatctttttggagcccgtatcacagattctgggacaagccacttacgaaatttgaagaacctgcgctccttggaaatctgtggtggaagattgaccgatgctggtgtgaagaacattaaagatctttcatccctgtcgctgctaaatctgtcacagaact

SEQ ID NO: 2084 - DNA, 422 bp, Gossypium hirsutum
  Clone ID: LIB3083-051-Q1-L1-D4
gtttttcttgtttggtacttgtctttgttgtccaacaattgggtggtcaaagttctgcatatttgttgattcatggtgagcctaccaactacgtttctgccgttggggaccctggaatgacgaacccaaacgtcagagttgctttggaagcttggaatttctgcaacgaagttggctttgaagttcctaacgtgggcagcccccgctgggctgattgtactgatctttactgctcttctgactccgtttatctgggtggcggccttgttaataatggcagtcagtgcagagtacttcacaaagtgaatgagactgacaacaggttaagagctggtgataaatttcctataatgggctttgagtcttatgctgaccctgacctgtttgcaaaggagaaagagctgtatctcggttctttatgt

SEQ ID NO: 2085 - DNA, 439 bp, Gossypium hirsutum
  Clone ID: LIB3083-051-Q1-L1-D5
ttttaagaggtgaaggaaaaaaaaatggaagattcatcatgagggtcgttcttgagaaagcaatgggatgaatacaaagaattctgggccgatcgatttccgttcactaatgtctattcaagatacatcggccgtgaacagtcccttccttcatggtctgaatccgatgttaacgagttcatcgcttctgatccggttcatggacccaccttgaagactgccagggaagcagcaaacatcgccttatacggaagtgctatcggagctatcacaactgcaggttttgcctggaaatactcgaagagtttacatggtgctggactgtctttcgtaggaggagccgtttttggttggacatttggacaagaaatcgcaaatcatgcgtatcaactctacaggttggacacaatggctgcacaagccaaatttatggattggt

SEQ ID NO: 2086 - DNA, 432 bp, Gossypium hirsutum
  Clone ID: LIB3083-051-Q1-L1-D6
gaagaattgattaagtgtcgttatgtgctgaaggagaaagaggttatcatatctcagcagaaacaagcagaaaatgctttagcacatcaagcttgtgctttgaggtccgacttagagaaagctgtcaaggataatgctttgttgttcctaaaaattggaagggaagacaagctgaatgctgataatagagtagtggttaataactatcaagtagaacttgcccaacaaattggttctatttgcaacctggtgtcctcattaatgtctcagcaaaacgaacaccttgagagtgttgagaaactctgttgttcttttactgatacacatcaaaaggcaatcttggatatgaagaaaaaggtcactgccgcgaggactttgcatgtttcccagatggaggcagtccaaaatattgtgcgtttgcacaagggtagc

SEQ ID NO: 2087 - DNA, 440 bp, Gossypium hirsutum
  Clone ID: LIB3083-051-Q1-L1-D7
cacagcttttccaagccagaaaatccagcaccaagtcagcagattctagtcttgactttggaaatgaagaagtaccggttgaacccaaaacagatcttgggctttccccttcatttatttcctctagtgaaaacctgaatatgagttccgaaagttgttgttcagaaaatgcaaccttcagtactaacagttcacctctgccaattggcagacctttgcaagtagataattctttgaaaagccgaatccggtaccaatgtgcccccaccagctaagagcagagagacttcaacagttcacctctctgacgagtatttgagcttctgttacacttgcaagaaaaaactagagaaggatgaagaagtttacatgcacagaggtgaaaaggcattttgcagttttgattgccgcactgaggagatttttgctgatgaggaaat

SEQ ID NO: 2088 - DNA, 435 bp, Gossypium hirsutum
  Clone ID: LIB3083-051-Q1-L1-D8
gaaacatcgctggtttcatttctgaagccatacagggtgttggtggaattatcgaattggccccaggttacatgcctgctgtttatagcaccataaagaaagctggaggcctttgcatagctgatgaggttcaggctgggtttgctcgcacagggagccatttctggggatttgagaaccatggagttgttcccgatatagtaacaatggcaaagggcattggaaatggcatccctctcggtgccgtagtaaccacccctgaaattgcagaggtcttgacccgcagaagttacttcaatacctttggtgggaatcctgtatgtactgctgcagggttagctgtcctgaaagtgatcgaaaaagaaaagcttcaggagaatgcacatgttgtgggatctcatttgaaggagaggctaactgcattaaaagataaat

SEQ ID NO: 2089 - DNA, 381 bp, Gossypium hirsutum
  Clone ID: LIB3083-051-Q1-L1-D9
gaactttgaagagcggctgctcagattttgcgtatttctcagatttttctctgagtttgaaacgatgtctacggctggcgaagctgcttgttcttacgctgctttaattctctatgatgatggcattcccatcaccgctgagaaaattgcaacaattgttaaagctgcaaatgtctcggttgaatcttattggccaagcttgtttgcaaagcttttcgaaaagtgcaacattgaggatcttataaccaatgttggtgctggtggtgctggtgctccagttgccgcagctgcacctgttgctgctggtggtggtggtggtgccgctgctccaccttctgctgaggaaaagaagaaggaagaaccagaggaagagagtgatga

SEQ ID NO: 2090 - DNA, 448 bp, Gossypium hirsutum
  unsure (1)..(448): unsure at all n locations; Clone ID: LIB3083-051-Q1-L1-E1
cgagnnagaaaatggttcattctgacaaagaatgaagaaaggagaccagccttgagcgagtaaatatctcaagctgagaaagatgaaccaaagagacatgccttgacaataaataactcagctgagaagatgaacaaagagatggccaggacagtgaatagctcagctgagaagatgagacaagagacagctacagtaaatggctcggctgagaagatgaagaaagagacggccttgacagtaaagagctcgaacgagaaggtgaagaaagaaacagccttgacagtaaataactcggctgagaaggttaagaaagagatcgcttcaacagtgaatggctcagctgagaagatgaaaaaagagaccactgtggcagtttcgaaatcacctgacattgaaactatgctggggccattaaggatgaatgagacatcagatttatttcatg

SEQ ID NO: 2091 - DNA, 339 bp, Gossypium hirsutum
  Clone ID: LIB3083-051-Q1-L1-E10
tcgtgttttttttttttttttttttttttttggtacttctattgattttattgtctcttgtttgaattggatgcattcttattcatttgcttgcttccctgtttcatttctatagttgggcttttcaaggattacaatcagttcatatttcctagattcatgtttgagatgagttaattgtttttttccctctttgttttagcttatttgtacattttgattcttctcgtctggtggagctgcacatggaccagtacgagaaagtagagaagattggtgagggaacctatggcgtttgttataaggctcgtgaccgtgtcaccaatgaaacaattgctt

SEQ ID NO: 2092 - DNA, 353 bp, Gossypium hirsutum
  unsure (1)..(353): unsure at all n locations; Clone ID: LIB3083-051-Q1-L1-E11
cagagtaattgctaatatatttatagtaccaaattccatagttaccaaaaagcaacatcccatacaaaaccatatgcatccgtacgagtctagtatctatctactgatgtaaagatgttcgtaaacaaaaaaacataagccaggaaaccacatttctaacacccaaaccagcaattcaggttgaaagaacagaaaagaaaaatccaaatcgttaagaaagcaaacagtaagaaacacacactactactattcctggagatcctcctccgcatcctcctcctcataatcatactcctcatcagctgttgcatcttgatattgntggtactctgaaaccagatcgttcatgttgc

SEQ ID NO: 2093 - DNA, 345 bp, Gossypium hirsutum
  Clone ID: LIB3083-051-Q1-L1-E12
gctctaggttttcttttttttttcagttcttagtactttgtttcatttcgtcaaaaaaaatcccatcatgagagaaatcctccacgttcaagccggtcagtgtggaaaccaaatcggaggctaattctgggaagttgctagcgactaacatggaattgatcccaatgggaactacgtccgtacttctcgtgttcagcttgagagggttaatgtttactacaacgaacctagtggtggtcgttacgtacccagagctgttttaatggaccttgaaccaggaaccatggatagcttgcgtactgctcctcacggacaactttttagacctgataacttcatttttgg

SEQ ID NO: 2094 - DNA, 433 bp, Gossypium hirsutum
  Clone ID: LIB3083-051-Q1-L1-E2
atactttgctgcaaattctcccaaatttttcagaaaatctaggcgggggaaaaaaatgagagagatccttcatgttcaaggtggacaatgtgggaaccaaatcggttccaagttttgggaggttgtttgcgatgagcacggcatagatccaactggaaggtacattggttcctcggatctgcagttggagcgtgttaatgtttactataacgaggcttcatgtggtcgctttgttcctcgtgctgtgctcatggacttggagcctggtacgatggacagtgtccgaactggtccttacggccagattttcaggccagacaactttgtttttggacaatccggtgctggaaacaactgggccaagggccattacactgaaggagccgagcttatcgatgccgttcttgatgttgtgaggaaagaagctgagaac

SEQ ID NO: 2095 - DNA, 443 bp, Gossypium hirsutum
  unsure (1)..(443): unsure at all n locations; Clone ID: LIB3083-051-Q1-L1-E3
aaccctctctcaaatcttggctcgccagtcgcctctctttcttgttctgcttcttcttcttcattctgttggctgctgctgctgctttggtggcgtgatttagaagccacaactcaatttcatataaagaaaaaaaaaagagtgagatggatccagacgcagtagccaaggccttcgtcgagcactactactccacattcgatgccaaccgggccggtttagccaatctctaccaggaaggttccatgttgaccttcgaaggtcaaaagatccagggctctcagagcatcgtggctaagctcaccagccttcctttccagcagtgcaagcacaacatcaccaccgtcgattgccagccttccggctccggcggcatgctcgtattcgtcagcggtaacctncaactcgctggcgagcagcatgctctcaagtttagccagatg

SEQ ID NO: 2096 - DNA, 444 bp, Gossypium hirsutum
  Clone ID: LIB3083-051-Q1-L1-E5
gaaagtaggtgacgacagaagagggttgtggaattgggaagcggaagaagaagctactgcgattgcgattgccaactcattcttccgtcatgggcaactgtggcactagagaggaatctgacgttgttactcatgctcaagttcagcagctccacaaccacatcttatccgacaagaagcttactcaaagtcagagccagactcagaatcgtaccctctcagatctgagcgacttcgaggattccaggaaaaatgcgcttctctatacccacattattgccttcactttattcgagcttgagactattaccaagagcttccgttctgactatattctcggggaaggtggcttcggaacagtctataaaggttatattgacgagaatgtgcgggtcggtctcaaatctcttcctgtcgctgtcaaggtcctcaacaaggagggcc

SEQ ID NO: 2097 - DNA, 436 bp, Gossypium hirsutum
  Clone ID: LIB3083-051-Q1-L1-E6
tcgagtttttttttttttttttttaaagcataaataatatgcgattctcattataatctatcacaaaaatatgtgagtccattacattaagatagcactaaatatttacaataccatatgggagagagaaatttcggatctcctccataatcgaaatgccagaaccaaatatggcattttgattttacattacaatattatttgtcaacatccagttgaacatgacaaacgaacgatcatcagctctctgctaacaaaacgtttcacgccaaacacaatagaccattaaacacgacatctacattaacaagcttctaaatctgctactgaaagggctcataccgacacactagaccattaaacacaacatctacattcgttaacacctaccttcgttaacgaaaatgaaaacttctaaatataccttagcaccatg

SEQ ID NO: 2098 - DNA, 444 bp, Gossypium hirsutum
  Clone ID: LIB3083-051-Q1-L1-E7
caaccttccagttctctccattgccataatccacaaaaatggagaaataaataaacactgtcgctttctcattagccagcttcgaagaatcgcatattactttgatctctccaacgaaatttaagtaataaaaatggtgttcgaggtgatgaaagttccaacgacgacgtttgaaggccagaagccaggcacttctggtcttcgtaagaaggtgaaagtttttgttcagcctcattatttgcagaatttcgttcaagcaacattcaatgcccttacacccgagaaagttaagggtgccacacttgtcgtttctggtgatggtcgttatttctcaaaggatgctgttcagataataatcaagatgtcagctgcaaatggagtaaggcgtgtatgggttggtcaaaacggattactttctactccagctgtatcagctgtaatacg

SEQ ID NO: 2099 - DNA, 420 bp, Gossypium hirsutum
  Clone ID: LIB3083-051-Q1-L1-E8
caagaaggaagctttgaaggaaaagtttgagggtctttgcagggtcatcaaggatgtgctgggtgacaaggttgaaaaggttgtggtttctgatcgtgtggttgactcaccttgttgtttagtgactggcgagtatgggtggactgcaaacatggagagaatcatgaaggcccaggctttgagggataacagcatggctggttacatgtcaagcaagaagacgatggagatcaacccggagaaccccatcatggaagagctgataaagagagccgatgcagacaagaatgataaatctgtgaaggaccttgttctccttctcttcgagactgctctcctgacctctggcttcagccttgatgaccctaacacctttggcaacaggatccacaggatgctgaaactcggcttgagcattga

SEQ ID NO: 2100 - DNA, 332 bp, Gossypium hirsutum
  Clone ID: LIB3083-051-Q1-L1-E9
ggtaagttccaggcaacaacaatttgtattatacgataacaaagcaacgagtccacattgagaaccacaaaaaaaaaaaaacacacacacacacattaaaatgcgcgggtctaacacgacagttccgatgaaaacaagtcgtcagcatagccaaatcctcattactagagagacacctagcaattacaccattattacgagaaacattaccttcaataaacatatccacatcatgtcgacacattttgtaacaagcaccaaactgaaagacaaccgtcaacttgagatcaccacgttcaaaggcccccaggaccatttctgttcttctgctt

SEQ ID NO: 2101 - DNA, 285 bp, Gossypium hirsutum
  Clone ID: LIB3083-051-Q1-L1-F1
gaaaggtgaagtggtaaaggttgtttgagaactgagcatatgtgggggatagaagacaagagtacggcctaagccaaatacacacaaaggaaagaagacatatgacttggagttgcagatgcagtaaactatgattagattgcttagacaaagcaattgcatttggatgaacactaccagatgatgagtcgtttttgctctcataatgtgagagaccgaattcacgcttgtattcacgattatgatacgatccagaaacttgacgtattcattatttacattcaa

SEQ ID NO: 2102 - DNA, 293 bp, Gossypium hirsutum
  Clone ID: LIB3083-051-Q1-L1-F10
atcttgctagatttcgatctccttgtttctagtttgatgtcttttcttcaaagaatttaaaaattttgaatttttatatctactacaccgccagtcgccagagccagttggtttattctgtgccggaatggctggaaacgactggataaacagttacctggaagcaatcctggacgttggtccaggaatcgactatgctaaatcctccttgttgttgagagagagaggtaatttcagtcctactcgctacttcgtggatgaggtcattactggattctatgatactgatctac

SEQ ID NO: 2103 - DNA, 364 bp, Gossypium hirsutum
  Clone ID: LIB3083-051-Q1-L1-F11
acatcaaacccgatcatcaatggctacctattatttcattatctttgaatctgttcaacatattaatacaggatcaagtaataacttgataaagttataaaaataaataaataaataaaggaaagcttcaatctcctatgaaggataagccatctacattgacataatttgtggtccatacaaaaatggactcatcattaactcaatacattcaaatatgtaccatgaacaaaccatataggtagctttagtttgtgagcttgtcaagccaagaatccatgacttgagacacagtctccataaatgcagcttcactcatgcctggaagcaacaaatcttgagcttcatctacaatttgctcaat

SEQ ID NO: 2104 - DNA, 248 bp, Gossypium hirsutum
  Clone ID: LIB3083-051-Q1-L1-F12
atttatttatatttctcctgttaactttttcgctactcattttgtttctgtcatactgtatcctttttccaatttcttatcaaaatcatgagtttgcataggtacccgatatggtgctctttgtttttgttaattaatgtacaccctgcaggggaaaataacaagtgtggaaaaacaacaggttgaattagccattgcaataaaacctgaaatattaataaagaaaatgctatacaagttgtgattgt

SEQ ID NO: 2105 - DNA, 425 bp, Gossypium hirsutum
  Clone ID: LIB3083-051-Q1-L1-F2
tctgcttcaaagctcctgtccgggtagaattctcttcttccgttgcgttgtgttctttgttgttcaatcgccatggcttcaaagcggattttgaaggaactcaaggatttgcagaaagatccacccacttcttgtagtgctggtccagtagctgaagacatgtttcattggcaagcaacaatcatgggaccctcagatagcccttatgctggaggtgtgtttttagttactatccatttccctccagattatcctttcaagcctcctaaggttgcgtttaggaccaaggtcttccatcccaacatcaacagcaatggaagcatttgtcttgatatcctcaaagaacaatggagccctgcactaaccatttccaaagttctgctctcaatctgctcgttgctgaccgatccaaaccctgatgaccc

SEQ ID NO: 2106 - DNA, 427 bp, Gossypium hirsutum
  Clone ID: LIB3083-051-Q1-L1-F4
gttttggcattctgggccttttcctaagtggatggagagacgggggtgcagcatatccgcagtttccattcaaggttttaatggaagagttggtgggagtcactgcttgtgttcttggagacatggcttcacgtcctaattttggtcttaacgagctcgacttcgttttctcaactctcgttgtcggttccattatgaatttcactcttatgtatcttttagcaccaacagcttccgcagcttcttcaagtctcccttctatctttgcaaactgtcctcaaagtcatatgtttgaaccaggtgcttttaccttaatcaaccgtttcgggactattgtctatataggaactgtgtttgctgctggtggactggctgctggacttgtctggactgcaatctcaaacggcttgatcactatgaggaaaaa

SEQ ID NO: 2107 - DNA, 441 bp, Gossypium hirsutum
  Clone ID: LIB3083-051-Q1-L1-F5
ccgacttgaatcatctcagagctgttaccgaggaggatggtcgagctctggctgagagggaaggtctttcatttcttgagacatcagcactggaagcaaccaacattgagaaggcattccaaactatattgactgagatctaccatatcataagcaaaaaggcattggcagcccaggaagcagctgctagtaccgcaattcctggccaaggaactaccattaatgtcactgatacatcaggaaacactaagagaggatgctgttctacttagaaaggtgataggttacatttgatgctgttctaccttaaaaggtcataggttacatttgagaaggtaaaaatatttgctaggaagtaggccctttttctgtttttgtcaatttttggctgacagggagacatgtaaaatacatatatatattacctgaattgtgatatga

SEQ ID NO: 2108 - DNA, 365 bp, Gossypium hirsutum
  Clone ID: LIB3083-051-Q1-L1-F7
accaccatcaatcattttatttattccaccatgactgctataccatgcggcgctttactacccggaccggtgagctccaacattcgcaaactcatcataagccctatacccttaactacactacatctctccatattatcatttacaccaactacctcactccttatccatcaatacaaaccctctattctccctgaacttacacagctttcaaaactagccaaaaacttgatgctaacagactatcctttacactttcaaaacctcacactatcaaaacatatttcttacaccatatatacgattcatcaactatatcatacgaacaatatccatttaatgaactctacttctattcatgaaat

SEQ ID NO: 2109 - DNA, 431 bp, Gossypium hirsutum
  Clone ID: LIB3083-051-Q1-L1-F8
cttgtttcttatccttctccgctacctaagacagagagagggagagagagagagagagagagaaacacagagagggagaaatggtttctctgaagctacagaagcggctctccgcgagcgttctaaattgtgtaaaaggaaaggtttggctcgatcctaatgaagtcaacgagatctctatggccaactcccggcagaacataaggaagttggttaaagatggttttatcatcaggaagccaaccaagattcactctcgatctcgtgctcgtcgcatgaaggaagccaagagaaagggacgtcactctggatatggtaagcgcaaggttacaagggaggcaaggttgcccacatagatcttatggatgagaaggatgcgtgtacttagacgcctactccgcaagtacagggaatcaaagaagattgacaag

SEQ ID NO: 2110 - DNA, 383 bp, Gossypium hirsutum
  Clone ID: LIB3083-051-Q1-L1-F9
aaatcatgggaatgccgctagtttccattgctgcagctcccaaaatcacctttgttcccaattccatctctctaccttcaattaaggtgcgtaatattccatcttcgacagcttccaccggtgggttgtcgatagaatgttcgtcgaggccgcagaagaaggcaacgaagcatcatatgaagaccaggccacgcaagacgcagccatgggacataaggaggaaacccaccgtttacgctcctttgcctccgctgcctcctgattgggccttagtttcaagcgtcggagaaaatgatggcgccgatgttgctgaggttggtctcgctggctctgctctacaggctcctgcttcaactgggtagtttttttttcactgttcatcg

SEQ ID NO: 2111 - DNA, 415 bp, Gossypium hirsutum
  Clone ID: LIB3083-051-Q1-L1-G1
aatagctaacattcaagcagtgaaccatttttaaacaaatgccccaaagcatgtaaatcaaaaatcaccttctgtcttaagttgaaccagagatggctaattggcaacaacaatgcaatattacaaacttttaagtgctaataaaaataaaaatgcctgctcaatgtctcgaaataatttctctttgcaaagaaaaggaaaataaatgctcaacaaggtagctactaactagcttagataataccaattttgtttgcaacgtccaaagcatcgtattcgggtgtcaacctaacgtatgctttctttgttccatcaagcctgatcaaagtgttaactttcttggcctgaatatcatacatcttcttgacagcatctttaatcttcttcttatcagcacgaatgtcaacaatgaaaa

SEQ ID NO: 2112 - DNA, 287 bp, Gossypium hirsutum
  Clone ID: LIB3083-051-Q1-L1-G10
ttaatatcgaagagacaaaggcagaggaagagtgtgaggagaagaagaagcatggtctcctggagaagcttcaccgatcagatagcagcagctccagctcttcaagcgacgaggaagaaggtgaaggagaagagaagaagaagaagaaaaagaaggagaagaagggactggaagaaaagattgaagagaaattagaaggggaaaagaaagaagaggacacctcagttccagtagagaagtgcgatgagccagtagtccagccagagacgccagagaagaaaggtttc

SEQ ID NO: 2113 - DNA, 372 bp, Gossypium hirsutum
  Clone ID: LIB3083-051-Q1-L1-G11
gtttaagtacgacagtgttcacggtcaatggaggcatcatgagcttaaggtgaaggactcaaagacccttctctttggtgaaaagcctgtcacagttttcggtatcagaaaccctgaggaaatcccatgggctgaggctggagctgagtatgttgttgagtctactggtgtttttactgacaaggacaaggctgctgctcacttgaagggtggcgcgaagaaggttatcatttctgctcccagtaaggatgctcccatgtttgttgtgggtgtcaatgagaaggaatataagcctgaccttaacattgtctccaatgctagctgcaccaccaactgtcttgctccattggctaaggtgatcaacgataaatt

SEQ ID NO: 2114 - DNA, 390 bp, Gossypium hirsutum
  Clone ID: LIB3083-051-Q1-L1-G12
gtgtgcgagatccgcagaaagttttcaacaggtgagaacacgttcactgttggaggggcttacgctgttgatcatctcacactgattaaagctaagctcaacaatcatgggaggcttggagcattgctgcagcatgaagtcataccgaagtcattgttgacagtctctggtgagcttgacaccaagtccttggacaaaagtcctcgcttaggattggcctttgctctgaaaccctaatcaattatttgcaacccaatgatgcttttacagatttgattacgattttttttttgtggtgatttaaaatgggggtgtcaataagttgctccacagacgattaatattcatttctaggttcgcattttctgtggatggatgattgatactttt

SEQ ID NO: 2115 - DNA, 414 bp, Gossypium hirsutum
  Clone ID: LIB3083-051-Q1-L1-G2
tactttgctgcaaattctcctaattttttcagaaaatctaacacgggggaaaaaatgagagagatccttcatgttcaaggtggacaatgtgggaaccaaatcggttccaagttttgggaggttgtttgcgatgagcacggcatagatccaactggaaggtacattggttcctcggatctgcagttggagcgcgttaatgtttactataacgaggcttcatgtggtcgctttgttcctcgtgctgtgctcatggacttggagcctggtacgatggacagtgtccgaactggtccttacggccagattttcaggccagacaactttgtttttggacaatccggtgctggaaacaattgggccaagggccattacactgaaggagccgagcttatcgatgcccgtcttgatgttgtg

SEQ ID NO: 2116 - DNA, 440 bp, Gossypium hirsutum
  Clone ID: LIB3083-051-Q1-L1-G3
acattttgcttcgtatctttgataatggaagccaaatggctggttgtgttttcagtggcggcaatgctggtggcactggccaactgccaggaatcgttgaagccattggtgaagatggtaaagggcaagaagctgtgtgacaaagggtgggaatgtaaagggtggtcaaagtattgttgcaaccataccatttctgattacttccaaacttaccagtttgaggacctttttgcgaagcgtaacacgccggtagcacatgcggttgggttctgggattaccattccttcattactgctgctgctcagtatcagcctcatggatttggtaccaccggggaaaagctccagaatatgaaagaagtcgctgcttttcttggacatgtcggcagcaaaacttcatgtggctatggagtcgctaccgggggaccattggcttgggg

SEQ ID NO: 2117 - DNA, 446 bp, Gossypium hirsutum
  unsure (1)..(446): unsure at all n locations; Clone ID: LIB3083-051-Q1-L1-G4
tgtgtttatgtttttttatttttataccatatcaccattcattgagccaaaaaaaagcagccatgacaaaaaaccaaatttgcacacaggaaaaaaattgaagaaaaaaaaaatgaaaaagatggtaacccaaaaaccaaaagtcaccatcacctccgatcagcatcgtactgagacaaaggtacaacttccgacaaaggcgtataaatcggtgtcagaagcggtgagttccgacaaacaggacaagacccattaagtttcagccaagcatcaatacaagttacatgaaaacaatgcctacattcaggcatgatcctaaacatctctgattctctatactcacacaaacatatcgaacaaatggtgttcccagcactataacccgtcacctccaccgtcgtacacacctnctttttgctgaaccggaacttgaggtaagagtttat

SEQ ID NO: 2118 - DNA, 432 bp, Gossypium hirsutum
  Clone ID: LIB3083-051-Q1-L1-G5
gtttgagctagctagctcttactcaaatggcaaccaaaacgagaatgttgcaaatattttcacttttcttctttttgttcagtatctgcaactccattttccttggtgctaatggagatgacaatggtggttggcaaactgcccatgccaccttctacggtggtgctgatgctaccggcacaatggggggagcttgtggttatggaaacctgtacagtcaagggtatggaacgagcacagcagctttgagcactgcacttttcaacattggcttgagctgcagtgcctgctacgagctccggtgcaacaatgatccttactggtgcattagtcgaaccataaccgtgacagccaccaacttttgtcccactaactatgctttatctagtgacaatggcgtgtggcgcaattccccacgagaacactttgatt

SEQ ID NO: 2119 - DNA, 434 bp, Gossypium hirsutum
  Clone ID: LIB3083-051-Q1-L1-G6
aaaaaattttatgaaaccatattttatactaaacaaaaaaatggcgccatacatgttttctttttacatcctaagtagttaaattgaaaaaaaaaaactaacacttaaaatattttcagtgttgaatttctaaagttaatctgaatagagaggtgattgaaaaaccaatatggtggaaatatatagtaatcaaaaagatcaaaggtcagtgttgggattgttaccagcgaggataagtgaaatttccaaacctctgctgaaagcttgattgaacatcaaccttgtctggaaagtcgagacgaacgggaaccatgagaaaaatgctatcggaacgaatataatcattcccattccagcatcgtataatcgtgccatcgatcgcactgatttccacaaccccgtctttttcacaaatggtttccaagctgcagcaa

SEQ ID NO: 2120 - DNA, 440 bp, Gossypium hirsutum
  Clone ID: LIB3083-051-Q1-L1-G7
aaaaaaaacacaccctaaagagacaatgagaaagctgctagcctttgcctttcttttcttcttcttttgggataaaacattagctcaaatagctccggcgccgccgttaaaggtggacaacatcacttccatcctcgaaaaaggtggccaattcaccactttcatcaagctattgaaagccacacaggtggctgatcaactaaacaaccagctaagcacaccggaccctaacgacgggataacggtgtttgcaccgagtgacaacgcgttctccggactcaaacccgggacgttaaactcactttccgaccaagagaagcttcagttggttcagttccatatactcccgacgttaatgtcgacgtcgcagtttcaaaccgcgagtaaccctttgagaacccaagctggggatgtaaaggtgggaagtttccgcttaatgt

SEQ ID NO: 2121 - DNA, 372 bp, Gossypium hirsutum
  Clone ID: LIB3083-051-Q1-L1-G8
ttcgagcttatgtatgccaaacgtgccttcattcactggtaggtaggtgagggtatggaagaaggagaattctcagaggctcgtgaggatcttgctgcattggagaaggattatgaagaagttggtgctgagtcggctgatggtgatgagggcgaagatgatgagtactaagaagtacctgtgattgagcgtgcgtatagatgtcttttattacctgttgctaccgtgttatgcaagcttctattctttgaagcttgataaagacttgaaatggtttactgtatgttatgcttgctcatgcatcatctgtgtctgggatgaaacttgatatattagctggctgtaaactatgggcttacctagctccagggg

SEQ ID NO: 2122 - DNA, 393 bp, Gossypium hirsutum
  unsure (1)..(393): unsure at all n locations; Clone ID: LIB3083-051-Q1-L1-G9
cgagcatacaattntgctcaaacatgcaagngaaaaatggcctgcttgttctcccaccacaaatcntgttgaatcaatncgagttgcaaattggcattgagaaacttaccagaagacgtttataagcttaaatgggatgttgtggttgtggacgggccgatcggggacacgccggaagcaccagggaggatgccaactatctacactgccggcatgttggcaagaactggtgggattgggaagaagacgacgactgacgttgtagttcacgatgttcatcggacgattgaaaaatggttttcttgggaattcttctgcgaacaaaactttgtctctgctaaagggaaactctgggtttttagaatacctgtccatcaatcgaattctacaagc

SEQ ID NO: 2123 - DNA, 405 bp, Gossypium hirsutum
  Clone ID: LIB3083-051-Q1-L1-H1
aaaatgcagtggtttactttattgatctaaaaaggtagtaattaaatcaatgaaagcatcaaacaccagacaaattgtccacccaaggaagagacacctgacaaatgaccatttcatgataaaaaagcgggactcaacaaaaacgtttctcgtgccgctcgtgccaaatcggcactaggtgttatacagttcacacataagcgtcaatcaaagaactgatcacccttgagcgacactttatcttttggattactctctctctaattttttctctttgccctttgattgattatttcatctgcggttcgcttagagaaaatgaaaggaaaatcaagtgtgaagcaaacacgtccttattaaataaaagtggtagatcgatctcaaaggttaaaaagggttcaaaat

SEQ ID NO: 2124 - DNA, 380 bp, Gossypium hirsutum
  Clone ID: LIB3083-051-Q1-L1-H11
gccgtcaccaggatggggaccgcctccaggaggaccgccggggcctcccggtttatgtggctgctttgattttatttgcggtggtatttgccgtcttctttcttcttgtttttatgttctctgctgctgctgcatatttgaaagctgctgtgggccaatgttcggcgggccgcctgggccacctgggccaagacctttttaattatagtgctcatctctttttcccttttactctgtttttgatttgtgttttaggctgttgtgaactgtgatgtgaaacaaaaatctagttctgcccctttctgttctttcttgccagcatggaacatggttccagtccacgcttttatttgttctaaaataaaaaaaattagttaaaa

SEQ ID NO: 2125 - DNA, 391 bp, Gossypium hirsutum
  unsure (1)..(391): unsure at all n locations; Clone ID: LIB3083-051-Q1-L1-H12
caaattttgaatcaggtttttgagtttaagtggcgagatctgaggaatggcagcaaattcatcaaatggggaacaacaaacaccctcaaagccaccacctttgccatctccattgcgtttttccaagtttttccagtccaacatgaggattttggttactggaggagctggttttatcggctcccacttagttgacaaattgatggaaaacgagaaaaatgaggtgattgttgttgataactacttcactggatccaaggacaatcttagaaaatggatcggtcatcctagatttgagcttattcgtcatgatgttactgagccattgttggtcgaggtcgatcagatttaccaccttgcatgtccagcttctncaattttctacanacac

SEQ ID NO: 2126 - DNA, 400 bp, Gossypium hirsutum
  Clone ID: LIB3083-051-Q1-L1-H2
tctaaaatgggattctctagatcatcggacagtttcctcacggtgtgcccaatcctacccatgcacgtgtcggctaccccttcatgtcctatgctcaacttacccagctgccatttcctatccatctaatctgcgtgcacgtgcatccatatcggaatgcctgatgctcagctgcgaatattcatgcaacttctacactcaattcgatctagtctccgagatcaaccggcgcatcttatctgccaggcgatacactagctacagctccctaagaataaacacgagcccatgttcgcgacgcttgtcgtcatattatcactgtcggtcttgagctcaatccaattcttactcacgctggtgcagttaatttacgcactagtcacgttcgatctatttatat

SEQ ID NO: 2127 - DNA, 446 bp, Gossypium hirsutum
  Clone ID: LIB3083-051-Q1-L1-H3
gaagaatacgagaaagaaaaacccgagttccccaaactggaaagggctaaagagcacgagaaacacgaagtcgaatattcggaaatacccgagtacaaggaaaaggaagataagagtaagaaacataaagatgaagagtgccaggagtcacacgaatcgaaagagcacgaagagtacgagaaagaaaaacccgatttccccaaatgggaaaagcctaaagggcacgagaaacataaagccgaatatccgaaaatacctgagtgcaaggaaaaactagatgaggataaggaacataaacatgagttcccaaagcatgaaaaagaagaggagaagaaacctgagaaaggcatagtaccctgagtgggttaaaatgcctgaatggccgaagtccatgtttactcagtctggctcgagcactaagccttaagccatatgacactggtgca

SEQ ID NO: 2128 - DNA, 436 bp, Gossypium hirsutum
  Clone ID: LIB3083-051-Q1-L1-H4
aaacaaaaatttcatggctcggaaattctttgtcggtggcaactggaaatgcgatgcgacaactgaggaggttaaaaagatcattacaacattgaatgaagctgaagttccttctgaggatgttgtggaggttgttgtgagccctccatttgttttccttacctttgtgaaaagtctgttgcggtctgatttccatgttgctgctcagaactgttgggttcgcaaaggtggtgcttttaccggagaaattagtgctgagatgcttgttaatctgagcattccatgggttatcatcggtcactctgaaagaagggctctcttgaatgagtccaatgagtttgttggagacaaagtagcgtatgcactttctcaaggcttgaaggttattgcctgcattggggagactcttgaagagcgagaatctggctctaccatg

SEQ ID NO: 2129 - DNA, 422 bp, Gossypium hirsutum
  Clone ID: LIB3083-051-Q1-L1-H5
caaggagtatctggtggataatagccttgaagatttaatgggaggtctcaaccgagggaaaatggaggacaatctcctggacttctttccatctgcaaagcgatcccctgaaggtttctctgaacatttcaccaaggaagggttggcgcccttggttgaatacaatgagaaaaaaatatttgaagtaaaacttaaggaactgaagtctgctttgacaacccacatagcacaagaatctgatatatctgaagtcattgagaatgtcaaacaacgtgttaatgatgctaaatcacctgatattgaggttgtacgaattctttgggatgtaataatggatgctgatcagcggactggatagaaccagcatcaaaatgccaattcagctttacgacaagtcataacatgggcaaagctggcaaatt

SEQ ID NO: 2130 - DNA, 431 bp, Gossypium hirsutum
  Clone ID: LIB3083-051-Q1-L1-H6
agattgttttgaaaaacaccatctttcttgtgaattctgcagcctttggagtaacttaagaagaaatgggggaaaagagtttaattgccaaggatgtcaccgaattgatcggtaacacgccactggtatatctcaacaatgttgtagatggatgtgtggctaaaattgctgccaagttggaggcaatggaaccctgctccagtgtcaaggacaggattggatatagtatgattgcagatgcagaggagaagggtctcattgtaccaggcgagagtgtgctgatcgagccaactagtggtaataccggaatagggttggcattcatggcagctgctaagggttacagactcataattacgatgccttcttcaatgagtttagaaagaagaatggtcctccgagcttttggagctgagctggttcttacggat

SEQ ID NO: 2131 - DNA, 439 bp, Gossypium hirsutum
  Clone ID: LIB3083-051-Q1-L1-H7
caaatcagtatcattcagaacacagattctctcacggaaacagagtaccccatcactgtttagtccaaaacccgttgtactaccaccctcaatctactagaatcaaagtcccaacgactcatcctccaactacttatccttaatctactcaatctatgacggcttaacctaaagctcggctaataaactaccatcctcaaataaaattcagcgagatatcgccctcaaatcagtcatagccctacggctcagtgcatcaaccaccatattggccttaccagagtggtactcaatggtgtagtcatagtctttaagtagctcaatccatctgcattgcctaagattaagttccttctgagtgaggagatacttgaggctcttatgatcagtgtagatgaccagtgcgaatactacaacagccaactccaagtcacacgtc

SEQ ID NO: 2132 - DNA, 393 bp, Gossypium hirsutum
  Clone ID: LIB3083-051-Q1-L1-H8
cacaaaacaaacagacccttcaattccccaagatttcaattcttacaacactacctgtataaagaaactacatactacattttcctaaacatattttttcaaaatttctttgaccaaagctcaatcaaactcgaactcttacatgattttcctttttttaatttttacagatgaatacaagcattcaacaactatcaacagcaatcacatatttttcacatttcagagctctgcaatagagtcgggaccatagtattcaaggcaaacattatgtcacctaggaccagaaagctccatggcttcgagcacaagtgatgattcttctataaaatccgagtaccgttgaggaaggttatcgttatcgcatgatcggagcttcggcgtctttatcat

SEQ ID NO: 2133 - DNA, 386 bp, Gossypium hirsutum
  Clone ID: LIB3083-051-Q1-L1-H9
ccgttctagaccggtgagtggggaattcccaggagcaggtgctcttgcttatggcgagcatatgccaaatgcttctcttcataaacgagtgcacccatatcccatgtctgaaactgaaggagctgaaagatgggatgataagaaagagggaggatggaaagagaggatggatgattggaaaatgcagcaagggaatctcggtcccgaagctgatgatgcgtatgacgacatgtccatgcttgatgaagctaggcaaccactgtcaaggaaggtgccaatagcatctagcaagatcaacccttaccgtatggtgatcgtggctcgtttacttatcctggctttcttcctccgctatcgaattttgaacccggtgcatgatgctattg

SEQ ID NO: 2134 - DNA, 341 bp, Gossypium hirsutum
  Clone ID: LIB3083-052-Q1-L1-A1
cctccaaagaaggagaaacctgagccaaaaccaccgattgatacacctccaaagaaagagaaacctgaacccaaaccacccgtatatgaacctccaaagaaggagaagcccgagccaaagccaccggtttatacacctccaaagaaagagaaacctgaacccaaaccaccagtgtatgaacctccaaaaaaacctccaatgtacgaacctaagccaccaaaaccaccggtttatacacctccaaagaaagagaaacctgaacccaaaccaccaatgtatgaacctccaaaaaaaccttcaatgtatgaacctaagccaccgaagccaccggtttatacacc

SEQ ID NO: 2135 - DNA, 340 bp, Gossypium hirsutum
  unsure (1)..(340): unsure at all n locations; Clone ID: LIB3083-052-Q1-L1-A10
attttccttacaagacagttgatcatgagattaatccatatggctagctcaatgttccttaagcttgcctgtctgctggtgttgagcatggtgatggcagcacccctggctcatggggccataacccgtgctgatggctcaatcggcctgccacactgccttccttatttgtcagggaatggagacggtgctgatgccacaagttgctgtgccaatcgtcatgaatgccttgnggatcgctctgtggtgatacataggaaccgatctaacttgaaatcgggatcggatcagcgtggaatgtcaaaatggcgtattatgggaaccccaactaattcttttt

SEQ ID NO: 2136 - DNA, 382 bp, Gossypium hirsutum
  Clone ID: LIB3083-052-Q1-L1-A11
cacctgagtgagaacataattttttttttgcttttttagggattgggaattaagctaatttatttggtttttttagatagtgataggaaaaaaatagaattatgatttcgtagctacttttcctccttttctttcttcttcgcatttagattaacctaacctaaccctaggtttttttttggtgttcttgttaattttgtatttgtttgtggtttaaggtaaaagacggaattctaggtttttttctcccttcttttattttattttttttagattttttttacttgattgatcatctggatgtttatgggttgtcggtgcggttgatttgaagtttagtgtcgccgtataatttcctcgctattttaacgtgaggggattt

SEQ ID NO: 2137 - DNA, 265 bp, Gossypium hirsutum
  Clone ID: LIB3083-052-Q1-L1-A12
tcaagttattttttttttttttttaaattggaaaccggagaccctgactttctttttccttctatcttacatttcttgtaaataacacccttctatgttacaaatcaaaatttcagtggagttttcattcaccacagcttgtcttcttcttcttacattctcaatttcaaactgccttctcagcctttttaagcaattataataagaattgcataagctttatacctctctttcttggaaggcaccatctaaacctagactccgt

SEQ ID NO: 2138 - DNA, 433 bp, Gossypium hirsutum
  unsure (1)..(433): unsure at all n locations; Clone ID: LIB3083-052-Q1-L1-A2
agtaggaatagcttttttaactcaattcatttcattaacaaaatgtaaaatggagtttcatggtaatgaaatattaacacaaatcaaagtatgatagttacataacaagatcaaaaccttttaattttagaattcattaagtgcttcatgcaaccactcttacgatatggtattttattaggtcggaatttggactgtgaggcgagaatcatggaccacgaagcgaggttaaacataagcatgttggcgtttggtcgtccggtatcatccctcctcctttgcttgtattaacagcttctagcattctcacaacctnctncattgcagggcgtttctccggattcgcatcccaacattttttcatgatgtttgctaaagaattcgggcagcatctcgggatatctggtcgtagattctgtcgaacaacagcaga

SEQ ID NO: 2139 - DNA, 237 bp, Gossypium hirsutum
  Clone ID: LIB3083-052-Q1-L1-A3
agagcccgttgcatcaacctaattacgctaatcatgcgagtaggcgacagtctcagactcgcgtttacagtattagcaagactgattacagagaacattgtgcatcaactcactgtatcaccgacacataatgatccttagccatggcctgcacagaatccaccgctaccccaaagtatgaggctgcatagaattatgcctccaccattgacaccaatcaatcggcctcatattcct

SEQ ID NO: 2140 - DNA, 384 bp, Gossypium hirsutum
  Clone ID: LIB3083-052-Q1-L1-A4
caagacacaagaaccaagagacataccacgatggcaacagcgacggagaagcaagccatggttgttggaatcgacgacagcgagcacagtacgtacgcgctgcagtggatcctcgatcacttctttgctcctttcgcttccaatcctcctttcaagctcgtcatcgttcatgccaagcctactgcttcttctgctgttggtctcgccggacctggagctgctgatgtattgccctatgtggatgcggatttgaggaagatcgctgccagggttgttgagaaagccaaggaactctgccttagcaaatcggtacatgatgccgtaattgaagtggtggaaagtgatgcaaggaatgttctctgtgacgctgtagaaaaacaccat

SEQ ID NO: 2141 - DNA, 437 bp, Gossypium hirsutum
  Clone ID: LIB3083-052-Q1-L1-A6
gtttatctgggtcgcaaagattcacgagtttcatgggctgcttcactagaagggaagttacctaaacccaccatgagtatgtcacaacttataaatcttttctcttcaagtgggttcactgttcaagaaatggtggctttaagtggagcgcatacaattgggttttctcattgcaaagagtttagctcaaatataagcaacgatacccattataatcctagatttgctcaagcattgaaacaagcttgttcaggttatccaaataacccaacattatcagtttttaatgatattatgacccccaacaagtttgataacttgtattatcaaaatctaccaaagggtttggggcttttggaatcagatcatggattgtatggtgatcccagaacaaaaccatttgtggaattgtatgcaagggatcaaaacaagttctt

SEQ ID NO: 2142 - DNA, 421 bp, Gossypium hirsutum
  Clone ID: LIB3083-052-Q1-L1-A7
gccttcgttacgttacgcgccgacggagagcgtgagtgcgtgttctataggaatcctagcgccgatatgctgttgaagccggaggagttgaaccttgatcttatcagatcttccaaggtatttcactatggatcaataagtttgatcgtggagccatgcagatcagctcatttaaaggcaatgtaagtagccaaaggagctggtgcattgctctcatatgatccataccttcgcttgccactttggccttcagctgatgaggctaggaaacagattttgtccatttgggataaggcagatattgtcaaggttagtgatgtcgagcttcgagttcctcaccggtagcaacaaagtcgacgactaaactgccatgaaactttggcgacctaactttacactgctcttggtcacccttggtgaa

SEQ ID NO: 2143 - DNA, 436 bp, Gossypium hirsutum
  Clone ID: LIB3083-052-Q1-L1-A8
cttcaccacacattccccatagctacatgctactactgtgtcattgaccctactctttgccttgttgtattcaccaaatttcttgtttttgattacacaaaatctcccataccttatcttcagtttcctggattctcgtccaatcacttgcgtctctcttgtatcctgttttgattctaagctttgtttgcttacttgtgtgtctgttcatcacatcatctacatttccctccactgtttctctcttctatattttcccaagattattttctctttccgttttttcctccctattttttttttctcgggagacttttttttaggtatacccagatcttgtttagttccaagctttaggttgtcatcgttttctcgaggttttaaactatgggctcttgaatttgtgaaacaaagggagatatattggttaaaaact

SEQ ID NO: 2144 - DNA, 395 bp, Gossypium hirsutum
  Clone ID: LIB3083-052-Q1-L1-A9
gttattgaagctagctagctccacattttctatggcttcagagcttcttttgattgctgtctttgttcttgatctcattgcttttggtttagctgtggcagctgagcaaagaagaagcactgccaagattgtccaagacagtgaagttaattataactattgtgtctatgactcatacatatcaacaggctatggtgttggtgcatttttgttccttatggttagccaagcccttgtaatggctgcaagcaaatgcttctgctgtggaaagggtttaaaccccagtggttcaagggcctgggcagtcatccttttcatagtctgctggttgtttttcctgattgctgagatatgcttgctggccggatcggtgagaaatgcctaccataccaaat

SEQ ID NO: 2145 - DNA, 336 bp, Gossypium hirsutum
  Clone ID: LIB3083-052-Q1-L1-B1
ggttaaagaaaactggatttctgcatcacgtaaagggacaggaaagatctttggttggttgaaaagagccaaagaggtattaaagtaacagcaacctacacaaatctgtcaacatctttacgtacagtccaaatattaataaacacaatgatttcgtagatatccattaagcatagtcaaagcatgcctcatttgttacttgacattcaatcttccagttaattttctaacaaaaaccatagatttttttctctaacagaattgctgggaaagggcaagggacaactaaaacccctactcacacttgatagacctgtatatgtgacgcacaaagaa

SEQ ID NO: 2146 - DNA, 368 bp, Gossypium hirsutum
  unsure (1)..(368): unsure at all n locations; Clone ID: LIB3083-052-Q1-L1-B10
ataagggatcagggatccggaaaagtacatgctggaggacgagtaacctacaagttcgaagaggtagaccgacaaaacttacgagccggtttgcgacagtcattgaggatattagtagcagccggggcagtcgaggtgggtactcatcgtagtgacgggcagagaataagatgtaaagggataagcaatgaggagttagatgagtttttggactcggtttctatgttaacaagcccgttgtgtaccggggaaaactgggtggtgcacaccactgctcaccagatgggaagctgtangatggggataaatgaaaaggaaagggcagttgatgaaaatggagagagttgggaaacttaaagaatggttgg

SEQ ID NO: 2147 - DNA, 366 bp, Gossypium hirsutum
  Clone ID: LIB3083-052-Q1-L1-B11
gagctattcagatgcgaagttctttatcattaaatcctagagtgaggatgatgtccacaaaagtatcaaatacaatgtgtgggccagtacatctactggcaacaagaaacttgatgcagcatttcacgagaccaaggggaagcctgatagctgtcccgtgtttttattgttctcggttaataccagtggacaatttgtcggattagcagagatggtgggccctgttgattttaacaaaactgtagaatattggcaacaagacaagtggaccggttgcttccctgtgaagtggcacatcattaaggatgtgccgaacacttcattgaggcacataacacttgagaacaatgagaacaagcctgttac

SEQ ID NO: 2148 - DNA, 337 bp, Gossypium hirsutum
  Clone ID: LIB3083-052-Q1-L1-B12
caaaagtcaagagtagattaaactaatggccggaatcgggcctttgactcaagattgggagcccgtcgttattcgtaaaaaagcccctaccgccgccgccaagaaggatgagaaagtcgttaacgccgcccgccgtgccggtgccgagatcgagtccatcaaaaaatcaaatgctgggacgatagggcggcttcaagtagtacttctttgaacacaaggaagctcgatgaagacactgagaatcttgctcatgaccgagtgccaactgagctaaagaaagccatcatgcaagctcgaatggataagaaactacccaggctcaacttgctcagatgat

SEQ ID NO: 2149 - DNA, 438 bp, Gossypium hirsutum
  Clone ID: LIB3083-052-Q1-L1-B2
cgcctaataaccgctcggatttttctcagacgtgaaaaaaatggggctgtctttcaccaagctattcagccggctatttgccaaaaaggagatgcgcatactgatggttgggcttgatgctgctggtaaaaccaccattctttacaagctgaagttgggagagattgtcactactattcccaccatcggtttcaatgttgagaccgttgaatacaagaacatcagcttcactgtttgggatgttggcggccaggacaagatccgaccattgtggagacactatttccaaaacacgcaaggacttattttcgtggttgatagcaatgatcgtgaccgtgtggttgaagctagagatgagttgcacaagatgttgaatgaagatgagttgaaggatgctgtgctgctagtatttgcaaacaagccagatcttccaaatgc

SEQ ID NO: 2150 - DNA, 394 bp, Gossypium hirsutum
  unsure (1)..(394): unsure at all n locations; Clone ID: LIB3083-052-Q1-L1-B3
gcaaaaccctccttccagacatcttctgcttcttcctccaaacaatctccaaggaaacgaaaatggctgcctcttctgcttttctttctacttttatttctccccaaacggtctccttctcacccaaatccttctcttctcttagcctccttcctccaactaacgtgcgcacggtacgcactgtgaccctagccaccggttcacagcccgccaccggcccccggacgccacgcggcatcatgaagccacgtcgtgtaacgcctgagatgcaggatgtcgtangagtccctgaaattccccgaactcaagcccttaagcagatttgggcttacattaaagagcacaatcttcangaccctgnaaacaagaagattataaactgtgatgagaagct

SEQ ID NO: 2151 - DNA, 432 bp, Gossypium hirsutum
  Clone ID: LIB3083-052-Q1-L1-B4
ataagaccgtaaaagttcgccttgctatgaggcaatctaggactctcaagatctgcgccaatcattatgtgttggcaacgatgacggtgcatgagcacgcagggaacgacaaatcgtgcctatggcacgcttctgactttgctgatgatgaactgaaagatgaacttttctgcattcgttctgcatcacgtggacaattgcgaaagcttcatgtgaaacggtccgagaagttgctgaatcacactaatcagcagaggaaaataaagaggcatctgctgcagctggtctacttgataaggtgagtgttgaggaaaaggatgccaaggatacagtggcagagacagatgttaaagcaaaggaagaaaccgctgcacaggacgatgcaaccaaagtagatgatagtgagaataaagatggggagccagaatccac

SEQ ID NO: 2152 - DNA, 439 bp, Gossypium hirsutum
  unsure (1)..(439): unsure at all n locations; Clone ID: LIB3083-052-Q1-L1-B5
ctgaattttacataaaagaacagaagtaaatatggtacagacaaaacaagatcaagcatcgaattgagtatcatcaaattaaaaccagaaagccaagttgagaatctcagaaaataaaatgcatagccataactttaaataagcactcgatgcagtgctcgttcaacaacaacaaaagaacatttgcaatgagtaaaagtataccttaatcaggcaatgcggttcctcgttcgagattattttttatttccaatgtgtatttcccgaaggcccgttcgatcttcttattgaaatgctcgttacggtcattgatcgaatcgatatccttctcatcgtgaaatttcctcctcctactaaatgacttgcgtttttcttcccggtccttaagtttctttaccatcttatcaatcttatcttccgaaaccttangtgccttccc

SEQ ID NO: 2153 - DNA, 439 bp, Gossypium hirsutum
  Clone ID: LIB3083-052-Q1-L1-B6
gatttcgacctgccaattgtcacttgatctcatcgtttggcccgtctattcttctcggcgatttagattaattaaatcgtaacagcatgaatttcctgcttggagctttcaagccggcatgcaatatcttgatcacattttccgatgctaaaactcgcaagcaggtccccatgaaaaacgaaaatggccaaatggttatggtaccgcttttccaaagtcaagaaaatattgctgcgaagatctccatagaaccacttcaagggaagaaaattgaacataatggtgtgaaagtcgagcttcttggtcaaatagagatgtattttgacagaggcaacttttatgatttcacctctcttgtacgtgagttggatgttcctggggatatatatgaaagggaaacttacccatttgagttttctacggttgaaatgccatatga

SEQ ID NO: 2154 - DNA, 417 bp, Gossypium hirsutum
  Clone ID: LIB3083-052-Q1-L1-B7
gccatttgggaatgttcaatcggaggtgcttctgcgaagggataaagataccttcactttaaagcaaggatgggcctttccaaggaaagtgtatttcaatggcgatgaatgcatgctgccaccacctgatacttacccttttctaccaaattctgccccccatcaacaactattctccggtttgacagccattgctgctatggttttcttgttggtcactgtttggtgattgttatatatactcccatggagtatgaaaagttttggattctgaaaatattaattactgtaataaatttaaggagatatgctagaataaaatagcaattatgtgaagtgattttaagaacagtgttactgtatatttgaaacataaaactattttgactaataataaataaattttagttagtacat

SEQ ID NO: 2155 - DNA, 418 bp, Gossypium hirsutum
  Clone ID: LIB3083-052-Q1-L1-B8
tatcaagagattgttgatgcatatggtgttgcaggatatgaggaggcaaatcctgcagtttacactgttgttacttttccttttctttttgcggtgatgtttggtgattggggtcatggaatatgcttgttattgggagcattggtccttatagctcgagaaggcaggctcagcactcagaagcttggaagttttatggaaatgctatttggggggcgatatgtactccttttaatgtcacttttttcaatttattgtgggttgatttacaacgagttcttctctgttccctttcacatatttggtggttctgcttacaaatgccgagatgttacctgcagtgatgcaaagtcagctggtttgattaaatttcgtgatccatacccatttggtgtggatccaagctggcgcggaagtc

SEQ ID NO: 2156 - DNA, 372 bp, Gossypium hirsutum
  Clone ID: LIB3083-052-Q1-L1-B9
aagaaaagagaagagtgttgaagtattgaagctgtctgggttctgtttgttttttgaaatctgatgtctccgccgcttcttggcgtggaggaagggggtcagaacaatgtgactttactgggttcttctggctctatggatagtgtgtgccagaataatgctgaattgaaggaacgcaattacatgggcttgtctgattgttcttctattgatagctctgttgtcacccctggttctgacgatggcaacgtaagtacgaatctgaaggcaacagagctcaggcttgggcttcctggatcacagtctcctgaaagaaatcctgagctttgcttgttaagctctgctcaacttgatgagaaacccctttttcct

SEQ ID NO: 2157 - DNA, 305 bp, Gossypium hirsutum
  Clone ID: LIB3083-052-Q1-L1-C10
cacgtttgtttttcttgtgattaatcgatatggctagctgaatgggccttaaacttgcatgtgtggtggtgttgtgcatggtagtgggtgcacccctggctcaaggggccgtaacctgtggtcaagtcacaaactccctcgcaccctgcattaattacttgagaggcagtggtgctggtgccgttcccccaggttgctgcagcggcatcaaatctctcaactccgccgcccaaacaacaccagaccggcaagcagcttgcagatgcatcaaaagtgcgggcgtcggcattactggcatcaacttt

SEQ ID NO: 2158 - DNA, 423 bp, Gossypium hirsutum
  Clone ID: LIB3083-052-Q1-L1-C11
cgaaaaccggattctgtcaccaaaccggaacttacagtgggcttagacggcccctccctttgccgccaatcaatcaaccgctttccgtggccgaattttgtctctcccttttccagcggacttccactgacggctccaccactttcgtcgtcaatgaaaccgccggcgaatcgctatctcactctcaattcgtttctcaagtacgttccctagcttactctctacagcagcgttactctctttcccaaaacgacgtcgctttcgttgtctcaccgccttcgattcatattcccgttgtttacttcgccttgctgtctttgggaatcatcgtttctccctcaaatccactcagttccaactcggaaatcgcttaccagatccaactcagtaaatccggtattgccttcgctacttcaaaagcct

SEQ ID NO: 2159 - DNA, 318 bp, Gossypium hirsutum
  Clone ID: LIB3083-052-Q1-L1-C12
cggctgagaattcgacgaggtcttctgttttgatatacaatgaactggggtagagtgaatgtaatttattttacagacaaatggtttaacataattttgggttttaaagcagaggttatacacacacttttttggaaaagaaaccaattagggcaaatacttcttacactgaccttattaagccttcttcaagaaccaggtatacagattaatctcatatgatagctacaaccctttgggctttggcttactgagtgttgtcttatgagatgaaacaaatggatcagacagacagactatgttatgtctgattcaagt

SEQ ID NO: 2160 - DNA, 248 bp, Gossypium hirsutum
  Clone ID: LIB3083-052-Q1-L1-C2
ccggcgccggcgttggtggagaaagaagctgttgaatagagcaaacaggtttaccgcaaatttgagattgaagagtacatgatactggatgcacgacatgaaatctcagtccacggaaccaaggattgaatccatgaaagcgatggaagctactgctgccattgcatcagctttaaatataaatattataacttagctattgactttgtggaaaggatgaaactggtgcatcagcgttcatgctatat

SEQ ID NO: 2161 - DNA, 411 bp, Gossypium hirsutum
  Clone ID: LIB3083-052-Q1-L1-C3
agcttgaaaggttccttgcataatgactgaaaatgttacaaagtccaacaataacaagcttacacactgtgaaacgtacgtatgaagtaagaaaaaacaaatttgggtgaaaaatgaaaagcagaaacagaagaaatacaattagactgcacctttaattaaatttatgtgacttgggaacagtttcttccctcaaagtgtgttattgatggaaactacagcacaaccttggagacagctcgtgttgagacctgaacatactttcgctaaagcatcaccactgaaaccctctcatgctaatgtcttcaatgtatttggcatgccatccgcggcattgccacttttttacaagatgctctccaacacagtaatcaaagcaaattttttatgattaaaaacctatactttctg

SEQ ID NO: 2162 - DNA, 310 bp, Gossypium hirsutum
  Clone ID: LIB3083-052-Q1-L1-C4
gaagcatataaaactgacccgttaccaaagcacattatggaccatgcactacagtgactatgcctcccatgttaaggcaaccaggggggcagcgcctactattgctggcgctaagctcggaaaccactgattcttccaacagctttttaccagaaaagaaggtaaagctgctttggttaaaatataatgacattatattaaaacacaagaaaaatgggtggaataggttcgattgtgttccgacccagatgttttagtaattacaagacacctttcaaataacattcttcaaattcatttgattttgaag

SEQ ID NO: 2163 - DNA, 435 bp, Gossypium hirsutum
  Clone ID: LIB3083-052-Q1-L1-C5
agaaaatggtttctattgagttatcaccggaggggattgccggtttacctgaggaaattggactcgattgtttgattcggtttcattattctacttacagagtcgcagctcgagtctgccgacgatggcaacagcatctccaaagcagggagttgcactatctcagaaagcaagccggatatacccgtaaagcggcttgcttagttcaattactcaataacacctccgattctgctgggtcaaagccggttggtccgcccacatacggccttacagtttttgatcctgtgagtggaatctgggatagaattgacccggttcccaagtacccttatggtcttcctttggtttgccagatagcaagctctgaaagaaagctagtggtgatgggtggatgggacccctcaagttatgacccagtgcgggatgtcttca

SEQ ID NO: 2164 - DNA, 429 bp, Gossypium hirsutum
  Clone ID: LIB3083-052-Q1-L1-C6
tcgagttttttttttttttttttcccatcaaaaagaaaggtatttcaataaaaataaaatacaacaaaaacaaacatgaaaactaaaacccattgttccatccatcacaagagacagtcacaagtaaaaacataaaacaggtccagattattatattcacaagtcatagcccacataaacaggattcaaagcagatcaactctcagaaaccaacggctccatttcagtcgtctgctcaccaaacaccttagcgatcttctctgtaggaaccaaaggcaaataggaggcaaccttgtaccctttctctgcactgctagccactgtctcgttatacttatcgctgcaataagcagctgttgggacaacgaccgaggcaacttgagggaagagcgggagcatgttgagtttacgccaagctgaaaccgcaca

SEQ ID NO: 2165 - DNA, 423 bp, Gossypium hirsutum
  Clone ID: LIB3083-052-Q1-L1-C7
ctgggacgaagacaagaaggttctggaatcagtcgccgggagatcggctgatctcgaaaccgaggttgcgaggcttcaacatgatctgatcacttcgatgagtgatgcagatgaagcgaacaagcagtcgatggagttgaagagagaattggaagagaaagggttggagattaggagattgggcaaggaaatcactgaactgaagaaagagaaagttgagaacgagaagagagagagggagttggagaggaaattaggggttctagaagtgagggaatcggaggagaggagcaaaaatgttaggatggaagaggagctgaggcaacagctggatgtattcaagaataaagttaaggacctggaagcagaggtggcgaaaacgagggttgaactggagacgactataggagaacaacgagaatc

SEQ ID NO: 2166 - DNA, 435 bp, Gossypium hirsutum
  Clone ID: LIB3083-052-Q1-L1-C8
gaggaaggtaattttggattgactgagaatggtagtactactgaacctgagaagcgaagggaggttcacagttccaacattgaaaagaaaagtaaatctgttgaggataggaattctaagaagtctaataaacagagtggaaatcttgctaaagtgtcagcttcttgcaaggtgaaaggcaaagataaagaatgcagtagttctaagggcaaagagtgttcgggtagtgaaaagtctgctaggagtgagcttttggctgaagctccagttctcaggtggggttcattcatggataattggggcttagtctctaacaaggatacattattaaatcagaaaggcttggagtttgacaatcactggggaagagtagattatgatgccgtgattccagccgagaaaattgcagaattgaatcttcaggcgattgtttac

SEQ ID NO: 2167 - DNA, 313 bp, Gossypium hirsutum
  unsure (1)..(313): unsure at all n locations; Clone ID: LIB3083-052-Q1-L1-D1
gtagtaaagtaataatctcttaattatgagaaataagagaccggaaagtccaagggtctctcaagggggcgtgcattatgganngtatcgaaatctgatagaccgggtgacaatatgcctgctagtggagccagtcaagtcttgacagaaatctggagggactcaagttcctcgaagggaagtcaaaataataggctttctccagagcaacccagtcattccattaagnncagagagtttttcttccagcaagttcannaagaatcacttggagctangntgcgtaattccaattggcagataactatcagaa

SEQ ID NO: 2168 - DNA, 269 bp, Gossypium hirsutum
  Clone ID: LIB3083-052-Q1-L1-D10
gctgataccattgacctgattgccgcgcatgtaggaataggaaatagatcttgacgagtttcagcccctaatgatcattattgcttaagacactctcaagacattgattatccccgtactgtatatgaatgtcatagttgctccgatcttgctgcttaaatggctgatgctttggcttctgcttacatcgattttaaagacatcaaaacatactcttaaaagcttgttcatggtgcccgaacactctttaagtttgctagtgatcaaag

SEQ ID NO: 2169 - DNA, 329 bp, Gossypium hirsutum
  Clone ID: LIB3083-052-Q1-L1-D11
gcaaagagttagatcgaagattgcaaaatgtttaactttgaagctgaggtatttgcaaaagaaatcatcaaaccatcttcactagaaatccatggcatgaaacctttcaaactcaatatctttgaccaactcaccccaacaacttatgcctcattcatggcattttaccccttgaatgaagccaatttcactaccaccaacatcttgcctcatctaaaggcctcgctttctgaaaccctaaacatcttatatccaatttccggtcggatcaaagataacatattcatcgatcatttccatgaaggtgtgccatttttatcaacttaaac

SEQ ID NO: 2170 - DNA, 369 bp, Gossypium hirsutum
  Clone ID: LIB3083-052-Q1-L1-D12
agagccttcatgttaaggactacaaatactaacaatttagtcttggggtctgtgtatcagagaaattttctgtattgatgattttgggggttttccgtttcttctcatggaatttaggttgtgaaatcagaccgtttcttctcatggaatttaggttgtgaaatcagactcaaataagcttggggggccttagttctcgctgagtgttcatggttttttgtttgcttcagtttaaaacaatattttctgcatatacaactgagtgtgctttgcacttttttaattgtttgcgtttcttgattcattaatcgtaatcctactatttgagggaaaaaaaaaatgaaaaaaaaccggcacgagggggggccc

SEQ ID NO: 2171 - DNA, 397 bp, Gossypium hirsutum
  Clone ID: LIB3083-052-Q1-L1-D2
attctgcaactttttttctctatttttatttattatttttttttttttttattatcacttttgttttgcttttttttttattctctacccttaacaattctcttcacaatccccctaacaaatacttcatttatcatcccaatcccatttaaaccttataccaactttacctacataaacccttttaaaacctttacctatttcaaaaacatatatacttcctctaacactaaacctacacttaatacaactcatattaaccacactatattactctatcttattttaacctaataatttttacccttatatcccttatttataactcaaaccatcttctttaatatcctttctttattaaataacatcctcactaaccttaaaaaattctcctttt

SEQ ID NO: 2172 - DNA, 445 bp, Gossypium hirsutum
  Clone ID: LIB3083-052-Q1-L1-D3
gaagaagatcttcaaagtcgacgaccatatcggtgtcgcgatcgccggtctcaccgccgacggacgcgtcctttctcggtatatgcggaacgagtgtatcaactatagcttcacgtacgagtcgccgcttcccgtgggccgactcgttgttcaactcgccgataaagcccaggtctgcacccaacgttcttggaaacgaccttatggtgttggtttgttggtggctggcttggatgaatccggggctcatctctactataactgcccaagtggaaactactttgagtaccaagcttttgccatcggatcacgctcgcaagctgcaaaaacgtacttggaacgcaggtttgagagctttagagacgcatcacgggatgatctggtcaaagatgctctttatggcataaaggagaccctgcaaggagaaaccttaaaaagctcggtt

SEQ ID NO: 2173 - DNA, 441 bp, Gossypium hirsutum
  Clone ID: LIB3083-052-Q1-L1-D4
cgctaacaattgctgttgagaacaaacaaacgcagagttgggctgcaatggcggtgaaattcttgatagcgttaatcttagtaattgcagcatctctttgctgggtatcgtcggctgattcgtctgaagctgctttcgtcaaaaagaccatctctgcccacaagatcgtcatcttctcaaagtcctattgcccgtactgtaggaaggcaaaatctgtgttcaaggagttgaaagaagttccattcgttgtggagcttgatgagcgagatgatggatggaatattcaggatgccttgagtgagattgttggtaggcgtactgtaccacaggttttcattaatggaaaacacatcggaggctcagacgatactgttgaagcatatcagagtggaaaattggctaagctgttgggtattgagttgaactagttgaattggaagc

SEQ ID NO: 2174 - DNA, 407 bp, Gossypium hirsutum
  Clone ID: LIB3083-052-Q1-L1-D6
aaaaacgaaagccaattggagattattctcatgtcgtgtatgttccaagtatatggtctactaaacggagtaattaccggaggaatggtaaatttaacagtaggacctaattccaaccatcaccataaaaatacaaacaaaacatttgcatattcccattacaaacataacacccttactgcaagcctctaccctgctgcttgaaaatccccaaaatcatcctcctctatgtcttctgtgctctgactttcaccacattgttgttcatctctatgctctttctcggacttcgaagccttcttttctgaagttccgtctaactggagatccgggggcgagcttgttggagaattcccagtcgtttctacaggtgaaagttgtgctggtggatgtggctggggtgactt

SEQ ID NO: 2175 - DNA, 431 bp, Gossypium hirsutum
  Clone ID: LIB3083-052-Q1-L1-D7
gggataggccaagaaaaaactgtccctatttcttgatcgaggttgaagaagaagaagaagccatggaaaaacaaaacaggtcgggaactgcaggaaaagttataagatgcaaagctgcagtttgcagaaatccaggggaaccacttgtgatagaggaaattatggttgacccacctaaagcttgggagattaggataaaaattctctgtacttctctttgtcattctgacgttaccttctggaaaatatccattggaccatttgcactttttcccagaatttttgggcatgaagctgttggtgttgttgagagtgtaggggagcatgtggaggaatttcaggaaggagatatggtggtacctgtgtttcgtccgaattgtagagaatgtatggactgcaagtcccaaaagggaaatggttgttccatattc

SEQ ID NO: 2176 - DNA, 431 bp, Gossypium hirsutum
  Clone ID: LIB3083-052-Q1-L1-D8
ggaaccaaatcggttccaagttttgggaggttgggtgcgatgagcacggcatagatccaactggaaggtacattggttcctcggatctgcagttggagcgttaatgtttactataacgaggcttcatgtggtcgctttgttcctcgtgctgtgctcatggacttggagcctggtacgatggacagtgtccgaactggtccttacggccagattttcaggccagacaactttgtttttggacaatccggtgctggaaacaactgggccaagggccattacactgaaggagccgagcttatcgatgccgttcttgatgttgtgaggaaagaagctgagaactgtgactgcctgcaaggtttccaggtatgccactcattgggtgggggaactgggtccggtatgggtacattgcttatctcgaagatcataga

SEQ ID NO: 2177 - DNA, 378 bp, Gossypium hirsutum
  Clone ID: LIB3083-052-Q1-L1-D9
gagaagcatggttgaaacacaagatccttcttccaagggggtagatgatatgacaatgagaagatttctaagaggtcgtgatttagatgtggagaaagcatcgagcatgttcctcaagtacctgaaatggagacgaagctttgttcctaatggtttcatttctccatcagaactcacacatgaaatccaacagaacaagatgtttttgcaaggttccgacaagaaaggacgacctatttctgttcttcttgctgcaagacatttccagcataatggcggcctcgacgaattcaagcgttttatagtctacattttcgacaaaatactgaccaggatgcttccaggacaagattaatttattgtgatcggggatctttg

SEQ ID NO: 2178 - DNA, 444 bp, Gossypium hirsutum
  Clone ID: LIB3083-052-Q1-L1-E1
gtcatgctcacacccctcgttgttggtatctttttcggcgtggagagtctctttccggtgtcctcgctggatccctcgtctcaggtgttcagatcgctatctctgcatccaacacggggggtgcttgggacaacgccaagaagtacattgaggctggtgcttcaccacatgcaaaatctcttggccccaaaggttcagatccacacaaggcagctgttatcggcgacaccatcggtgaccctttaaaggatacatctgggccatcgttgaacatcctcatcaagctaatggcagtcgaatcactcgtcttcgctcccttctttgctacacacggtgggctgcttttcaagttattttgagtgaaggtcaacaaaaagtaaacagctaatggtccgtccacccattgctgactctctcaattgatccatttgaatctgtagaaca

SEQ ID NO: 2179 - DNA, 360 bp, Gossypium hirsutum
  Clone ID: LIB3083-052-Q1-L1-E10
cgtcaacgaagctcaatgtacaataatgatgctgtaattgctaaaagcacgtggctatcccggtgcaaaattatctattatacagtttttagcatgatgtatggaatggtgggatcttgtgcacatcttgtaatggtcaactcttcatggactcagtctcacgtcgagaagctttggggaattcctaagcgcattaagcgactttatccaccttgtgatacttcaggacttcaggcacttcctttggaaaggtcaatggaaactccaaaaatcataattgttgcacaatttcgtcctgagaaggcacatagtctttaacttgaggccttttctattgccataaaaaaactagatgaacac

SEQ ID NO: 2180 - DNA, 278 bp, Gossypium hirsutum
  Clone ID: LIB3083-052-Q1-L1-E11
tatcctgctgcacaacaaatgcataactataatggaaaaggtcttaaagatgacacgacactgtctgaaagcagtgtcactgaaaatagcttcattgtgatcatgttgacaaagaataaggttgcatctgtggagggttcaactgcttcagccgcttctacaatgaaagctcctgaagcaagcacgccaccaactgctccagcaccagcttctactgcacctgttgcaacatctgctacggctgcacttgctgctgactctgctcctgttgcttcaag

SEQ ID NO: 2181 - DNA, 327 bp, Gossypium hirsutum
  Clone ID: LIB3083-052-Q1-L1-E12
gaccattcaagatcaacggtgttcctttaaggcgcgttagccaatcctatgtcattgctacttccaccaaggttgacatctcaggggttaacgtagacaagtttgatgacaagtactttgccaaggaagtagagaagaggaagaagaagactgagggagagttttttgaggctgaaaaagaggataagaaaaaactgcctgaagacaagaaagaagaccagaaagcagtcgacgcctctttgataaagtccattgagggagtcccagacttgaaggcctacctcgccgcaagggtttctctcaagtctggcatgaaaccgcacgagc

SEQ ID NO: 2182 - DNA, 441 bp, Gossypium hirsutum
  Clone ID: LIB3083-052-Q1-L1-E2
gtcgcaactgggatagggccaccaaaaggagaaagcaattatgaagaagctatagaatttgatccaattattcatcacaaccagttctgcctctgggtgaatgggaatgtagctgctgctggctgcagtggctactccagctccacctcctgctccaatgctgatgttgttgcactttgtgggtggcagctgaccttggatgctctggatgccctgcgatcactggggcatattcctgtacagacagtacagtcagagtcggcagcatcattgcataaggatgatcagcaaactcctggtagaagtctccttcaacggcattctgtgaacaaaagtcatggccaacattgatagtcgaacatgaagtgcaaggaaacctgcaatgaaacctgcatggagcagtgtaattacgatttccctctggctttcatgtatgcacca

SEQ ID NO: 2183 - DNA, 431 bp, Gossypium hirsutum
  Clone ID: LIB3083-052-Q1-L1-E3
gtaaactttgaggacaatcatgttgcaactgggtttggagatcagcttgctcggccaattcttcgtcaagagtggcatgagaacttgagctttgaagatggtgttagactattggagaaatgcatgcgtgttctcctgtatcgtgatagatcagctgttaacaagcttcagatagctaaaattactgagaatggggtaccattttccaagacatatatatggaacacactctgaaaattctgcgtttgagagacctgtgcacagggctctatgagcacaggggctcgtgcaaactcttcataccctttgggaacttctatgcgctcatatgataagaacatcttacatcgatgggagacaacttgttgcatgatgttatatgtctggaagaaacttattgagtttgatgctgattgtcatttgatttaatg

SEQ ID NO: 2184 - DNA, 424 bp, Gossypium hirsutum
  Clone ID: LIB3083-052-Q1-L1-E4
agctgacaaatctcaagtgtaccccaaatttgtgtttgaggactacatgaatctctatgctgacctcaagttccaagccaaggagccaaggttcgaagccatgaagaccgtggagtctgcagttaacttgggtcctattgcaactgtttgagtccttcagtgattgaagagcgatgggttttaattagcagtgtgtttctgttaataagtttagtcggctgatggataaattctgttaattatagttctggaattagagagtgcctgcaggtgtggagcttagtagtttaaaataagctgaaaaagcttgtactaagaattcctcagttatatatggtgcctggtcgccagtggctgtgctttaaatgagatgttttggctgtcggaagtgaccaaattatatttgatatgaaaaattgtcctt

SEQ ID NO: 2185 - DNA, 439 bp, Gossypium hirsutum
  Clone ID: LIB3083-052-Q1-L1-E5
ctcgagtttttttttttttttttttagacatgcaggatgggtcgtcactcgattgcatttccataacttgtacaagacattcgaaaatttcagttgttcaaactactgagataaataaattggagaaagaaaccgtctctgacaaactataactgatgagagcaaagattgtaatgggaaatgaagaagtagaaggaatgaacaaacccaaacatcttggaacaatcgatttgacactagaaacttgcgttgttgttctttgtgtctttcatcgagcatcagctgatgcgaatgaatcagcaaaacctggcggccggcatggtatgctggtctgtgtagtgtctgtacttcccagaaatgatgaggagtcatccacattgctgttcccctcgaaggcttgccactttttcaatgcttggggtaaagttaattcaaggtc

SEQ ID NO: 2186 - DNA, 359 bp, Gossypium hirsutum
  Clone ID: LIB3083-052-Q1-L1-E6
acaacaaaaaaggggaggccccataccttggttaaacaaaaaataaaaatttcatgtcaacccccataaaaaactttgggggttaatcggaaatttcaaaaaattccataacaaaaatttaaattgataaattttcatcaccacctatcactggaaaataatcccattcttaaaccaaattctttgtgatccaaaaaaaataaaaaaaaccctttccaaatttttaaaaatacagttatttttacccccaaactgttaccaaatttaacctcaaattaaattgctcaacattaactggaagaaattccaaacccgaacctggcaacaaccttttaatttttaggggccaaaacaatttt

SEQ ID NO: 2187 - DNA, 373 bp, Gossypium hirsutum
  Clone ID: LIB3083-052-Q1-L1-E7
gtttctagaggcaaatccatctgagattatcaccatattgattgaggactatgtggtatccccacaaggcttaacaaaggttttcaatgcatctggtttgaggcagtactggttccctgtttcaaagatgcctaagaatggtgaagattggcccacagtggacgaaatggtcaagcagaaccaacgacttgtagttttcacttccaaatcagctaaagaggcttctgaggggattgcttatgaatggagatatgttgtagaaaaccaatatggagatgatgggatgaaagctggttcctgcccaaaccgtgctgagtcattctctatgaatacaaaatcaagaacattgattcttcaaaactattttcctact

SEQ ID NO: 2188 - DNA, 438 bp, Gossypium hirsutum
  Clone ID: LIB3083-052-Q1-L1-E8
tgatctttcacctgcaccagctgtaagggaaggagtctgtgtgctgcttgagataattgacacatataacagcatgatggttcctgcttcagggaaaaagccaccttttgatccggttatatctgctttacttgatccaattattcagatgtgtgagcaagcagcagaggcacataaatcaaagggagctggccactcatcaagaagaagtcgaatgagttccgactcgggccagcttagtaaatctgcagttgatgcaattttgtcaaataacaactctgctactttctctcagaatactgaagctccatccaagatcttccttatcaattgcttgtgtgctattcaacaaccattactcggacatgaggttgcagctgaatatgcaaagaaacttggcactacgattgataatcatgtaaatgttctcgtggaaaa

SEQ ID NO: 2189 - DNA, 289 bp, Gossypium hirsutum
  Clone ID: LIB3083-052-Q1-L1-E9
gtcacaatcactctcacactcatcaccacagaaatgatggtgatgaggaccaacaaagaccccgaccaccacatcttcaccaccatgaatttactccgccgtacccttcaccaccaagctaccagcagccacctggctttgatggaccctatcctccgccacctccatcatcatacttgcaccaacctggctttgatggtccacccccaccatcttactttcagcaacctggatttccaccacccccaccacaccaaccaccgtcatatcagtaccaacagccacccca

SEQ ID NO: 2190 - DNA, 414 bp, Gossypium hirsutum
  Clone ID: LIB3083-052-Q1-L1-F1
gaaaagataagggcaacaacatcattggcgaagctgtgggaatcagtagtgcagggactaatgatttcgttttcaatttctatgatattccgaccagacgattggagttcgacattgttggataccaacattttctgcttcagaaactagaagattttctcaaggaattgtatgaactcggatgccgaaaaatgatcgtagccggactgcctcccatcggttgcttaccgattcaaatgacggcgaaatttcaaattccaacaaatcgaaaatgcttggaagatcagaactcggacgctgaatcttataacaagaagcttgccaaactgttgcctgaactacaagcaaagcttccagggagcaagcttgcatatgcagacgtttatgaaccattatttgacatgattaattatt

SEQ ID NO: 2191 - DNA, 358 bp, Gossypium hirsutum
  Clone ID: LIB3083-052-Q1-L1-F10
tatgacccggactgaacgatttcgacacgaggccatcacctaggtcctaagcttcctgtctgctaataaagtccttgtggatgtatgcctaatccgccccgtattagaaagaaaggtattccactgctgaggctgagagtcataccatccatgtcgactatcttttaccctcttctgtatgcaccccttatactactgcaaaaggtttgaacaaaaagacatttgtacaagtcatgcacaagcatggtccatgctcacaaccccatgaagagaaagcaaatattcccacacatgtccagatccttatattatacgaagtaagggttaagtcaattcacttcaagttaaccaagaacct

SEQ ID NO: 2192 - DNA, 257 bp, Gossypium hirsutum
  Clone ID: LIB3083-052-Q1-L1-F11
cccagaccatccaaaagccagaagagcaagagccaagggtgatcccgtagacccaaaatggttatggcctttacggcctttagaaaaaataatactaactctcatttgaaaagggttccagtttaaccaacgcataaacctatgaaccctatgtcacccatagtagttataactttaatttaccgtgtatcaacctcacataatgcttcaataataaagacacagacccataccctggacttgtattcattactgat

SEQ ID NO: 2193 - DNA, 355 bp, Gossypium hirsutum
  unsure (1)..(355): unsure at all n locations; Clone ID: LIB3083-052-Q1-L1-F12
accgtatcctctgttacactctcgactcttatcaaaatggatctgggtctcaccatggcacaaacccttacccgtgcggccacatccaccctcacgcgccacctttctctctccttaatcctccccaagcgcctcctttcctccaaatccatcacccatcctcctcccatcccttccctccgcttctcccgccgccctcttacccctctttcccacgccgtccgatgtctccctctcgctcccacgcgcttcacttccatccgttgccgcgtcaaccgctccgggaactccgcttactctccgctcaactccgggtcgaacttcagcgaccggtcgncgactgaaatggccccgc

SEQ ID NO: 2194 - DNA, 236 bp, Gossypium hirsutum
  Clone ID: LIB3083-052-Q1-L1-F2
cacactattacggcagcaacatcattgaccaaactccgggaatcgttactccatcgtcttgtgaccactgactgcttaactacgatatttttaccatacaatcggaatccgacgtttctagataccaacattttatacttaatctaccatgagatgatctgaaagccttgtatgaactctgaaaccggactatgatcagatcctaactgccttccatcggctgctgaccgattcaa

SEQ ID NO: 2195 - DNA, 429 bp, Gossypium hirsutum
  unsure (1)..(429): unsure at all n locations; Clone ID: LIB3083-052-Q1-L1-F3
cctatccgaacctttagatggtctaccaacagctgttatgagactgagatggctgattcaaaaactggtgcagagcttcttgatataatcctccccgagggagggtatggggccgagaatcccaccaaccaaatggcttcatcaccaccgtatttctgtggatcaccgccgagcagggcgtcgaatccggtaatccaagatgcccgattcaacgacgagcagccggtgctacctncactaacatccccagcaacctcctcaaggggaggatgcgtgagggtgaaattcgggcagatgccagctgctgtacgaatcgagggatttgattgcctcaccagagatggccgccatcgcagcatcttcgccgtggcttaaaaaaaaccaagatatgagaacaaaaatgtgagaggagagagggaagatgataaa

SEQ ID NO: 2196 - DNA, 439 bp, Gossypium hirsutum
  Clone ID: LIB3083-052-Q1-L1-F4
taccttttctgatggaacagtctacaaggggactttatgaagtggggtcgaaatagcagtgacatcaactgcgatttcgtctcgtgaagactggtcaaagaatttagagacacaatttagaaacaagatagactcgttgtctaaagtgaaccacaagaatttcgtgaacctcattggctattgtgaagaaaatacgcctttcacaagaatgatggtttttgagtatgttcctaatggatcactctatgagcatctacatatacaagaagctgagcacttggactggggaatgcgcctaaggatagccatgggaataacgtactgccttgagcatatgcatcagcttactccccctatagcccatagaaacttgcagtcttgctctgtatatctgactgaagactatgctgcaaaaatatctgatttcagcttcttgaat

SEQ ID NO: 2197 - DNA, 441 bp, Gossypium hirsutum
  Clone ID: LIB3083-052-Q1-L1-F5
gctgttctctctctctctctttcccatagtttcagccatgttttaatccatcgctcacaaaattatgggtttgaaggaggaattcgaggagcatgccgagaaagttaagaccctcccggccgccccttcgaatgatgacatgctcattctctatggactgtacaagcaagctactgttggaccagtgaataccagccgtcctggaatgttcaacatgagggaaaagtacaagtgggatgcatggaaggctgttgaagggaaatcaaaggaagaagcaatgggggattatatcaccaaagtaaaacaactgtttgaggctgctggaagttcttgatgtgtgtgtgtatgaccaatgaaactggtgtaatttcaagcccttgtcggttacttggggttttcattactatgaataaattatgtactctttttctattgctatta

SEQ ID NO: 2198 - DNA, 362 bp, Gossypium hirsutum
  Clone ID: LIB3083-052-Q1-L1-F6
tggacacgcttaattagaaatgctctctcccatttgttcgtgctattctttacacaccaacccccattttcacccgattactaaatcatggactatcacacaccccacatctgctactacctcttatcatttccggatgattaatactacttgccctcaataaaacatactagaaaactatgataccaggcatctattgatagcttttgtattcatacgctgaggaggatctttagccacttacacattcttccctactactcaattgccagcatcaacatcactttaagaaactatatactacatacccacacatgggcatcctaaactatactcctataaataccgatccatataactgc

SEQ ID NO: 2199 - DNA, 437 bp, Gossypium hirsutum
  Clone ID: LIB3083-052-Q1-L1-F7
ctccacttctgttgttgagccttacaacagtgttggctgaactcactcccttttggagcacactgatgtggctgttctccttgacaatgaagctatctacgacatttgcaggcgttctcttgacattgagcggcccacctacaccaatcttaaccgtcttgtctcccaggtcatttcctccttgactgcctcactgaggtttgatggtgccttgaatgtcgatgtgactgaattccaaaccaacttggttccctacccaagaatccacttcatgctttcctcgtatgctccagtcatctctgctgagaaggcttaccacgagcagctctcagttgctgaaatcaccaatagtgcctttgagccctcatctatgatggctaagtgcgatccacgccatggaaagtacatggcttgctgtttgatgtaccgtggtgatg

SEQ ID NO: 2200 - DNA, 438 bp, Gossypium hirsutum
  Clone ID: LIB3083-052-Q1-L1-F8
ataaaaactagtttcgcggattttaggttttcggaaggggaagggagaggattgttaagcgacacgcctctctcactcaaaccctattctttttcccaatttctcgaatctagggttttacattctccttttcctctccaaatcaaccttatttcattttttttcttctcttagaaataatatcgtcaatgagcaacgaattagttaacttcaacatgtccggtcttggcgatgctcttaatgccgaagcacgagctggtctcgttaacgctctcaagaataaacttcaaagtcttgctggggatcactccgatgtgctggagagcctatcaccgattgtcaggaagcgtgtcgaggttcttagggagatccagagccaacatgatgaaatggaggctaggttttttgaggagagggctgcacttgaagctaaatatc

SEQ ID NO: 2201 - DNA, 292 bp, Gossypium hirsutum
  Clone ID: LIB3083-052-Q1-L1-F9
gttagagcagcgtataattgagagtggtgaagcttcaatggctaatgcttcatttgtggatatgcagcatacagttatgagattgatgacacaatgtaatgaaaagagttttgagctggagataaaatcagcagataatcgtatcctccaagaacaattgttgaacaagtgttctgagaatgaggaattgcagaataaggtgaatctcctggagcagcggttggcatctttgtccggcgacaaattatccttgtcctctgaacaaggaatatctgaagaatattctgatgag

SEQ ID NO: 2202 - DNA, 119 bp, Gossypium hirsutum
  Clone ID: LIB3083-052-Q1-L1-G1
cttacaactgcgcctgatgtaacatttttgaagctatgggaatatttattcgaccattttgaatccaacgaatacttggctacgagattatatacagaacacactactccgatgtaact

SEQ ID NO: 2203 - DNA, 293 bp, Gossypium hirsutum
  Clone ID: LIB3083-052-Q1-L1-G10
actacggatcccccctcttaccctacccatacgaaccataactccatcatcttaacccactcttccaacacatcgatcttgcggccattaccatgcaaatctgatactcaaacttacctaccctacctcatgattcaaaaaactatacccactgattaagaactgtcttaagccaccgtacggagtattatacttaacaacaaagaacaactatgtcagcttcaacacagcagctagacacctcatgagcctaatacatgaacaaggcatttttggaagccatttaatccaaa

SEQ ID NO: 2204 - DNA, 291 bp, Gossypium hirsutum
  Clone ID: LIB3083-052-Q1-L1-G11
ataactttgtgttccgtcaaaatggacctgccaataacggggctgggggacattatactgaacgagctgaatagattgattcacttcttgatgttgttcgtaaagaggctgataattgcgattgtttacaaggttttcaggtttgccattcactggcagtttgaacaggctcagggatgacgacattgttgatatcaaagatcagggaagaatacccttaccggatgatgctaacgatctaggagtttccatgacctaaagtatcagctactgcgggtgaaccctataatg

SEQ ID NO: 2205 - DNA, 282 bp, Gossypium hirsutum
  Clone ID: LIB3083-052-Q1-L1-G2
cgtgctcctgcgcctactgagatagcttttaagccctgggaatccatatgcggaaatattgaatccgttgaataatcaaaccagcatcattatacgctcattacttccacgatgcactaactttactacaacacatggaggtttgattcaaataaaccatggaaggcctcagccactgcattacgtagtcaatgcaggcttcttagccgccctatatagggatcatcctgatgctgctgatacacctggatgcgatagcggacccaatttctattcaactga

SEQ ID NO: 2206 - DNA, 446 bp, Gossypium hirsutum
  Clone ID: LIB3083-052-Q1-L1-G3
ctctcattgtaactactctcacccttcaactagccattgggagtgcacaaacaccagctgcctcaccttccagtacgccaaccaccaccaccaccactccaccttcaacttcgccaccacctacaacttccgcaccacctccttcaacaacccctccacctacaacttcagcaccacctccttcaacagcaacgcctccaccttccaccacgcccatcgcgccagctcaaccacctgcaacaactccccctcccactgttgcaccagctacaagcccaaccgttccaccgccacaaactccaccaccttaaccaccttaaactccttcaaccacagctccagctcaaccgtcagcattggcaccaccatcaccaccaccagtatcttctgcaccagcaccagcttagaaaccaccagctcctgcaccagttaagcttgccccaaca

SEQ ID NO: 2207 - DNA, 384 bp, Gossypium hirsutum
  Clone ID: LIB3083-052-Q1-L1-G4
ccggcttccttggtctctgtggtaaaaaagtagacaggagagagtgctacaatgaaaagattaaggaattgacacaaaaattggaagctgaacaaaaggtcaccctccgagaaaagcagcaaggttctgctttggttttctttaccagtagggtgactgcagccctggctgctcaaagcctacatgctcagatggttgacaattggaccgttactgaagcgcccgaacctcgtcaactcatatggagcaacctgaccatcaagttttacaataggataatacgacaatatgtcgtttatattgtcgtgtttctgaccatagttttttatatgattcccattgcttatatctctgcagtcacaacccttaagaatctgagaaaac

SEQ ID NO: 2208 - DNA, 414 bp, Gossypium hirsutum
  Clone ID: LIB3083-052-Q1-L1-G5
attggacggagcgttgatgaaacaatgaggactgcgccaggccttgcagtatgtgcaggaaaatccagatgaagtatgcccagctgggtggaaacccggagagaaatccatgaaacctgaccctaagctcagcaaggattactttgcagcaatttgaggtatagcctagaaagcagaaggtatgtgttgcgtccattaggattgactaaatgagtttttgtttttcaatgtatcttttttgttttaaagaattgcttagccttggatggtaatataaaagtatggggaaataatcaaatattaatgtttggattgtgtcttttgtatcttcaaaggctgaagcataataatcttactgtctggactgcctgcatgatgatttttctactattttttgttaaaaaaaaaaatact

SEQ ID NO: 2209 - DNA, 399 bp, Gossypium hirsutum
  Clone ID: LIB3083-052-Q1-L1-G6
gtctaaactagaactacggatccctgcatctatacgaatccagcacgagttttttctttttacagaatggaattttccatgagagaatcgacatgagaagatttctttcaacatacatcggaaaacagaggtattccctaaatcaacgcttaacagggaaaaataatataaaataaaagctcagccccaaaatgagcattaaatgtttatatctctaagcatgatcagatcttaaccttgaattgcaacctaacacacacaattatcgattatctcatctgaaaacattatcgaatctaagaatcatgattatatattataaaagcatattccgttttacacaattaatcgatcttgacaaatgagtatataattccttgtgaaccaataacatgcata

SEQ ID NO: 2210 - DNA, 438 bp, Gossypium hirsutum
  Clone ID: LIB3083-052-Q1-L1-G7
agggggtatccgggaccaagtggctttggttcaggctccgccgcccaagaggttaccgaagggattgatggaaccaacttgactgctctagttaccggaggagcaagtggaattgggttggaaacttctagagtattggctcttcgtggagtccacgtcatcatcggtgcaaggaacatgaaagccgcgaatgaagcaaagaacaaaattgttagagagaacacaagagcccgtatagatgttctggagctggatctttgctctactagttcaatcagatcatttgccgacaatttcattgctcttcatcttcctcttaatatcttaataaacaatgctggcatcatgttttgtccctttcagctttctcaagatggaatagaagtgcagtttgcaactaatcatataggacatttcctcttaacaaaccttctactg

SEQ ID NO: 2211 - DNA, 294 bp, Gossypium hirsutum
  Clone ID: LIB3083-052-Q1-L1-G8
ctttaatgttcttcacatttgaaaaaagaatccagtgaagcatataacaaaaacccaactgtttttattgtggatttagtagcttcatttatttatacaatggtatttgtttcaaagattcatatcattgatctatatttcaataaaatgtttggaaatagaaataagattccaaatccatcaaattttcatttcttattgatttcaaaaagtgcaaaatctgttgatggaataatcaattacgaatttctcttctggtataaaaacctttgtaatttgtttgaaattgctttt

SEQ ID NO: 2212 - DNA, 366 bp, Gossypium hirsutum
  Clone ID: LIB3083-052-Q1-L1-H1
cataaacatgcgactgatctagtaaatttgcagatgggggaatattggtacgatagcttggaatccaaggaacacatcgatgcgagcttatagaccgaacacactgctgcaatgagactagatagggcaatggcttattcatttactcatcagcaaactttgaagacatggtcgaaatgcatgaatccgtcattcatggatatgaacaatccgtcattgggctgcagttggatacaactatggatgatcgctcgatcatcggaaggacatggcgtgacgggaaaagaacccgacaacgaccagtcatccggaaggaatgcacatttctgagtacatatcagcaaagcttactctcggtaccaactc

SEQ ID NO: 2213 - DNA, 320 bp, Gossypium hirsutum
  Clone ID: LIB3083-052-Q1-L1-H11
agcgatgatggtgcggccatgctgacatctgaatctctagtggaaacggtcgactttgcaagaaagtgggtttcattctgcaaaaaattttccattgaaccacgggcacctgagttttacttcttacagaagattgattacttgaaagataaagtgcagctctttttttgtaaaagaacgtatagctatgaaaagagattacgaagagtacaaaattcgaatcaatgctttagttgcaaaggctcagaaaacacctgaagaaggatggacaatgcaagatggaacttcttggacgggaaataacccccgtgatcaccctt

SEQ ID NO: 2214 - DNA, 305 bp, Gossypium hirsutum
  Clone ID: LIB3083-052-Q1-L1-H2
cttactcttgcttctactctcccatttttctatcttcggggaacttggttctaatatttcgaactctcagatgccttcccctcgcggttttatacataacgaatcatggctctgtgccaaataaagctacgtcttacctattctcttgtcaacatacgttatacgcatgaacagaatgcatgatctcgtgaatcatggactttaactttcccacggtgggtgataggaactttaaactatggttcatattgcgactatccgattgtcttggattcaagtgaatgccaatcgactatctaaactca

SEQ ID NO: 2215 - DNA, 433 bp, Gossypium hirsutum
  Clone ID: LIB3083-052-Q1-L1-H3
catcctaaaacatacatttgcatatattattgttgtctgggtcattgtttttccaagaaagcacaatgaatgtagacgaggaggtggagagactcaaggaagaaattcaaagactaggccagatccaatcagatggttcttacaaggtcacatttggggtgctatttaatgatgatcgctgtgcaaacatctttgaagcactagttgggacactaagagcagcaaagaaacgaaaagttgttgcatatgatggtgaactactactgcaaggagttcatgacaatgtggaaatcattctcaaagctacaacaccagcagcagcagctcaaagtagcaactaatgcagttctaaataaataattgcaattatagttttgcagcaaaagtttgatgatattctatgtaatttttcaatgtttatcatgtttgaaag

SEQ ID NO: 2216 - DNA, 445 bp, Gossypium hirsutum
  Clone ID: LIB3083-052-Q1-L1-H4
ggttgtagtagctatgctttgtgcaggagccacagctcagtcaggttgcgctagtgtgttgatcggcatgtcaccctgtttgagttacattacagggtcctcatcaaccccatctcaacaatgttgcacacagctagctaatgtcgtgcgttcatcaccgagatgcttgtgccaggtccttaatggtggtggttcatcatttgggatcaacatcaaccagactcaagctttggccttacctgattcatgcaatgttcagactccacctatcagcagttgtaatgctgcttctccagctccagcagactctccggtaggatcacctgaatctggaagcaaaattccaacaggagatggatctagaagtgtaccaactgcacgggagaatggctcatctgatggaagcaccaccaaaatgtcactctctttgttcaccttccttctg

SEQ ID NO: 2217 - DNA, 311 bp, Gossypium hirsutum
  Clone ID: LIB3083-052-Q1-L1-H5
gacagctctaactgactctgccccagctgtacaggaaagggccacttccatgcctactttccagactgctacaaaccaaaatgatgtaactcctcacacaccttctgcaagttccgagactgtcacaaattatgactttactaactaattctctgcaaatgcttactctgaacccaataacacaaactccaaagatcttactcaagacatgttagctcaaaatcaggtaaaaccttatagccaaactacacaccccgatatccatggtctacaagcacaatcaaacgctaatatgtacagacaacccacac

SEQ ID NO: 2218 - DNA, 437 bp, Gossypium hirsutum
  Clone ID: LIB3083-052-Q1-L1-H6
gttagaatagcatcagcagcatcagcagcagcagggggcgtaaacgatcaaccaaccagaaaagagaaacaagatggtttcagggtcagggatctgcaccaagagagtggttgtggatgcaaggcatcacatgctaggaaggttggcttccattttggccaaggagttgttgaatggccaaaaagtagtggttgttcgatgcgaagagatttgtatgtcgggtggtttagtgaggcagaagatgaagtacatgaggttcttgaggaagcggatgaacactaagccttctcatggccccattcattttcgtgctcctgctaagatcctctggcgtaccattcgtggcatgattccccacaagaccaagcgtggggcagctgctcttgctcgattgaaggcttatgatgggatttcagctccttatgatcagacaaaga

SEQ ID NO: 2219 - DNA, 435 bp, Gossypium hirsutum
  Clone ID: LIB3083-052-Q1-L1-H7
ataacggtctggttcctatacctggatcaaacagggaaggttggtgtcaaagctaggctggattgtcatcaagatctgccgagtactacaaacaaggtgctcagtttgccaagtggaaatcaatatttagcattccttgtggtccttctgctctggctgttaatgaagcttcactttgactctctctttatgctaccatttttttacccacaaaggtcttgtgccaatattgagaacctcgaattcttttggatcgacaccaccctattgataagactcttgaagtaactgatatatgttgtacataagtcttttactactttgaagataacaatgatacatttgtaggcatattactcaatcccaatcttgtaaccacaagttctgaacacaatgagaggtctaatcctgatactattgccaaatatactccta

SEQ ID NO: 2220 - DNA, 113 bp, Gossypium hirsutum
  Clone ID: LIB3083-052-Q1-L1-H8
actatcaattcttatctcaccatccacctttcggggaagggtcgcttgaaagttaggctggatcttaacccaatggtgtggcattatatgctcaatgtgatccatttgacaag

SEQ ID NO: 2221 - DNA, 258 bp, Gossypium hirsutum
  Clone ID: LIB3083-052-Q1-L1-H9
tcaggcctgcagatccattcaccgccgcatccgatcatgggggcagggcagtcccagtatgaccaggaggccttgcatattctgaatgaacttatggtcactacgtagtattagaatgcagatatccaaacggaacttgagatatatcgcataaaggtgtattatcattatggcctagacataattatgatgctttcaagaaggaatgatgacagcattctaagtccaagatctgcctcttgcactaatgctgaggac

SEQ ID NO: 2222 - DNA, 347 bp, Gossypium hirsutum
  Clone ID: LIB3083-053-Q1-L1-A1
cagacatgctaatacaaatgctgagacaagcagggctcatggttctattatacctcttgagctttttagtgggtcaaagcgaggaacagggcatggttcatttcaacatttcccttctcaagcggggtatacgtcttcttctgggtcagatcattccccccctagcttgaactctgatgctcaggatcgtaccgggcgaataatttttaagctatttgacaaggaccccagccactttcccggtacactacggacccagatttataattggctgtcaaatagtccgtctgaaatggagagctatataaggcctggatgtgtggctctgtccgtttatgtgtcaatgc

SEQ ID NO: 2223 - DNA, 429 bp, Gossypium hirsutum
  Clone ID: LIB3083-053-Q1-L1-A10
gctaaagcaaaggaagaagaagaaatcaccaaaataagtcttatgagaagcatggttgaaacacaagatccttcttccaaggcaaaatcatgatttcttctgttatgtcaaaattatgattgaaaaattgaaccagaagtccgacaagttgaactttcgcttcttgtaggaagtagatgatatgacaatgagaagatttctaagaggtcgtgatttagatgtggagaaagcatcgagcatgttcctcaagtacctgaaatggagacgaagctttgttcctaatggtttcatttctccatcagaactcacacatgaaatccaacagaacaagatgtttttgcaaggttccgacaagaaaggacgacctatttctgttcttcttgctgcaagacatttccagcataatggcggcctcgacgaattcaagcg

SEQ ID NO: 2224 - DNA, 423 bp, Gossypium hirsutum
  Clone ID: LIB3083-053-Q1-L1-A11
gagagtagatattcgctcgtttctctctttcgtcgaactccgcgtaataatcgctcatatttctcgcagacgtgaagaatggggctgtctttcacaaagctgttcagccggctttttgccaagaaggagatgcgtatattgatggttggacttgatgctgctggtaaaaccaccattctttacaagctcaagttgggagagattgtcaccacaattccaaccattggtttcaatgtggaaactgtggaatacaagaacatcagctttactgtctgggatgttggtggccaggacaagattcgtccattgtggaggcattacttccaaaacacacaaggactcatttttgtggttgatagcaatgatcgtgatcgtgtggtcgaagccagggatgagttgcacaggatgttgaacgaggatgag

SEQ ID NO: 2225 - DNA, 377 bp, Gossypium hirsutum
  Clone ID: LIB3083-053-Q1-L1-A12
tttcagcatcgattactttttatttttttcagagcctccttcaccaacctccgctctgttcagcccgtgatcttttgatctttctccatggctaccatttccaagctcgctaaccccaacccagacgcttctctttcattatctttcaaacccagatcttcttcatcgcttaaatgcttcgttgggctccctaccaggcctgctttcagctctaagctggtttcatcttctagcttgtcctcgataaacacccaccctttcaggggctccttggttgtcaggtgttctcttgctgatggaaacggtagttcagtgaagacgactactttgcatgatctgtatgaaaaagaaaggcagagtccatggtatgacaacct

SEQ ID NO: 2226 - DNA, 376 bp, Gossypium hirsutum
  unsure (1)..(376): unsure at all n locations; Clone ID: LIB3083-053-Q1-L1-A2
gttggggctaggtttttgctgacaagcacgagtgaggtttatggcgatccgcttcagcatccacagaaagagacctattgnggaaatgtcaatccaattggcgagaggagttgctatgatgaagggaaaaggacagctgaaaccttagctatggattatcatcgaggtgccggtgtcgaggtgcgaattgctcgtattttcaatacctatgggcctcgcatgtgcttggatgacgggcgtgttgttagcaattttgttgctcagaccattcggaagctaccaatgactgtttatggtgatggcaaacaaacacgcagcttccaatatgtttccgatttggtggatggactttgtgctttaatggatggtgagcaca

SEQ ID NO: 2227 - DNA, 359 bp, Gossypium hirsutum
  Clone ID: LIB3083-053-Q1-L1-A3
gtacaagccatgctggtaggtactgcttggagacgtgggaactgggaaaacaagcttggttctgagatttgtcaaaggccagttttctgattttcaggaatccacaattggagctgccttcttgactcaaggtctgtctctaaacgaagacacggttaagtttgatatatgggacacagctggacaggagagataccatagcttggctgctatgtactatcgaggtgctgtaactgccatcgtggtctactatatcacaaactcagaattctttgagcgtgccaaaaaatgggtgcatgaactgcaaagacgaggaaatccgaatctgataatgttcttggtagcaaacaaggttgacc

SEQ ID NO: 2228 - DNA, 402 bp, Gossypium hirsutum
  Clone ID: LIB3083-053-Q1-L1-A4
ggactgcctcaaacaaggaagtcaatgtcgttttctgagttcaggccactaaacgagaactccctcatcgaatacattaaagccacgccgtctttgtcatcgaagatcggccacaactatgatggtttaaagattaaggaagttggagatggcaatcttaatttcgtccacatcatcgttggcccttctggttcttttgtaatcaagcaggcacttccctacatacgatgtattgtggaatcttggcccatgactaaggaacgagcatatttcgaagcggtggcgttaaaacaacatggtgggttatgccctgaacatgttcctgaagtttatcacttttgaccgtaccatgtccttgattggaatgcgatatttagagccgccccatataatcctgagaaa

SEQ ID NO: 2229 - DNA, 488 bp, Gossypium hirsutum
  unsure (1)..(488): unsure at all n locations; Clone ID: LIB3083-053-Q1-L1-A5
accagcacggctaagggaaaccccttcaaaaatgggaggaacctaaaagcantttcatgggagggaagaaagccaacttaaggggctttgcttcaacctcanttaaatcaaaacgatagacctccannttttcaatagcattggatcaagaaatcttggaaaagagnntcctgttgaatcttaccagagatgannggttggggttttgaagaaatcagtcancttataccttttgtagctgcttggagaaaaatgggtggcacctaaaaaagggctgaagtgccatttctttttnttccctgctataagctgaagtgattgcctcaaccccactcggtgttgttctcatntttctcatcttnggaatttcccctttcacaccttggcattggaacccattgatcggagcatatatcttgcccggcaacacgtgttcttttaaataccatctgatctgggcacccggcatttgcatgtccgtttctcgt

SEQ ID NO: 2230 - DNA, 431 bp, Gossypium hirsutum
  unsure (1)..(431): unsure at all n locations; Clone ID: LIB3083-053-Q1-L1-A6
ccaggatggtaagcagtgggtatggaggtagcatagcgaatcaaggaatcgctgcctttgggaagcgtccggttaaagagtatgacgagaaggtgatcgttgagatctacaaatcattggtgatggctcaaggtcagttggtgccgcgggaaccaggaaagctttgctctgccatcatctgtcaacgctgaaaatcagattaagtaaagggtttattttcaagtatgtcagattatttttcgccacaaaactgtggtgaaaatagcagttattagttcgtgaaaattacagaaagcacatttcctaaagaaaagcagataaaatatgaaaattcttgctttagttttagtttttttattttattttttaatctctccaaaaatgttgttattaagtaaggcatantaaattgttcagtttagcaataagct

SEQ ID NO: 2231 - DNA, 426 bp, Gossypium hirsutum
  Clone ID: LIB3083-053-Q1-L1-A8
tgtgcatcaactcatacataccatagagtttgtgctcggtgccgtttcaaatacagcctcataccttcgattatgggccctaagtcttgctcactcacaattgtcaattgtgttctacgagaaggttcttctccttgcttggggatacaacaatatggtcatcctcgttgttggcatcatcatcttcatttttgcaactgtcggtgtattgctaattatggaaaccttaagcgctttcctacatgcattgagacttcattgggtcgaattccagaacaaattctacgagggagacggttacaagttctatccattttcattcatcttgatcgatgatgaagactattgaagcaacaaagaatcgaataaaaacgatttcggcggagttgaattttgatagagatatggaagttttggtgaaaattt

SEQ ID NO: 2232 - DNA, 412 bp, Gossypium hirsutum
  Clone ID: LIB3083-053-Q1-L1-A9
attgtagctagctagctccacattgtctatggcttcaaagcttcttttgattgctgtctttgttcttgatctcattgcttttggtttagctgtggcagctgagcaaagaagaagcactgccaagattgtccaagacagtgaagttaattataactattgtgtctatgactcagacatatcaacaggctatggtgttggtgcatttttgttccttatggttagccaagcccttataatggctgcaagcaaatgcttctgctgtggaaagggtttaaaccccagtggttcaagggcctgggcagtcatcctttccatagtctgctggttgtttttcctgattgctgagatatgcttgctggctggatcggtgagaaacgcctaccataccaaataccgaaccattttcagcgag

SEQ ID NO: 2233 - DNA, 399 bp, Gossypium hirsutum
  Clone ID: LIB3083-053-Q1-L1-B1
cacgagcagaagctcgactgtggtggcggctacatgaagctgctcaatggcgacactgaccacaacaaatctggcggtgacaccacgtacagcgttacgttcggacctgatatgtgcggctacagcgccaatatagtgcatgccattcttacgtacaatgtgacaaatcacttgatcaaaaaggaaggtgctcgtgagactgaccaactcactcatgtttatacattcattctccgatcagatgctacctacagcatgcttatcgataatgttgacaaacaaactggtagcttatacactgactgagatattctcccaccacattagatcaacgatcctgaggccaatatgcctgacgattgcgatgacaaggaatacattccttctcctgcatacaaa

SEQ ID NO: 2234 - DNA, 317 bp, Gossypium hirsutum
  unsure (1)..(317): unsure at all n locations; Clone ID: LIB3083-053-Q1-L1-B10
ctacaacacacttgctagtattcctacttggagtggtgactctcaccactcccacatttggtacctatgagtcaccaaattatgggaaaccccctactcctgtattcaagcctcccaaggtgaaaccaccaccatatgaacctaagccaccagtgtatgaaccaccaaaaaaggagaagcctgaacctaaaccaccggtttatgcacctccaaagaaagagaagcatggacccaaaccaccaatgtatgaacctccaaagaaggagaagcctgagccaaagccaccagtttatacacctncaaagaaagaggagcct

SEQ ID NO: 2235 - DNA, 368 bp, Gossypium hirsutum
  Clone ID: LIB3083-053-Q1-L1-B11
ctgatgcaaagcttcaaatccaaggaatacgttcgtgaaacttttgcttggatgcattattactggtaccttaccaacgatggcattgaatttttaaggacttaccttaatctcccctctgagattgttcctgctactttgaagaagcaaactaggcccggcggtggtcgtcccatgggtccttctgatagccgcccacgtggtccgccacgctttggcgacggtgagaggcgattcggtgacagggatggataccgtggaggtccacgaggagtcggtgatttcggtgataagggtggtgcgcctgctgattatcagccttcattcaagggccctggttcaaggcctgcttttggtcgtggaggcgg

SEQ ID NO: 2236 - DNA, 425 bp, Gossypium hirsutum
  Clone ID: LIB3083-053-Q1-L1-B12
gaaggatattgaggcattggagcttttcagagagatgcagagtgcaggggtgaagccaaactctgtaacaataccttgcttgctaccagcttgtggaaatattgcagcattggtacatggaaaagcagctcatggtttttcccttagaacaggaatcattgctgatgttcatgttggtagtgcattagttgatatgtacgctaagtgtggaagaatccatttgtctcgactttgttttgatagaataccaaacaaaaactcagtctgttggaatgcgattatgggtggttatgcaatgcatggtaaggctaatgaagctattgatatttttcatttgatgcaacagaaagggcacaagcctgattttatcagctttagttgtgtattatctgcttgcagtcagggtggcctaacagaacaaggtt

SEQ ID NO: 2237 - DNA, 385 bp, Gossypium hirsutum
  Clone ID: LIB3083-053-Q1-L1-B2
ccaggtcccacctgtccgccaggaaaattggggtcctaaaaagaccatgaagtttcattcaaatgtcgaccctgagggtcatgcatgtcttcaagaaacaactgctgattgtaaactcaatcttccaaaacctagcaaggatgggaagaacaatgttggaaggagggatccttccggtcagtggtcaagtgacaatagaatggaagcccaatcaaataaaaagcatgaagttgatgcaaaaactgctgctgcatgtagcacaaaggggaagactgcccctgagaaaaatgtgattcaggattttgatggtcaaacaaggcaagtagagataagaaatggaatttcaaaatcatccttgcattgtgaaaatgaaagtcagcaagaa

SEQ ID NO: 2238 - DNA, 406 bp, Gossypium hirsutum
  Clone ID: LIB3083-053-Q1-L1-B3
aaatgctttgctttgtatttcgttaaccatggctcatagcactcgtcaccctttcttccttttccaacttttactcattagtgtctcactaatgatcggtagccacaccgtctcgacagcggctcgacgtttattcgagacacaaacaacctgatcggagttgccacaattagcttcaaaatacgaaaagcaggaagagtctgaatatgaaaagccggaatacaaacagccaaagtatgacgaagagtacccaaaacatgagaagcctgaaattcacaaggaggaaaaacaaaaaccgtgcaagcaacatgaagagtaccacgagtcacacaaatcgtaggagcacgaagagtaccagaaagaaaaacccgagttccccaaattggaaaagcctaaagagcacgag

SEQ ID NO: 2239 - DNA, 376 bp, Gossypium hirsutum
  unsure (1)..(376): unsure at all n locations; Clone ID: LIB3083-053-Q1-L1-B4
caaagattgagaagcttgagaccaaatgccagtgtcagtgagcagcatgaagcggttgaaacctggcgcaatgagaaactgaaagaagccaaaaatttagcccttggaggagagagattggattcaactcttctgcgagaggaagcagggaatttagtaaaagtcttggagtcaaattgggctgcactgtcagaagagattggcctttggattcccaatgaaatcaagaatcaagaacataatgataagcctgaggacgtggaagatactgatgatccagaacaaattttagctgggaggcctcctctgccggagtgccgtactgaacttcacactgattatgatggtgattgtgttcgatggngtcttacacatc

SEQ ID NO: 2240 - DNA, 429 bp, Gossypium hirsutum
  Clone ID: LIB3083-053-Q1-L1-B6
gagagagagaagaccatggccgatcaacttacggacgatcagatctctgagttcaaggaggctttcagcctctttgacaaggatggcgatggttgcattactaccaaggagctggggactgtgatgcggtcacttggtcagaaccctactgaggcagaactccaagatatgatcaatgaagttgatgctgatggaaatgggaccattgattttcctgaattccttaacctaatggcaaggaagatgaaggatactgattccgaggaagaacttaaagaggctttcagggtgtttgacaaggaccagaatggtttcatatctgctgctgagcttcgccatgtcatgacaaatctcggtgagaagcttacagatgaggaagttgatgagatgatccgtgaagctgatgttgatggtgatgggcagatcaac

SEQ ID NO: 2241 - DNA, 415 bp, Gossypium hirsutum
  Clone ID: LIB3083-053-Q1-L1-B7
gtgcaaccgatagggcaaaagcggctgacgaatgtggccgtcgtgcgtttgaagaaacacggcatgcgatttgaaatcgcttgctacaaaaacaaagtcctctcatggcgttcccgggtcgagaaagatttggacgaggttctacagtcccatacggtgtactccaatgtttcgaaaggggttcttgctaagaccaaagatttggttgctgcttttgggactgatgatcagactaaaatttgtttggagattttggagaaaggggagctacaagttgctgggaaggaaagggaatcgcaattttcgagtcagtttcgggatagcgacgattgtcatgcaaaaaaccatcaatcctgaaactcagcgcccttacaccattagtatgattgagagactaatgcatgaaatttatttc

SEQ ID NO: 2242 - DNA, 388 bp, Gossypium hirsutum
  Clone ID: LIB3083-053-Q1-L1-B8
ccaaatcggttccaagttttgggaggttgtttgcgatgagcacggcatagatccaactggaaggtacattggttcctcggatctgcagttggagcgtgttaatgtttactataacgaggcttcatgtggtcgctttgttcctcgtgctgtgctcatggacttggagcctggtacgatggacagtgtccgaactggtccttacggccagattttcaggccagacaactttgtttttggacaatccggtgctggaaacaattgggccaagggccattacactgaaggagccgagcttatcgatgccgttcttgatgttgtgaggaaagaagctgagaactgtgactgcctgcaaggtttccaggtatgccactcattgggtgggggaact

SEQ ID NO: 2243 - DNA, 391 bp, Gossypium hirsutum
  Clone ID: LIB3083-053-Q1-L1-B9
aaaccaacccatcaatccattaacattattagtgatgatacaaactaaaactttacaacaattaccaaacagaacaacactcatcatttggagctacatataaaagtgcatatatatatatattgcttgccacttcccttagaacaataacacttatgattgtaagctgttacacaattcaaaacgacacaaatatagaaagaattctacaacgattcaattaattatctataaattcccatcaaaaacctcgtcgactttcagtttcagagctgagcaagacggcggatatcaatggggtaagcatcggtaggagattgagcgctgtaggatctcctcccaatgatcacattggcagcctcacttggatgaaatgcatcccaaaacaagt

SEQ ID NO: 2244 - DNA, 294 bp, Gossypium hirsutum
  Clone ID: LIB3083-053-Q1-L1-C1
atctggggattcatcacgttctgctgtttctgcatattcttactctttgcaaaagaacactgcttggttagcaaaaagcatttcaaataatgggttggctgaccaagattcttaaaggttcaagtaataaagggcgatatcatgagagatatggagatggtagaacttgggatgaacctcgccgttcaacagaaggctctgatggttttgacaaagatgaaattgattgtgctattgcaatttccctttcagaagttgaccaaaaaggcaagatagtcatagaagatgagtctg

SEQ ID NO: 2245 - DNA, 403 bp, Gossypium hirsutum
  Clone ID: LIB3083-053-Q1-L1-C10
aaagtatcgaagctgtgaaaatgtccaagcaagctggatggggtgtgatggccagccaccgcagtggtgaaacggaggatacttttattgctgatctttcagtcggtttggccacgggccaaattaagaccggagctccatgcaggtctgagcgtttagccaagtacaatcagcttctgcgaattgaggaggagcttggtgcggaagctgtctatgctggagccagcttccgtgctccagttgcaccctattaagatgcttgtttagatgataatttgctgagactggatgcgtgcggcagagcttcagtggtttattgtgaccctaaaacatgtttcaataattttgatagcaattttgtacttgttcagaattatatcaatctccgtgttatttttgttgg

SEQ ID NO: 2246 - DNA, 376 bp, Gossypium hirsutum
  Clone ID: LIB3083-053-Q1-L1-C11
agaattttgagtggattgttcttggatccaattttgtggagattacagagaaaaaaagattgatttgcaaatacacaatacgaattatcgcgatgggtttcaagatatttgtggcggcgatgatggtgagttccatcgcatcggctcatatttcattagcatacaccgtgcctgcttttctatgggctcctgatttctctagcgttgaatcgaatgaatctgtcaattatcagatcaagtctccaaaggatctagctaactctgttctctctcaagggggatggcctgacttactgtgctccgataggaaaaatgatcgccctgttgatctacccgttgtttttgttggtagaaagttgcactcttcagatgttgc

SEQ ID NO: 2247 - DNA, 357 bp, Gossypium hirsutum
  Clone ID: LIB3083-053-Q1-L1-C3
ctctccctccaattaagatgcagatcttcgttaagaccctgaccggcaagaccatcaccctcgaagtcgagagttccgacacgatcgacaacgttaaggcgaaaatccaagacaaggaagggatcccaccagaccaacaacgtctcatcttcgccggaaaacagctcgaagatggccggaccttggccgattacaacatccagaaggagtccaccctccatctcgtcctccgtctacgtggtggcatgcagatcttcgtcaaaaccctgtccggcaagaccataactttggaagtcgaaagctctgacaccattgacaacgtcaaggcaaagatccaagacaaggaaggcatcccac

SEQ ID NO: 2248 - DNA, 398 bp, Gossypium hirsutum
  Clone ID: LIB3083-053-Q1-L1-C4
ctgagggattccggcccaagttttctgggaaactgtccattctgccaaagggttcttcttactttggaaggaaaagaaggttcccttacaagctgaaccttgttaatctcagtgacaaaccccaatggttcttggagataagtccagaaggaaaggtaccagtggtgaagtttgatgacaaatgggtggctgattctgatgtgattgttgggattattgaagacaagttccctgagccttctttgaaaacaccccctgaatttgcccatgttggatcgaaaatatttggtacttttatcacatttttgaagagcaaggatgcaaacgatggatcagagcaggctttggttaatgaactgaaagcattggatgaacatcttaagggacatgggccattc

SEQ ID NO: 2249 - DNA, 318 bp, Gossypium hirsutum
  Clone ID: LIB3083-053-Q1-L1-C5
tggaaaaccattctttgcgctaaaaaaaactaatgttgcgccgtggcacaataaattctttcacctctattaccatctcagtcaactatcaatgctcagggagccactgatgttaatatcaggctaattattattttctgttgattgcattgtttacatgcatgcagacacatcaatctccaagtattctgctacttatttggctaaacagcagtgttaataggaccaggcattcatgcagcaggttcacactattataagttgatgcttgacaacacatgataacatggaagcatcactacctgatctttctaggac

SEQ ID NO: 2250 - DNA, 410 bp, Gossypium hirsutum
  Clone ID: LIB3083-053-Q1-L1-C6
gcagcagctacgtggatgagagtgggaagcagttggttgcagctggtgatacaggcaactcagtagaacttgtcggtggttcagagcttgttataaccaaaagaagtgatgagggaatattgagtaaaacacttggttcccgagaatacatgcgctactatcagcagaagcctcgtccatcacctgcaaataacatggccattacagctgccttggcctcaaggtacaggagtatgggcatagcaaccgtgcagtcaagagagcaaatggtgagaatgaaagtgatgaaagcaatgaatagagggggtgtggaggcaatgcgtacaaaagttggcatgaagaataatgtcattcggaacttgcccaagaatgttccgtattagtcagcacatgggttatccttctcagca

SEQ ID NO: 2251 - DNA, 372 bp, Gossypium hirsutum
  Clone ID: LIB3083-053-Q1-L1-C7
gagatattaaactctatggcagtcacaaacgaacacttcgcgactgctcttggaacaagcaatccatcagctctgcgtgaaactgttgttgaagtgcccaatgtcagttgggaagatattggaggccttgagaatgttaagagagagcttcaagagacggttcaatatccagtggagcatcccgagaagtttgagaagtttgggatgtcaccgtcgaagggagtgctattctacggccctcctggatgtgggaaaacccttctggccaaagctatcgcaaacgaatgtcaggcaaatttcattagcgtcaagggtccggaattgctcacaatgtggttcggagaaagtgaagccaatgttcgtgaaattttc

SEQ ID NO: 2252 - DNA, 349 bp, Gossypium hirsutum
  Clone ID: LIB3083-053-Q1-L1-C8
gtgatgaagtgtgtgatgatgtgcgcgccttgttgagaaggtataaagatggttggtcgatgacacaatgccctgacgccggaatattcttgtcgtggaaagatcaggtggtggtttgggccagtgcatggcggccttgacgacggcgaccggtggcagatggcgtttttcttttcttttcctttttgttgcatggcaaggggagtggttcacacgtgtgttatggttttttttctcgtacgtgtaatgtggattggcgtatttttttctttataatatggtattggggagtgccaagaatttgcttattttcaataggattgggagtaattaaaaatttattttcact

SEQ ID NO: 2253 - DNA, 402 bp, Gossypium hirsutum
  Clone ID: LIB3083-053-Q1-L1-C9
attgaatcaacattttccttggatgttaattcgaaattggattgggaatcaattggcaaaattcttgcacgaggtcatagtcgtatccccgtttatgctgtgaatccaaaaaatatcatcgggttgttactggtgaaaagtcttctcacggtacgaccagagaccgagactccagtcagtgctgtttccatcaggagaatgcctagggtcccagcacatatgcctctgtatgatatcctcaatgaatttcaaaagggcagcagtcatatggcagctgtagtgaaggttaaaggaaagactgaagaccctcaattttttgttgacggacagaaatttgacgagcacaaagttaccaatggaaattctcaactaaccacccctttgctgaccaaatatgactct

SEQ ID NO: 2254 - DNA, 315 bp, Gossypium hirsutum
  Clone ID: LIB3083-053-Q1-L1-D10
actaaaagaaccatttaatttattccaaaaacaaactacattttaagagtttgacaaaataaccaaaacctttgtgggttgcaaaaccataaaagctaagggaacgttcaaaatagagatcatactagtaaatgtgggcatcaaaataatggttaagattttagtcaacttcctccattttgctgcccttgccatctgcattctccaatgggggcatgtcaacatcagcatttgcatcaccagcatcctcgtcgatgctcaacccaagtttcaacatcctgtgaattctgttgccgaaagtgtttggatcatcaa

SEQ ID NO: 2255 - DNA, 370 bp, Gossypium hirsutum
  Clone ID: LIB3083-053-Q1-L1-D11
ccccatgggatcatattgaatgtgaaggaagtacagtaacatcattggacctttcggacatcaacttgaggtcaattagtccaacgttcggtgacttgttggatcttaaaatactgaatttgcataacacatcactttcaggagcaacacaaaatctgggcagcctgcagcaccttgagaaactgaatctgagtttcaatcagcttacatcctttggttatgatataagcagcttggttaaccttcgagttctggacttgcataatatcagattacatggaattgtttcagacatcttgtgagaattataaaatctacatctactgaatctggataacaactatacttaatgtacccttcccctatcttt

SEQ ID NO: 2256 - DNA, 365 bp, Gossypium hirsutum
  Clone ID: LIB3083-053-Q1-L1-D12
tgaggctggacctgtatcaccaactcctgctcttgccaatggttttattacatttggcagctttaataatctggcaaagataacacccaaggtattgcaagtttgggcaaggatattatgtgctgttccaaattcccgtctcgtggtaaaatgcaagccattttgttgtgacagtgttcggcagaaatttctatcaacattagagcagctcggtttagaatcgcttcgtgtcgatcttctccctctaattcttcttaaccacgaccatatgcaagcttattctcttatggatattaggttggacacatttccgtatgctggaacaacgacaacatgtgaatctctatacatgggagtaccatgcg

SEQ ID NO: 2257 - DNA, 392 bp, Gossypium hirsutum
  unsure (1)..(392): unsure at all n locations; Clone ID: LIB3083-053-Q1-L1-D2
gcaaataaccgcctttttcttctcttggctgagctctctcccccaacataaccatggcagataggatataccctaaacaagcgacanatggcaccgtcgccgcaaccaacccttcttttccagccactaaagcacaacaatacggagcctcccgccctgtctaccgtccacaacccgaacgccaccgctaccgccgctcttgctgttcttgctgcctttggaccaccatagctatcctcgttctcatcctcatagccgccgtagcttctgctatattgtacgtcctttaccgccctcaccgtccgactttcacagtttcctccctcaaaatctcggcacttaacgtaacctcagcttccaagctgatcaccaacatcaacctaaacgtcaca

SEQ ID NO: 2258 - DNA, 300 bp, Gossypium hirsutum
  Clone ID: LIB3083-053-Q1-L1-D3
caagcagacgctctccttatcttttgcaaaacctgacatttatgttcggcgaagcacctggtaagtggaactcccggcttggctctggtggtgcgactggccacgctaacaacgtatcattcacaaactctacagcgctgctcgacgtatcatcatgacatgtcttatgcgcacaacgggtacgcacgcgactccgcctgtgtatatgtatgcgcactctgtataacaacgaagctaatctcgatatcatcctaatggccgctctatgcttatgctttaaagaacgaactttaccctcct

SEQ ID NO: 2259 - DNA, 391 bp, Gossypium hirsutum
  unsure (1)..(391): unsure at all n locations; Clone ID: LIB3083-053-Q1-L1-D4
gttctcttaaaactcaacctctcaaatcctctggaccttttttttttcttccaatccatacagcacccaattccatggccacctcttccccacgtgaggataatgtctacatggcgaagctcgccgagcaagccgagcgctacgaggagatggtgaagttcatggagaccgtcgtctncgccgtaccctcctccgacgagctctccgtcgaggaaaggaaccttctctctgtcgcatacaagaacgtcatcggcgcccgacgcgcctcctggaggatcgtttcctccatcgagcagaaggaggaagaacgcggcaacgccgaccatgtctncgtcatccgtgagtacagggccaagatcgaggctgagttgtccgagatttgcgccggaat

SEQ ID NO: 2260 - DNA, 419 bp, Gossypium hirsutum
  unsure (1)..(419): unsure at all n locations; Clone ID: LIB3083-053-Q1-L1-D5
gtataatccaatcctatcttatagtttggtgggttgaacatggagccgccgcctactggtgaagaacccacttcgtgggatgagctatataacataaatttgattccttctgagctgttcctcaagtttagaaaagaaattcaggggtttcgagttggtgtcaatttggagttcttcaatgcccctatgaatgatttccaaactaagcttgtgctgaaacctttatcccctgaacggaggtggaagtttgcatatgagcctataagacaagatgtacgccttatttccaaaaagatccctgtcacaaaatttcttaatctccaggttggcataggccacaatttcaagatgaatgcaattggntggaaaatggaagctcaccacctgttttggtggaaatggaattttttcgattcgga

SEQ ID NO: 2261 - DNA, 355 bp, Gossypium hirsutum
  Clone ID: LIB3083-053-Q1-L1-D6
tcgagttttttttctcccaatttcttctgccctgttttagcctcccaacccgaaagccacctccaccctctccctcccaacatcaaacagaaccgccccttacattatcctacttctgtcccgtcaattgttctgcttgcttattgtttaagctctaggaaaatcgaagaggccttatagttttcgagcaggaactatggatctgacaaggtttttgatctcaaaattttgacaaggatgcctgtctcaagatttccttgatctccatcctttctggataaagccaatcccaagtgaaaatctgcctcctggttttgatcctggtgaaggctgcaagcttaattctttgcctctg

SEQ ID NO: 2262 - DNA, 330 bp, Gossypium hirsutum
  Clone ID: LIB3083-053-Q1-L1-D7
cactcaaacgaacattggtcttttccaaatttcaagagcacatcacagacattcaataacacaaataacaatagtaaaaaggttaagggaaaaaaaatatgaaatcttaaagctccaaaaacagaaagctcaagaaattacaacttgtaacactatacatgatcttccatgatacagaatgtggatataagttggaaaaacagattagatacgacctgggaaatgcctcctttcaaattctgaaaccccattttttcgtcccctctttcttcgccgtcctctttgagttcggatcgatgagattttccagtgattttgctttttctgtgc

SEQ ID NO: 2263 - DNA, 413 bp, Gossypium hirsutum
  Clone ID: LIB3083-053-Q1-L1-D8
ctagtctcgagttttttttttttttttttggaactcaaaggcgggtagctgagatcgtctttctccggtttcctcattgtttttgtttttcgcagttaatacaagatggctgatggtgaggatattcaaccacttgtctgcgacaatggaactggaatggtcaaggcgggatttgctggtgatgatgctccaagggctgtgttccctagcatcgtggggcgtccacgtcacactggtgtgatggttggtatgggtcaaaaagatgcatatgttggggatgaggctcagtccaaacgtggtattttaactctgaagtatccgattgaacacggtattgttaacaactgggatgatatggaaaagatttggcatcataccttttacaatgaacttcgtgtggctcccgaagaaca

SEQ ID NO: 2264 - DNA, 430 bp, Gossypium hirsutum
  Clone ID: LIB3083-053-Q1-L1-D9
aaacaaagcaagaactagaaaaccagatcgaaaaatgtcgggaatcatgcacaagatcgaagaaacccttcacatgggagggcacaagaaggaagaagagaagcacaagggagaagctcatcacgaaggcggccatggctatggcgctgctgagcacaagggagaagttcatcacgaaggcggccatggctatggttatggcgccgctgagcacaagggagaagttcatcacgaaggcggccatggctatggcgccgctgcggccgccggtcacggtcacggtcacggcgagcagcaaaaggaagggtttatggataagatcaaggacaagatccacggcgagggaggtcatgaacatggtcacgagggcgaaaagaataagaagaaggagaagaagaagcatgaagatggccatgatagcagcagcagc

SEQ ID NO: 2265 - DNA, 405 bp, Gossypium hirsutum
  Clone ID: LIB3083-053-Q1-L1-E1
cgagatcgccttctcaggcttttgtgccctaagaattctgacttttctcgctgtaaataagtgcaaaagtcggtgaacttttggggacgtgttctttctgaggttcagagccttcattcgaggattcttgttcttccttagcatggcaaccaatgaaaatcttccaccaaatgttataaagcaactggcaaaggaattgaagggtcttgacgaatcacctccggaaggaattaaagttggtgtaaatgatgatgatttttcgatcatttatgctgacattgaagggccagctgggactccatatgaaaatggtgttttccgtatgaagttgttactgtctcatgatttccctcattctcctccgaaaggctactttctgaccaagatttttcatccaaatattgc

SEQ ID NO: 2266 - DNA, 142 bp, Gossypium hirsutum
  Clone ID: LIB3083-053-Q1-L1-E10
tatcattttctatttctcaatgacacaattctttctagctgagatattttcccacaactctctccccccaaaatttttcataattcacaataaccacttctgaacaaaccaaaaaaatatttttcacacatcccaaatccct

SEQ ID NO: 2267 - DNA, 418 bp, Gossypium hirsutum
  Clone ID: LIB3083-053-Q1-L1-E11
attttggcgccgttgccagggatcggtaacgtacgaatcttatttttgtttcttatgaccagatctgctctaggaactcttgcgtttgattccgagactgaaaagactgcgagagctaatcgcaaggaaacaaagctaaggaaaaagcagtcagcggtggttgggactcaaagtaatccatcaccggaaatcagaatcgacgacgaagcagagtctaaggttaacgaaaaccctactcagacttttgaaggagaaaaagtagaagtcgattccccagaagaagtgcttaacgctagggttgacgtaaaccttaatttagcacctcaacctatggctcatacaattcggcaactggccgaagcgccaacagaacaaccgccactatgcatcgcgtatcctactatggatacctgatttg

SEQ ID NO: 2268 - DNA, 398 bp, Gossypium hirsutum
  Clone ID: LIB3083-053-Q1-L1-E12
gaagattttactccatttccttgcaaaggccagcctggcaaggatggatggtatcctcctggtcatggtgatgtgttcccagctctaatgaacagtggcaagcttgctactttcttatcacaggacaaggagtatgcatttgttgccaactcagacaacttgggtgctattgttgacttgaaaatattgaaccatttggtcaaaaacaagaatgaatactgtatggaggttacacccaaaaccttagctgatgtgaagggtggtactcttatttcttatgaaggaaaagttcagctccttgaaattgcacaagtccctgatgcacatgtcaatgaattcaagtctatagagaaatttaaaattttcaatacaaaacaattgtggcttgacctaaatgc

SEQ ID NO: 2269 - DNA, 412 bp, Gossypium hirsutum
  Clone ID: LIB3083-053-Q1-L1-E2
ggccatcgtttttgcttaaaaaatatggggacattactaattgggtgagaagtgccatgtatttctggatcacaaaagtctcaaaaatctgatgcctcatagagacttaaatctgcgaaaaagacgttggcttgagtcgttgaaagattacgagcttgtcattgattaccacccgggaaaggctaatatggttgcggacgccttaagccggaaatcattgtttgctttacgagcgatgaatgtgcacttgtctgttctacccgacaatgtgttaatagttgaattaaaagccaaaccattattgattcatcaaattcgtgaagcccagaaagttgatgatgaattagttgcataacgggctgagtgtgctccgaacaaggaatcggagtttcaaatcgatgatgatgattgg

SEQ ID NO: 2270 - DNA, 434 bp, Gossypium hirsutum
  unsure (1)..(434): unsure at all n locations; Clone ID: LIB3083-053-Q1-L1-E3
gaattcggagctatctacttctataacccaggggtacattggctggtcggtggcttcttccttcaatttatttatgtatttgcctctaaaataacactgagatataataaacggagcctaaataaaatctttcaatccatatttttgatagatcaataaggcttcggttttcctcagctgatccagatcttatccgttggcgatggcggcttcaactgctaatggcacgggatggtacaaagggagagtcatagcagttccatcgggggatagcttggtgataatggccttgaccagtaacaggcctggacctccacctgagaaaaccattaccttggcttctctcattgctcctagactggcccgaagaggaggtgttgatgagccatttgcctgtgacagcanagagtatttgaggaagctctgcattggaa

SEQ ID NO: 2271 - DNA, 304 bp, Gossypium hirsutum
  unsure (1)..(304): unsure at all n locations; Clone ID: LIB3083-053-Q1-L1-E4
agactagagagaatggctgtntcttcttcatttactgtcatgtgtgttgtggtggcttggatgatggtggggagcagtanctatgctcagctctccactaatttctactctcaatcatgtccaaaggtgttgcctacagccgagtcagtggttaaatcagccctgtcaaaagagaagcgcatgggtgcttctctcgtccgcttgttcttccatgactgctttgtcaatggttgtgataggtcaatactcctagacgacacttctcctttcacgggggagataactgcggctcccaataatattt

SEQ ID NO: 2272 - DNA, 328 bp, Gossypium hirsutum
  Clone ID: LIB3083-053-Q1-L1-E5
gggctgggactttgcccgcagcacatccgcgccacactctccaggaagctcatcaaccatggcggaacagaccgagaaagcatttttgaagcagcccaaagtgtttttaagctctaagaaaactggtaaagggaagagaccaggaaagggagggaaccgcttctggaagagcattggtttgggattcaagacccctcgtgaagctattgaaggaacttacatcgataagaaatgccctttcactggccctgtttcagtcaggggccgcatcttagctggtacttgccatagtgccaagatgatgaggacaatcattgttcgacggaac

SEQ ID NO: 2273 - DNA, 306 bp, Gossypium hirsutum
  Clone ID: LIB3083-053-Q1-L1-E6
atattcaaccaaaggacgagatgataaagatgtatcagctagcactgtgggattataattatatcgagggtgattcacatttcatctacaagctggatatcttgcctcatgccattgtaatcatgctataccatgccagtgtaaacagtcaaacaacaaatttgttttttcacaacatatctaatcatatgcacaactcttgacattacttgagtgtcaagaaactacacatataaatgcaaatgcctatgcagttccttgatccttaaagaacatgtattaacttgagattcacattgacatgct

SEQ ID NO: 2274 - DNA, 426 bp, Gossypium hirsutum
  Clone ID: LIB3083-053-Q1-L1-E7
ctgggccgtttattaaagattgggcgacgtggaatcaggtattcttgctagttgatattatctgctgttgcgccattattttcccaattgtttggtctattcgttcgttgagggaaacttcgaaaactgatgggaaggctgcgaagaatttggcaaagttaactctgtttaggcagttttacatcgtggtgattggatatctatattttacgagaattgtggtgtttgctttgaggacgattgcagcttacaagtatcaatgggtaagcaatgcagcggaggagactgcatcattggcgttctatttgattatctttttcatgtttaggcccgtggagaaaaatgagtactttattcttgaagaagaagatgaagaggctgctgagctggctcttagagatgaagatttcgagctttgagaacctg

SEQ ID NO: 2275 - DNA, 416 bp, Gossypium hirsutum
  Clone ID: LIB3083-053-Q1-L1-E8
agcaattgaaaatgtttgatgatttagctaagaacttgggagatcttacgtcaaaaccgagtttgtttgaaacagatgggaatttagatgaggatgttttaaggcagtttgagaaagaagtgaaagatagagtgaaatttgctaggttgatggtagctgaatctaaagagaattatgataatcagttgaaaattcagaagttgaaagataccattttctctgttagtgaatcattaggtaaggcaaaaaagaatggagctttagcgagctctattgctgctaaatctattcctaagagtttgcattgcttggcaatgaggcttgtggaggagagaatttcacacccggagaagtataaggaagagtcgcctacggctgagtttgaggatcctagtttgtatcattatgctgtattt

SEQ ID NO: 2276 - DNA, 327 bp, Gossypium hirsutum
  Clone ID: LIB3083-053-Q1-L1-E9
caacttcaagaacttaggggtccatttgttgttaggggagatgtacgaccatgagagtttggtcaaggcaataaagcaagttgatgtggtgatttcggttgtgggtcaaatgcagttagcagatcaagttaagatcattgctgctattaaagaagctgggaatgtcaagagatttttcccatcggaatttggaatggacgtggacaagaacaatgcggttgagccagcaaaatcgacattcgcaatcaaggctcaaatccgtcgtgctgttgaagctgaagggatcccttacacttatgtgcctgctaactgctttgcaggctattt

SEQ ID NO: 2277 - DNA, 353 bp, Gossypium hirsutum
  Clone ID: LIB3083-053-Q1-L1-F10
cagaatttaaggaaatggtttttcaattcaatggggctaggtcttctattatgtcttatgtttttaatgtgtggcagaggcaatgcagtaagggatttggaagagaaatatgatcttgaaagccatggcagagacgacgaagttgagagtttagatgacaagtacgttaccgcttactttcatcaaactttagattctgcaaatcactttgatggacgtgatgaagtgaagaatttagaatacaaatattcatcggcttactttcacacatcgttagattctggaaaccatggcagatactacaaagcatagatattgtaagacaattatgctactgcgtacttccacaagac

SEQ ID NO: 2278 - DNA, 336 bp, Gossypium hirsutum
  Clone ID: LIB3083-053-Q1-L1-F12
gtgacagccctaaagatatccatgtaaacaagtcccagcgtgtattacttacacataacgttacgtaccactcataggtagcatgctaaagaaaaagtacggagccccgtgctgagatccctattccagtctttttctatgcttacaatggcccggaacaggacttgtgtcgtaaatagtgaatggtgttgaatagcactcagaaagtgattagatcatcttttggtccttgatgcttctttgaatctcgaccccctccagatgaaccttcacctttcttaccgaaaatcatttcatagagatcgtgcatcatgtcatggttgctttcaccgcgag

SEQ ID NO: 2279 - DNA, 358 bp, Gossypium hirsutum
  Clone ID: LIB3083-053-Q1-L1-F2
atcaaactgtaagaacctaagatatcaacgttatctctgcgaaaggcttgaaaaacgtcaacctcatcgataaaatggacgtttacgccgtcgtttcactcaagggtgattcatcgaagcacaaattgaagacgctggtgcataaagattgtggcagaaccccgaattggaattttccggtcaagttcaccgtcgatgaatcattggctaaaaacaataagcttagcatcaagttcaagatcatgtgtgaacgtatatccggtgataaagaacttggtgtagtcaacgttccggtcaaagagcttctggattcgccgggcgatggtgggtcaatgaaattcgtttgttttcaggtgag

SEQ ID NO: 2280 - DNA, 370 bp, Gossypium hirsutum
  Clone ID: LIB3083-053-Q1-L1-F3
atcccgagctaaacagccttgattgaagcggcacctcataattccaatagcgatgagaacagttgacattatgactacttgaaagaataatcgttattctgactgctcttccatcttcctttaccattttcaattttggagaccacaaagctgtgaagaactggcaactattcttatgtgttgctgctggtctttgggctggactaattattgatctgggaactgatatctatactatcaatgcatacagccctgtacaagatgtcgttgattcctgcaggactggagctacgactaacgttattttttggccttgcgttgggttacaagacttgcattattcctatttttgctattgcaatcaggattt

SEQ ID NO: 2281 - DNA, 384 bp, Gossypium hirsutum
  Clone ID: LIB3083-053-Q1-L1-F4
gagagagatgtgaatattagtttaaacttgtgtattttttaaatgttttatttttttccatttcatttttcaagtctactaagcaaaggacagaaagaaaattactttgttctttctattttttcatctttcctaccaagcacatctatggaaagaaaaattatatttttcatctttttatttttctacccttcaattttttatcattctaatttttttctgctctaccaagcaaagatttaatgtttcaataattggaggttttattggttactatttgattgcaatataggttggaccagagtatgcaagatattgcgggatagaggcattggagcctctggggatttacttgccaggcgatcttaattacccgggaggagt

SEQ ID NO: 2282 - DNA, 371 bp, Gossypium hirsutum
  Clone ID: LIB3083-053-Q1-L1-F5
aataaagccaaatgaattaaatccaaaagacgcagcttcgatcttatccatttctcaaaatccatcatcaaaattagggtttctgtaaagtaaaaaaataaattgaaatcaaaatcgttttgaaatcttagggaatgcggccgaattgttgtcatgtttcgtttgcttttgttctgaagttcttgaattttctccaagctttccttggagtgtcgattttactctactcgttttggatgttggatcaatggaatcatcacgtccccatttctcctccgccgtcagttccgtggccggattcttctctctcggctctcttcaattcgagaccggaggttgggggagctcgaggagccaaggttttcgatgat

SEQ ID NO: 2283 - DNA, 379 bp, Gossypium hirsutum
  Clone ID: LIB3083-053-Q1-L1-F6
tgatcatatcagttctatatttggctttcaaaaagttcatgatctcgggatttaccttggggttcctcttttccatcagaggttgacaaatagcactacgaattttgtagttgaaaaagtttggggaagctacatagttgggactccaaaaaagtctccattgctagtcgtatttatctagctcggttggttattttatccatccctagctattttatataatcaatgatgattcttaggaaaattagtgatgagattgaaagtggtctagagtggaaaagacttcatgatcaaaacatatcctttcttttgaagctaggtatcaaaacatatcctttcttttgaagctgggtttcaacattgtttctaacaaggatgt

SEQ ID NO: 2284 - DNA, 284 bp, Gossypium hirsutum
  Clone ID: LIB3083-053-Q1-L1-F7
atcaaactgtatgggtccagcatcctgtatatatcatggggcaaataccttgctgcattctgtctcaacatatcgtatgctgtgcctttcacatctacactaactggatgtatagcaagtaatccaattgacgcgacattgggattttgagaccagcgcttcacagacatcattgcttgaagaggtgcagcaccacaacaccacttgtccacaggattctttatgttggatatagctgccatataaccatttataccagctgcaagaatatgacagccgatatg

SEQ ID NO: 2285 - DNA, 376 bp, Gossypium hirsutum
  Clone ID: LIB3083-053-Q1-L1-F9
aaaagaaggattaaaaaaaatcaatggaatcgaagaaacgaacggcggaatcagccccggtattccaggaaggaataagcttaatcctcactcggtggtcggctctcaccgccgccgttgaaaacgagtggggcggccgtgattctctcggcaaagccaacgccatctgcacggacgtcttcgcattcttcactgaagccagagcggagccgctttatatagatgatttggaaaatcttttagaggaaggtttgcttagtcttaatacgttagttgaagatggcagcattgaggaggtggctgagaaattaatgattatgcatgaagagtgtttggaaggtaactatcaatctgttgaaaaactgaggacaacgaa

SEQ ID NO: 2286 - DNA, 389 bp, Gossypium hirsutum
  unsure (1)..(389): unsure at all n locations; Clone ID: LIB3083-053-Q1-L1-G10
tagattataagcacctccccataagcaaaccacaaaggaaagcttggagagagacccaaaaacaatgtctaaggaagtgagtgaagaaggacagggtcgtaaggactatgtggaccctccaccggcacctctgattgatatggctgaactcaagtcatggtctttttacagagccctcatagctgagttcatagccactctcctcttcctctatgtcactgttgctaccgtaattggtcacaagaaacaacaagatgcatgtgatggtgttggtctcttgggtattgcatgggctttcggtggcatgatctttatccttgtttactgcacctgncggtttctcaagtgggacacatttaaccctgcgggtgactttttggggttgtttt

SEQ ID NO: 2287 - DNA, 379 bp, Gossypium hirsutum
  Clone ID: LIB3083-053-Q1-L1-G12
ggaaatccagctaggtttgttcgggctttgacccatgaagaaaccttagaaatccctaaagttgccgtggctattaatgatctaagcaaagaacatttctccgagttccttccgtactcaacagtatatttagaagttgagaagttaaagaagtccctaggaataaccatttgattgcccttcatttttcattattccataatatcggtttccccgagttttccttgcgaagaaataagcaaccaaagaacacctagaagaagaatctcttctgttgtttatccatgcacttcatcatgttggctgttgaaagaaaaaccttttaatcatgagtgacctatgaaatggaatatagattgtaggtgaattaattttcatt

SEQ ID NO: 2288 - DNA, 357 bp, Gossypium hirsutum
  Clone ID: LIB3083-053-Q1-L1-G2
ccggcgtgggtgaaggcggcatgttagaaagacgtgactgcgccgccgacaatttgcattctaaaggaacgcttgatttgaaaaatggacagagtagcactaattctggaggagacaccaccgttaagaagaaaaatatccatgggatactgaatactgcgagccggagaatattgcttccacttggagctatgattgctaggtacatcaaaagctctgagtcaccagatccagcttggccctatcttaatgtatcctgtcaaatatgaccttatgccataggagttgctggctggggaactgatcttaagcttggaagagagtcctctggtctcacatattccggtaatagataca

SEQ ID NO: 2289 - DNA, 425 bp, Gossypium hirsutum
  Clone ID: LIB3083-053-Q1-L1-G3
tggcatcctcaggatttcaagctgacgtgagggctttacaaaagcaactggcagctaggcacttgatttatcagcatcagcacaacaagcaaatgagctgccctgcaatggctcaattgctttccaacacactttattacaagcgtttctttccttactattcttttaatgttttgggtggccttgataacgaaggaaagggttgtgtcttcacatatgatgctgttggttcctatgagaaggttggatacagttctcaaggttctggttcaacgctcatcatgccgttcttggataaccaactgaagtctcccagtcctcttctattgcctgcccaggatgctgttactccacttgtggaagctgaagctattgatttggtaaaaactgtttttgcatctgcatccgagagagatatatacact

SEQ ID NO: 2290 - DNA, 373 bp, Gossypium hirsutum
  Clone ID: LIB3083-053-Q1-L1-G5
aacaagttctactagtttgacattgtttattcaaaattactagatagagtgctgtatacagcttgttaactgattacatcagggcctaattctagaagtgataatttgctctaaaaacagtttctaagcatataaattccttgaaaattaggcatgctttgaatcttatcaagcaacaacagggcctttttttttctgtatatgcttagcctcagtctatactggaagaaggtcttgcacacccacaaaaacaacccttctttcgtcttccaccccgtcttccaccattgtagataaagtcccttaagaggacaccggttcgggttttccctttgttcttcctttcatcttctaggttcagcataacgtactc

SEQ ID NO: 2291 - DNA, 412 bp, Gossypium hirsutum
  Clone ID: LIB3083-053-Q1-L1-G6
gtgcaaaaccagaaagtaaaaagaacagagctttgatatcctaagctaatgtcggacgaggagcaccatttcgagtccaaggccgacgccggcgcctccaaaacctatcctcagcaggccggtactatccgtaaaaacggctacatcgtcatcaaaggccgtccttgcaaggttgtcgaagtttccacttccaagactgggaagcacggacatgctaagtgtcactttgttgggatcgacatcttcactgctaagaagctggaagatatcgttccttcttcccacaattgtgatgtgccacacgtcaaccgtactgattaccaattgatcgacatttccgaggatggatttgtgagcttgctgaccgacagcggagacactaaggatgatctaagggctccaactgatgaaa

SEQ ID NO: 2292 - DNA, 396 bp, Gossypium hirsutum
  Clone ID: LIB3083-053-Q1-L1-G9
atcagaagataagtaacagatgggagaaatgctgggttggcaggtccaaaaagtcttgctgagctgaaagttgggaagaacagtgataataagcagcatcagtctcttggaaagcgaaggagtgttggagatcatcaacaaattgaaggtaatctttcattcaaggggccaatgcctctaagtgagattctgaagagaaagagacaatctgaaggtgccgcttctggggatggtatagcatctgtaaataaagaagatgttgaccagaagcaaaacaagggaagcttgattagtggctccaataacaaagaagtatcagtgacagggaaagaggcgaacaaagatgaagaatccaaggttgcagctacagatataggaataacggaagccactcat

SEQ ID NO: 2293 - DNA, 363 bp, Gossypium hirsutum
  Clone ID: LIB3083-053-Q1-L1-H11
gttaagctcaaggctttaaatggagaaagaagtagattagcacaaagctttgagtacaactatggtgattttatccccattttgaggccattcttgagagggtatttgaagttatgcaaggaagtgaaggaaatcagattgcagcttttcagggaccaattccttgaggagaggaagaagcttgcaaccacaaaaagaattgacaacaatgctttgaaatgtgccattgatcacattcttgatgctcaacgaaagggagagatcaatgaagacaatgttctttacattgttgagaatatcaatgttgctgctattgaaacaaccttatggtcaattgaatggggcattggttagcttgtgaac

SEQ ID NO: 2294 - DNA, 301 bp, Gossypium hirsutum
  Clone ID: LIB3083-053-Q1-L1-H2
aacaaaagatgtatcaaattaccaaaatcctcatccttaacaaccttaataataaatgagcaagcgtaagtctcagtatctaacataacttaaagcatatgacactgtcattaaataaaaatactagaggtgcagcaaccaaaatgtctcttccaagtaaagatgcagaaatggacttcatttcagaggaatgaacctagaagaatgggtggcaccaataccaggtctaccatgcttaacgggcttgtacgaaatggaaaactcggcaaggtaatggctgatcatttcaggcttgatttca

SEQ ID NO: 2295 - DNA, 235 bp, Gossypium hirsutum
  Clone ID: LIB3083-053-Q1-L1-H3
cgctggaactaaatatgcctgattaactactttccaattaccatgaacgaaacactacagtgatgtggaccttttgcgaagagagacataacataactacttacatatgggactttcttaagctaacaataataacacgctcatccaccacctgagcaagatatgctttgacactctacatgtactagagaaaccaggtttgtatactactagagaatacttttgaaaccatata

SEQ ID NO: 2296 - DNA, 227 bp, Gossypium hirsutum
  Clone ID: LIB3083-053-Q1-L1-H4
cgcaaaaccctccttccagacatcttctgcttcttgctccaagcagtctccttagaaacgaatatggctgcctgttctgctttgatctatactataatcactccccaaacggtcttcttctcacccaaatccttctataatcttagacttcttcctacaactaacgtgcgcacggttcgcactgcgaccctagccaccggttcacagtccgccaccggcccccggac

SEQ ID NO: 2297 - DNA, 347 bp, Gossypium hirsutum
  Clone ID: LIB3083-053-Q1-L1-H6
gttgctcctgctacaaggtctccaatggctttaatggggtcatgtagaaatgaaaaccaagaagtgaataccagcatgagaactgccgagaccatgctgcggttggtgcctatggctttaggggttgctgcacttgttgtcatgctcaaaaactcacagtccaatgactttggctccgtttcatactcagatcttggtgctttcaggtacttggtgcatgctaatggtatttgtgcaggctattcccttctttcagctattatagcagctgtgcctagtccttctactatgcctagagcttggactttttttctacttgaacagattctaacatacattatcttggg

SEQ ID NO: 2298 - DNA, 269 bp, Gossypium hirsutum
  Clone ID: LIB3083-053-Q1-L1-H7
ataaatattattggtcgaaaggtgctttatggaaacaaaaagcctttcaaacacttaaatatattcatgtgtaaatacatatccaacgctcagattaaacaacatatgaaatctggatatccatttcatacaccctcgcttctttcactgtcaccgcatttcttaccattttaaaagtcatcttccattcaaaatattaccccatattatatggaacatttatacaagaaggagccaataataaatcaatttttaaaccacacctctcg

SEQ ID NO: 2299 - DNA, 364 bp, Gossypium hirsutum
  Clone ID: LIB3083-053-Q1-L1-H8
aaaaatatgatattagcctggattttgattctcagctccgccatggcagtagctcgttgccaagatttttactcccatgccggaccatatgttccgcctccacaaaaagtaacctatctccacttctttttacacgacactatgagcggcaacaaccctagtgcaatccccatagtcagtccaaacatcaccacctcgacggggttcggcggcgtgatagctttcgatgatccactcaccgttggccccgacataacattagaggtcatatggaacgctcaaagcctctgggtgtcgacaggcaaagacgttttgactctgatggcgtacctggacatcgggtttacgaaaggtgaatttaacc

SEQ ID NO: 2300 - DNA, 326 bp, Gossypium hirsutum
  Clone ID: LIB3083-054-Q1-L1-A11
cggtcgtgtcttttctggcagagttgcaactggtttgagggtcagaatcatgggtccaaactatgtacctggggagaagaaagacttgtatgtaaagagtgtacagagaactgtgatttggatgggaaagaagcaggagacagttgaggacgttccttgtggtaatacagttgccatggttggtttggatcagttcatcaccaagaatgctacattgaccaatgagaaggaagttgatgcccacccaatacgtgccatgaagttttctgtctcacctgttgtccgtgttgctgttcaatgcaaggttgcatcagatcttgccaaac

SEQ ID NO: 2301 - DNA, 250 bp, Gossypium hirsutum
  Clone ID: LIB3083-054-Q1-L1-A12
atctcttgttatattatgccataactgttatcgacctatcgtactttttcaactattcctcgttactgcctcactacaagactgacgagacaccgtctaccgtgcggataaacatgaattccacacacaagcaacccgatacgagctgccacattactcgtacaactacgaacaacacagtgagttacaatcctaacatcatcaatatcgctaaatggacccatgacatggaaatccttaaacgcacaat

SEQ ID NO: 2302 - DNA, 212 bp, Gossypium hirsutum
  Clone ID: LIB3083-054-Q1-L1-A9
ggggattataaaaaataaactagggatgttcaatgtacctaatagccaattatcgaaacgtgacatcattggtgtataattcaaaaggtagccacaccttgctttaaaacataagtgcccacagttcacatgttcctactttttagaatgaaccaaactcatggtatacaaaaggaaaacacatgaaaaaatcgtacctatcatcatcatgt

SEQ ID NO: 2303 - DNA, 394 bp, Gossypium hirsutum
  Clone ID: LIB3083-054-Q1-L1-B12
cgatgatgatcagcataaagacaatgaggaggaaaggatgattgacaagctgttgatacagtacagtaagaaaccgccatctggtgaagagggaaagataagaagaaagtctaaaagtcgtcatgcacatcatatgggaagtgatgtgtgtgaagctcctcataaatcaagtagggatacatccgatgatatgtccgagaccatttcccgtccagcccgttcaatatctctccctcctgcacaaacagctgaatcaaaaggaaccaaagtttatgctcgtgctaactcattcgagtctgataagtcgagtgcaacccagcatgtgcattcaaagttaccagattatgatgaattggccgctcactttgcaacaatgaaagggagataaagcttt

SEQ ID NO: 2304 - DNA, 294 bp, Gossypium hirsutum
  Clone ID: LIB3083-054-Q1-L1-B9
tctaaactacggatcccccgtctgcggaattctcacgagttacatcttttgttctgggatccttgcaaaagccaagtgctgtctaagcccttcaacatcctttctttcatggttgtttttatgttcctccatctcttcgtcccataatagctgtttctagaactcctccttctgctgatgttagaggaacattggaacagcaatctgttaggaggtattctggggctctgcccaatggaaaattcactggcagtttttcttctctgaaaacaaatgctttctttcacacacgtg

SEQ ID NO: 2305 - DNA, 425 bp, Gossypium hirsutum
  Clone ID: LIB3083-054-Q1-L1-C12
cttttatatttttcctctccaattttccgtcactttcccgagaaaatgagagaaatccttgacatccaaggtggccaatgcggcaatcagataggagccaagttctgggaagtcgtatgtgccgaacatggcatcgattcaacgggtcgatatggtggtgactcggagctccagcttgagcgaatcaatgtttactacaacgaagccagttgtggccgttttgttccccgcgcagttttaatggatctggaacccggaaccatggatagcgtaagatccggtccttacggacaaattttccgacccgataacttcgttttcggacagtccggtgcgggaaacaattgggctaagggacattacactgaaggagcggagcttatcgattccgttctcgacgtggttagaaaggaagccgagaattg

SEQ ID NO: 2306 - DNA, 205 bp, Gossypium hirsutum
  Clone ID: LIB3083-054-Q1-L1-C9
aatacaaaagacagtatggaaccatgcatttcttacataccgaccctaaccttttctttcttatgacatgactaacaaagctctaaactaaaacactacctgatactacaaccattccactttaaaaccatacatacactgtttacacttgaataaacacacaataccatcagattcttatgtgaacttgaactcaagccttttc

SEQ ID NO: 2307 - DNA, 409 bp, Gossypium hirsutum
  Clone ID: LIB3083-054-Q1-L1-D10
tttatatttttcctctccaattttccgtcactttcccgagaaaatgagagaaatccttcacatccaaggtggccaatgcggcaatcagataggagccaagttctgggaagtcgtatgtgccgaacatggcatcgattcaacgggtcgatatggtggtgactcggagctccagcttgagcgaatcaatgtttactacaacgaagccagttgtggccggtttgttccccgcgcagttctaatggatctggaacccggaaccatggatagcgtaagatccggtccttacggacaaattttccgacccgataacttcattttcggacagtccggtgcgggaaacaattgagctaaaggacattacactgaatgagcggagcttatcgattcacgtctcgacgtggctagaaag

SEQ ID NO: 2308 - DNA, 239 bp, Gossypium hirsutum
  Clone ID: LIB3083-054-Q1-L1-D11
tcgatctctattaccaccgtctcaaacccattaatagcggtacatagttcacatccctaaagtctttcaatgcttgcccgatatccaaactccagcccattctagaattctaaaaattcttactattgaataactctaagacgtcaaaagccctagttgagaaacatcttacttagataataccatacctatatcaactagctcattacactagatattccttctaaaaccagagatat

SEQ ID NO: 2309 - DNA, 404 bp, Gossypium hirsutum
  Clone ID: LIB3083-054-Q1-L1-D12
ccgtgttcccctcgccaaaggtttccgatacggttgtctgtccatacaatgctactctttcggttcatcagcttgttgagaatgctgatgagtgcatggttcttgataatgaggctttatatgatatctgcttcaggactcttaaattgactactcctagctttggtgatttgaaccatttgatctctgcaaccatgagtggagttacttgctgtctaagattccccggccaactcaactccgacctccgaaagcttgctgtgaacttgattcccttcccccgtcttcactttttcatggtcggatttgctccactgacctcccgcggttctcagcagtaccgagctctaactgtccctgagttgacacaacaaatgtgggatgcaaagaacatgatgtgtgct

SEQ ID NO: 2310 - DNA, 417 bp, Gossypium hirsutum
  unsure (1)..(417): unsure at all n locations; Clone ID: LIB3083-054-Q1-L1-D9
ccggtgttaagaggctttatcagatgcaggccaatggaagcttgttgttccctgctattaatgtcaatgactctgtcaccaagagcaagttcgataacttgtatggatgccgtcactctcttcccgatgggttgatgagagctaccgatgtcatgattgctggtaaggtcgctgttgtctgtggttatggtgatgtcggcaagggttgtgctgctgccttgaagcaagccggtgctcgcgtcattgtcaccgagattgatcccatctgtgcccttcaggctctcatggaaggacttcaagttttgacccttgaggatgttgtctccgaggctgatatctttgtcaccacgactggtaacaaggacatcatcatggttaaccacatgangaagatgaagaacaatgccattgtttgca

SEQ ID NO: 2311 - DNA, 422 bp, Gossypium hirsutum
  Clone ID: LIB3083-054-Q1-L1-E11
atggggaagtttaaggaagcgctaaaggattttcaacaggtcaaaaagatttgtcccaatgatcctgatgctaccaagaaattaaaggaatgtgagaaggcagtaatgaaattaaaatttgaagaagcaatttctgtacctgagtctgagaggcgttttgtagctgactctattgattaccatagcatagaggtggagccacaatattcgggtgcaaagatagatggagatgttgttactttggattttgttaagaaaatgatggatgacttcaagaatcaaaagtgtttgcataaaagatatgcattccagattgtcttacaaatgagaaaaatgcttcgatctcagccttctcttgatgatattaatgttcctgatggcaatcatttcactgtctgcggtgatgtacatggccagttcta

SEQ ID NO: 2312 - DNA, 418 bp, Gossypium hirsutum
  Clone ID: LIB3083-054-Q1-L1-E12
cggcacgagcggaagactcagttgtctcgtccacattcgttccctgtctttccccaggtaggtccattcaggcatagaactggagtttggagttctctaccaggttgattgagtgctcgaccaaagggaaagggcttgagcgtccttgattcaaagtctctatatcccaaagggaagcaactgagcttgatagctgccacctccgcatctccgataacaatatcggaacccaagatagcataggtagtaaataaacccggatccactaactcggtactcaaccacacggtgttgtggtgtgctagagtgaataatgtccaggaaccatagaaagcaagtggttgtccccgtgccgaacgccaccaaacagtaaccttctcgacgatgggaacataagtgagatttcgtgggttatcat

SEQ ID NO: 2313 - DNA, 423 bp, Gossypium hirsutum
  Clone ID: LIB3083-054-Q1-L1-E9
caaaaccttgttgggagatgagttggggaagtttcctgcgcccttgttgatgaatactatgcactttgcatttcaagctttattatcaaatgcaataacgtggtattggtctcatagatttcagccttcggttgcaatgtcatatagggattacttctacagagttgtacctacagctctttcaactgcactggacgttaacctgagcaatgtatccctggttttcatatctgttacttttgcaacaatgtgtaaatcagcagctcctatatttcttctcctatttgcttttgcattcaggttggagtccccaagctttaaactcttagggatcattgtggtaatctctattggaattctattaacagttgcaagggacactgaatttgagttttggggttttatctttgtcatgcttgctgc

SEQ ID NO: 2314 - DNA, 430 bp, Gossypium hirsutum
  Clone ID: LIB3083-054-Q1-L1-F10
gtgcagtgacttccatctccactcccatttcagtggtttcggcttctaaggcagcagcagtgcgtgtcatacctgcagctcctttgcagttcgaggggactcttggatggaaaggatctgctgccacaagtgcttttcgcccagcatcacctcgacgtaactctgatggtgataagagactatcccttggagggacaagcagtagctcaaaacggaggttggattgccttgattttgatctcaatgttgctgatgctggcgatgaaaaaggtgctgaactaatgtccgggaaacaggttacagcctcatcaggtctctattctgcagaatcttcactgaaagctagtcagagaaaatccgagagacttgagctggatttaaattgtgtcagtgatgatggtgacggtccagcactagaattcagagtcaa

SEQ ID NO: 2315 - DNA, 417 bp, Gossypium hirsutum
  unsure (1)..(417): unsure at all n locations; Clone ID: LIB3083-054-Q1-L1-F11
agatcttctagaggtaggtatcgagctcagagtaaaaatcgtggaccagatcgtggttatcgtataggaagtgggtccaaagcatttgggaaaaacaaccgccagaatatggctccaaaggtggtgagagggagaggacctaggagttatgaacctaatatgaaaatcagcagtcaagcacctccaatacagggcagactgtctggaaagcctcttgagaaaacatcacaagccaattcaggtagagcttccaccctcgcaacaaatgccggtactgtatcagatcctaatccgaaacatatatttgcgtcaagcttgagttctgcttccccacctttttatccagcggcgtcttccaacanagacactgctttaactcataagaaagatgtacatgctgaaagtgtgagcgggaat

SEQ ID NO: 2316 - DNA, 336 bp, Gossypium hirsutum
  Clone ID: LIB3083-054-Q1-L1-F12
ttccggatgggtcatgtaaggtggcccttggatcaagtggcagtggggatacagtaatcgccatgcctagtgagatggaaatcataccaccgaagaaatcagacaagatcaaaatcatgggtggctcactacgcggtctgactggcaagctaatcggggtagatggcacggatggcattgtaaggatagatgacagtcttgatgtgaagatattggacttagttatactagcaaaattaccctgataataataacaacaacaataatgataactagcaatgtatatgactggtaagtagtttttgagtaaattttgtttggaattaaaaaaaacaa

SEQ ID NO: 2317 - DNA, 423 bp, Gossypium hirsutum
  unsure (1)..(423): unsure at all n locations; Clone ID: LIB3083-054-Q1-L1-F9
atcaaccttgtgaaaatggcgacaccccaattcctatcagccttccggtactccgacagtctaacagtcgtagctatctccttttgcactgccattgtctgcgaagccatctcatggctcttaatctaccgcaccaactcttacaaatccctcaaatcctctatcgacaaagccgccaagaaactcgaaatcatgaaaaccgaccaaaaccctagcaagttatccaccaaaaaatccaaaaccaagaagatcgaccgtgtcgaaaccagcctcaaagaatccagccgtgacctttccttattcaagttcaaatctggggctgtcgtcgccctcgttttgatcgtcgtttttggcttcttgaattctctnttcgaaggcaaagttgtcgccaaattgccctttaagcccatcgggatcgtgatg

SEQ ID NO: 2318 - DNA, 398 bp, Gossypium hirsutum
  Clone ID: LIB3083-054-Q1-L1-G10
tttcactatttcattcctttctcacaaaaaatatacattatttctatacacttactttaaaccctcttctccatgctcattcatactataaaattcttcaccttattacccaaaattaacatcaataataaatatacaacaaccataaatcaaaagcacaacacctttcatctccataccacccaaaatccataataacataaaccatctttcattccttaaacccataatgttaatatcctttactttcaccattcaatctcaatctcattcttcacctcaaactcaatcctaaccatttttaccaccaataatacctattaaccctatttcacccctttttaaattccaccctcattaaccctataacaatattcccaaattcttcaacaataaat

SEQ ID NO: 2319 - DNA, 429 bp, Gossypium hirsutum
  Clone ID: LIB3083-054-Q1-L1-G11
cctttttcagtgaaactggtgctggaaagcacgtccctggtgctgtctttgtggatcttgagcctactgttattgatgaagtgaggactggtacttaccgtcagcttttccaccctgagcaactcatcagcggcaaggaagacgctgccaacaacttcgctcgtggccactacactattggcaaagagatcgttgacttgtgcttggaccgtatcaggaagcttgctgataactgtaccggccttcaaggtttccttgttttcaacgctgttggtggaggcactggatctggtcttggctccctccttttggagcgtttgtctgttgattatggcaagaaatccaagttgggtttcactgtcttcccatcaccccaggtctccacatctgttgttgagccctacaacagtgtcctctcaactcactccc

SEQ ID NO: 2320 - DNA, 288 bp, Gossypium hirsutum
  Clone ID: LIB3083-054-Q1-L1-G12
ccaatttgtattgccttggagatgttgtgtacgcgcctggtgtatcatgagactgtctacagccttctgttatagataaagaaagtaatagagcagtacctaatgcctaacatccgtgatgacttactgaaaacttgtgcagacgatccatgccttgctgatcactggccatatcttgtctgcaactacttcaatgagtccactgtgatcacagatatggagcttgcttctaattaatcccaacgttcaagttctcctagtatcacagatgtaacccaactcacaaca

SEQ ID NO: 2321 - DNA, 430 bp, Gossypium hirsutum
  Clone ID: LIB3083-054-Q1-L1-G9
gccatggcttcctcaccaaaactcttctctatgtctatggtcttcctttttgccctcttgtccatgcaaatccatgctagagagtacttcagcaaattcccaagagttaacatcaatgagaaagagacaacaaccagagagcaaaagcacgagaccttcgttccccagaccacccaaaagccagaagaacaagagccaaggttcattcctgaaacccaaaatggttatggcctttacggccacgagtcaggctcaggctcaggctcaggctcaggctcaagccggcccagtttcaccaccaaagaaacctatgaaccctatgtcacccctgttagattccaccctgatgagccctataacagcatccccgaatcctccaacaataaagacacttactactacaacaagaatgcctacgagtccactaagc

SEQ ID NO: 2322 - DNA, 396 bp, Gossypium hirsutum
  Clone ID: LIB3083-054-Q1-L1-H11
caacaatgggttaaaaaattaaaaaccagagaaaatcactataactctctcgcaattattccaggctctatttgccattcccttacttgccttgggcaaatatcacaaaaggataattaaaaagataaaaataaatcaaaatcacagaggattttgaaaaaccttcttttcaaatccccacagttaatgagtgtttcaagctccccacatgcagcaaatgttgtcccaatgctacttttcggcttccaagttcatcaaccacactcaaatccttacaaacatccaccttaaacctcaccaatgtctctgatttccctgttaatgaaactttctcaaatcccaacaaatgcttttggggcgagttgtgcactgatgggggactcgaaaacaagaaca

SEQ ID NO: 2323 - DNA, 349 bp, Gossypium hirsutum
  Clone ID: LIB3083-054-Q1-L1-H12
cagttgagtatttgtacgaagagaatggtaatggcttccgtgagattcataatttcggccatgaaacaaatggggttgccaatggtcatttcaagggagtgaatgggaagcatcaccaagacaaaataattcccgtggctacaaaggcaaagagacttctcccactttttgatgccaccgatgcagaaactgaagaaaagatactgaatggacatgaaaacggcttcaattctgttgccttgcaacatacgttacctgaacttgagaacaaaatgatcacaatagaggaagaagtggaccatgtttatgaaagattaccagcacttgaggcagatagggagtttctaaa

SEQ ID NO: 2324 - DNA, 430 bp, Gossypium hirsutum
  Clone ID: LIB3083-054-Q1-L1-H9
ctttggccttctttggaatttgtaattttccgaaagcttgagtggccggaactgtggcctaacctcagtaggaatatataaaagggtgaagatgggaagaggaaagatagagataaagaggatcgagaacaccacgaatcgtcaggttacgttttgcaagcgcaggaatgggctgctgaagaaagcatacgagctgtcagtcctttgtgatgcataagttgctcttatcgtcttctccacccgtggccgactctacgagtactccaacaacaacataagatcaacaatatagaggtacaagaaggcatgttccggtaccttaaacacaaataccgtcacggaaatcaatgctcagtattatcaacaagaatcagccaagttgaggcagcagattcaaatgctacagaattctatcaggcatctaatggga

SEQ ID NO: 2325 - DNA, 228 bp, Gossypium hirsutum
  Clone ID: LIB3083-055-Q1-L1-A1
actgtgggcaccagctaacgtatgtgacccttcaattgaattgcatgaaagcttccctttacctttggtaagcgttacccctatcttaccaaatggccggacaaaggtactggggtgaaaaaggcttagtttctagcggaattctcccttttatatataaagctctataggttcaaatgcagatgcctttcgtgcacttttagtataaagaatatataaatacccatc

SEQ ID NO: 2326 - DNA, 420 bp, Gossypium hirsutum
  Clone ID: LIB3083-055-Q1-L1-A10
ggaaggtcttatcccttttgtttacagggctatagggcagtactagagcggaaaagaagatcacgttttagcaacatggttcaacgagtcaccctcggcttcttacatgagactccccaccggagattctgatcgcttccaaatatccgatgatcgaatctttgaatcagataattatgggaagttttccacttcatcatcatcatcatcatcatcttccatggttgctccttctgctagtactaagattattttatcaaccggagttcaatctcctgctgtctgtcgtttgactcctcgccgcgtcgttacatgaaaccatcgcatacttatgggttaatctagggtctgggaatttcatgtatgtagaaaatatatatgtatttctggttacgttaatcattatgtatgggtacttaa

SEQ ID NO: 2327 - DNA, 357 bp, Gossypium hirsutum
  unsure (1)..(357): unsure at all n locations; Clone ID: LIB3083-055-Q1-L1-A11
cgagttttgtttttttagaacgggtaaaatctgcagactaagantatttcaaaggatgtaaacaccaatgaaatatgtatagttcatagcattgtttatgaaaattacacactgctaagaataaaatgggtacaaactgttcaaaacttagtcaatagacatgtttcagtccacttacttgcaatgatttcaattctaagaaacacataatatcatcaacaatcaatggaaatgcagctctgtgacacggtagtgctatcggcggtgctgacaaacgggttgatccgaacccaaacaatacagaatacataaaccaacaacactgaccaaaggacaacaattgttggagtcctgttt

SEQ ID NO: 2328 - DNA, 159 bp, Gossypium hirsutum
  Clone ID: LIB3083-055-Q1-L1-A3
aagaattccattcacttatacctactttaccaataacatagactagtggtaaatattcaaatgtcattcaaagctaaaccctacatagatcccactcctatacatatactacaaattctttataaagacatcctaagtctcaatcatatatctacaacc

SEQ ID NO: 2329 - DNA, 218 bp, Gossypium hirsutum
  Clone ID: LIB3083-055-Q1-L1-A4
acttctgagtcatgataatatacactgtcaactttgatcatcatcaaccaatcactctaaatacttaactatgaaactatattaaatctactcgctaattgatgacatatgacaaggccttaaaacattctacattcatgcttctatatccggacttagcacatatattacacagaacctcaattaaacacatcctctatacatcataagctctacac

SEQ ID NO: 2330 - DNA, 260 bp, Gossypium hirsutum
  Clone ID: LIB3083-055-Q1-L1-A5
tactttgacactgtgcgcaccagcttactgctgttaccctcctatagatatccatgaaaggtcctttttaccttggcaagattacccctatcattaccaaaagtcaggacagaggtactgctgtgaatagggctgcttttcaagcggcattctcccttttatatataaagctatatcgtttcaatggcaattgccttccgtgccttttcaatcaaaagaatatgcacctacctagccagcttatttaatcttccaaactt

SEQ ID NO: 2331 - DNA, 383 bp, Gossypium hirsutum
  Clone ID: LIB3083-055-Q1-L1-A6
ccaagcattgcaaaatgtgcatcatacctgaatgtgctaagttcggtcctcaaaacttcatggcaatgttcaatgtgcactgcacacttttattttcttcagtttggtatctaaatctaaactttgaaactcgatttgatctacacgccaattgtttacggaggacaaggtgttaatgcatactacattcaagcttatatagccggagttagtgcataaaaaaaaaagaacgtgaatcaaattcatcgacatacatgaaaagctctacacatgcatcaacagaacagttaattttagggttgagagaagaaagagttaaaacccacaacgattcctcaaccaatgtctttgccttcgccttctatcaccattctctctacacc

SEQ ID NO: 2332 - DNA, 134 bp, Gossypium hirsutum
  Clone ID: LIB3083-055-Q1-L1-A8
aaaaggttgaaattttggaacatgaacgggtttcaacctggctagacacatttggctgatgaaactaatcatggggaagggttcattacaacttattaaacttggaaaggccacaaatgtatttgtttgggaag

SEQ ID NO: 2333 - DNA, 391 bp, Gossypium hirsutum
  Clone ID: LIB3083-055-Q1-L1-A9
gcttacaattttttttatataatttctgttagaaaagaacccagttcacttttcagttcttggtaccttggctgaccatttttgtttgaattgcaggttaccagggtttagccattgcttttcatttgaagctctcctccccattgtttttaaggtcatatatttattatatattatcagcacaaaaagaaaaaaatgggtctctcaagtcttccagctccatcagaaggagtgttatgtatactcttggtaaacacagctttatctatatctatagttaaaggcataatccgatcgatccttcacgttgtcggtatccatctcccaccaccatcatcggattacactgaaaatctctcggaatcattcgatttccaccttaatactcctg

SEQ ID NO: 2334 - DNA, 364 bp, Gossypium hirsutum
  Clone ID: LIB3083-055-Q1-L1-B1
cccttcctcaaccttatcacgcctctatgtccttcgacccacgcatccgaaagaaaatgtcgcgtgcttcacaaacaccaactcactcacacacactcagatatctacatttagctatctacataatagaaatcacaaagaacatatataaactctttcccactccgaatacaataagcatataactacatcgcttggactcaattcctaggtgctactattcaacctcattcaaacgatgttaaataaatacttcaatctgactaccaacaatcaattatttaataaagcttaagagataatatacacaatgacatatagacttcattccgctcagaatcacttccatgtgcctttttaacta

SEQ ID NO: 2335 - DNA, 286 bp, Gossypium hirsutum
  Clone ID: LIB3083-055-Q1-L1-B10
catcagccatatcaagcctcgagttccgtcgacccactcggggcgtaattaaaggagagggatccatagaaatccccacatatgttcaacgacttcataatcgataaatatatatacaacaatccttactattttatacaaaaacaaaatcattccaattatttctttcatatatatataattattaatctttctctgatatcaatctttgtgaataacgccagtaatctcaacactttgataagctgagactatcaaatcactaggtcatgatttctaaaacatt

SEQ ID NO: 2336 - DNA, 355 bp, Gossypium hirsutum
  Clone ID: LIB3083-055-Q1-L1-B11
aaaaatccaaaatatatattgaaaaatttaaaaggacgtatacattacatttttctatatcctatacaatcaaatcacccaatttacaaacatattacctccctataaaaataactacacaactttaaaatataaaattaaaaaaacaatatcaaaaagtaataaaataaaataaacaaccaacctttttcttcttcattgtttctctttctcaaaatattctcctctatcacaaattccatttccaaatcttaattcttaaattaaccttacattttgcattaaaactttaatctttctttactcattttgcctttaatgcaaaaactataatcccttcacaaacaacccttat

SEQ ID NO: 2337 - DNA, 406 bp, Gossypium hirsutum
  unsure (1)..(406): unsure at all n locations; Clone ID: LIB3083-055-Q1-L1-B4
cgctttacaatctagaactagccgatacctacacctattcgaatccagcacgaatctaacaacttacacctactcatctccaaatccagcattcgcgnctatctgctccagctttctgaccaatctcacaagctctctaagactataatcaagtacctgccgtgtctgaaaaagtagtaaccggaactgtgaactgatcatgtctgacatcatttctcaaattcaagcttccaaagactcaagcaaattatcatatataagccgtgcgactacatattctctgccaacttcttcatcatactcatgcaagatgacattttataaacaacatccaagatcctttaaagagaatcgttacatcatgaatgccacacgttttacaaatccacatattgaaaggcaatat

SEQ ID NO: 2338 - DNA, 390 bp, Gossypium hirsutum
  Clone ID: LIB3083-055-Q1-L1-B7
cttctacactcttctctggtaagttcatcgaaagatcagagcaagatccctgccaaaatgaacgacgctgatgtatccaagcagatccagcagatggtgagattcatccgccaggaagcggaggaaaaggctaacgagatctctgtttccgctgaagaggagttcaacatcgaaaagcttcaattggtggaagcggagaagaagaagattaggcaggagtacgagaagaaggagaagcaagttgaaatccgaaagaaaattgagtattcgatgcagcttaatgcatctaggatcaaggtccttcaggctcaagatgatgtggttaatgctatgaaagaatcagcatccaaggaccttctcaatgtgagccatgatcaccatgtttacaaa

SEQ ID NO: 2339 - DNA, 401 bp, Gossypium hirsutum
  Clone ID: LIB3083-055-Q1-L1-B8
tttggatctaggagttgaccctccatcatctcgtgatccaggcattgcctgctgttgttccagcttctcacagtctcacaagctctctaggactagaatcaagtacctacggtgtcggtaaaggtagtaaccgtaacggtggtctgatcatgtctgacatcatttctcaaattcaagcttccaaagactcaagcaaattatcatatagaagtagtgtggcaacagagtctctgccaactttttcatcatactcggccaagagggcatttgaaagacaagatcgtggttcctttgaagagaatagtgacatcagggaagccaagcggtttacaaatccacatattgaaaggcaatatttggaaatgccatacagagatgtaagctctatggattcacataac

SEQ ID NO: 2340 - DNA, 406 bp, Gossypium hirsutum
  Clone ID: LIB3083-055-Q1-L1-B9
ctgtatatgaagctctgttagcttagtgcaatccaagatttgggtacctacgcgaaaatggaggatgattaagaaggattttccaggctatctttgagttgaatccctacatgactctttttcggcgcataaaccattgagggagcttcgagatatacagggtgtacaatgattataaagatgagaagtccgatatgaaaatgggggacatgctaccaacgaagcttgatgaggagcaaatggctgaactacgagaaatattttcttctttcgatcggaacaactatggtagcttaacacagctggaactgtggtcgctcgtgcggtccttgcggctaaaaccgagccttgaccaggaggtagcccttatacaaaaagctgattccaataacaatgggctgatcca

SEQ ID NO: 2341 - DNA, 393 bp, Gossypium hirsutum
  Clone ID: LIB3083-055-Q1-L1-C10
taccttgctagcacgaattaccctccaggatccttatcatgccttgagggccgtctacccacccgtgcattatgacaggggggaattgcattcattctattataatcgggctaaattcaataccattattacatcgatatttacaatctagatctacgaaacgtcctgagtactactaagacaatagtcttggcattaaaactctcattattgctatacttgactaccacatttaccacagaatcccttaatctaaacatttgatttatccagtcggaaatgtcttaaaacacattctaaaaattatatgctgatttaccatgtaatactgcatgcactattgcactacataccttaaaacaactcgtttaaaatgatgccacatagcatatc

SEQ ID NO: 2342 - DNA, 221 bp, Gossypium hirsutum
  Clone ID: LIB3083-055-Q1-L1-C12
cccctcctacatttcgacccccaaaaccctccatcatccttatcatgcctcgatgtccttcgacccactcgtgcgcaccatcaatagtaactttcactaatacatattacaactctaactcttacaaaaccatcttattctccatcactactatacatttactcataaactcctagacttctcattcttcataatatttatcttacatacacctacttaat

SEQ ID NO: 2343 - DNA, 424 bp, Gossypium hirsutum
  unsure (1)..(424): unsure at all n locations; Clone ID: LIB3083-055-Q1-L1-C4
cttgctaagaaatatcatgcatttttggcctctgaatctggcatcaaacagatcccccgtctcttgggtcctggtctcaacaaagcagggaaattcccaacccttgttactcaccaggaatctttggagtccaaagtgaatgagacaaaggcaatggtgaagttccaattgaagaaagttctttgcatgggagtcgccgttgggaatgtagcaatggaggaaaagcagatcttccaaaacgtgcaaatgagcgtcaatttccttgtttcattgttgaagaaaaactggcaaaatgtgaggtgcctttacttgaagagtaccatgggaccttcaaacaggatcttttgaattatgcatggagtgaaatcatttttttaattgagaatgtttcaaaaaattaattnggttatttgattgttggaaa

SEQ ID NO: 2344 - DNA, 273 bp, Gossypium hirsutum
  Clone ID: LIB3083-055-Q1-L1-C5
ctaatatccactgctccacactttccatcctcctatctgggcatgggcatttctagttccatctactctgaacaatgacctcttgttaagaacaatcctcattccttactcacagctgtgaatactttaccatttaccatctctagatacgacataaaagtctttcactcttaataggacctaagttctcacgcgattaatgataactattgcctatgctctctagactcactgtccacacaatgctgtactagttcattctgtcatacctac

SEQ ID NO: 2345 - DNA, 398 bp, Gossypium hirsutum
  Clone ID: LIB3083-055-Q1-L1-C6
gttggctatatgtggtatgaatgtatttacaagctggacaaggtggcttacaacaaatatcacccatacacatcttggattcctataactgtctacatttgcttgcggaattgtactcagcagcttcgaagttacagtttgactctctttgcgtggcttggcaagataactctggagacttacatttcacaatttcatatctggttgagatcagacatgcctaatggacagcccaagtggcttctttcttttatcccggaatatcccctactcaacttcatgctcacaacagctatttatgtcttgatatctcatcgtctgttcgacttgaccaataaacttaagtcagttttcattcccacaaaagacaaccgacggctgctatataatttcattgc

SEQ ID NO: 2346 - DNA, 440 bp, Gossypium hirsutum
  Clone ID: LIB3083-055-Q1-L1-C7
atagaactagcgcatacgacccttcgaagaactatcacgactcgaagctcacttacacgcagctctattagtacagttgaagacaggtgtggaaccattctttcaagcagtcatgtcacttcaactgtgaaggacgtatcggatatacgaccttcagatgaagttgatgatgaacctgaagtacatttctcttcagaaaaggcctcctcagatttaggttctaccgaactgctgaaaaccactgattttaaagcttttaagtctgacgtgcttacttattttccctcaagttactatgatgctgtcctacttacatctattgagaatgaaaatccgaccaaagcatgcctagaaatggttggagagttacatgatcctgcggttgaaagtacaaaacccccagcactatccggtgcaaacgtcatgaacatcatattagt

SEQ ID NO: 2347 - DNA, 389 bp, Gossypium hirsutum
  Clone ID: LIB3083-055-Q1-L1-C8
gtggagtcaattcgtggttgcggtgactattctggcggtgggcctgctttcggcatcagccaccgctagaccctgcaagacattcttcgtcgcctcctattctttctcttttgaaaaccctaacgacccttcttcctccaccggattcgtcaccgtcttcaccgagatcggtcaattgaacgtcgtaccaccaagacccaagccctccgatgtcttgagctctctccgtgagcgcagtaaggacatccttagcgtggtcgtcgctcttctcttcggcgtccgtagcggcgctctcacgggggctaccctctacttggtctggaccctcttctcggccccgtctgattatcatcgtgctttgttggaagatgatgagagcgacggagaac

SEQ ID NO: 2348 - DNA, 258 bp, Gossypium hirsutum
  Clone ID: LIB3083-055-Q1-L1-C9
aaccctcttcatcttaagagctgtccttgtgctctttctaaagtaactaatctcattttacatccacaattaacaaaatctcaaaatctttcaaataaaaaaacacaattctaaatccattgccatttgtcaaaaacactggacctgatgaccgaaaaatttagatccacgaccttactgcaaaaaaaacccttcgctatattcaaaccaacatcgctgatatgcataagcaacatatcatgcttaaaacgatcactg

SEQ ID NO: 2349 - DNA, 400 bp, Gossypium hirsutum
  Clone ID: LIB3083-055-Q1-L1-D11
ggttgctacaaatgaagagggtgatgctacagacgaacttctaatgtactggaacgaggatgaatatgaagaattcaacttacgaattgttcataggaaaaacaggaccggattcgaagaaaacaaggacctgcctattgtgctaaatagtgtcattgctggaagatattacgtaacagaatacctaggttcagctgcttttagtaaggtcgttcaagcgcatgatcttcttacgggaatcgacgtttgtttgaagatcattaaaaatgacaaagattttttcgaccaaagtttggatgaaatcaaacttttaaagcttgttaataagcacgaccccggagatgagtaccacattttgcgcctctatgactacttctatcatcaggagcatcttttcatc

SEQ ID NO: 2350 - DNA, 403 bp, Gossypium hirsutum
  Clone ID: LIB3083-055-Q1-L1-D12
actggtgtgaacccaaagtagcattatgccggatactgataaaagagctatttacagaagagctgaaatctctccggagaagaaaccaatctccatgtatatatatgatatgatatgatcctatatcaaaggcctcagtatacaggcttcaacttattacaaagacttttcactaagaaacaaaagaagaccaaaacccagtatacaatattaaaattttctgtgtgtataatgtgtaaaagcagctacctctataatttcctatcagttgaagcgatgatcttgataacaaggccggggaaaacatcgtcagggtcatggatatgcgggttccgctcgacgataaacggatcgccacacttgtcgctgatggagtgaagggtttcaccttcgccaacgacat

SEQ ID NO: 2351 - DNA, 370 bp, Gossypium hirsutum
  Clone ID: LIB3083-055-Q1-L1-D2
tcacgactggaggaccgtcgacccacgcgtacagtgcagacaactggggccaaggatccgaacatggctgcgctaaaactggctctaaaagccatggactgactcgcgattgcataaagcatacgctagaaccaaaaggccattgatagatacctgaactcctggaatgagaccctgacctgcaggttgcctgctatacctgagaatacaccagctatcgactgcgcttactacgaagccaatgtatccaacgctgtctcgatggatagaccttgacaagaagcctagatgcgctgaacgttaccgtgccataggataaacatactgggcatgaggatgccgctcaagaagaagatgcgaaatcatgtgc

SEQ ID NO: 2352 - DNA, 381 bp, Gossypium hirsutum
  Clone ID: LIB3083-055-Q1-L1-D3
catccgacggcctgcaagaattcatcacgactcgcttcgatttcctccattccttttacattgcctttacggggaggccattgactgtacgctgaaataaatagattaaaaaaaaaaaaggttgaagaaggtgaagagtctctgtttcagcttctttatctgtctttgcttaaaaaaattatttcttcttcttattcttttattgttgtgtaaatacgcttatgcgtaaggattgttctcctataatgctgggatcagattctgattcttttttttaactttgtctgaaaaatacgtttcttctccttgatttttgatacagatcgtttcattttcaccatttacaaagatccaaaacaattaatatccctcttttttaaa

SEQ ID NO: 2353 - DNA, 389 bp, Gossypium hirsutum
  Clone ID: LIB3083-055-Q1-L1-D4
ggatgtcagaggtaccattcagacctagggaaaagcttagcgagtatcagaaatattttcaaggcatccataaacacacttacttgaaaggtccttacgataagatcacatctgtcgccattcccgccgctctagcagcaagttccctgtttttaatcggacgagggatctataacatgtctcatgggattggaaaaaaggaatgagagctctcactcatggttagaagacatgtttttcatttctgggtttcattatagcatgaaattgcttgtttgtttgctctaataattgttaggcttttatgccaaatggagatcttaaaagataccctttggggatatgttttttagtttggttttggattctcttgaaagctaaatgataag

SEQ ID NO: 2354 - DNA, 430 bp, Gossypium hirsutum
  Clone ID: LIB3083-055-Q1-L1-D5
gtttcaataaaaaattgcagagcaagttgctgaagcatgcggaagcggaagaagacttggctttgaagcaacagttggagttatacgtagagagaatttatgatgttgatcctgaagtccataaagtagctcttgaaagcatgaggcaagaagtccgcacctcaatcagctccatgacttatgttccaaagctattgaagtttctccgaccccattacggaaccctaaaggcattttatgagactatgcttgattcagatttgaaggtattacttgttttgctttaatgatctttcattatatcttttgtaaatgtaatttggctaagcaatgcagggaaggatgattatgatggagccattatttaatattgggactttgttggtaatatacatgaaaattatttggcttttataatattgaaaatttt

SEQ ID NO: 2355 - DNA, 411 bp, Gossypium hirsutum
  Clone ID: LIB3083-055-Q1-L1-D8
gtgaaacactggcgtcctccgatcttattggcaagctcgggactgatgtcgagatcgatatttctcccgaaaagttccaccatatgtggtgccacaggccgcaccatgtccaccacactagctctgaaaaagtacaaggatgcgatttacatgaaggtgaatttggaactcccggcgtcgttatctgctggagatatgtgcatgatggaaaggctaaaactgctaagcaggtagttgaagttatggaccatgagaaaaagtcaataactttcaaaatgcttgaaagagatctgatcgatgaatacataagcttcgtgattacaatccaaacttcccccaagagcgacggtaaaagcaagttagtgcactggactctggattatgaaaagctgcacgaagggtatttgggac

SEQ ID NO: 2356 - DNA, 268 bp, Gossypium hirsutum
  Clone ID: LIB3083-055-Q1-L1-D9
tttctacccccattaccctccatcaaccttatcaacctctatatccttctacccactcgggctcttttctaaaggtttctctcaacatactttcccccttctcctaatctctcattattacctaacttataacacaaccatcttcaataatactaaaccccaaacttcaatctctcaccctaatttatctcctatttataacatcaaaattacttacaccccctctataactttacactcacctattactattctatcaaccttcctt

SEQ ID NO: 2357 - DNA, 407 bp, Gossypium hirsutum
  Clone ID: LIB3083-055-Q1-L1-E11
ttgcgacccccaggaccctccgtcaccgtacaggcctcgaggccgtcgacccagcgtgggaaattataagggtagagctcacatgttactgattcatctctcactttaactcatactatacattcttaaagtacttgttatatgataatattattactgttcctctcatacccagtgatcagtcctcagacagcccttctgttccaccattcagtgcacttaccttatatccttcctcaattacccttagtcatcatccccacactatattcctgaccttaaggactctattgtacattgctctaaattatctaacttgttgatatgtcctatactgactaaattgaacaccttaatattggtgcaatctattaatatctgccttaatatcagtatcttactcttat

SEQ ID NO: 2358 - DNA, 421 bp, Gossypium hirsutum
  Clone ID: LIB3083-055-Q1-L1-E12
tacgttgggacgcccatataccctccgtcatccgtatcaggcctcgagtttcgtctacccactcgtgcgcatatatattggggatatagtatactgtaataatttatctgtttgaaaattactataaaacggtgttttctgatcggtttttgtttcctgcttaccatatgattgtaaattgttttatgtattaatcagttaatgctaattatttttgctgatgtcatatgttaaatagctataaattccaacaaccaactggtgtgtaaaaataatttaaaatttcctttactgaaaggtatttcccatttttgttgtgaaaagaatccaaatttattactttgtgttgtggtttttaaaatattaataaatgtctaagttattgtttgcataacaattaatattattttaaatttttaaa

SEQ ID NO: 2359 - DNA, 336 bp, Gossypium hirsutum
  Clone ID: LIB3083-055-Q1-L1-E2
gcgacccatacgacccttcgtcagcctcatcatgcctcgatggccttctacccactcattcgcatttctgagtccgggtttatatacttgtattcatatcaataagttacaacatgtgtggatcgactaaccttaccctgattactacactctctgctattcaatacacctatcagtgtaacgtgcattttaatactcaaatattgtcatgatgatctacttgaacataatacttattagtgtggtcacttattggctacagattttaaaaactacatgccgttatatatacctttactcttcaaaatttcttcatgatgcattactcttagaata

SEQ ID NO: 2360 - DNA, 309 bp, Gossypium hirsutum
  Clone ID: LIB3083-055-Q1-L1-E4
cactcaaaaactacactctagactattacttacatactaaacatacacgcacatttgcagggtaatataacttttatacacagattacatcctattctattactatcaacgtcataagtaaaaatatttacctcaatatcaaaaaatctccaacctaacagaaactgcttcaacaaaccttcttctacataactcttttgttctcaaaaaatccactaatccttctttaaatcaactgatcgaaacactgttaatcctactattccatccaatcctcatcaaaaaatactagtcccattactaattata

SEQ ID NO: 2361 - DNA, 153 bp, Gossypium hirsutum
  Clone ID: LIB3083-055-Q1-L1-E5
tatatattatctacatactattctgcagcaacatattcagaaccaaacaactatttgtcacaagggtcatacaagcctttgcatcaggctatatacttggaaccatatatctcaacgtaggaaatgatcaatgaaggatatctgtacaaaccc

SEQ ID NO: 2362 - DNA, 252 bp, Gossypium hirsutum
  Clone ID: LIB3083-055-Q1-L1-E6
ttgatacgctgaactccactcgttccatacttgcgccggggtttggtttcagactctaatcatggtatccaagcacaatccatcaggcaacaaagaaccgctcccactatctatatgtgctcctactgacactgcgagctcgcttctacattccgtatacatcgcatcacattggttttactgtaaaccatataccaaatccttggatgtcacacatcacgcatactgcaatctcttaacacatactagact

SEQ ID NO: 2363 - DNA, 395 bp, Gossypium hirsutum
  Clone ID: LIB3083-055-Q1-L1-E8
tctaggcatcggacccttgcacatccggatcaaccctctagagccttacttccacgcttaccatacacgcacagggagagggaaagagaattgttgtaacagagacagattcatatattttaacgtatcataacaattatgaccaataacaatatatcggaaacttaagcagaggcttgtttaaacacaaccacttctacttatctatttggttatcatttcaatcactaaaactaccttgaatcaactactcaaaacaaggatgagactccccttacaaacatacctaatctaaccatccgattcccattaacacacatatcacctaactcatcagcaccgtttccagcataattaccaatattaacgatttcaccatcccattatcataaaca

SEQ ID NO: 2364 - DNA, 344 bp, Gossypium hirsutum
  Clone ID: LIB3083-055-Q1-L1-E9
tacactaattccacaccatcattcttttaatttaacatatacaaattatttctacagcttatcttaacagatcgactaaccatcactactatacctccatatcaaccattaaattctctacttcctatactctctactacctcccatcccttaccatcttttaaaccattaccctcctccttcactatttcatctcctaccaactctccctatatttatacctatacaccctcctatcccatctcacttacctttacaatatcctaaacaacctacaaatatatacctacattttctacattattaattcttaaatcttacctcatactctctaatattacctc

SEQ ID NO: 2365 - DNA, 405 bp, Gossypium hirsutum
  Clone ID: LIB3083-055-Q1-L1-F10
ttgcgacccccaggacgctccgtcaccgtacaggcctcgagtttgtcgacccatcaggcgaatttaaaaggggataatgcatactgaaataacttatccatttgaaaatcactataaaaccgtgttttacaatcaccctttgctgcctacataccatataattatcaaaacttacatgtattattcacataatgctaaatatactctctgacatcatatgcataacaactataacttccaacaaccaacctgtgtgtaaaaataatttaaaatgaactttactaaaatgcattacccatttttgcggtcaaaagaaaccaaatttattactaggggcaagattctgtaaaatcttaacaaatgactaagttaatgattgcccatcaatagatattattttaaatt

SEQ ID NO: 2366 - DNA, 174 bp, Gossypium hirsutum
  Clone ID: LIB3083-055-Q1-L1-F11
cccttaaattatttctctataaaccacaattcctaacctcactctatcctacaagatccacacgatactctataatgagacttgccatcttatcacagatagcctcaacatctcttccaaactccactccatcattgtctactatcacaacccccacatggactcccacttata

SEQ ID NO: 2367 - DNA, 375 bp, Gossypium hirsutum
  Clone ID: LIB3083-055-Q1-L1-F12
ccaatgaccctccatcagccgtatcaagcatcgatggccgtcaatacacgcggggcgacaaacctgggctagaaacagtgatggctgagtggacaaacctacagcacctgttctatggacagtatgaaagcatagtcaactctgaggtactctggaagctgctccaacatggcatcaatgcagatgacaaacgagtacaggatattcgtgtgaaggcagacgagatctacagcatggatgagggcatacgaacacgtctaagtcagccaaaaaaccataacgctggacaaacattactttgctgctcaagatactaaagctgatcataaacgagatctgcaacataatagaagctaatgccagatgacaggccac

SEQ ID NO: 2368 - DNA, 225 bp, Gossypium hirsutum
  Clone ID: LIB3083-055-Q1-L1-F3
aaactaatcgatcccacccctacaaaattcatcacgactttattccttacacccacaccttcctacctcatgggaacattttttcaaactacttcatttcccatatcaatattatttaccacaatataactcctcacatatattataacttcatatataaacttcactatctattcataccttcctatcaaactacctatttatatcttctctccatctttacta

SEQ ID NO: 2369 - DNA, 380 bp, Gossypium hirsutum
  Clone ID: LIB3083-055-Q1-L1-F4
gtctcctactcatggtaagggcattgaatggggaggtgagcatgggtataatcaaacaactataattgaagatccaaactattgggattcgaatagtaggaaaagcataatgaaggtgattgcagaagagttcagtaaattcaagcttcccatcacatttgtcaacatcactcaactctcaagttatcgaatagacgcacacacatcgatttataagaagcaatggagtccattaacagcggagcagctagccaacccagttagctatgctgattgcgtacattggtgtttgccatgcctttaagacaacttggatgaacttctctttttcaaagttgactatcccttgaaaatatatattcattttctatcatgaaatt

SEQ ID NO: 2370 - DNA, 398 bp, Gossypium hirsutum
  Clone ID: LIB3083-055-Q1-L1-F5
aaaaaaaatctttacagactctatcttctaaaaacaaaactgaaggtgtcttgctgcggaggaaactgtggctgcagctctggttgcaagcgtggcaatggctgtggaggatgcaagatgttccctgacataatagagaagactacaactgagactatcggtcttggtgtgacaactcagaaaatgcactttgagggatctgagatgggagtcggggttgagaatggatgcaagtgttgagacaactgcacttgcaacccttgcaatcgcaaataagaaggggggaaaatgaacaacagagagaagcagagaggcctttgtctttttaactaaataaattctattactttaggatgtatcagcaaatcttcatgaggatttggttcttaattatgtgt

SEQ ID NO: 2371 - DNA, 373 bp, Gossypium hirsutum
  Clone ID: LIB3083-055-Q1-L1-F6
tttttatttttttacttaaatgaaactgcgccatattatgggtattgcattttactaaagttcccctaacaaagtaaatgagctcaatataacacctgtaatatatgataaagtgatgtaaaaggtccaattctttcttcccctgcctctcgggttaccgatttacatcttcaatccagctttacggaagagaacaagtaatgcacaaaccagaaagatgaaaggaacccgatcgtgccagtggccaacatgattgcgaggaccatgaagagagaataccccaagtagagagttgcagagaccggtccactcaaactcttgagatcgaatatgaggtagtttacggagtataagaagatgtagatggctactg

SEQ ID NO: 2372 - DNA, 403 bp, Gossypium hirsutum
  Clone ID: LIB3083-055-Q1-L1-F7
gttgtgcaattttaatttgattgttttctgaaaagaaatgagttgtgtctctacatctgcttcgtctgactcttccgtatcttcttccacttcttggttttccggcattgttaggggccgcctagacaagtcctcttccctaaagatggctggcagctcctcctcaggtggcggccttgcctccaataacgaaggacccatcaagggtaagaaccagttccgtggtgtgctcttcaagtatgggcctaagtccatccaggttgcattcaaaactggtgactataagcaacaagttattttcattggtggactgactgatggatttctagcaactgattacttggaacctcttgcagttgctttggataatgaaaaatggtcacttgttcaactacttaatgtc

SEQ ID NO: 2373 - DNA, 214 bp, Gossypium hirsutum
  Clone ID: LIB3083-055-Q1-L1-F8
attcagagaggaaagactgggaattacccactacaaataccttcataaacaagttcacataaagcttaataagttgagtaccaattaacgttgaaacaactataatgcatcaaaaatggaacataaaattatagagaaaaaaactattaaaattaagcataacaaacttaatatttaagaacccattaaatccatggatacccaccccttaaaa

SEQ ID NO: 2374 - DNA, 401 bp, Gossypium hirsutum
  unsure (1)..(401): unsure at all n locations; Clone ID: LIB3083-055-Q1-L1-F9
tggatccaaacgatctgcangaatttttctcttaaacaaattaacaaatttatcgaatccttcaaataaaggaattttattatagtgactctctcaaacattacaacatatcaggaacattacatatatattaaccacattataacttacacaaatatacacttaataacactataaatcatcaattctttgcaatattaacaaaacagaataaacattctttattacaatcacaaaaaaataacctaataagtttttcccttaaattacaaaactcaccataaactcaagatacgaaacttatctccaagtcaatatacccattctcctcttatgcaaccaacttacacatcttttcttctttccaaaactcatctttgaattccaaaagataaattcca

SEQ ID NO: 2375 - DNA, 395 bp, Gossypium hirsutum
  Clone ID: LIB3083-055-Q1-L1-G11
caacatttgatcccgcttttcgctatctcatttctctggttttcccagctgcattgctcaacaacttcagcccaagctccggctcagtctcccgcaccacctggtccaccagacgtcgccaaaatcctgcaaaaagccggccaatactccgtcttcgttcgtcttctcaaatccacccaagtctccgaccgtctcattggcgagctcaaagatacagatgatgggaagaccatttttgcccccactgataaggctttctccgccctcaaatctgttgccttgaattcactcaacgatgaacaaagggttcagctggtgctatttcacgtcgtcccagattatatcccattttcccaattccaaacagttagcaaccctatgagaacacaaagccg

SEQ ID NO: 2376 - DNA, 415 bp, Gossypium hirsutum
  Clone ID: LIB3083-055-Q1-L1-G12
ttttcttccaatgttaaaggagttgtttataggcataactgaagttccagttatatgtgcaggggaagtctctttgtgggttttggctgcaatgaaagatgttggacttgggttcttaattggagtcggctttgctgctttcagcttcgtttttgccttgggaactatagtaggagcaatgaaaggccaaacgactgaaactgggtcgttcagtgggactggacttggcgctgttgcaggtgcaaccacagaccttcaattgcttgaatcattggctgatggggagttattatcacagatcactgtattagttaggttagtgagtgagaacgtcttcattgcatgggtgaattcagcaatgctaaaagcttttcaatgggaaatggagcaaagggtttgtcaagaagttggattc

SEQ ID NO: 2377 - DNA, 381 bp, Gossypium hirsutum
  Clone ID: LIB3083-055-Q1-L1-G2
tagttctaatgatttatagttttattcagaagggaaaagctgggaatttcccacttgaaattccttcataaaccaatttacctaaaacttaataagttgcatacccaattacgtttaaacaactataatgcttcaaaaatttaacatcaaattatagagaaataagctatcaaatataagcataactaacttactattgacgaacccatctaatccattgatacccacccgttaaaatcttcttcccgatccgacacctatacctaacccgatttttagaaccgtaacagcaaccggatctaccttaacaaggccttgaatatcatccatccctataaccgaaatcatatcgagagcttccttatcgactttcatttgatc

SEQ ID NO: 2378 - DNA, 394 bp, Gossypium hirsutum
  Clone ID: LIB3083-055-Q1-L1-G4
atgcacgcagtaagaagtccgttacactatacattgtagtcgctgtcctgggaggattgcacgagccagatcgttatgttttgatggggaatcatagagatgcttggacatatggtgctgtcgaccccaatagtgggactgcaacactccttgatattgctcgaagatatgcccttttgatgcgaaagggttggaaccctcggaggacaatcattttttgcagctgggatgctgaagaattcggaatgatcggttccacggagtgggttgagcagaaccttgtaaatcttggtgctaaagctgtggcatatcttaacgtacattgtgctgtgcaagggcctggtctttttgctggcccaacatcctagctagataatcttattcttgaggtcac

SEQ ID NO: 2379 - DNA, 405 bp, Gossypium hirsutum
  Clone ID: LIB3083-055-Q1-L1-G5
tttcagccggctttttgccaagaaggagatgcgaattttgatggtgggccttggtgcagccggtaagactaccattttgtacaagctcaagcttggagagattgtcaccactattcccaccatcggatttaatgtggaaactgtcgaatataagaacatcagtttcactgtctgggatgttggtggtcaggacaagattcgtcctttgtggaggcattacttccaaaatacacagggtctcatcttcgtggttgacagcaatgacagagaccgtgttgttgaggccagggatgaattgcatagaatgttgaatgaagatgaactgcgagatgctgtgttgcttgtttttgcaaacaagcaggatcttccaaatgcaatgaatgctgctgaaataactgacaagct

SEQ ID NO: 2380 - DNA, 371 bp, Gossypium hirsutum
  unsure (1)..(371): unsure at all n locations; Clone ID: LIB3083-055-Q1-L1-G6
tgtgatgcgaatgaatgaagggtatatcaaggaaggaagcgcgggtagtgtaatgggagttgttcacagaaatgacaatgtgcttatgattgttgcttcgcctgagccaattacaactggatgccagtgggccaaatgtatcttaccagcaagtctcgagggtattgtattgagatgtgaagacacatcgaatactgatgccataactgtttagtagtatgtgcatcgtaagctcttttcataaacacaaatttattctattttttcccctttctattaaatatctggcgatgatggtggctgtggtaaggtcgactgatgagcatgagcccctctggtcgttattatcctttntaactgtgtatagcttt

SEQ ID NO: 2381 - DNA, 376 bp, Gossypium hirsutum
  Clone ID: LIB3083-055-Q1-L1-G7
tccaatcgaacgaaataagacaacagggggatagttcatttagggttcttgtacacttgagggcaacaagatttgtattggaatcaatttcgagcgaatggtaaaaaagaaatgaattcaaaacactatgcagcattcgtagtctccatgggaaaaggcagatcaccagcaaaacttatttttccgcaatttggcttcctcttgtctgtctaggtaagcaagcagttcttcttgcctcatcaaagcatcatgaagagccttcttggcaacaattaactctgcttcaagggcatcaactcgacatacagcagcattcaacaattcctctttatcataaagcatcacagatggctttgcttgtagtgtatcaactttc

SEQ ID NO: 2382 - DNA, 374 bp, Gossypium hirsutum
  Clone ID: LIB3083-055-Q1-L1-G8
cttcatcactgtaagaggtctaaaatttcacgttgcagaggtcggtgaaggttctaacgtggtactcttcttacatggattccctgagatatggtattcatggcgacaccaaatggtagctttagcgaatgctgggttccgtactcttgcacccgattacagaggttacggactctccgacataccacccgaacccgaaaagacaacctttgccgacctcgttgccgaccttgttgctatcttagatcacctgggaattaataaggttttcgttgttgcaaaggattttggggtcaggcctgcttatctgttaactctgcttcatccccatcgagtgtcgtgtgttgtaacattgggtgtcccacatgttcctt

SEQ ID NO: 2383 - DNA, 409 bp, Gossypium hirsutum
  Clone ID: LIB3083-055-Q1-L1-H11
ttttcttcagctctaagcgacaacaacaatggctgacttcaagaaagccggtgctttgattctgacagtggctttgcttgtgaatctcgctttaatggttgatgctgatggtgatgatgataagaagattcgagtcaggaaacataagggtgagaagcagtgtatacaaggatgggaatgttcctactggtcgaaatattgttgcaacaaaacggtttcagatgtcttccaggtttatcaatttgaggacctgtttgctaaaaggaattcgccggtggctcatgctgttggattttgggattaccattcttttattttggctgcttccatttatgagcctttgggttttgggactactggtggtaagcgtatgcaaatgaaggaagtcgcggcttttcttgcacatgtc

SEQ ID NO: 2384 - DNA, 396 bp, Gossypium hirsutum
  Clone ID: LIB3083-055-Q1-L1-H2
cggagtcgacgcgtcgaccctctcaccaatcaccgggcgggttcttggatgccaatccaaatatgtccagccttccgaagcgttctcaatgttgataaaaaatgaaaagagtttggaaatcctctacaacaagaaccagacagaaatcggagctgctgtgactggcattgatggtggagctccctatttctggtgtgtgctgttgagcaacggtaagcacaacagttgctttgatctggaagacggtgtggctaaaatcagcagacctgggtgcttcagtcgtgccaatgatgattgcagcattactgatggcccatccccgattggtcataattgggtgtatgctattacagctttcattgctatgggatatgccttctgcttatgatcataacc

SEQ ID NO: 2385 - DNA, 347 bp, Gossypium hirsutum
  Clone ID: LIB3083-055-Q1-L1-H3
gcctacgttgcgaccgccagggacccttcgtcagccggatcacgcctccagggccgtctacccacgcgtcctactagagattgtgcgagcaccttcttacgtaatagatgttctcgtccgacgcgcatctgtcgctgaccaacatgttcaacacaccacatatgcacctgatgcacgatggtctaatgcacatcagcatcatctacgcaaggcccacgtgccaaccgcatcgccctcgcaaactaacattcgacatcctggaacactacacttgtcaattcacgctacacgaaatataacacactgtctcactttaatcatcactttaattcatttctaacacacaa

SEQ ID NO: 2386 - DNA, 373 bp, Gossypium hirsutum
  Clone ID: LIB3083-055-Q1-L1-H4
actacgtggctacccccaggtaccctaattcagcccgatcacgcctcgagggccgttgacccacgcttcctatcagtggttgagggatcgccttcttaggtaatagatcgcctcctccgtagcgcatctcgcgcggtctaacatgttcaacactccacatatgcttttgatgcacaacggtctctgggacttttacatcagctccacaaataccacttgccagcccttgatccctcgcaactctgcttacgacaacgtcgaatagtacctttgtgaatacagcttcgcgaagtattacacactgaccatctttgatggggtcttaaaatgtcttcttactcacactagctatgaatgcatggatttattgaaa

SEQ ID NO: 2387 - DNA, 350 bp, Gossypium hirsutum
  Clone ID: LIB3083-055-Q1-L1-H5
cgcaagcactaaatttaaagctcgataatactttattttgagaaagataaaatgccgatttctcgaatcgcagtcggctctcctgccgaagccggccaagctgatgcactcaaggctgctttagccgagttcatttcagtgcttattgttgatttccacggtgaaggctcggccatggctttcaacaagttgaccgactattgctcctcaacaccggcggctttagaagctgcagcattgactcacgccttggcgttaccagtggccgtatctatcggggctaacatttcctgcggacacgtaaaccccgtcagaacgttcggtgcattaatgggtggccacattacatt

SEQ ID NO: 2388 - DNA, 388 bp, Gossypium hirsutum
  Clone ID: LIB3083-055-Q1-L1-H6
ggcgcctactgctgcaatgctgattcttccccatctcggggaaactacttcaccggtcgttcctacttcaccgccaccggaggtaaaggcctctgctttgaaatggattgcactgggtaaaagcttttttgttcgaacaaaatctgggtctattagcaaagagtcaaaaatggaggttgaccgttgtttatgtgctgattctggcttggaaaacaggttccttgaagcctttgaactcagctggtggtaaggtaatgatcatgatccatagttgacgggtcgggcaaaggcttgcttgtaaatttatcactctaatgttggttttcattgcaccaactcttgtaattacagccaattttctagtggaaatgtaatcctcaaacttcag

SEQ ID NO: 2389 - DNA, 419 bp, Gossypium hirsutum
  Clone ID: LIB3083-055-Q1-L1-H7
gagaagtgcgatgaggtagcaacagttcaccactcagagacgccgggaaagaagggtttcatggataagatcaaagacaaactcccaggacagcataagaaagatgaagaggacaccacccaaccaccagctgctgctgccccaattgagaacgaccaccatgaaggagagacaaaagagaagaagggatttttggtgaaaatcaaggagaaaattcctggttaccactccaaaacagaggacgagaaggaaaaagagaccactgctcccaattaatgaatcaatataatgcatttcaagtaaaagatgtgtagagattgtgtggcttatcaatttgttggaactgtctgttctctggttttctttttggggttgcatacatcatataaatttctgcgtctggttttcccctgctttgt

SEQ ID NO: 2390 - DNA, 385 bp, Gossypium hirsutum
  Clone ID: LIB3083-055-Q1-L1-H8
gcaaaactccgttccagttaatggcatcaatgaacaggctgcaacagctgccttgacaccagaaccagagccaactcatgacaatcttgcagaagacccattaacttacccagaagatgaagatgttaataatgatgctgaagtttttgatccttcggataaggaggaaggatcagtgattgaagatgaagttgttgaaccccaaaacattacaagtcctaatgaaactgttgtggttgttgattcacctcctgtggttttagaggatgctcctaagaaatcatatgcttcaattgtcaaagtaatgaaaactaatacagcgtctgctccggtctatgttcctaccaataatgtgagggtggcacctaaagaacctcactccatt

SEQ ID NO: 2391 - DNA, 468 bp, Gossypium hirsutum
  Clone ID: LIB3083-056-Q1-L1-A1
gaaactaagaaatggcacgcaagaagatcagagagtacgattccaacgcattgttggagcagcacttgaaaaggttttccgcctacaatttgcccatcaaatctgcacaagtgacggagtcaactgatttcaatgagctagtagagaaggagccatggcttttgtcgcagaaactggttgtcaagcctgatatgttgtttggaaagcgtgcgaagagtggtttggttggcttgaatcttgattacgctcaagttactgcatttgtgaaagatcgccttagcaaagaggtggaaatgagtggatgtaaaggacctgatacaacattcattgttgaacctttcattcctcacaatgaatagtactaccttaacattatcttcgagcgtcttggttgtagcattagcttttcacagtgtggatgaaattgaaattggattagaacttgtgacaagggttaaaacccttatt

SEQ ID NO: 2392 - DNA, 448 bp, Gossypium hirsutum
  unsure (1)..(448): unsure at all n locations; Clone ID: LIB3083-056-Q1-L1-A10
ggaaattgagagctctccaattttctccagaggatgaagtggaaggggaaattatattttagcancataggttactgggcaatgcagtttcaagaaaccatgttaccgataatttagtttctagggttgctaaaagtctaccacaggaggttgaagcatcaaggataaagatatgggatactatgcttgttaatcgatatctttatgagctaagagaagcaaagaagcagggccgtaaagagagaagacataaggaggcacaggcagtgttggctgctgcaactgctgctgtagctgcttcctccaggatttcatcgagaaaagatggcttggaagattctagtcatcaagagaatgtattgaagctgaatgcttttgttggaagggccggcattaactctcagacaagagcaaaagatgcactttctaggaatgctgtctcaaggac

SEQ ID NO: 2393 - DNA, 420 bp, Gossypium hirsutum
  unsure (1)..(420): unsure at all n locations; Clone ID: LIB3083-056-Q1-L1-A2
tgatgaggaaggtgggaggttgctggatgaaagggaaagtgagggaactgacaaaaagagggaatctgagaattagatcttgtcggtggttaattttaggatatgagatatggaaggaggtagcagataagggctaaagggagagtggttgggatgatgatcgtgaaggtttgcatttaaaggcaaaaggaaatgaggggatcggatttcttttgccccatttggctgcatttgggttttggtatgttgtgtttttaagcctccgttccatagactagttattatgctcatttcttaataataccaagggattgtgattcacatatgttgcttatttcacaagttaatgtatgttagtagaggaagaacaatctaaaatgccctgtactctgnntgtttttatttaaattgtatgtcttc

SEQ ID NO: 2394 - DNA, 427 bp, Gossypium hirsutum
  Clone ID: LIB3083-056-Q1-L1-A3
caagctttgatgaagccccttggccttctttatcccctggggcgatggagtttgtaaagagattgttgaacacggactaccgtaagagagtaactgctgctcaggctctgagtcatccatggttggcaaattgtcatgacataaagataccatcagatatgataatatggatgctcgttaaaacttatataggctcctctacactacgaagagcaacactgggtgctcttgcaaagacgttgactattccacagcttgcttatctccggtaacaattctcattgttagggcctaataaaagtggatttattctgatgcagaattttaagatggtgatgttggagaactctactgatgctatgaatgattctcgggtccttgattatgtcaacatgattagttctattcagtatagaaaattggactt

SEQ ID NO: 2395 - DNA, 455 bp, Gossypium hirsutum
  unsure (1)..(455): unsure at all n locations; Clone ID: LIB3083-056-Q1-L1-A4
cctgaacccaaaccacccgtatatgaacctccaaagaaggagaagccgtagccaaagccaccggtttatacacctccaaagaaagagaaacctgaacccaaaccaccagtgtatgaacctccaaaaaaacctccaatgtacgaacctaagccaccaaaaccaccggtttatacacctccaaagaaagagaaacctgaacccaaaccaccaatgtatgaacctccaaaaaaacctccaatgtatgaacctaagccaccgaaaccaccggtttatacacctccaaagaaagaaaaaccagaacccaagccaccaatgtatcaacctcccaacaacccaccaatatatgagccaaaaccacctaagccaccagtttatgcaccaccaaaggaagaaaagccaaaacctaaaccaccagtttatgagcctncggcacatgagccaccatacggtcacta

SEQ ID NO: 2396 - DNA, 449 bp, Gossypium hirsutum
  Clone ID: LIB3083-056-Q1-L1-A5
gaaactaagaaatggcacgcaagaagatcagagagtacgattccaatggattgtggaagcagcacttcaaaaggttttccgcctacgatttgcccatcaaatctgcacaagtgacggagtcaactgatttcaatgagctagtagagaaggagccatggcttttgtcgcagaaactggttgtcaagcctgatatgttgtttggaaagcgtgggaagagtggtttggttggcttgaatcttgatttcgctcaagttactgcatttgtgaaagagcgcctcggcaaagaggtggaaatgagtggatgtaaaggacctgttacaacattcattgttgaacctttcatccctcacaatgaagagtactaccttaacatcgtctccgagcgtcttggttgtagcattagcttttcacagtgtggatgaattgaaattgaagagaactgggacaag

SEQ ID NO: 2397 - DNA, 226 bp, Gossypium hirsutum
  Clone ID: LIB3083-056-Q1-L1-A6
tgatgaggaaggtgggaggttgctggatgaaagggaaagtgaaggaactgacaaaaagaagcaatctgagaattagatcttgtcggtgggtaaatttaagatatgagatatggaaagaagtaacagattaaggcttaagggaaaatggttgggatgatgatcctgaaaggttgcatttaaaggccaaaggaaatgaagggatccgatttcttttgccccatttggc

SEQ ID NO: 2398 - DNA, 418 bp, Gossypium hirsutum
  Clone ID: LIB3083-056-Q1-L1-A7
aagcagtttcctcttatcaaagcccgtgatgctacagacgacatgctgtcttgggggctcaagagaaaggttgatggttccattactatgatcgataatgtgaactgtatgactgacgaaccttcgcaagatggtaatgaatatgtgaatgacgtcataatatatttggaaactttggtttctaccgcacaacagatattgcctcctcaagttcttaaaagagttttacaagatgtactttctcacatatcatacaagatcctaggtgctatatttggagattcagtgaacaagtttaatgtaaatgctattatggggatagatgtcgatattctgttgttagaattttttgcagataacctatcacctgtattttctgaaagcgattcatttcaattgataaatgcacttgcttagt

SEQ ID NO: 2399 - DNA, 480 bp, Gossypium hirsutum
  Clone ID: LIB3083-056-Q1-L1-A8
aggaaatcgaagcagttctcgagaaaatctgggacttacaggacaagcgcagcgacgccattcactccatttcgcgagctcacttccttaactccatcaaagccctaaaaaaatccgacaagaagaagctctacgacgatgtcgtagtcggcgcggacgataacaggactggcttcgtgttcgtcaaggaatttagaatcgacgatggtgactccgcaattcaagaggccaagagtcttaatgatataagaactgctctcgagaatctcgaggaccagctcgaatttttccacacagtacaaatacagcagcgtgttgagagagatgctgccattgcacgattagaacaaagccggataattcttgcattgagattggctgagcatcatggtaagaaatacaaagtaattgatgaagctctagctttcgtgggagacgtacacgatgccagccgttacatctcacctaaaaacctttact

SEQ ID NO: 2400 - DNA, 303 bp, Gossypium hirsutum
  Clone ID: LIB3083-056-Q1-L1-A9
tctagttttttttttttttttttttttttttttttataacattttttggtccatttgttaatttttataaacttatttagatttttatttatttttttttttttttaaaccccaaatttctatttataatactttttttaattaaaaaatttttttacttttatacccaaaatttattattaaaatttttttattaaaaaaaataaaatttttccttttaaattttaaaactaacaaaaaaaaatttttttattccccaaaaatttttaaaaaacaaaatatatcaaacatctttttttatat

SEQ ID NO: 2401 - DNA, 437 bp, Gossypium hirsutum
  Clone ID: LIB3083-056-Q1-L1-B1
ctgcacgagaaaggaacgaaatctctgaacttttctctgcggtatgcgtttcttttgttaacaagcggaacagtcttcgatcatccacgctatacaccggttattctactaatcctcttctgattcagtcaaatcacttcgcttcctactttctttacttgttttactcttataactccaaccatatgattaacggttaggtcaacacgttcatcatcggcattatcatcggcgcaaatggatgcttcaggtacggactcacatgcttacggaggtgcatcttctaattcaaggagacacagaatactatcgaattcaaatataatccaagtgactgtttcatcccagttagaatactcatgcctactacgtacatcacgttctatccaccaagaatccgaccctcttatcactaatccgaacctataaaataacac

SEQ ID NO: 2402 - DNA, 411 bp, Gossypium hirsutum
  Clone ID: LIB3083-056-Q1-L1-B10
gttctacaaaaattatttccggagcctggacagcttcaattcgtttgtgctgacgtgggggatgcaaaagcagtaaacaaaatattttcagaaaatgcatttgacgctgtaatgcactttgcagctgttgcatatgttggggaaagcacacttgatcctctcaagtattatcacaacattacttcaaacaccttggtgatcttagagtcaatggctgcacatgatgttaggactttgatatattctagtacatgtgccacatatggagagcctgaaaagatgccaatcactgaagaaaccccacaggttccaatcaatccatatggaaaagctaagaagatggcagaggatatcatcctggattactctaagaactcagacatggcagtaatgatcctaagatacttcaat

SEQ ID NO: 2403 - DNA, 445 bp, Gossypium hirsutum
  Clone ID: LIB3083-056-Q1-L1-B11
aggcaatggaggtcgataaaaacgaagaccagtctagctctggtttggaagttccgaacaaaggcaatggacttgatctggataagtactcttggacacagtcccttcaagaggtcactgtcaatgttccagttcccaatggaacaaaatcaaggtttgttgtatgcgagataaagaagaatcatctaaaagttggacttaagggccagcctcctattattgatggggagcttttccaaactgtcaaacctgatgactgttactggagcatagaggatagttgtgcactgtcgatccttttgaccaagcacaaccaaatggagtggtggaaatcattggtgaaaggagatcctgaaattgacactcagaaagtcgaaccagagaacagcaaactatctgacttggatcctgaaacacggcaaactgtatagaagatgatgtttga

SEQ ID NO: 2404 - DNA, 299 bp, Gossypium hirsutum
  Clone ID: LIB3083-056-Q1-L1-B2
cgagtttttatttttttttttttttttttatttatttttttttttaagttattggtttttaattttttatgtttatttttttttttctatttttttttttttttttttaaaattaaagcataaccaatattaacattttaataaaaaatccaccctattaaaaaaaaacaacacaaaaatttaaaggtctaataacactatattcctaaacttaaaaaactttttattcaaaaaaaaaatatcctattctgacaaaaactatctaattataaaataaacccttaacttaatttttcaaa

SEQ ID NO: 2405 - DNA, 397 bp, Gossypium hirsutum
  Clone ID: LIB3083-056-Q1-L1-B4
ctctgagggtgtcttaataaacgccttcgatttactttcggtttccagttacttggttatttctacgttgttgaatttttagtaagcgaaaatgatagagtgcatttcagttcacatcggtcaggctggtatccaagtcggaaatgcctgctgggagctttactgccttgaacatggaatccagcctgatggccatatgccaagtgacaagactgtcggaggaggtgatgatgcttttaacacctttttcagtgaaactggtgcttgaaagcacgttcctcgtgctgtctttgtggatcttgagcctactgttattgatgaactgaggactggtacttaccgtcagctttttcaccctgagcaactcatcagcggcaaggaagacgcttgcaacaac

SEQ ID NO: 2406 - DNA, 439 bp, Gossypium hirsutum
  Clone ID: LIB3083-056-Q1-L1-B5
agtttccttacaagtctgtctgtcttgcgattaatccatatggctaggtcaatggtccttaagcttgcatgtctgctgcagttgtgcatggtgatggctgcacccctggctcaaggggccataacccgtgccgatggcttatacggacttccacgctgacttgcttttacgtcacggaatggtgatggtgctgatgccacaggttgctcagccatcgctatgaatgccttgggatcgctctgtggtgatacatatgaaccgatctaacttgaaatcggggtcggatttcggtggaacttcaaattggagtgttatggaatcccaactcaatcgtgagtaatggctgcatcccattgtgtgatacattacagagcatgattgtggattgtattctcataagtcacgattgacttgcgtgctacattgcatgacttgataa

SEQ ID NO: 2407 - DNA, 473 bp, Gossypium hirsutum
  Clone ID: LIB3083-056-Q1-L1-B6
aaacaatagaaactatatcttgttaatagaacataaatagagaatttcaaatccaacatctcagaacattaaaacttaattgtaatgttaccttaatcaaaactgaaaacagcaacctataaataaaacctgacatgcaaaaaggtaccagaaatataaaaaggtaaaattaagaacatattccatcacttaaagcacttggcatccaagagaggctctccctcaaatggctcgcagtcttcaatcatctgattcacccgttccttctgggctgcatctgagaggtcgaccttcttccactcgtagagttccatgtcatagcactcgtcaatcacaaattgaggaatctcttgcccacggaaaagccatagtcctttcaccttgaatggagggttagcaccgatcaccaacatcttcccaaatgcatacttgcgggccaaatccattctctgcaggaatcctccaaccttgtt

SEQ ID NO: 2408 - DNA, 354 bp, Gossypium hirsutum
  Clone ID: LIB3083-056-Q1-L1-B7
cgcttggtcgcctgggataagaagccgacgccgtcatggttcacgtcagtttctaccgcaattatgggaagacatttaagaagccaaggcgtccatacgagaaggaacgtttggatgctgaatttaggcttgtaggagaatatggtctccgatgtaagagggagttgtggagggttcaatatgctttgagtcgaatcataaatgctgctcaggatcttcttactcttgatgagaagaaccctcgttgtattttccaaggtgaaacttttcttcctaggatgaacaggtatggacttttggatgaaaatcagaacaagctcgaatatgacttggcttttaccgttgagaacttcc

SEQ ID NO: 2409 - DNA, 467 bp, Gossypium hirsutum
  unsure (1)..(467): unsure at all n locations; Clone ID: LIB3083-056-Q1-L1-B8
ttatacaccataccggtgatttatatgacttagatttatcggaccttgatgttaaagacgatgaagctttagccatcaactgtgttggcacattacattcgatcatggatactagtcgggacatcgttatatcgagcttccggcgattaaaaccgagggtaatcaccgtcgtagaagaagaagccgacctcgatatcggtgtcgatggggtcgatttcattaaaggtttccatgaatgtttaagatggttcagggtttattttgaagctttagatgaaagtttcaatagaacaagcaacgaaaagttgatgcttgaacgagccgncggccgggccatcgttgacttagtggcttgttcgccgtcagagtcgatagagcggcgtgaaccagccgcgcgttggtcaaggcggttccatgcaagtgggttcagtcctgtgggtttgagtgatgaagtgtgtgatgatgtg

SEQ ID NO: 2410 - DNA, 402 bp, Gossypium hirsutum
  Clone ID: LIB3083-056-Q1-L1-B9
caggaatgcatgggaaaccatggatgcggattgtgagcgtgtcgatggatattgcgttggccctagggaaagcctggcgtgaagctgttaatgcagtcatcaatcttctaggcatgcaaccttgtgagggcacagaggttgtccctaacaattcaagatcacacacttgtcttctatctggagtatacatcggcaatgtcaaggtgcttgtgccgctgcagtttggacttgacggtccaaaagatgtggcaatgaaactcgctgttagatcagaagatgaagctgctagtgatgcgattcatgagatcgtacctagtggctaagtttgtatccatcggctgttttttgcctccaatctggcttctatatataaattttcttgtgattttatatgatattgga

SEQ ID NO: 2411 - DNA, 319 bp, Gossypium hirsutum
  Clone ID: LIB3083-056-Q1-L1-C1
ctgctaagaagacgggggctggtcgccgatagatttattagtattaagcacttgaaggtaaactccttcactttgggagttatgattaccccaaatgagtacttttagtagttatataggtagttaaaagagcacctagaagagattctcagcctaaacttgcttaaattttgactgcttttcttttttctttttctttatttaatcctttatttttggtagcgcggctgacatttgttttgaacattgtttaaataaggctgaactgtagcacttctcttttgtttccatgcgaggacgttatagacattttcttttc

SEQ ID NO: 2412 - DNA, 371 bp, Gossypium hirsutum
  Clone ID: LIB3083-056-Q1-L1-C10
gctttctattttgtaaaccatggctcataacattcgtcaccctttctgccttttggaactttttctcatttgtgtctcaccaatgatcggtagccacactgtctcggcaacggctcgacgtttattcgagacacaaacaaccttatcggagctgccacaattggcttcaaaatacgaaaagcacgaagagtttgaatatgaaaagtcagaatacaaacagccaaagtatcacgaagagtaccccaaacatgagaagcctgaaatgcacaaggaggaaaaaaaaaaaccctgcaaacaacatgaagagtacgagaaagaaaaacctgagttccccaaacaggaaaagcctaaagagcacgagaaacacgaag

SEQ ID NO: 2413 - DNA, 410 bp, Gossypium hirsutum
  Clone ID: LIB3083-056-Q1-L1-C11
ggaagatgttcaattcaggttcatcatcattgggaatgaagccattcgaggacaggcaagctcttacattcctggtgccatgaacaacataatgaactcgctggcctcatttgggctaggcacgacgaaggttacgaccgtggtcccgatgaatgccctaagtacctcgtaccctccttcagacggcgcttttggaagcgatataacatcgatcatgactagtatcatggccattctggttcgacaggattcgcccctcctgatcaatgtgtacccttattttgcctatgcctcagaccccactcatatttccctcaactacgccttgttcacctcgaccgcaccggtggtggtcgaccaaggcttggaatactacaacctctttgacggcatggtcgatgctttcaatg

SEQ ID NO: 2414 - DNA, 349 bp, Gossypium hirsutum
  Clone ID: LIB3083-056-Q1-L1-C12
cggcaacatgtgcttatagggctttcaatgatatgatgattggtccagattacgcgctaaacattgaactatgtgacattataaacatggacccaagtcaggctaaggatgcgttgaaaatcatcaagaagcggctgggcagtaaaaatccaaaaatacagctattagctctttttgtattggattctctcagcaaaaattgaggcgagcatgtttttcagcagattgttgagcgcgatatcttgcgtgaaatggttaatatagtaaagaagaagcctgacttgaatgttagggaaacaatactcattttgatagacacatggcaagaaaccctttgaggatctagtgg

SEQ ID NO: 2415 - DNA, 392 bp, Gossypium hirsutum
  Clone ID: LIB3083-056-Q1-L1-C2
ccgctatgttcaggaggaaagctttcttgcattggtacaccggtgaagatatgggcgagatggagtgcaccgaggctgagagcaacatgaacgatctcgtgtccgagtatcaacaataccaggacgctaccgctgacgaggaaggcgaatatgaggatgaggaagatttggatgaagaacacatgtgatgaaagcgaaaaccaaacgaagttgtcggtaatgcagcatatacaggtatgtgattcgagtggatttgtatgtaatgagtaatgaaagtgtcttttccctatatttcccttttacgagtttgctttttttggtttctatttgagagagtaatgtataatatatccgaaaatagtaatgtaatacctatatctatggttgtattc

SEQ ID NO: 2416 - DNA, 469 bp, Gossypium hirsutum
  unsure (1)..(469): unsure at all n locations; Clone ID: LIB3083-056-Q1-L1-C3
gtcaaaagataattttctatcattttaaatataaatataacgctnaagttaacataaaatgtcatctgacaaatattacaacataaaaaacaattcattaccttgaaatgctatccatgatcttatcaatcatcataaatcaaacacaagcatttctaacaactataaattaacaagcaaacattactaaatttattacatattcataattttaaaaacctcacactaataacaataaacatgataccctcacactttgaacccatcatcttcaaaataaataatattgctaacatagcataaatattcttcatatttctattcataatcttcaccttcatcaccaacttttacataatccttttcaaaagcagacatatcctaactgactttcgaaaattcaccttattacaatccctatacaacataccaatgcacaaaaactctctttaaattcattatatcaaac

SEQ ID NO: 2417 - DNA, 433 bp, Gossypium hirsutum
  Clone ID: LIB3083-056-Q1-L1-C4
cgactccacaccaatgcgctctcattgtatctactctcaccctacaactagccattactagagcacaaggaccaactgcctcaccttccactactccaaccaccaccaccactcctccaccttcaacttcaccaccacctacaacttcctaacctactccttcaacaacccctccacctacaacttcagcaccatctccttcaacaacaacgccttcaccttccaccactcccaccccgccagctcaaccacctgcaacaactccccctcccactgttacaccatctacaagcccaactgtcccaccgtcacaaactacaccacctcaaccaccttaaactccttcaaccacacattcatctcaacccccatcattgccaccaccatcaccaccaccaatatcttctgcaccatcaccaattcacacaccacc

SEQ ID NO: 2418 - DNA, 278 bp, Gossypium hirsutum
  Clone ID: LIB3083-056-Q1-L1-C5
gagccttgttgggttttagttatccgacaccctcgaactccttataaatacacggtttacacggttctctgctaacctatatttgtaaccaaacatccatttaacgcataccaaataattaaaaccagcattaatgactccttcaactctcacataactttcatgtaaggaaaccttacaggcaagctttgttcgtgatgaatatgatcagtctaaagttgcttacaaccaatttatcgatgaaattcctgagatctctattgccggtatcaattatg

SEQ ID NO: 2419 - DNA, 473 bp, Gossypium hirsutum
  Clone ID: LIB3083-056-Q1-L1-C6
gtttatacatcattttatttccaaaatgcaaacttccaagggtctgaggtcccatttatactttgatttaaaacccaccatctaaccgttacaacaaaatgagcaacaatatccaatttgcaaacaaataatacagatttgttaaaaaaagggctagcctttacaatagaaaataacccaccaaatactgacgtaatcatattaacacaaactccactattaaggcaaaaacaaaatgcctaataattaatgaaagcataactgtagcttcatctttaaggaaggaaatccgaactcgtgctagttaatatttacattctctcatacaatctatgagtatccatcccatgatttctagcacctgatctcatatgaaccatactttgtaatatagcgaacccattcaactgtgttatacccactgttattccagaccttaagaaaccggacacttaaaccataagctgtaaaca

SEQ ID NO: 2420 - DNA, 447 bp, Gossypium hirsutum
  Clone ID: LIB3083-056-Q1-L1-C7
gagccttacaacagtgttctgtctactcattcccttcttgagcacacgcatggggctgtgctcttggataatgaagcaatttatgacatatgccgtcgttcccttgatattgagaggccaacttacactaacttgaaccgtttgatatctcaaatcatatcatccttgacaacttctttaaggtttgatggagctatcaatgtggatgttactgagttccaaaccaatttggttccatatccccgtatccatttcatgctctcttcatatgcacctgtcatctcagctgagaaagcataccatgaacaattgtcggttcccgagattacaaatgctgtgtttgagccttcaagcatgatggcaaaatgtgaccctatgcatgggaagtacatggcatgttgcttgatgtatcggggagatgttgtccccaaagatgttaatgctgct

SEQ ID NO: 2421 - DNA, 484 bp, Gossypium hirsutum
  Clone ID: LIB3083-056-Q1-L1-C8
gtttgagcaagaagataccatatcaaaagagattgagcgacggcctggaaatggtgatgatttgtattcatatccactatcaaataattcacggtccgatcttgaggatggattctttccatactgtgagattaatgttgtgttgagtgtaacaacttcaactgtgggtcaaccactagaacataaaaagccttcaattagccttgatattccaagttgtcgacctgaagcggcggatgctctctcttttgctgcatcaactctctgttctttggcggagcaggttgggtcctcaaccaaaaatgtacaggggctaggtaatctaggaaacactactgataaacggttctctgaagaggtctcgcgaactacatacaaattgtctgtatcctgtttttcacacgaagattgtcctggcattaatcaatacagcgataatacatgtgttcatgaaccagtgagtaggtctgtagtggatcgagac

SEQ ID NO: 2422 - DNA, 414 bp, Gossypium hirsutum
  Clone ID: LIB3083-056-Q1-L1-C9
cgaagagatttgcatagcccaactcttacggaagcatgacgaagattgtagacaggcttgattctgatgtgcaaaaggcggctaaccttcaaataactgtgcaggacctgaagaagaaggtacagataattgagacaggcaaaaaggggaaaggaattgaatatggtacagctaatgagcagatagaagaagctgaagaagccatcacgaagctatttgatgtcaatcacaaattgatgacacacgttgaagatggcttctggacgattgatggcaaatatgcactataaccatatgagaatggtaacatgaggatacgaaaagtatcagaacacgcaagaagagggttcgaaaagattgaacggttgcagttgtacgtgcataatatacagattttcttactgaatcatgatg

SEQ ID NO: 2423 - DNA, 464 bp, Gossypium hirsutum
  Clone ID: LIB3083-056-Q1-L1-D1
gccagctttgcatttctgaaaacaaaagcgataatgaagtggaaaaagataatgcaatttcaaacggccttgacactagtgtgaataatgacaaagaggatccaattttttgttctataaaagatgaattgagttccaaagagtctgtgagtattgttaaagctactgaaatgatggttcatgaagaaagcaagtccctggatatttcttcagagacgagcggctcttcaattatcacagatgataaaaatgttgacatatatgaagtttgtgatgaaaaacaaaatccttggtacttgaaacaggattcatcggaagtggaccaacagcctttttctccattatcatctccatcagactcatcagtcatgaaaaaggttgaatgtttgcagagtgttactgatataccagagcgatcaagccccgtatctgttcttgagccaatatttgcagatgatcttatc

SEQ ID NO: 2424 - DNA, 224 bp, Gossypium hirsutum
  Clone ID: LIB3083-056-Q1-L1-D10
gtacaataacatgtatatgatcatttttgatacgaggttcgaaagtcgcgatcatgctttatttgttaagctcaatggtctaaatggataaagaagtatattaccacaaagctttgactacaactatggtgatcttatccccattctgacgccattcttgagagggtatttgaagttatgcaatgaagtcaaggaaatcacattgcatcttttcaaggaccaat

SEQ ID NO: 2425 - DNA, 452 bp, Gossypium hirsutum
  Clone ID: LIB3083-056-Q1-L1-D11
ctagaatctaccaatgcatctgttatattgaaggatctagttccctagctgcagagtaaatgttatgactgtgtttcagctatattgaaagaactccaaactgaacttgataatttgtacactgcgattggaagtgaacacaaggaaagcgattctgtgcctcctcctttaattgttgagagatctctttttattggcagactcttgtttgcattcgagaattactctaaacacattgctttgattcttggctctccacggttctgggtgaaatacacagctcctgcaatttttgagaagctcccttcctcgatgtggcaatctaaagctgtcaatggatctcctttctctgacagccttggaaggcaaatactcactagttccgagaggcaaagttcatcacctactgctgcattgcttggtgcaaatgaaagtgcaaacccaaaacttta

SEQ ID NO: 2426 - DNA, 417 bp, Gossypium hirsutum
  Clone ID: LIB3083-056-Q1-L1-D12
tcaatatcaaggctctttttcggaagatcgcagccgctttacctggagtggaaacgctttcatcaacaaaacaagaagacatggtcgacgtcaatcttaagtctacaaacgcaaattcatctcagtcgcagcaagaagccggaggatgtgcctgctgaggatacatacatacattacactcactcacacacatcatttgatccgaggtatgtatggttttctcaacatttagtgttttctgtaaaaaggaaaaaaagaaatctgttctctcccaccccctttttggtagcattgggcatatttggatttgatggaatgttttgaagcataaaagttgcttgagagagaaggttcttaaattttaccaatggtagttaggctcgtcctaacctgtcctatatgtgtacgggtcttgac

SEQ ID NO: 2427 - DNA, 321 bp, Gossypium hirsutum
  Clone ID: LIB3083-056-Q1-L1-D2
ggttgatcacaaagttgagctattttcaattgaatgacaaaacttatagttgggggaatcgatatattactacacaaaactttcactctaattttattctgtcttgtgcatctccattcttgtttgctcatacatcacataccataatctaaaagaaccacgcaagatgattttttttcaacagttaatgccacacattgtactgtctggtcctttggctttcatcacaaatggatcaattccgacccaaagcaaggagaaaattgaaaccaatatcactgaccatataacaacaatggttggcctccccttttgtcttcc

SEQ ID NO: 2428 - DNA, 308 bp, Gossypium hirsutum
  Clone ID: LIB3083-056-Q1-L1-D5
ggatcaaatgataaacatactttatccgatacagaggctaagcagttgatcgggaggctcatctatgctgaactgtcatagactgagctcgaattcactattgtgaggccttttaacttgattgcacccaacattgatttcattcctagtattgattgtcctagtgaatgatttcccagagatactgcatgctctattaattatctcctacatcctgaaccacttaagctcaacaattgtggccaaatctagaaaactcttatattcataaaggaatctcttgaagctcaactcttgaccattgaaaa

SEQ ID NO: 2429 - DNA, 435 bp, Gossypium hirsutum
  Clone ID: LIB3083-056-Q1-L1-D6
aaataatggccctctgcaagccgtattctaggttggtcctagcactagccatggcattggtggcagctacggtgcctgtttatgggcagagaactatcaacactccatgcaccccatcggcacttaacatcttcactccttgtatgaacttgcttaccaatagcagtgccaatggtacttcgcccactgcagattgttgcaactcgcttaaaacgctcacatcgagcggcatggactgtttgtgcctcattgtcaccgggagtgtcccgttccgtttacctatcaatagaactctagctatttctcttccccgagcttgtagcatgcctggtgtccccctccaatgcaaagcctctgttggtgcacctgttcctgctccaggtccaatttcacttgcaccaaccctttcttcaggaacatcaccaactttaagcc

SEQ ID NO: 2430 - DNA, 475 bp, Gossypium hirsutum
  Clone ID: LIB3083-056-Q1-L1-D7
ctcgtgccgctctcagcgcaattgccatcaagctgaagaaatacctggagagctgagttatataagggcattcaacattttgtaaatagaagagagagaggtactggttcgtagaggtggtgggacttcttcgagcttagggtcctctctcattgcatttattttttttgttggtgcatatgtataattagaacagttgagctttaatggtgaggttttgtggagagttttaactgaagggaaaagcttaaaagataacattatgggttctgtttgttgctgcttgcgccctgaggattttgaggactatatcaatccgaacagtaatgtatatagaaattgcgtgtgcctcagttgctttgttcagaacttcgtacacgtgtataccacattgttcccaaaaggggaattgcgttctggcccttcatccatttatgggacaagatctattatctcttctgcatctctagataac

SEQ ID NO: 2431 - DNA, 394 bp, Gossypium hirsutum
  Clone ID: LIB3083-056-Q1-L1-E11
gaaaagccctaatttgacagctctctcagtctctcattttgcctgaaggccatgtgtaggagaaaggttagggagcccaaggaggagaatactacccttgggccggctgtacgagacggcgaacatgttttcggggtggctcacatttttgcttcatttaatgacacatttattcatgtaacagatttgtctggaagggaaacaatggttcgcattacgggtggtatgaaggtgaaagctgatagggatgagtcttccccttatgccgccatgcttgcagcacaagatgtttctcaacgctgcaaggagttgggtattacagcccttcatataaagcttctagctactggagggaacaaaaccaagacacctggtcctggtgcccagtcagcac

SEQ ID NO: 2432 - DNA, 288 bp, Gossypium hirsutum
  Clone ID: LIB3083-056-Q1-L1-E12
gcacgaattcttcacgataacaaatacactaatattctctatttacctacagtcgatctaacacaagaacaccaggaccaattatcacaggtcaatctcactgttattaataatcacatatataaaatcttattttggtcagcaattcccttctttccacacttgtattctaatcctatatactactaacagcttaatgattctcatattcacgatcactactatataatatgctaacttttaaaccaaatcctttttaccttaacttaacttacctctacactaacc

SEQ ID NO: 2433 - DNA, 337 bp, Gossypium hirsutum
  unsure (1)..(337): unsure at all n locations; Clone ID: LIB3083-056-Q1-L1-E2
gtattgctgataaccatggtgttcaaaactttcctgccttttttcctgctatncgattagtgggtcaacacgcctgcaaccttgatattcctgctgttagcatgacattccctgcatatgttgcccatccgcaacttgcaacgtgaaattctgaaatgacatgactgccaatattgacacgtgcatgctccagctctataagcaacatattgtccaccttatattgcaattgatcgtttctattcatgctcatccatcagcacaaatatctttaactggaagcctaactcaaaaaaatacttctaacaagccaaataaccaattgaaacccttccca

SEQ ID NO: 2434 - DNA, 311 bp, Gossypium hirsutum
  Clone ID: LIB3083-056-Q1-L1-E3
taatactactactccaagcattcatattccttacatgtaaggttttcgtgtcattaatcgatatggctagctcaaattcccttaatctagcatgtgtcactctattatgcatacatttaattacacccctatctcacagctccgaaacctgttgtcaattcacaaactacctcacaccctgcattggttacttttcaagataatgaaactggtaccattcccccaatttgctgcggcgacattaaatctttcaactccgtctcccatacaacaccagacctattagcaatttgcatatgcataaaatatgc

SEQ ID NO: 2435 - DNA, 276 bp, Gossypium hirsutum
  Clone ID: LIB3083-056-Q1-L1-E5
aacctaaggcccaagagcacctttttatacaacttccaacaatgacaaacctttacccaaaccaccaatgtatgaacctcctaaaaaacctcctatgtatgaacctaagccaccgaaaccacccttttatacaccttcaaagaaagaaaaaccatatcccaatccatcaatgtatcaacctcccaactacccaccaatatatgagccaaaaccacctaagccaccaatttatgcaccaccaaaagaagaaaagccaatacctaaaccaccatttta

SEQ ID NO: 2436 - DNA, 371 bp, Gossypium hirsutum
  Clone ID: LIB3083-056-Q1-L1-E6
gatggtaggattttcttcccaaacagaatcttgggttgccgccataagctcaatctaccaatcccagaaagaggcagatagcttcgaattggatctaaaacgtctagatctgataaagatagatcaagaagactaggataataatattaacagccaagataagattagcaccaccaagaagaacaagaagaaaaatcaggtgttgctggagggatacgtggaagcggttgatgaggaggatgaactgaagatgacaaagagcttgacccgtgatgatctacaccaacttaaagggtgtttagatctggggcttggcttcaacttctaggagattactgaccttttgaacaccttcactgcactataactat

SEQ ID NO: 2437 - DNA, 338 bp, Gossypium hirsutum
  Clone ID: LIB3083-056-Q1-L1-E7
tcgagtttttttgttttttttttaacaacccattactaagtaaaagagatatgagttgcacaaagcacacaatatctgagttcgagcttttacagtataaatcttcagatgagtttcatttcctatgacaataccaacaatatgacatccacaagatagtaaaagaccattgagttccttattacctttcacaaatacatatcgcaagccaataccaatgaaaaacacaagactttaaaacagaatataaagatataaaccaaacccttctttcaaaatttttgtcgctttcttcttgactgatctatattggctgtgaaattctgatctttggcttg

SEQ ID NO: 2438 - DNA, 349 bp, Gossypium hirsutum
  Clone ID: LIB3083-056-Q1-L1-E8
cttttctgtgcgcattgctggggtgttttatatgcacgatgatagaggtcgatacaatgttggcggtcggcataggcgaacacgtggtggaaggaatttgtgggaattcaaagatgataggaaatgggtacatgacaagtttgaggagatgactttgcaagaaaagcattatgaggtgggaagatcatctataggcacgtatcgagctcacagtaataaatcgtggaccacgtcatggttatcgtaaaggaattgggtccatagcatttgggaaaaacaaccacctgatcatggtttcaaaggatggtgagaggtatatgacctatttagtattaacttaatattaaaa

SEQ ID NO: 2439 - DNA, 497 bp, Gossypium hirsutum
  Clone ID: LIB3083-056-Q1-L1-E9
aatttctcccatctttctcgtctctgggtctcgtaagttggtgaatagggaagttattagtgccaatggctcggattgagacctctgcagctcacattgtgttggcaatatttgctgaggccatgtttgttgtgtccagtaccatggcacatgatattgctccttctcctgcaatggctaccgtagcaagctctgctttgccggtttccgctgtcttcttatgctcttacatgttagtctctttaattgctctcttagcgcattgaattcaaagcttatcaagactttatgacattggctacccttaatttcactctcactggtgatgacgtgagtatcctctaatcttctccgagataatatttgggtgttatcaattttcaatttctctaaagttttaaaatctctatatatatcatgttacattagtgacatatatttgattttgaaagtaaatagttgtgaatatcttatatatcatagatatataatggtat

SEQ ID NO: 2440 - DNA, 366 bp, Gossypium hirsutum
  Clone ID: LIB3083-056-Q1-L1-F10
aaaatacaaagttcgataatactttattttgataaaaataaaatgccggtttctgggatcgcactctggtctccagccgaaaccggccaagctgatgcactcaaggctgctttagcctatttcatttcaacgcttatttttgatttcgccgatgaaggctctgccatagctttcaacaagttgaccgacgatggctcctctacaccagcctgattagtagctgctgtattggctaacaccttgaccttattatgccgctgtttcaatcctggctaacaatttctgcggacacctaaactccgtcgtcacgttctgagactttcggggtggccacattacattggtgaggagtattatgtattggat

SEQ ID NO: 2441 - DNA, 410 bp, Gossypium hirsutum
  Clone ID: LIB3083-056-Q1-L1-F11
gcgaggaaacattgcgatatgatagaagattttaaacacgctactgccaagcaacaagtggacatcgggatggaattccaaagtcaacacaagcatacaaatgggcaaaaactagccccaacccaagagcaaaagcctatgcattttaactggcaaagactaacaccagttcaagagcagcaatcgagcaactcaattgcccatttgccaatccatcaacaccaccaatcagcatcgaggaccgtcgtagtcaccacgaactgggagacatttgattcctacccagcatcgttgccagtcccctcagcatccacattaaccgacaataattcactcccgccaaaattccctttggacttctttgactaaacaccactatgccacgtttctgctctatatttctctggtgt

SEQ ID NO: 2442 - DNA, 453 bp, Gossypium hirsutum
  Clone ID: LIB3083-056-Q1-L1-F2
gaactttaaagcaactccaatgccaagcttctatcaggagcctccacgccctaaggtggaattaaagaagataccaccaacaagagctaaatctccaaagcttggtagaagaaaaagctcaactcctttggactctgatggtaacagcaatagtggtcaccaatcagtccagctaagtctggatgagaaagcatttcagagcacctcttctaaagtaatttctcctgtcaatgcaaagaagccacagcggaaatcacttcccaaactgccttctcagaagactagtctgtctggttcaacaaatgacgaaaagacatctaatacgcccagtcagaaaaaggtaaatgcacctaaagcatctaccgagggaaagatagccttgcctaaggcaacaaatgaggagaataacactttatctgatgtaacaaatgaagaattatcttcaacccaact

SEQ ID NO: 2443 - DNA, 311 bp, Gossypium hirsutum
  Clone ID: LIB3083-056-Q1-L1-F3
cagtcttgacggaacagtcatccacatctggtgaccattcaccggttgcggcgaataataagacccaatacagttcactgaccgtcatgaaaaaacgtcatgactcggataaccctcgcttcacacaactcaatcagatttcagaacataccacatataacaacaggcctaatatcattatgacccactccgatcgtacttaccaactattactcacacctaatagcaaatttcaaactgaaacaattaatatttggaataaattagctatttatgaatagagtgacatctcattggataaccaataggca

SEQ ID NO: 2444 - DNA, 156 bp, Gossypium hirsutum
  Clone ID: LIB3083-056-Q1-L1-F4
attatgccggaacttatagtgaccagaaatgccgaactaactgcagagagcctgctcaaagatggtaccatgtaccacgttcatggctgaagccaagtggaaactttttggtggcgtatgaagaatggggaggtgatcccaacgctgattgctttg

SEQ ID NO: 2445 - DNA, 484 bp, Gossypium hirsutum
  Clone ID: LIB3083-056-Q1-L1-F6
aagcattgcagatattacaggctcacactgatgaagtatgggttttgcgattctcacataacggaaaatacttagcttcatcgtctaatgatcagtcagcaatcatttgggaggtttatgaaactggagtatctttaaaacataagctctctggtcaccagaaacctctctcttctgtttcatggagtcctgatgaccgtcaacttctgacatgtggtgcagaagaggttgtaaggcgctgggatgtctcttctggtgaatgtcttcatgtttatgaaaaaactggtcttggtatggtttcatgtggatggtctccggatggcaagtggatcttttcaggtctgaatgataagagtatctgcatgtgggaattggatgggaaagagctagagtgctggaaagggcaacgaacactaaaaatttctgatttggaaataacaggggatggaaagcagattataagtatttgtcgggaacagcaata

SEQ ID NO: 2446 - DNA, 317 bp, Gossypium hirsutum
  Clone ID: LIB3083-056-Q1-L1-F7
tagggacaatgaaaactttaccaatacgaacgaatattatgtactttataagactcagatagtattcgactacggctcacctttcccacatttactcaacacaactcctcattcaacaaccaaaacctctgtagtttataaatctatcataacaaaaacctacaaattatataagttttctactcattgacaatctaacataccactccacttctaaatctactcattttttcaataccctcaaacaccccacaaatatatcttccttagtacaaaaattcctataattaaaaacttttatactacctaactaccaa

SEQ ID NO: 2447 - DNA, 376 bp, Gossypium hirsutum
  Clone ID: LIB3083-056-Q1-L1-F8
cttattcctttattgctttttagaatctttcttaatcgaagatgatggagtgcatttcgatccacatcggtcaagccggtatccaggtcggaaacgcttgctgggagctttactgtctcgagcatgtaatccatcctgatggtcatatgccaagtgacaaaactgtcggacgaagtgatgatgcttttaacacctttttcagtgaaactggtgctgggaagcacgtccctcgtgccgcattcgtggatcttgaacccactgttatcgatgaagtgaaaactggtgcttaccgccagctcttccacccagaacaactgatcaacggcaaggaatacgcagctaacatcattgcccgtggtcactacaccattggcat

SEQ ID NO: 2448 - DNA, 370 bp, Gossypium hirsutum
  Clone ID: LIB3083-056-Q1-L1-F9
accaaaagattaataactttcatatgaactaaaagtactttagaaattgagaactctttaattcaaatgacaatcccaaccagacatgcaacaactaaatgctcttttatttaaaaccacatataatggtactacatgcctgaagcttgaattcccataattgaattactcaattccaaagagtttcttcaactgcataacaaattcatatactttttcttggtcatgaaaactcttggctacactctccttttgcaggcaccttttaacccaagcaatcatcttgggacactctacttaaatgcttaaatccccacacttctcataaacataaaaccatgtataaaattgaactaatgcaacatccaca

SEQ ID NO: 2449 - DNA, 286 bp, Gossypium hirsutum
  Clone ID: LIB3083-056-Q1-L1-G1
gaagaattggccaaaacttgcattggggatcagacttctcgtgtgctggtcattctatgtctgtggatgcttttagccgctacgatggcgacgcagtaaatcgacgtctcatgaatcttttcgaccctaaagcctctccatcaagaaaacctgataatggcgttgcgtcttccgacgtcgtggttgacaccacccacagactttggttccgactatacagcaacactaccaccgctggcaaaatgtccattcccattatagtctactttcatggtggaggctttgc

SEQ ID NO: 2450 - DNA, 371 bp, Gossypium hirsutum
  Clone ID: LIB3083-056-Q1-L1-G10
cgagcacgagtgatgtttacggttatccccttcagcatcctcataaagaaacctagtggggatatgttaatccgatcggtgagaggagttgctacgatgaaggaaaaaggactgctgaaaccttaaccatggattatcatcgaggtgaccgtgttgaggtgcgaattgctcgtattttcaatacttatggccctcgcatgtgctttgatgatggacgtgttgttagcaattttgttgctcaagccattcggaagcaaccgatgactgtttatggtgatggaaaacaaacacgaagcttccaatatgtttctgatttggttgattgactcgttgctttaatggaaggtgagcacatatgaccttttaatctt

SEQ ID NO: 2451 - DNA, 370 bp, Gossypium hirsutum
  Clone ID: LIB3083-056-Q1-L1-G11
aaataactagattttcctcagatttgtacgtgaagcggcattatcaggggcaattgtaggacacaatgctcttatggagaatgcttggcatgatactgagatgcttgccgaggctgagctccatgcacatgctcatgggcgacccacactgaagaacttggttgacgcttgtaacaaagtgttacataatgaggttgagcacaccccatctgcaaaaacagatgctactgctgcatttttggcttctcttgacgagcccaaacttacacgttagtcagaggcatggaagaaacctcctatcgaaatcctcccttcggacatgtctgctctctcagattcaattacagtttacacgaaacctgttccattg

SEQ ID NO: 2452 - DNA, 429 bp, Gossypium hirsutum
  unsure (1)..(429): unsure at all n locations; Clone ID: LIB3083-056-Q1-L1-G2
gatatatcaaaatggcagtgccatcatttcaaatccagcttccaatggtgaggggcctgatgatggaaacctggtctcagaatatgaatcaaaacaaacgagcaaattctcttctgaagagttcaaggaattaaagttggaaaacgaaaacatggcaagggatctttctcaatgcaccgaaaatctggagatgaccaagtctcagttacacgaaactgagcagcttctagcagaagctaaatctcaattggcttatgctcaaaggtcaaacagcttggctgagacacagctcaagtgcatgacagaatcttatagatcacttgaaacacgtgctgaggagttagagaccgaagtgaaccgtctncaggtaaaaataaaagctcttgaaaatgagcttcaagatgaaaagagaagtcatcaagatgcttt

SEQ ID NO: 2453 - DNA, 454 bp, Gossypium hirsutum
  Clone ID: LIB3083-056-Q1-L1-G3
atatcactgacgatagttcgacatcagctgagcattatacgggtgaggtgcacaataatactactatactgatgccagattgcaatcgaataaatgtgatgtgattaattggcacttgatccatatgagtacgctaaattttcatgctctatatctcatcatatgatatgtaactacatatactactaatttatgtaatcgctttgaaacaatcgtgtcaacttgtatgaaacatcaacttaagccatacgagttgttgcatgcgcaacctattcataacatgagcgataacggtctgacttggaataatcaggatatgctaacgtttagacaatggctcttcatgttcaatactggacggatatttgattttactttaaagtcttaactgtatcactatttggaaattgtactggagcatttacccccaacaatttagattccagatacttta

SEQ ID NO: 2454 - DNA, 463 bp, Gossypium hirsutum
  unsure (1)..(463): unsure at all n locations; Clone ID: LIB3083-056-Q1-L1-G4
ccgctgtcgatctttaacctttcataccgcaaacaatggttctccaagactacggggatttgttgaaccctccggccgagctcgagaagaagaagcacaagctcaagcgtcttgttcaatctcccaattccttcttcatggatgtcaaatgtcaaggctgcttcaacataacaaccgtatttagccactctcaaactgtggtggtgtgtggaaactgccagacggttctgtgccagccgaccggcggtagagctagactcaccgagggctgctctttcaggaaaaagggtgactaaatccgatccagcggcaacgattcgaggaaaaagttttttttgtatgatcccactctggttatctttttgatgtggtaaaatttgtctcaaatcttcgaagtagaattaaggattttagaatgactattatgtgctaatgntcttgatttagtgtggatgggttttgg

SEQ ID NO: 2455 - DNA, 469 bp, Gossypium hirsutum
  Clone ID: LIB3083-056-Q1-L1-G5
gaaatagatgacactccacctgtaactagctccttatctcatgaagctgttcaggcgaaaggaggaaaagaaacagacagggaaaaactgctaggtgcagcagatgattcaacacccagggttagaacagctcaagaaattattgcaaaatatagaaaagctggggacgcctcttcagcagcagcgcatgcgagaaataaactggtagaaagacgggaaaagctggagagaatcaacagacgcaccgaagagctgcaaagcggggcagaaaactttgcgtcattggcagatgaactggtgaaggcaatggaaaatcgaaagtggtggcaaatataactggacacaaatggggaattatatcttgagatcatttcttcatactccatagtagttgatcacttccgagctcatgatggcgccattattgttcacagtaaaaaatttggaatcatatgagttggttggtgaa

SEQ ID NO: 2456 - DNA, 383 bp, Gossypium hirsutum
  Clone ID: LIB3083-056-Q1-L1-G6
gttgaagccatttgtcagttcttcaatattattggtaagcgagcttggtagagtccaaaatcacggcgcataaatgatgtgtacttcaacagactgaaggagttgactacaaatcctcagcttgcaccaagactgagatttatggatcgtgatgttcttgatctgcatgcaaacaactgggttcccaagcgtgaggaggtgaaagccaaaacaattactgaaatccattcggaggctgaaaagaatcttgggctgcgtccaagtgctactgcaagtatcagaaatactcgcgttgattctgctagtccaatgagtcctggtcctggtggttttactatcaatcgttctgatactggtggtatgatgcctgcaatgccaggaac

SEQ ID NO: 2457 - DNA, 87 bp, Gossypium hirsutum
  Clone ID: LIB3083-056-Q1-L1-G7
ggtacaagcgctggatatgcgttttacattcaaagagaccacttgaggagcactggctgcttattaatgcatagtcagaaggaatca

SEQ ID NO: 2458 - DNA, 220 bp, Gossypium hirsutum
  Clone ID: LIB3083-056-Q1-L1-G8
cttacacgccaactttaatcctaccaaaagcaccataacggtcataagtgttcatagctaatctactaactcaccatacacaatcgttaatactactccgatccacttcttacattctactacttccccaatgaaactttacccaactcaaaccttttacgtttatgatcataactagccatcaactaaggactctaacaaatattgatagccatcactt

SEQ ID NO: 2459 - DNA, 421 bp, Gossypium hirsutum
  unsure (1)..(421): unsure at all n locations; Clone ID: LIB3083-056-Q1-L1-G9
gaaagagaagaagattaaaaattaatggacngttggtttttaagatggggaatagtggcaattaccatgtcaataaatttgctgaagaatggatttaaagtcactgtttggaatagaaccctttctaagtgtaatgaattagtggctcatggtgcatcaattggaaaaaccccagctgaagtgattaacaagtgtacgatcaccattgctatgctatctgatcctgctgctgctctttcggctgttctcgacaaagacggtgttcttgaacaaatttgcggcggtaaaggttacatcgacatgtccaccgtcgatcccgaaacttcttgcaagatcaatgaggcgattacatcgaaaggtggacgattcctttaggcccctgttccggtagtaaacagcctgcagaaaccggtcaactggt

SEQ ID NO: 2460 - DNA, 483 bp, Gossypium hirsutum
  Clone ID: LIB3083-056-Q1-L1-H1
cttcgccgccgccaatttgcattctaaaggaacgctagatttgaaaaatggacagagtagcactaattctggaggagacaccaccgttaagaagaaaaatatccatgggatactgaatactgtgagttggggaattttgtttccacttggagctatgattgctaggtacataagaagctttgagtcagcagatccagcttggttttatcttcatgttttctgtcaaatatcagcttatgccataggagttgctggctggggaactggtcttaagcttggaagtgaatcctctggtatcacatattcgggtcatagatacattgggattgcccttttcgtcctcgctactgtccagatctttgctttgtttttaaggcctaaaaaggatcacaagctccgtttctactggaacatttaccaccacagttttggatacgcgatacttgtcctcggcatcatcaatgtgttcaagggcttcaatat

SEQ ID NO: 2461 - DNA, 315 bp, Gossypium hirsutum
  Clone ID: LIB3083-056-Q1-L1-H10
tttttcgatttcaatctcaaaatctgcagcacttattttatatacagtaacatctcgcgtaaatgagctaattatcttctaacttaacaaccatacctaaataacataatagcatatggctcaatcaaaacctccaaacaaaataaaagcaatccttacaacattttaaacacaatctttaaaaatgattgaaaatgcttatacaagcaactaaaactttcactacatcttccttaatactatataattactcattcaaacgaacaacatgctttcattaatagttatcactttatcgaccaaattcctaaactt

SEQ ID NO: 2462 - DNA, 323 bp, Gossypium hirsutum
  Clone ID: LIB3083-056-Q1-L1-H11
tttacatcaaacattccatatttatcttaaactttcattatttctggcaaaatgggaattttttaaatggaacaaggttccagtaaaagtaacaacatatatctaatagttgacacattcatcacatataaataccttacatgataaatcacacatattgtatccttttaaacagcatacaccatatctctcttccaacatttaaccaaatcattcaaacaaaaccaattccaaaaccctatattttatcgatatcttcatcttctaactcaatctaatcatctgcacctaacttatcttccttatctacaattccttcatta

SEQ ID NO: 2463 - DNA, 358 bp, Gossypium hirsutum
  Clone ID: LIB3083-056-Q1-L1-H12
ggcccgaggctcaaatcattctctgactggcttctgaagactatggggtcctacagtgtagaagccattttttcagctgctactcgtgaatatgctccattagttgaggagctgtggaagcatgcattcattcaggaaacctacatcaggagaaatgaattggaaatgttacccagtgttgctagttattacctcgagcgggttgatgagactattgaaaacagactatgaaccttctgatttagatatcctttatgctgaatgtgttacttcttccaatggtcttgcctgtgtcgacttttctattccccaatcttcacccgatgaaaatatcggcactgccgaacagcatgattca

SEQ ID NO: 2464 - DNA, 345 bp, Gossypium hirsutum
  Clone ID: LIB3083-056-Q1-L1-H2
caaaaccatgatacggagaactaagtccgatcaggaagaggagaacagaaagaggatggaggagttaaggatccagcgccagaagaggatagctgagaggagtgctgccggtggtcttaatccggttacttcccggaggagctctaccgaaagtaaaacttcagcagcttcaacgaagagccagccatcaactcaagacactaagaaatatcggaagccagtccttagaagttccaccatagaacgccttgcaaccgcacggaatacttcaaaggtctcatcggctgaattgaaatcgagccagccgaaaaagccgacattgaaggaaaacaggtattcaacaac

SEQ ID NO: 2465 - DNA, 465 bp, Gossypium hirsutum
  unsure (1)..(465): unsure at all n locations; Clone ID: LIB3083-056-Q1-L1-H3
attgaaattaatttaaaagtattattctttttataatgatgatagatantattacatatatattttttggcccagttggcatacgaaaataaacaataaatatatccatttctttaagcttctacggcattctcttcctctttatagcataaatccttttcttgttcagacaaaatatccttttcaaccctcttcaggaagctcagcatcatctctaatccactttcatcaaatcggggaatagtgaggccctttgggtgatgaatgacaacaggatctacacacgattccaacagctccaatccatatggtttcaggaaatcattctctcctaaaaagtgaagagatgggcagtggatgggagaagaataagtgttttctgccactgtttagttcttgaatttagccccttcaattattatcaaattctttatttggggaacttttgtaagcgccatacccttc

SEQ ID NO: 2466 - DNA, 222 bp, Gossypium hirsutum
  Clone ID: LIB3083-056-Q1-L1-H4
taggtaatgttatatacattgaagtttattcataactaaattaaatgatggtgcaagggtgaaaataaattcaaataaatttattttaaataagatttcattatttaattatttaaatcaaatggtatggattaatacttaatctgctatgccactttttcatattataattatcgttttcaactgctttaattcatccccaatgttttcaatcattcacat

SEQ ID NO: 2467 - DNA, 338 bp, Gossypium hirsutum
  Clone ID: LIB3083-056-Q1-L1-H5
aaaaccctaattttccctctcactcatactcacagcagacgctaaaaggggaacggtgttcaaaagaagaaagatttgtgatcaagatattcagccatggatgaagagtacgatgtgatagtgctacggacaagccttaaggaatgcattctcagtggtcttctattcgttgatggactcaaagctttgcacatggataggaatgactattatggtggagaatcgacttctcttaatcttgtgcagcttttgaaacattttacgggagatgaaaagccttccgaaaagctgggggcaagcagagaatataatggtgatatgatacctctagtcatgat

SEQ ID NO: 2468 - DNA, 445 bp, Gossypium hirsutum
  Clone ID: LIB3083-056-Q1-L1-H6
caaaacttgaattctctccaacatgttttgaggaaggcagaggagtagcttgttgcgctgccagctgagacttcttatgccgatttcgaacacaagttccaggagattggtttggagagagggtggggtgatacagctgagcgtgtgctcgagatgatccaactccttttggatcttctcgaggcacccgatccttgcacccttgagaagttcctcgggagaattcccatggtgttcaatgtcgtgattcttacacctcacggttactttgctcaggacaatgttttggggtatcccgacaccggtggccaggttgtttacatcttggatcaagtccgtgccttggagaacgaaatgctcaaccgtatcaagcaacaaggacttaacattacccctcgtattctcataattactcgactttttcctgatgccgtgggaacaactt

SEQ ID NO: 2469 - DNA, 441 bp, Gossypium hirsutum
  Clone ID: LIB3083-056-Q1-L1-H7
tgagccctcatctatgatggctaagtgcgatccacgccatggaaagtagatggcttgctgtttgatgtaccgtggtgatgttgttcccaaggacgtcaatgctgcagtcgccaccattaagaccaagcgcaccattcagtttgtcgattggtgtcctactggattcaagtgcggtatcaactaccaaccacccactgttgtccctggtggtgatctcgccaaggtccagagagctgtttgcatgatttctaactccaccagtgttgctgaagtcttctctcgcattgaccataagtttgatcttatgtactccaaacgtgccttcgatcactggtatgttggtgagggtatggaagaaggagaattctcacaggcttctgaggatcttgctgcattggagaaggattattaagaaagtggtgctgagtcatctgacggtga

SEQ ID NO: 2470 - DNA, 422 bp, Gossypium hirsutum
  Clone ID: LIB3083-056-Q1-L1-H8
gggaatcctctcttctctagaaaccaccgtcgagccatgggtctaaggacccgaaccactgccaatcgcctccctcacctcctctccctacagcgtgccctcgctattcacaccaccgtcccttctctctcctcttctgccaccccaaccacatacgcccggccttctccgccgtccacctccggcactccctccagtctctctaagcctgctgagtacgtgatctccaaggtcgatgacctcttgaactgggcccgtcgtgggtccatctggcccatgactttcggcctcgcttgctgcgccgtcgaaatgatgcacaccggtgcttctcgctacgacttcgatcgctttggtgtcatttttaggcctagccctcgccaatccgattgcatgattgttgctggcactctcaccaacaaaat

SEQ ID NO: 2471 - DNA, 305 bp, Gossypium hirsutum
  Clone ID: LIB3083-056-Q1-L1-H9
atcattacacttactaattatgccatgacggcactaattaagatattctatgtgctcccataattcaaactcaacaacttatgtacactaaaccatttactacctaatctacaataaatgcctaaaactcccatcttactatctttactacaataaccattgtaacttaattgacattgcctcattcatacactatttccataaatcctactactatttacccagcacatacaccatattcttccattatatacaacaaataccatgctatttaataccattttcttttctctgaactaccctat

SEQ ID NO: 2472 - DNA, 460 bp, Gossypium hirsutum
  unsure (1)..(460): unsure at all n locations; Clone ID: LIB3083-057-Q1-L1-A10
tttccttcccttcttccttctttttcatacatattaggtgtagcattgttcactgttcctttgaatcccttcttcatccaaaatcttggcttagagatttcaaagggccttaagatcatgtccatcttaagcaagagtccaagcagcaacatgggttcttctcctttcttccatgaattcaagaaacaagcttctttcttcctcaaggagaagatcaaaacagctcgtttagctttaactgatgtcacccctgctcagctgttgactgaagaagctacgaatgggaatccatgggcaccaaacacccagtctcttggttccatctcaagggctgcttttgaattagatgattattggaggatcgtggagattttacataacanattggacaaatttgaaagaaagacatggagaacctcttacaattctctgatagtgcttgaaccattgttgactcatg

SEQ ID NO: 2473 - DNA, 540 bp, Gossypium hirsutum
  unsure (1)..(540): unsure at all n locations; Clone ID: LIB3083-057-Q1-L1-A11
ccgagttcaggnnntctatctatgtatagtgccccggtgcacctnntgatgtgggatggcaatagggagctgtcnnntcgactgtgtcttatgtggtctctcagtgacgaaaaccgacncnntggttattcaagnncatcnnataatgaaacagcccccggtgctttgagatatgcctttctggttcnngagtcttcttttgcagtgctttacctannatgtcacctncttcatannttgatatcttggattgtgaatcatttaccatttcaacaatnnagcaagtgcccatgatgggaaagccgaaatgtgccattttnttaatggaatccctnncagtttggataagaaagctnnttgttatgttcaaatttccaccagagaaatttgattggtattgatcccgtcatgatccgatattgcctaatcgaaaccgtcgtcttctttcgatatcaacatgnttgggattnagatggaccttcaaggctcctgtatatgtaggcacaagggtgttgttttcaacaggcaaggcatttgtat

SEQ ID NO: 2474 - DNA, 320 bp, Gossypium hirsutum
  Clone ID: LIB3083-057-Q1-L1-A12
ccggagatgattggaaaagaaatcgagaaggcaacatctagcatctagccattgcagaatgtgttcatccgcaaagtcaaaattttgaaggctccaaagtttgatcttgtgaagttaatggaggttcatggtgattactctgaagatgttggtgtgaaaatagagaggcctgcagatgaaaccatggctgaacctacccctgaggttattggagcttaaatcaagatttcttgaattttatctctttgttttttcgtactaaaaatttctgttggtcattttcattttgttggaagcttgagttgaatttgttcttggtt

SEQ ID NO: 2475 - DNA, 401 bp, Gossypium hirsutum
  Clone ID: LIB3083-057-Q1-L1-A9
gcattttgtaataaatccaaaaatgaaaaacatttttttgcccataagttaaaaaaaaaaaacaatgcgacaggtaaggccatggtatttctacagaagcaattttatccactctgtataatattccaaatgacaatgaacaccacttcccctaaagttcagcttctttatgatctttgcaaaaccacattttctaattctggtttgtcttcttctgcttcttcccaatccatccaaatcctctgctctcttctggacacgtttacccctgctgatgttggacttaaagagggaaatcctattgatgatgaagggcatggacgtgtagctcggtgtactcaacctattacatatttgcacattcacgaatgtgatggttttacgatgtgtatattctgctt

SEQ ID NO: 2476 - DNA, 267 bp, Gossypium hirsutum
  Clone ID: LIB3083-057-Q1-L1-B10
gaccaagaggatagttctagtcacaatgtcttcactaagggcagtgtgaaatggccatgtatcgacgaaccgcacattgaagatcggtaaaggccataaactatttgattaagggtgggcatgtcaagggagggcacagttttcttgtaaccaaaccagacatgattattttcgtactgatcaatcagagaaccttcttgctaaacgtatttcaccatgcgtacatgcagattcattctagacataccattcattcattacttccga

SEQ ID NO: 2477 - DNA, 432 bp, Gossypium hirsutum
  Clone ID: LIB3083-057-Q1-L1-B11
gtcatttgaaaatttttcgtcctggtattaacggtacagggtttcgagtttcatagagaaacctcgaaacttctacgtagtgagaggaaagtttgagtacgtgcgatggctcgctcgtggagagcaagcggctctttggtggctctagctatagtcttgtccggatgcttctttgcaatctcaattgccaaggaggaagccgcgaaattgggaacagtcatcggaattgatcttggtacaacttattcttgtgttggtgtgtacaaaaacggtcatgttgaaattatagccaatgaccaaggtaaccgtattactccatcgtgggtggctttcactgacagcgagaggctcatcggtgaggctgcaaagaatcaggcagctgttaacgcttaaagaaccatctttgacgtcaagatacttattggaagaaag

SEQ ID NO: 2478 - DNA, 445 bp, Gossypium hirsutum
  unsure (1)..(445): unsure at all n locations; Clone ID: LIB3083-057-Q1-L1-B12
gagttttggaagactttgtttccggttgctgtggcgcatgccattgtgcatgtatcagcaactgtgagtatgtctaaggttgcagtttcattcactcacataatcaagagtggtgagccagctttcagtgtcctggtttctagtctcttgcttggagagagcttccctcctgcggtttacctctcccttgttcccatcattggtggttgcgctcttgctgccgtaactgagctcaactttaatatgaccggttttatgggagctatgatatcgaacttggcatttgtcttccgtaacatattctccaagaagggcatgaaaggaaactccgttagtgggatgaactactatgctngtctatctatgttgtctcttgtaatactcacacctttcgcgattgctgtagaaagaccgcagatgtgggcagcaagatgggaaaaggcct

SEQ ID NO: 2479 - DNA, 404 bp, Gossypium hirsutum
  Clone ID: LIB3083-057-Q1-L1-B9
gaagaagggagtagcagagttcgaagaaacggcgccgggtgacttgggcccggccaatccctacaaagacccggtggccatgcttgaaatgagggagcatatagttcgagagaaatggattgacattgagaaagccaagatcctccgtgacaaggtcaggtggtgctaccgcatcgaaggggtcaaccatctccagaagtgccggcatctcgtacgccagtacctcgacgccacccgtggcatcggctggggcaaggatggccgtcatccctcccttcacggtccaaaggttgaagagatcgattcagaatgaatggctgcatttggtcatgataggtgactgactttgggcagcaaagtaaggagtgtgggatttgaataatcgtccacctacattgtcacta

SEQ ID NO: 2480 - DNA, 470 bp, Gossypium hirsutum
  unsure (1)..(470): unsure at all n locations; Clone ID: LIB3083-057-Q1-L1-C10
gtcaacactcccaccaagactcgggggctcggagctggggaagctgcggaccttacatattgggaaagtgctgcccgcatgatcgcggacgtatcgaaatctgacaagattgttgttgagaaatcaacagtccctgtcaaaactgctgaggcaattgaaaagattctcacccacaacagcaagggaatcaaattccaaattctttcgaacccagaatttcttgctgagggaactgcaattcaagatccttttaatcctgatcgtgttcttatcggaggccgggaaaccccagaaggcaataaggctgtccaagcattgaaggaggtttatgctcattgggttcctgaggagagaattcttaccaccaatctttggtctgcagagctttccaagcttgctgncaatgctttcttggctcaaaggatctcatncgtgaatgccatgtctgctctttgtgaggcaacccgggc

SEQ ID NO: 2481 - DNA, 421 bp, Gossypium hirsutum
  Clone ID: LIB3083-057-Q1-L1-C11
agaagatgtcctggcaagcgtatgtagatgatcacttggggtgtgaggttgagggcaaccatctctctgccgccgctatcattggccaagacggcagcgtttgggcccagagctccaatttccctcagttcaagccagaagaaatcactggcatcatgaatgacttttctgaacctggatcgcttgctccgactggattgtaccttggtggcacaaaatacatggtgatccaaggtgaacccggagctgttattcgagggaaaaagggccccggaggtgttactgttaaaaagaccaacctgtccttgatcattgggatctatgacgagccaatgactccaggtcagtgcaacatgattgtggaaaggcttggtgattatctcatagaccagggtctttgatcactttggtgtaaccttaa

SEQ ID NO: 2482 - DNA, 473 bp, Gossypium hirsutum
  unsure (1)..(473): unsure at all n locations; Clone ID: LIB3083-057-Q1-L1-C12
agagcatcagcaccaggcggcaactaaatactcttcccgacgtacccggtttaccaaccagaagccattttcgattaaaataacgaaataaaagcctatttttaatcaactttttatccatttttacccatttaagatccaacatttggcatttattccaaactttatctaaattttagaaaccctttttctgctagaaaaattattaataatggtagaaaaatagataaaaagttttaataaggtttttaagaaaaaaatctttttttttcttctgatattctgggaatccttatccataatctattcagcacttatcgtctntgcttaccttttctgtttattcgagatcgtttcttcttctctttttatttaccccagctccttctctttnttcttcttttaatcccctttccagattaaaaaagtttgggtggttggtttttttggctgggtttagaagtttttattat

SEQ ID NO: 2483 - DNA, 376 bp, Gossypium hirsutum
  Clone ID: LIB3083-057-Q1-L1-C9
ctttgcccgtggtttctacactattggcaaggagattggggacctcgggttggaccgcatcaggaaacttgctgataactgcactggtcttcaagggttccttgttttcaacgctgttggtggaggtaccgtgtccggtcttggttctctccttttggagcgtttgtctgtcgattatggcaagaaatccaagttgggtttcactgtctacccatctcctcaggtctccacttctgttgttgagccttacaacagtgttctctcaactcactcccttttggagcacactgatgtggctgttctccttgacaatgaagctatctacgacatttgcaagcgttctcttgacattgagcgtgccacctacaccaatctt

SEQ ID NO: 2484 - DNA, 395 bp, Gossypium hirsutum
  Clone ID: LIB3083-057-Q1-L1-D10
attatggtcactcttactgccttcaggctattctctctggtgctcaaggtagccctgttgctgtttcatggggatatgcacgttttgtgaatataagagatgccaagggagctactcccttgcacttagcagctcgtcaaaggcggcctgattgcgtacatatcctgttagacaatggtgctcttgtttgtgcttcaactggtggatatggttgtccaggaagcacacctcttcatttagctgctagaggtggatctcttgattgcatccgcaagttgttggcatggggtgcggaccgtcttcaaagagatgcatccgggagaataccttatgtagttgctctaaagcacatacatggagcatgtgcagctctgctaaatccttcatcagcagaa

SEQ ID NO: 2485 - DNA, 494 bp, Gossypium hirsutum
  unsure (1)..(494): unsure at all n locations; Clone ID: LIB3083-057-Q1-L1-D11
aatttccccatctctctcgtctctgggtctcgtaagttggtgaatagggttgtaattagtgccaatggctcggattgggacctctgcagctcacattgtgttggcaatatttgctgtggccatgtttgttgtgtccgggaccatggcacaggatattgctccttctcctgcaatggctaccggagcaggctctgctttgccggtttccgctgtcttcttatgctcttccatgttggtctctttaattgctctcttggtgcattgaattcaaagcttttcaagactttatgacattggctacccttaatttcactctcactggtgatgaggggagtagcctctaatcttctccgagataatatttgggtgttatcaaatttcaatttctctaaaagtttagatatctctatatatatcatggtaccataagtgacantaaatnntgattttgtaatggtaattggtgtgaattttcttatatatcatagatatat

SEQ ID NO: 2486 - DNA, 383 bp, Gossypium hirsutum
  Clone ID: LIB3083-057-Q1-L1-D12
agacgaaacatatggtaggggagcgaacaactaagagtgaggaaaaggagtactttgatcgccagccctagaagctcatgcaccagctgcttgcataaaaagctctagattttgcaaaagaagggatttcagcacgaaattgaagttgattttaaaaaccatggttgctactgctgtgacatcggcgtttttcccagtcacttcttcacctgactcctctgactcgaaaaacaagaagctcggaagcatcaagtcgaagccatcggtttcttctggaagtttgcaagtcaaggcaaatgctcaagcaccttcgaaaataaacggcactgaggcgtcgacgacttccgtggaaggttccaagaacgatgacggtgcaagttccc

SEQ ID NO: 2487 - DNA, 472 bp, Gossypium hirsutum
  Clone ID: LIB3083-057-Q1-L1-D9
aaggaggtgtcgcactagtggtctttggtgaacaaacaggggcccatcgggatgaggaagcctgaggagattaccaaggaggaatatgctgctttctacaagagccttacaaatgactgggaagagcatttggccgtcaagcacttctcagttgaggggcaacttgagttcaaggctgtcctctttgtccccaagagggctccttttgatctctttgacacaaggaagaagcccaacaacattaagctctatgtgagacgtgtctttatcatggacaactgcgaggagttgattcctgaattcctcagctttgttaagggtattgtcgactcagaggaccttcctttgaacatctcaagagaaatgttgcagcaaaacaagatcttgaaagttatccgcaagaacttggtaaagaagtgcattgagctcttctttaaatagcagagaacaaggaagattacaacaagtttta

SEQ ID NO: 2488 - DNA, 422 bp, Gossypium hirsutum
  Clone ID: LIB3083-057-Q1-L1-E10
gtccaatatgctttgagacttcccggtcaatcaatctgctcctcggtggccatgctcaaactcctgtggtttcgttgatgaatggttgaagaggaataagtcggttagtcttggtagtccttggtctcagtttcatcctgtttgtctgtaattctgttgacgtgagtgtgctaccttgtcttgtttatgcgccccctactgtcgagtttgaatggtatgtgttggcttaagtttcactttgttgttgtatactgctgctcgtgttatgtgctgagtcaaaataattaattgaataatatatatatagagtggtgagagagttaattttcattggtgtagtattccatccaccttcacttagcatctacagggatatgtattttcctggtgttttcggaaattgatgggactgctaaacatgt

SEQ ID NO: 2489 - DNA, 380 bp, Gossypium hirsutum
  Clone ID: LIB3083-057-Q1-L1-E11
aggaatcggagaatttaaaggaggaggtaaaggatgagaggccggatgtgcagactgaaacagttacagaggaggccaaagtagagaccgaggaacccgcggtggaagcagcggtggaggagaaaccagcggaggaggaaaagggagatgaaaaagctgaagagattcctgttgagaaagttgaagaatagagcgaccaataccatacgtaaggtggcaaaagcttaaaggagcttcttttttctataggctgtatgtcatagttggcggagtcatactactattatttatgattactatgtctgatgtgggatgatgagggctttctttttctttaatggttgtttttctgctttggggtttgatatttaatattgaac

SEQ ID NO: 2490 - DNA, 225 bp, Gossypium hirsutum
  Clone ID: LIB3083-057-Q1-L1-E12
cttaagcctgaaaattggcttcgggattccaattttaagtgaagaagggcgaatttggggttataccacacatatgagagataggcacattctcttaacacaggttggcaacccacactatgctgtccctgagatagtgtccgcggaactatacactctgcctcaaaaggatgcacgtagatgtggagttatatagtatgcgcttctcagaggcacactttcttt

SEQ ID NO: 2491 - DNA, 359 bp, Gossypium hirsutum
  Clone ID: LIB3083-057-Q1-L1-E9
tagtcttcattgcacgttatgctgaaaagctacgttcagaacgggacattgctcatttttaaccctgagctgctcctaacatgaccccatatgatacgaaactccacaatccatatgagacttacacagctctcatataaccgatacatatctcactatactgatgctactaatgtaccttttactggtcccagctctgcgacttcggaaaactatcccacaacttattcttacataaagttattgcttcatacatcaaatgttaacattgtcccctatcttcaaagtacaaaatctcaaccactatcttataattaacatttatttctcattcaacatacttaactcttatcttaata

SEQ ID NO: 2492 - DNA, 432 bp, Gossypium hirsutum
  Clone ID: LIB3083-057-Q1-L1-F10
tctagaactacggatgccccggctgaggagattcgcacgagtgatgccctaactttgggctcagtcctagtgctgattggtctgccggtgttgctgctattacttatctccggtcattgttgcagcaaggcccaaaaggtattcaggaagtggttcaaaacttctagaaggtaatgaaactgtttttccagcacttggatgatccccaccataaagttgcacaggctgccctttcaacccttgctgatattattccatcatgccgaaagccctttgagagttacatggaaaggatcttaccccatgttttctcacggttaattgatccaaaggagttggataggcagccttgctcaatgacgttggaaattgtcagcaaaacctatagcatagattccctgttacctgctttgcttcgttcacttgatgaac

SEQ ID NO: 2493 - DNA, 404 bp, Gossypium hirsutum
  Clone ID: LIB3083-057-Q1-L1-F11
ccaatttccttcattataagccaataaaaaaaaaaatccctggccatttggctaccttcctcttccgttacacgtttccgtttcctctcttatctctctcatttttagaaaatggctcaagtggtggccactagatcgatccacggctcattcttgtgccagggcactggatccgttcaagagcgagctgtcaagcttaagcctgcgagcttcggttctaaagtgctggcactggacgagaagaagaacaagagagtcgtgctcgggaagaactctcggattaccgctaagagatccgtacgcgccgaacctgaaattattcccgtatcgccggaggatgtgcctgagagggaggagcaatatgagcaatttagggggattcagcaagtaggtgacacatcggt

SEQ ID NO: 2494 - DNA, 436 bp, Gossypium hirsutum
  unsure (1)..(436): unsure at all n locations; Clone ID: LIB3083-057-Q1-L1-F12
aaaatacctctttgctggagttgtcgatggaaggaacatttgggccaatgatcttgcttcttctcttagcaccttgcagcagctcgaagctattgtgggcaaagacaagcttgtggcgtctacctcctgctcgcttctccacactgccgttgatctagtaaacgagactaagctagatgatgaaatcaaatcctggctcgcatttgctgcccagaaagttgttgaagtcaatgcacttgccaaggcgttggctggtcagaaggatgaggccttcttcgcagccaatgctgctgctcaggcttctaggaaatcctccccgagagtgactaatgaggctgttcaaaaggctgctgctgctttgaagggctctgaccaccgtcgtgcaacaaatgttagtgctagactcgatgcccagcanaaaaaagcttaacttacc

SEQ ID NO: 2495 - DNA, 491 bp, Gossypium hirsutum
  Clone ID: LIB3083-057-Q1-L1-F9
ccttggccgactacttcatccagaaggagtcaactctcgagcttgtcgttcgtttgcgcggcgggatgcaaatcttcgttaagacgcttaccggaaagacgatcactctcgaggtcgagagctctgacacgatcgacaacgtgaaagccaaaatccaagacaaggaaggcatcccgccagaccagcaacgtctcatcttcgccggaaagcaactcgaggacgggcggactttagccgattacaatatccagaaggaatcgactcttcatctggttctacgtcttcgaggtgggatgcagatcttcgtcaagactttgaccggtaagaccattactttagaagtggagagctcggatacgattgataacgtgaaagcgaagattcaggacaaagaaggaattccaccagatcagcaaaggttgatttttgctgggaaacagctggaagatggaaggactttggctgattacaatattcaaaagagttcactc

SEQ ID NO: 2496 - DNA, 444 bp, Gossypium hirsutum
  unsure (1)..(444): unsure at all n locations; Clone ID: LIB3083-057-Q1-L1-G10
gtgaaagtggagttggaaaagacccaactaatgaggagttaaagaagcgggcaaagcaaattgatttaaagaagttggaacaggaaccacgtgaagcccaagtttctaaggctcttgtagaggctaaggacctcgtttctgccattgaagatagaaggttgaagcttgggaatgcaatgtatagagaacttaccggattaaggaagccggttttggataaaaatggaattcttcattggcctgttttgctactctatgcggagtttatgtccagtgattttatagaggacttctgcgaaaccgacatgttttcagctcaccttgatatcatgttttcagaaagttgcccacctttaccatgggataaggaaaaccattattcccgtgacgcgattgaactctactatgaggctggttctgngatttgcctgtctaagagaaaaa

SEQ ID NO: 2497 - DNA, 465 bp, Gossypium hirsutum
  unsure (1)..(465): unsure at all n locations; Clone ID: LIB3083-057-Q1-L1-G11
ccgatatgagatgttgggtggtggagctaatgttgtgaaccatggctgcactaanggtgatggtcttggtgctgagataattgggacttttgtgcttgtttacactgttttctctgctactgatgctaagagaaatgccagagactcccatgttcctatcttggctccacttccgattgggtttgcagtgttcttggttcatttggccaccattcccatcactggaactggtattaacccagcaaggagtcttggagctgccatcatatacaacaaagaccatgcttgggatgaccattgggtgttctgggttggacccttcattggagctgcacttgctgcagtttaccaccagataatcattagagctattccattcaagaccagagattgaaatgattaaatctgtgtgtgtgtgtgtgtggggatcttcatctactttntggttcctactagtccctttgt

SEQ ID NO: 2498 - DNA, 470 bp, Gossypium hirsutum
  Clone ID: LIB3083-057-Q1-L1-G12
gaaaaaaaaaatgttttcaaatggaactgacaactcaacttctaagagtcctccaagtccttctcctttgagattttccaagttttttcagtccaacatgagaattcttgttactggtggagctggattcattggctcccatttagtggataaattgatggagaatgaaaagaatgaggttattgtcgtcgataactactttaccggcacaaaggacaatctcaagaaatggatcggacatccgagatttgagctcattcgtcatgatgtcactgagccgttgctcattgaggttgatcagatctaccatcttgcttgcccggcttcgccaatcttttacaaatacaatcctgttaagacaataaagacgaatgtgatcggtacattgaacatgttgggtctggcaaaacgtgtcggaaccaaggatttacttaccttaacttcaaaagtttatggagatcccttgaaca

SEQ ID NO: 2499 - DNA, 473 bp, Gossypium hirsutum
  Clone ID: LIB3083-057-Q1-L1-G9
aaagttgaaaagggcatatggtaaaatcgtgcacaaactcagagagcaaccatatcagccatctaaacgaatcaagtcatactagattcaacatgtagccaatttacaatggcaaagcatcacattgcctctctgctaacacactcagaaaccaaacacctaatctgaatctgattcagatttatgatcatccgcatttgctttctcttttccttcagcttccttaacagccttcccaaaggcatcaacgggaatcgatggtagatacccaaccacaggataaccttttccactcttctcctttaaccaactgttgtatttctcacacaaattagctgctttgggaacaaccttttctgtcactgagttgaaagtcgagttgcggttcagtttaacccacaacttggtcgagcttaccagcaccaagttcttgtactcagctgcagcgtaatgcaaagcccctcgtgctccat

SEQ ID NO: 2500 - DNA, 443 bp, Gossypium hirsutum
  unsure (1)..(443): unsure at all n locations; Clone ID: LIB3083-057-Q1-L1-H10
gatcatgctgatcgtcttttcaattgcataagagacacttggttgaggtctgctgggaagggtaatacatcagatgtgaaagaactgattccagaattcttttacatgcctgaatttttggaaaatcgcttcaaccttgacttgggggagaagcagtcaggggaaaaggttggagatgttgtcctacctccttgggccaaaggcagtgctagggagtcatcaggaagcatagagaggccctagaatctgattntgtctcagaaaatctgcaccattggatagacctcatttttggatataaacaaaggggaaaggcggctgaagaaactgttaatggtttctaccattacacatatgaaagaagtgtatacatagactcggttacagatcctttaaatgaaagccatcattttagctcagatcaatcattttggacagacacc

SEQ ID NO: 2501 - DNA, 498 bp, Gossypium hirsutum
  Clone ID: LIB3083-057-Q1-L1-H11
ccacaattggcttcttaatacgaaaagcacgaagagtctgaatacaaggagccaaaatatcatgaagagtacccaaaacatgagaagcctgaaatgtacaaggaggaaaaacaaaaaccctgcaaacatcatgaagagtaccacgagtcacgcgaatcgaaggagcacgaagagtacgataaagaaaaacccgatttccccaaatgggaaaagcctaaagagcacgagaaacacgaagtcgaatatccgaaaatacccgagtacaaggacaaacaagatgaggataaggaacataaaaatgaagagtaccacgaatcacgtgaatcgaaggagcacgaagaatacgagaaagaaaaacccgagttccccaaacgggaaaagcctaaagagcacgagaaacacgaagtcgaatattctgaaatacccgagtacaatgaaaaggaagataagagtaagaaacataaagatgaatagtgccaggagtcacacgaatcgaaa

SEQ ID NO: 2502 - DNA, 437 bp, Gossypium hirsutum
  unsure (1)..(437): unsure at all n locations; Clone ID: LIB3083-057-Q1-L1-H12
cagtgataatgctgtaggcattgctgagatggctggcatgagccacggaattctagagagaactgatgctcttgatgctgcaggaaacaccactgctgctattggaaagggtttcgccattggttcagcagcccttgtgtcccttgccctctttggtgcctttgtgagccgtgctgctatttcaacagttgatgtattgacccctaaagtttttattgggttgcttgtcggggcaatgcttccttactggttctctgctatgaccatgaagagtgtgggaagtgctgctttgaagatggttgaggaagtgcgtcggcaatttaacacgatcccaggtctcatggaaggcactgctaagccagactatgctacctgtgttaaaatctctactgatgcttncatcaaagaaatgatcccacctggtgcgctaggtatgc

SEQ ID NO: 2503 - DNA, 423 bp, Gossypium hirsutum
  Clone ID: LIB3083-057-Q1-L1-H9
aaaaaacagatatgattgaggtgattactatccatattggccaagctgcaattcatgtcaaaaattcctgctgggagctttattgtcttgaacatggaattcaacccgatgggatgatgcctagtgacaccacagtaggtgcttgccacgatgcttttaataccttctttagtgagactgggtcaggcaagcatgtgccaagggctatatttgttgatctaaagcccactgtcattgatgaagttagaaccggtacctatagacaactgtttcatccggagcaacttatttacggaaaggaagatgctgctaataactttgctagaggacattatactgttggtagggagattgtggatctttgccttgaccgagcgagaaaattggctgataactgcacttgactacaatgatttttggtat

SEQ ID NO: 2504 - DNA, 114 bp, Gossypium hirsutum
  Clone ID: LIB3083-058-Q1-L1-A7
agataattttctcttttcataagtttttgatctctggaagtctttgttttagtttaaagtttcacattttctttttaattccttttctccccccctttttttttgtggtgtgat

SEQ ID NO: 2505 - DNA, 372 bp, Gossypium hirsutum
  Clone ID: LIB3083-058-Q1-L1-B3
cactgaatgttccgtacacgccctcaagaacggatggatcgagaatgtttccaacgagatggtcatcaactcctggtccaaggttgtatatgtggtgagtgacaacatcgagggacttgtttgtcttatcaatatattccgtgaaccaatccgagtcatagaaccctcccggtgtgataattaacggcttcaaatcaacattctggtatatcttctgcactatactttgcagagctgctgtgtcagccgcatactggtctgcagagacccgagttccgaccccgcttccgcacaattcattttctaactcccaaccgtgaatggtatagttcttgtcaacagtgtattgcataaaagattcggcattggtgt

SEQ ID NO: 2506 - DNA, 335 bp, Gossypium hirsutum
  Clone ID: LIB3083-058-Q1-L1-B7
ctttttcaacttttaccctaaccacccaaccgatctatggcatatttaaacacaacttctctatccccaaacccctccggggaaaaccaccaactcaacctccaacttaatacaaatatcttaaaaaaaaaaccatcatttttaaagaatatttcaacttaacctactatattaagcattacaacgcccccaagaactaaaaactccagcataccacccttaatattataaaaaagcaatctccgttgcatttaataaaagcccaccttcttattaaccttattcaaagcttctccagtactcttttattaagaaagatctcacaactaaagaca

SEQ ID NO: 2507 - DNA, 365 bp, Gossypium hirsutum
  unsure (1)..(365): unsure at all n locations; Clone ID: LIB3083-058-Q1-L1-B8
ctctttccgattgtcaaggagtatgttcttggtctggagatgtagcgtaanctaanaaaaattaaaaacaatccantacnccaccangagcttgctgcctacttcactcactgcaaccttcaattaccacacctaaaacttgccctgctgaatgcaatgactgtctgctacaaagcaaaaaacatggctacagcaggtaactttgcccggcgactgctagaaacaaaccccacaaatgagaatcaagcgaagacagccaggcaagtgcttcaagctgctgagaagaacatgacagatgcttctcagctgaactatgatttcaaaaatccatttgtgacatgtggggcaacttatgtgcctattta

SEQ ID NO: 2508 - DNA, 406 bp, Gossypium hirsutum
  unsure (1)..(406): unsure at all n locations; Clone ID: LIB3083-058-Q1-L1-B9
actgtatgaaagattgttggaccggnntgagtgtgggtgtggtctgcgggctttttataatttcaaaataccgtnattgcccnatgaaagtatatgttcctgatcgtgacgcgtggcagtacgtaagtggtgataaattcccacgtgaggcaatgcagaggccattctctgtgagtggagtggaagggagaatctacgtggtgtcaagtgggctaaacgtggcaatagggacaccaatcgagggacaaaacgcggagttaatggcgaagtgggaggtggtggctgccccaaagggtttccacgacttctcccctttgagttgccaagtgctttatgcctagaaatccctctttcatacaaaatgctacctataactgtaaggcagtgggaatttacactttttaca

SEQ ID NO: 2509 - DNA, 373 bp, Gossypium hirsutum
  unsure (1)..(373): unsure at all n locations; Clone ID: LIB3083-058-Q1-L1-C1
cttaatttgattgttcagttaattatatcaattgcttaagttggatggtattatgggtgatggtgatgtcaaattgcaaagaaaaatgcangtgagaagagttcaaaaatatgttgaaacattggatatgttgaagattaaaaacgccatgcctaacaccaatggagctcaatccgaaacacagaatcgacataagcatagtgttcgaaaacaagagcagcaatccaggcaaagattagcaccaattcaggagcaacaatcgagcaactcggtttctcatttgccaatccatcaacaataccagcacaagcaccagcaccagcaggcatctggtcccgtcgtagttaccacgaaatgggaaacattcgattca

SEQ ID NO: 2510 - DNA, 355 bp, Gossypium hirsutum
  unsure (1)..(355): unsure at all n locations; Clone ID: LIB3083-058-Q1-L1-C7
gntttttnnnnntttttttttttttaataaactcatgggggaaagggcaangttagaacgtatatacctaaatataatnncatttaaaacattacactaaaaaaccatgtttgaattattgttgtataaaagttcccccctctttccttggaattatagatacaagaagaagatgcttgaaactaattttaatctcatatcatggttgctatcaactaaacttaggtgcaaccaccagttctaaacccaatcattcgtctagtaccatcatatactacttccaatgtcttctgctgtgtgttcccgtatatcagcacatcgaaatcgttagtgtttcctgcaaatgctaggcaca

SEQ ID NO: 2511 - DNA, 386 bp, Gossypium hirsutum
  Clone ID: LIB3083-058-Q1-L1-D8
tctaattgtgctgatggtcttgttgatgctgtcatgggctcaactggcattaccatctccaacaaccacatgacccaccacaatgaggtgatgttgctagggcacagtgactcctacacaagggacaagcaaatgcaagtgaccattgcctacaaccatttcggagagggactaatccagagaatgccaaggtgtaggcatggatatttccatgtggtgaacaatgactacactcactgggaaatgtatgctattggtggaagtgcaaaccccaccatcaacagccagggtaacagatatgcagctccaaccaacccatttgcaaaggaggttaccaagagagtggatacagctgaagggcaatggaagagctggaattggaagtc

SEQ ID NO: 2512 - DNA, 191 bp, Gossypium hirsutum
  unsure (1)..(191): unsure at all n locations; Clone ID: LIB3083-058-Q1-L1-D9
cccaattacctattccctatgacctaaaattttancatttcacccacttttaaacattccctacatctaaatatccaactatctcattatcaaatntcaaccaaattatcattnnttaatcattatttccatcacttctcctaacataaaatnattttaattttaacaccatcataatacaatttaacaca

SEQ ID NO: 2513 - DNA, 305 bp, Gossypium hirsutum
  unsure (1)..(305): unsure at all n locations; Clone ID: LIB3083-058-Q1-L1-E1
cnccacattacctttctcgccgatcctcgcactcacccgaagctttggcctccctggtaagctcatgaacgccncccaaagccccaatgaacaagtgttttgaacagaatatgtgtcgctgcatgtgaggaagagtaacagggcagctgttaatttgtatactcagacgttgggatataagattcatgatgtggaggccaagtattatgcagatggggaggatgcatatgacatgaagaagcagtttaaggaaagactaaccatcatcatggtcatcatcatcaccaccaccaccaccaccatca

SEQ ID NO: 2514 - DNA, 390 bp, Gossypium hirsutum
  unsure (1)..(390): unsure at all n locations; Clone ID: LIB3083-058-Q1-L1-F7
cgcatgttcaagccttatttcaaggcaattaaaaagcgggtagaggagctgattactcgagattatcttgagagagacaagganaaccccaacgtattcaggtacttggcatgattttgcctagtcattatgctgacgaagtggtgaatattgcttggagcaaatagagctcaaaaggatgggatgcgattggtcagtggtgaaagtggcgtaagcacaatgagatgccacctgatgagtgcttgagcaggagctaagatacttgtacagtaggagccaggtatggcaaatttcaataacttatgaaatcaacccggacaaatcatgattgatctcataatatggtccggtgtggcatgaaaaaccatagggtatctggtttcttattac

SEQ ID NO: 2515 - DNA, 369 bp, Gossypium hirsutum
  Clone ID: LIB3083-058-Q1-L1-F8
gaaatttggtttcatcaaggtggtaaaggtccaaattggatgggtggtaggattcctgatggtggtaaccaaattggtattcaggcttccaatttgcatcctaacgttaatggagttagatcaaaccagcaccagttgtctcagcagcaccaacaccaacaaccaatctttcctaagcaaacaggggtggggtatggagctcagatacctttacaaagtggcggtcagttggggagtcctggaattcggagtggaatgcatgggattggggatcagggaataagtaatggtctgattcaagcaggtgcactgcaaggtggaagcatggggatggttggtttatgaaccggatcacctgctaaccaactt

SEQ ID NO: 2516 - DNA, 418 bp, Gossypium hirsutum
  Clone ID: LIB3083-058-Q1-L1-F9
gtcaattgtttgagctagctagctcttactcaaatggcgaaccaaaacgatgatgttgcaaatattttcacttttcttctttttgttcagtatctgcaactccattttccttggtgctaatggagatgacaatggtggttggcaaactgcccatgccaccttctacggtggtgctgatgctaccggcacaatggggggagcttgtggttatggaaacctgtacagtcaagggtatggaacgagcacagcagctttgagcactgcacttttcaacaatggcttgagctgcggtgcctgctacgagctccggtgcaacaatgatcctcaatggtgcattagtcgaaccataaccgtgacagccaccaacttttgtccccctaacctatgcttatctagtgacaatggcgggtggtgcaat

SEQ ID NO: 2517 - DNA, 393 bp, Gossypium hirsutum
  Clone ID: LIB3083-059-Q1-L1-A10
gctctctctgtcttaacgctataatcattgaagaaaaatgggtttgaaggaggaattctaggagtatgcggagaaagctaagacccttccccagaacactaccaacgacgacaagctcattctctatggactctacaagcaagctactgttggaccagtgaacaccagccgtcctggaatgttcaacatgaaggaaaagtacaagtgggatgcatggaaggctgttgaagtttttgatagggaaatcgaaggaggaagcaatgaacgattatatcactaatgtaaaacagctgcaagaggctgctgctgcatcttcttgacgtgtgtgtgagaatagaaaatggtgtaaattttcaagccctttgatacctatgggtttgaaaaggtctaaac

SEQ ID NO: 2518 - DNA, 366 bp, Gossypium hirsutum
  unsure (1)..(366): unsure at all n locations; Clone ID: LIB3083-059-Q1-L1-A11
tctagttttttttttttttttttttttttttttggtttgtttttttttttcagaggaatttctaatatatttatagnaccaaattccatagttaccaaaaagcaacatcccatacaaaaccatatgcatccgtacgagtctagtatctatctactgatgtaaagatgttcgtaaacaaaaaaacataagccaggaaaccacatttctaacacccaaaccaggaattcaggttgaaagaacagaaaagaaaattccaaatcgttaagaaagcaaacagtaagaaacacacactactactattcctggagatcctcctccgcatcctcctcctaataatcatactcctcatcagctgttgcatcttga

SEQ ID NO: 2519 - DNA, 349 bp, Gossypium hirsutum
  Clone ID: LIB3083-059-Q1-L1-A12
tagttacaaaaaagaaggtccaaaccctacaaaaatggcggagaaattggctcctgaaaaacgacacagttttctccacaacggtgaaaaggtatttgaatgggatcaaaccttggaagaggtgaatatttacataaacttaccgccgaatgttcactccaaacagttttactgtaagattcagtccaaacatgtcgaagttggcatcaaaggcaaccctccttatctcaatcatgatttgttctccccagtgaagacggattcatctttttggacgctagaggatgatataatgcacataactttgcaaaagagggacaagggtcagacatggtcgtcaccgatacta

SEQ ID NO: 2520 - DNA, 125 bp, Gossypium hirsutum
  Clone ID: LIB3083-059-Q1-L1-A3
tgcctaaatctttaaaatccctcatatatcaataaaatataccgagattgtttttaattgtctttccattttgtaacaagattccacttataaataacttttacttcaacctcaaattcctaaaa

SEQ ID NO: 2521 - DNA, 309 bp, Gossypium hirsutum
  Clone ID: LIB3083-059-Q1-L1-A7
gtaaaaagtaggtttggtaagcaacgataatgggggaaatgatcctcctgaagaagatgattatctcttggctgaagctcgccagcctctatggcgaaaagtgccaatttcgtcaagtctgataagcccttaccggatagtcatcgtcctccgattcttcatcctcgcatttttcctccggttccgtattctaacacccgcctacgacgcttacccgttatggctaatctctgtcatctgcgaagtttggttcgccttctcctggattctcgatcagttccctaaatggttccctattactcgcgaaac

SEQ ID NO: 2522 - DNA, 275 bp, Gossypium hirsutum
  Clone ID: LIB3083-059-Q1-L1-B10
acaaggcctaccgatgcgtgtttgaagaagaagacaaagacggcaaagttgggatatcattatctaaagatctcatggctatagctggagaggctttaaaatccaacattaccacaatagggcctttggtgcttccagggtcggaacaactcctatttcttctcactctgatcgggcgtaaagtcttcaaccccaagtggaagccttatatcccagacttcaagctggcgtttgagcacttctgcatccatgctggagggcgagcagtgatagat

SEQ ID NO: 2523 - DNA, 355 bp, Gossypium hirsutum
  unsure (1)..(355): unsure at all n locations; Clone ID: LIB3083-059-Q1-L1-B11
ggatggtggtaaccggaggaggcttacgcttttggagcagatttcggcggtcgagaacggccgggatgctctggccggtttaactctcgacgccgttttgggaaacgctaagcggcctgagcaaccgcctgctcagaaccgtacccttctggagattatacgagacgatgattccaacaaggagaagaagagttggaaagcgttacgggacaagctccggctcaaacgactggcggtgtctgctcggacctcctcggttcgtatcccggcttctgatgttattgttaatgataataatagatcccagttctcgcggcacggntcgtttcgtttcactcggctgactcgactggtg

SEQ ID NO: 2524 - DNA, 350 bp, Gossypium hirsutum
  unsure (1)..(350): unsure at all n locations; Clone ID: LIB3083-059-Q1-L1-B12
ccctgttcacaagaaggtaagggagatgttgagggcggcggatagagaagtgcttgggtccgaccggaaagacggcggagccttcttggccggtttcgcaatgccacatgatccgccggaggcgctcgggaagcgcgggtatcatatggtttccggtgccgttgatgttgggttgttcagaaatgcggtggtggaggatgttaggaagtttaagattagtctcaatgctgattctgattattccgatgatgataaagattccgatgagaagtattggagtgaataaaaaatatagattgaaaatttcattttggttgctgtttgcgttatcgtttggntgcaatcctttt

SEQ ID NO: 2525 - DNA, 394 bp, Gossypium hirsutum
  Clone ID: LIB3083-059-Q1-L1-B7
aaacactatatgttgaaatcaaaagatgggctgctgggaaagagggaaatttgcgtgctctgctgtcaactctgcaatatgttctttggcctgaatgtggctggcagcctgtttctttgacagatttaatcaccgctgccgcagttaaaaaggtttacagaaaggcaactctttgcatccatcctgataaagtccagcaaaaaggtgccaatcttcagcagaaatatgttgcagagaaggtgtttgacttgctcaaggaagcatggaataagttcaattcagaggagcttttctgagttcaaatcgttgattatatagctaaagaaattcgtcgtttgacaaactaggcattggagttgaatgaaaacacgactgtccagcagctataattcgc

SEQ ID NO: 2526 - DNA, 421 bp, Gossypium hirsutum
  Clone ID: LIB3083-059-Q1-L1-B8
cctgaactcaagaagaggaaaatccctaagccaccgcctggccggactgttgcttcacctgcttcaaagactctcaaagatgcaaaaccaacaagtagtttgaggattccaggtgtacaaacaagtgatattaatagtttcagaatccaacaagacaaaaattttgctgtagcacaacaagacggctgcaccggaaattttatgaaatttgattcatggtatgggaattttctggtaccggttgttccatcacgggcagaacttaacagataagtatttcttgtatcatattaattttgatatgattttgtttgcaaacaatgtgacagttgtttaagtccttgcttttgctatatggatcataagattcttctccggctgctggttctcatttgtttgacaacaagagatccaatagtac

SEQ ID NO: 2527 - DNA, 256 bp, Gossypium hirsutum
  unsure (1)..(256): unsure at all n locations; Clone ID: LIB3083-059-Q1-L1-B9
ttttagctctctattccacgccattgttcttgtgtttatctcattttgaggagggtattgtttgatctaaggaagaaatggttgtttctgggccaattacgcctggacaggtgtcttttcttttaggaattcttcctgttttcgttgcatggatatattcagagttcctagaatacaagagatctgcatctcattctaaagtccatgcagacaataatctggttgaatcangagatgagaaaattaaagaagatga

SEQ ID NO: 2528 - DNA, 281 bp, Gossypium hirsutum
  unsure (1)..(281): unsure at all n locations; Clone ID: LIB3083-059-Q1-L1-C11
attggaggaatagtaagaaattgggcattgaacaaatgttaaacaaaaggactaagatttattataaccaagacaacatgcatacttgatactgcctctcctaataaccatacaagcaaaacaataaacataagcaaagaaaggtggtttgggacccaagaaacccatccctttacagataacagatgacccataaaaattcccccacaatggaacttgaagtatgtcactctttgacatatgcaaatgcatgttaacctagccacattgcangactacta

SEQ ID NO: 2529 - DNA, 336 bp, Gossypium hirsutum
  Clone ID: LIB3083-059-Q1-L1-C12
aaatttccttcttttcccatctaataaaaggaagggggcggcttaatctgctgtgtcgtctgcttgtcaaagtggaaatagatacgattgaatcttcttttatgtctgaacgggcctctctctttttgtcgtcatttggattactcggagagtactgtcccaagtctagaaaaaagaatataatttcctcttctgaaataatctgcatgcatattgaggctaataacacacactgtctcggttgccattgtgcaaggaggctgtctggtaaaaacttttgcattgcgatcgaaaacacaagtatttgatcttgcctttctgattaacgctcaccta

SEQ ID NO: 2530 - DNA, 410 bp, Gossypium hirsutum
  Clone ID: LIB3083-059-Q1-L1-C7
gacccttgtagattacaacatccagaaggagtcgaccctccacctggtccttcgggtccgcggcgggatgcaaattttcgtgaagaccctgactggaaagaccatcaccctggaagttgagagctcagacacgattgataatgttaaggccaagatccaggataaggaaggaatcccaccagaccagcagaggctgatttttgctgggaagcaacttgaagatgggaggacccttgcagattacaacatccagaaggaatccactttgcacctggtccttcgcctccgcggtggcttttaagtgtggtgccgaacacctgtccagttattgttgatgtgttaagtttgtatgtgtgtgggtcgtatgctaatgtgagctggccactaggctggggaagcttacgagtaaa

SEQ ID NO: 2531 - DNA, 381 bp, Gossypium hirsutum
  Clone ID: LIB3083-059-Q1-L1-C8
tgttagattagttagcgaaaggagaagaattcgggaagaatgcaaagaaaaagctgaatggttggggcttgtttagttctaaatacgaagacgccgccgatttatttgataaagctgctaattgcttcaagcttgccaaatcatgggacaaagctggatcaacttatgtaaagttggcgaattgccatttgaaatcagacagcaagcatgaaacagctcaagcttatgttgatgctgctcattgttataagaaaacagctacaaaggaggctatatcttgcttgcagcaagcagtgaacttgttttgtgatattggaaggctaagcatggctgcaaggtattataaggaaattgctgaattatacgagtctgaacagaaca

SEQ ID NO: 2532 - DNA, 347 bp, Gossypium hirsutum
  Clone ID: LIB3083-059-Q1-L1-C9
attaacgaagttctaccgccatggggagaagacgtgcgtgttgttatcgtgggatgaaaaacaaaccttacccgaagtcacgttattgtcgtggtgttcctgatcccaagattaggatttatgatgtgggaatgaaaaagaagggtgtggatgagttccctttctgtgttcacttggtctcttgggagaaggaaaatgtctctagtgaagctctggaagctgctcgtattgcttgcaacaagtatatggctaagtatgctggaaaggatgccttccacttgcgagtccgtgttcacccattccatgtcttgcgtatcaacaaaatgctttcatgtgctggagctgat

SEQ ID NO: 2533 - DNA, 338 bp, Gossypium hirsutum
  unsure (1)..(338): unsure at all n locations; Clone ID: LIB3083-059-Q1-L1-D6
tgataaattaaaagaagggatgggagttttaggcgagggggtttattggatggtatggctaacattcntgtccatgtcngtggtgccagcgtgcttggacgcccaggtacttttgcctaaagcgcttttccccgatgtgctgggtcgtgtatattcatggtatacgaccacataccaagattatttgctgttggatgagcctcattttttcatggcacttatgaaattggagcttgttttagtattgccgcttgctatacttaacacttatggcttgttgaccttcaagccctggttcaacaccacctgcctcatcttcggttctgctcttgttacct

SEQ ID NO: 2534 - DNA, 394 bp, Gossypium hirsutum
  unsure (1)..(394): unsure at all n locations; Clone ID: LIB3083-059-Q1-L1-D7
ctcttgcctctttggcaagcctactgcagatgtggcttgtattcacctcccttggagcaagcttganaaagcagaaattgtcgttgatgtcctcataaagaacccaaaccctgttccaatccccctcgtcgacattgactacctcattgaaagtgatggtagaaaactcctttcaggcttgattccagatgctggaaccatccatgctcatggtgaggagactgtcaaaataccagttactttgatatatgatgatatcaaaagtacatatgatgacattaagcctggcagcatcattccatataggctgaaagttgatctcattgttgatgttcctgtttttgggaggttaactttacctcttgagaaaactggaaagatccctataccttac

SEQ ID NO: 2535 - DNA, 378 bp, Gossypium hirsutum
  Clone ID: LIB3083-059-Q1-L1-D8
gccacatcatttggagattcattggttttcgatgatcaggtcttgcgtcacagttcgccttttgactggtttccttgcaacgattctcctgcgggttttgaagaatgatttcatcaagtatggtcaagatgaagaagcagctgatgaccaagaagaaactggatggaaatatattcacggagatgtattccggttcccaaagtacaaatctttgtttgctgctgctcttggatctggaactcagctgtttactttaacggttttcatttttatgcttgcattggttggtgtcttttatccgtacaatcgaggagctctattcactgcccttgtggtcatatatgcacttacatcaagaattgcaagatatactgcaac

SEQ ID NO: 2536 - DNA, 180 bp, Gossypium hirsutum
  unsure (1)..(180): unsure at all n locations; Clone ID: LIB3083-059-Q1-L1-D9
taaaaaaaaancttnnttnntcctnatatgcaaatacccatatatctntttaatgccaaaaattcttcccggttctctttttttctttccactagagcttatatcttattttataaatctttcaactacttatacctctatcatatattatactgattttaatccccattcttatttaca

SEQ ID NO: 2537 - DNA, 258 bp, Gossypium hirsutum
  unsure (1)..(258): unsure at all n locations; Clone ID: LIB3083-059-Q1-L1-E4
cctcanaattcncaccaggagtcacttctgaagctgatgacaggtgaatgcgctccgatatatagaatggtcgcgcgacataaccatctncnaattgcacaattccatcancatttggcagagaaactggatatggaaatgtcagctctgcagtacatgataagagaataccctggaaatgaggaagagaagatgagaggtgcaattgggaagtttggattgtcagggaaagcgcaagttatgccaatgaagaactta

SEQ ID NO: 2538 - DNA, 371 bp, Gossypium hirsutum
  unsure (1)..(371): unsure at all n locations; Clone ID: LIB3083-059-Q1-L1-E6
ctcaccaggatagngattagaatctaatcacctattttgggggcgggtttaantacgaggcgggcctgcccacttcttcantaacangtgatttggagcgaactcggattgacaacatgagcacattctacctgaaagagacctcgctggatcaaacaattgaaacagaggctcattttttngatgttggagttgaatctttggatgccgtgtcgtccggggcagatacaataagcaggtcaaaggagccaaacatcgcagaaaatccagtcctacgtgatcggaagggtcaacattatggctcggaatgtggcacctaactttctgtcactttcactctcgactcacctgataaatattaaatttgaacc

SEQ ID NO: 2539 - DNA, 379 bp, Gossypium hirsutum
  Clone ID: LIB3083-059-Q1-L1-E8
gtgatactttttatataaataaacacacaaataaggaaagtttacaatccaaatttggcatacaatcaatcacatattttcaatcaaaattcttcacaaaatgcatcaaattcacaacacaaatcacacatggctcgttaagcatcaaatgacaaatcaccaagtagtccccaaaaacaccattggctttttttttcttttttcttttaagttgaattttaaaaaaaataataatcaccttaattttccattgcctcatcttcataatcttcatcattgtcatctgcaacagcatcttgatattgctgatactccgaaaccagatcattcatgttactttccccttccctaaactccatttcatccattccttccctgt

SEQ ID NO: 2540 - DNA, 323 bp, Gossypium hirsutum
  unsure (1)..(323): unsure at all n locations; Clone ID: LIB3083-059-Q1-L1-E9
ccaaatcgtgaggcaaattctgggaagttgttagcgacggacatggcattgatcccggggggaactacntcggtacttctcgtgttcagcttgagagggttaatgtttactacaacgaagctagtggtggtcgttacgtacccagagctgttttaatggaccttgaaccaggaaccatggatagcttgcgtactggtccgcacggacaactttttagacctgataacttcatttttggccaaaatggagctgggaataactgggctaagggtcattacactgaaggagctgaattgattgattcngttcttgatgttgttcga

SEQ ID NO: 2541 - DNA, 189 bp, Gossypium hirsutum
  Clone ID: LIB3083-059-Q1-L1-F1
ctcccatctatctttttcttctttttttcttttttttttcttttttttttttttttttttttttttcttttcttttattttttccttcttttatcttttatttttttttttctattttttttttcctttttttttttttttatttttttttttctctttcttcttttctttcctttttttttttttatt

SEQ ID NO: 2542 - DNA, 321 bp, Gossypium hirsutum
  Clone ID: LIB3083-059-Q1-L1-F10
ttccttccaaacacacactctaatctgggccgggaaacaattcgaaaacggccggaccttgcccgattacaacatccaaaaggagtcaactctccacctcgtcctccgtctgcgcggtgggatgcaaatcttcgtgaaaaccttgactggcaagacaatcactctcgaggtcgagagctccgacacgatcgacaacgttaaagcgaagatccaagacaaggaaggcattctcccagaccagcaacgtctcatctttgccggaaaacaactcgaaaacggccgtaccttggccgactacaacatccagaaggagtcaactct

SEQ ID NO: 2543 - DNA, 367 bp, Gossypium hirsutum
  Clone ID: LIB3083-059-Q1-L1-F9
cttctgtttagtgatcgttgttacagcaagttgtaattctcgttgaggttgagctcacttgttcatggataacatctctatcactaatcttttgtgcatgatcctctaatttcgaagttaattcagcttctcttacagaggcggctgtcttaacactttcaacctcttctttcaattgagcttcaaccgtcaccaactgttcttcaagttttttgacatgagtttgcagtaaggaactctccgcaatctcagccttgagattgttaatctctgattttagagattcttcattttctttttcgttttcaattgttcttcaagctgtgatattacagattgaagttctttctttggttctgatgggttt

SEQ ID NO: 2544 - DNA, 297 bp, Gossypium hirsutum
  unsure (1)..(297): unsure at all n locations; Clone ID: LIB3083-059-Q1-L1-G10
ccaaaggtgttaacttcaattaacccaatgttggctgggcgggactatcatacaatgggatctttcatgttggcggtgacatgttccatgccattccaaatgctaatgcggtgattatgaagtgggtattgcatgattggngtgatgaagattgcataaaaatattaaggaactgcaggaaagcaattccaagagaaaatgggaaagtgataattgttgaagttgttgtgaaagcaaaagggagtggagtgttcgatgacatgggattcatattcgacctcctaatgattgcacact

SEQ ID NO: 2545 - DNA, 435 bp, Gossypium hirsutum
  unsure (1)..(435): unsure at all n locations; Clone ID: LIB3083-059-Q1-L1-G11
cctatatctttcagaagtggaggcggtggcggaggatttggaggaagaaacggtggtgtacagccncnnntnnangcggcngcggatatggtggtcgccaaggaggatatggtggcggacgccgtgaaggtggatacggaaacggtggggggtatggtggaggtggatacggaggtggacgccgtgaaggaagatacggtgacggcggatctcgttactcaagaggcggcggtgcatctgaaagcaactggaggtcttaaaattagggtttcaaagtgggcttgggcctatattgttatgggtttggtttgggtttggtagttggtaattctaaaagtactctgttactgtttggtttgggttctctcgtttttgatcgaaggtggtactggtcttcttaaagccataaaaatggaatgaagttttttttttttt

SEQ ID NO: 2546 - DNA, 149 bp, Gossypium hirsutum
  Clone ID: LIB3083-059-Q1-L1-G12
tctctctctctctctctctctctctcgctctttattatataaagatggcccccccaaaacaaaaacttatttctatcatttcttatatatttcctttctcttttacatcctacctcacccccccttaccatttttattttctctcttac

SEQ ID NO: 2547 - DNA, 382 bp, Gossypium hirsutum
  unsure (1)..(382): unsure at all n locations; Clone ID: LIB3083-059-Q1-L1-G9
cccacgttcccctttggagcaacatttcctcttggttcggccagctttcctggcagctcagcaacttactctgattcatctcatggtgggaggatttgtttaccctcagtccatgcacaattgttgagtcctgctggtgctgttccctcccattacccaaggccctatgttgttagccttgtacacaataatggtaatagtattgctgagaatggtaggaaatggggaagacaaggtctagacttaaatgcagggcctggagtcctggacattgaaggaagagatgagacaacagcgcttgcatctaggcaactgtctgttgtgagttcacaggctcntgcagaggagcaagcaaggatgtatcaagtggcaggtgatgttt

SEQ ID NO: 2548 - DNA, 271 bp, Gossypium hirsutum
  Clone ID: LIB3083-059-Q1-L1-H11
cttactgctcatatcaccatccacccaatctggggcgggcggtggcagaaatcgcggaagaaaatcatccgtgagttcatcaactcgatctccgccgttgattccaaacacccttcggtggctgggtggtggaagaccgtacagctttacaccgaccaaacgggagccaacatttcccgtacggtgctattaggtgaagagaaaaacgatcgtttttactcccacgggaaatccttcacgcgcttatcgatacagtccggtatcaaaagcg

SEQ ID NO: 2549 - DNA, 380 bp, Gossypium hirsutum
  unsure (1)..(380): unsure at all n locations; Clone ID: LIB3083-059-Q1-L1-H12
gaattcttttgtctggttggcctttgaagccatggccttgttattggcatcggcgagagcggatgacntcgttgtactaacggaagatatcttcgagaaggaagtcggtcaagatcgaggagctctcgtcgagttctatgctccttggtgtggtcactgtaagaagcttgctcctgagtacgagaagcttgggtcaagttttaagaaggctaaatccgtcttgattggaaaggtggactgtgatgagcataagagtgtctgcagcaaatacggtgttcagggctacccaactattcagtggttcccaaaaggctctttggaacctaaaaaatatgaaggaccacgaaccggagaagcccttgctgagtttgtcaacactg

SEQ ID NO: 2550 - DNA, 416 bp, Gossypium hirsutum
  unsure (1)..(416): unsure at all n locations; Clone ID: LIB3083-059-Q1-L1-H9
cgtgtaatgcctgctgggagctttactgccttgaacatggaatccagcctgatggccagatgccaagtgacaagactgtcggaggaggtgatgatgcttttaacacctttttcagtgaaactggtgctggaaagcacgtccctcgtgctgtctttgtggatcttgagcctactgttattgatgaagtgaggactggtacttaccgtcagcttttccaccctgagcaactcatcagcggcaaggaagacgctgccaacaacttcgcccgtggccactacactattggcaaagagatcgttgacttgtgcttggaccgtatcangaagcttgctgataactgtaccggtcttcaaggttttcttgttttcaacgctgttggtggaggcactggatctggtcttggttccctccttttg

SEQ ID NO: 2551 - DNA, 294 bp, Gossypium hirsutum
  Clone ID: LIB3083-060-Q1-L1-A1
gaaaatccaaaaacataaaaaatgaaaaaggggaaattcccaaattagttggactctctctgtctcatttgcttgctaccctctgcatcttagataagtaagagaaaagatcagatttttctattttaaatagggattttttttgcgtgtgtggtttttgagaggatccatggctgcaccaccggcaagagctcgggctgattatgattacctcattaagcttcttttgattggcgatagtggtgtggggaagagttgtctgcttttacgtttttctgatgggtccttactact

SEQ ID NO: 2552 - DNA, 276 bp, Gossypium hirsutum
  Clone ID: LIB3083-060-Q1-L1-A10
gcagactaacgttttgttgactcccagcaattaaaaagcaaatatagtaaaattaaataaatatattcccattaaaatacacattcccagtaaagcaaagctcttctctttcccttcccacttcaccaaaagaaattttcgccttttttttatccttgctttttgcgttatctccggtgcagaaaccctaaaaccttcgatcttcactgacccatttcatatctcaacccgacccgatctgggtccgatcccatttctcctccttcaaatgaaaaa

SEQ ID NO: 2553 - DNA, 423 bp, Gossypium hirsutum
  Clone ID: LIB3083-060-Q1-L1-A11
atatgcttattacacatttcattgaatctgaaagcttccatgcgttacgacataataggaagtgttggcagagttaaacagacatagcggaaactgtttaaaataaatcaagttactgaaatcaattgtctcagctgcataagtttggtatgcatacaccagtatctggattttgttgttccttccataccttccctgtaaccctcagcttcagctccttcctatccccaccagagaagaaaagtgccatgttacgttggataattagaccatcatgactgtccctgactttccggtgactatcacggatgctacgtggggtgccttcaaatataagttttcggccatttgctccaacctcaaggctatagctatagttcctagcctatgtttcatcacccatgaaactgagaaatgccatgt

SEQ ID NO: 2554 - DNA, 184 bp, Gossypium hirsutum
  Clone ID: LIB3083-060-Q1-L1-A2
aaatttcttatctctttatttggttaaccatggctcagaacttttagcatcctttctttcttttccaacttttactcattactgtctcactaatgatcggtagtcacaccttctattcatcggctagacctatattccagtctcaaacctgctaattatagcttctcccatatcattcataata

SEQ ID NO: 2555 - DNA, 241 bp, Gossypium hirsutum
  unsure (1)..(241): unsure at all n locations; Clone ID: LIB3083-060-Q1-L1-A3
gcacgagatttatgtgaacttatttcactgnattcaccagtcgagtacactgggatggtgctcgagtcttcagcgactatttctaggattggatttgcctcacagagctgcgatccactcacgctccatgtggattttaatctctgagagcaatgtctagacctccatatactgtaccactgacgcacactctacgagatcatctataccatatgatcgaattagacaattccgtaattat

SEQ ID NO: 2556 - DNA, 285 bp, Gossypium hirsutum
  Clone ID: LIB3083-060-Q1-L1-A4
ctgacctcaaggagcatgtcatcaagcctgtcatccctgagaagtaccttgatgagaagacaatcttccaccttaacccatctggccgctttgtaatcggtggtcctcatggtgatgcaggtctcaccggacgtaagatcattattgacacttatggtggctggggagcccatggtggtggtgctttctccggaaaggacccaaccaaggtggacaggagtggtgcttacattgttaggcaggctgccaagagcattgtagcaaacggacttgcccgcagatgca

SEQ ID NO: 2557 - DNA, 247 bp, Gossypium hirsutum
  Clone ID: LIB3083-060-Q1-L1-A6
tttaaatcgggattttgtaaatggtttattatgagaatgactttcaggccgatatgctgaaatctactgctatctatcattctaacacatctgtcacatttataatcggaggtcctcatggtgatgcatgtctcaccggacgtaagatcattattgacacttatggtggctggggagcccatggtggtggtgctttctccggaaaggacccaaccaaggtggacaggagtggtgcttacattgttag

SEQ ID NO: 2558 - DNA, 359 bp, Gossypium hirsutum
  Clone ID: LIB3083-060-Q1-L1-A7
ggggatcttctggttcttggtagcagaggacttggtcctttccaacgggtttttgtcggaacggtgagcgagttttgcgtgaagcatgctgagtgccctgtcgtaacaatcaagcgtagattggatgaaactcctcaagaccccgttgatgactaaatttgtttcacagaccccttgattcattgctcttggttctgttaatagacttgaaactctacaactataccaattccatatatcagtggggataagaaatgaattgcttcttgtttgggggaaaaaaatactatgtggggattggaattggtggttgcaaaaaaaaactctattaataggccggggttgctttaattacctcc

SEQ ID NO: 2559 - DNA, 226 bp, Gossypium hirsutum
  Clone ID: LIB3083-060-Q1-L1-A8
agttaaatatgcaaattccattcaaagagaaaccgtacatagatgcaaccggtaaacaaagactagaaattatttaaaaggccatcaaagggcacaatccttcacgtaaaaccagaaaacccacattaaggaagaccttaaggcttagaacccaccacgaagacgaagaacaaggtgaagagtgtactccttttgaatattgtaatcagccaaagtccttccatct

SEQ ID NO: 2560 - DNA, 401 bp, Gossypium hirsutum
  Clone ID: LIB3083-060-Q1-L1-A9
gttcatgctgggtttgctcgcacagggagccatttctggggatttgagaaccatggagttgttcccgatatagtaacaatggcaaagggcattggaaatggcatccctctcggtgccgtagtaaccacccctgaaattgcagaggtcttgacccgcagaagttacttcaatacctttggtgggaatcctgtatgtactgctgcagggttagctgtcctgaaagtgatcgaaaaagaaaagcttcaggagaatgcacatgttgtgggatctcatttgaaggagaggctaactgcattaaaagataaatatgatcttattggggatgttagaggaagaggattgacgcttggagttgaacttgtcactgatcacaagctcaaaactcctgcaaagcttgaaac

SEQ ID NO: 2561 - DNA, 288 bp, Gossypium hirsutum
  Clone ID: LIB3083-060-Q1-L1-B1
ggaagttatctgccttgaagtgaagaggatccagccggagagagaggggaactgcaaatattgctcttaggcaaaataccactgtagataaacctgaagaagcaacaattatagagatgaatgagccagtatcattgacatttgcattgaggtacatgaattcatttacaaaggctactccattgtcaaacatagtgacaatcagcttgtcatcagagctgcctgttgtggtcgagtataacatagctgagatgggttatattagggtctacttggcacccaagattg

SEQ ID NO: 2562 - DNA, 206 bp, Gossypium hirsutum
  Clone ID: LIB3083-060-Q1-L1-B10
taaatttcaacattttccaagtacaatcgaaccattagggcaaccagaaccattatcctagagaccctctcaaatgctcacaatcactatccctacgaagcaacattcatattcagaagagatctgcaccgtcaacatctctgccaatcaaacatacgcactcctactctactatcttcaacacatccactacctccacctcaatc

SEQ ID NO: 2563 - DNA, 380 bp, Gossypium hirsutum
  Clone ID: LIB3083-060-Q1-L1-B11
ggaattttcattttttctatatacctcctctccaatgtgtcctcagtttccctatacaatgagagaaatccttcacatccaaggcggtcaatgcggcaatcacatacgatccaagttctagaaagcactatgttccaaacatgccatcaattcaacggctctatatggtgctgactccgagctatagcttgaccgaatcaatgtttactacaacgaacccagtttttgccccttcgttccccgcacagcttcaatctatcttgaacccttaaccatctatagagtaacatccggtccttacggacaaattttcctacccgataacttcgttttcagacagtccgttgcgcaaaacaattgtgctaatgcacattacactt

SEQ ID NO: 2564 - DNA, 154 bp, Gossypium hirsutum
  Clone ID: LIB3083-060-Q1-L1-B2
atgcaaacgggagatctgccagaatctctctcgatgaattcgccttttggaggaccgagcgcgtcgaatccaactgttgccggagctccggcgaataacgatcggaaaatggcaacggcagagcatttagttctcgatctcagcaaccctgatc

SEQ ID NO: 2565 - DNA, 300 bp, Gossypium hirsutum
  Clone ID: LIB3083-060-Q1-L1-B3
aagcatatagggtgcgcaggataaagcgaggttttaagcttgtttaaaaattggcttgaaccccttcctgatggaagcttaccaaatataaatatccgtgcagctgttttgcagattttaactgattttccaattgatttagagcagcatgatagacgggagcagctaaagaaaagtggtcttggaaaggtcattatgttcttatcaaaatctgatgaggaaacgacatccaacaggaaacttgctaaggaattggttgataaatggagtagaccaatctttaataagagcactaggttt

SEQ ID NO: 2566 - DNA, 54 bp, Gossypium hirsutum
  Clone ID: LIB3083-060-Q1-L1-B5
gagagagacagagatagagagagatatagagagacagagagagaggggggcacc

SEQ ID NO: 2567 - DNA, 242 bp, Gossypium hirsutum
  Clone ID: LIB3083-060-Q1-L1-B7
aacttttcaaatatttgcccaaagacagcctaaccgggcacaaaaggtaggctatagagactcgattagttctaaatacgaagacgcccccgatttatttgataaagctgctaattgcttcaagcttgccaaatcatgggacaaagctggatcaacttatgtaaagttggcgaattgccatttgaaatcagacagcaagcatgaaacagctcaagcttatgttgatgctgctcattgttata

SEQ ID NO: 2568 - DNA, 424 bp, Gossypium hirsutum
  unsure (1)..(424): unsure at all n locations; Clone ID: LIB3083-060-Q1-L1-B8
cttgaggcccgtaaaccaggaggtgccaatttgtttatttgttatgggggtgttcgacatcgggagtccgttgcagcaaaagctaattggctggtgtttagcttcacagatcttataactgccttggagtaacttgctttcattctgatttttatgccatttttgggggttttctatgttctgttataagtttcctgcanatactaattaggcattcattcatgctgatcttataacatctatggctggtatatggattggtgagatattaagctcaaagaaggtcaccaccttttcaaacctcggttttaaccgttgatattaatatggggtccacctttatatggtaaaatggttggaaggttttctattgaatttaaaagggtttggagggatcctattttcatacctgcacaaaatattt

SEQ ID NO: 2569 - DNA, 440 bp, Gossypium hirsutum
  unsure (1)..(440): unsure at all n locations; Clone ID: LIB3083-060-Q1-L1-B9
gaaaaatccccttgtaccaagtatctgagtgccattgtagtttccaaaatcaagaacctagaagcaaactcaaatggcgacggtcgctatcgagaggaagcaacaggcatctgcggaagagatgtgcaccgccaagagcggtgccaagcaaggggagggcctncgacaatactatcttcaacacatccacgagctccagctcaatctccgccaaaaaacccacaatttgaaccgactcgaagcccaacgcaacgagctcaattctcgagttagaatgcttagagaggaactgcagctgcttcaggagcctggatcctatgttggtgaggttgtgaaaagtatgggtaaaaacaaggttttagtcaaggtccatccagatggaaaatatgtngtcgatattgacaagaatattgatatcacanaaatcacaccatcaacaa

SEQ ID NO: 2570 - DNA, 284 bp, Gossypium hirsutum
  Clone ID: LIB3083-060-Q1-L1-C1
aaatgggagatcagttagcgaaaggagaagaattcgtgaagaaagcagagaaaaagcgaaatggttggggcttgtttagttctaaatacgaagacgccgccgatttatttgataaagctgctaattgcttcaagcttgccaaatcatgggacaaagctggatcaacttatgtaaagttggcgaattgccatttgaaatcagacagcaagcatgaaacagctcaagcttatgttgatgctgctcattgttataagaaaacagctacaaaggaggctatatcttgc

SEQ ID NO: 2571 - DNA, 319 bp, Gossypium hirsutum
  Clone ID: LIB3083-060-Q1-L1-C10
gtttttggttcttttcctagtgatattcaaatcctgcaaaagccagagggtttgcttaatgggaatttgtttgaaaaatcgaatcttgatttatcgaaaccggcgaattcgagtgcatacgcctttcaacatcaaagtgaaagagggaaacaacagcagcaccatgttgggaattacagagaaaccctaagaccaccgccggggttttcaggaaagtctagaggaggaaggaaccgtgatttcggagccaggaggaatcatttagagcacaatgtagataaattaagagcagaatacagtcagttgagtaatgataatg

SEQ ID NO: 2572 - DNA, 324 bp, Gossypium hirsutum
  Clone ID: LIB3083-060-Q1-L1-C11
ggatggtgaagaatataattttgcaattgtgtttgcggctatgggggtaaacatggagactgcacagtttttcaaacgtgactttgaggaaaatggctcaatggaaagggtgacccttttcctaaacctggctaatgatcccacaattgaacgtattattactcctcgtatagctctcactactgcagaatacttggcatatgaatgcgggaagcatgttcttgagatccttacagacatgagttcttatgctgatgctctccgagaggggtctttttcccgaaaaaaaatacctggaacacgtggatatcctgggcacatgta

SEQ ID NO: 2573 - DNA, 396 bp, Gossypium hirsutum
  Clone ID: LIB3083-060-Q1-L1-C2
attaacattaaatgaaattactttataatcgaatgattaagtaaatttgttctcaaggtggatatactgacaaacataactaattctaaaaaaatcaagaatgccatttaaagccacaaggaatgaaatctgataatgatgccataactacactgtatatatattaaaatgatcgtatgtgctcgagcctttggttctaaaaagaaaaagctcaactatatctcttcaaaacaaatgtaaatgactttgaaaaattattacctctaaattcaattaaggaaccttccttacaatccaataatttcaaaggtatttattaaaccatatttataaactctcctaaagccctctcttaaaccatcttcatattccaaggaaccattttataccaatttg

SEQ ID NO: 2574 - DNA, 313 bp, Gossypium hirsutum
  Clone ID: LIB3083-060-Q1-L1-C3
acaaaaaaaatagagagcgagttaaagagaccgagggatctctttgtgtactcagatggtctctttccatctctcaattctcaaaaccctaatttctctgctttcccttttgcttaatcaatcgatccttgtcaatggccaacagtaatctccctcgaagaatcatcaaggaaactcagcgtctcctcagtgaacctgcacctggaattagtgcttcaccatcagacgataacatgcgatatttcaatgtgatgatccttggtccaacacagtcaccatatgaaagtggggttttcaagttggaacctatttt

SEQ ID NO: 2575 - DNA, 356 bp, Gossypium hirsutum
  Clone ID: LIB3083-060-Q1-L1-C4
cagaaactgacaagtctgctatgaaatcacaagtgtcgcacatctggcatgatgccggaatcaaggatttgacgttgcaagtggagtgtgtggaactatagtaactgatcttaggttacactgtcgagaatagagagtagctcattcatctttaggactgagtcttatcatgatcaaaagcatcagatagctccaatctatatgctgtgttgtaaggagtacatctttgtcggtttatcctggagcatgtatatactcgtaaaagttgagttaaccatcgatgtttcctgtaaaccattagaaaagggtgaaaatggggaaatgttaatttttgttacccatgaaataattgttaa

SEQ ID NO: 2576 - DNA, 266 bp, Gossypium hirsutum
  Clone ID: LIB3083-060-Q1-L1-C5
cttttaagctttcttttttcttcttgttttccttcgggtttgcttggactttatctcgtaattccccttcaccaacaacaaaaatcctcgatgtcttagcttctttgaaacaagctcagcatattctttcctttgatcctcaaatttctaatggtttttccaaaagccaaccccttttcgtcaactcttcttcttcatcgggttctggtttttcgattccacttcattcacggagctctttgcgaaaaacccatcatgttgattat

SEQ ID NO: 2577 - DNA, 282 bp, Gossypium hirsutum
  Clone ID: LIB3083-060-Q1-L1-C6
acattaaagaaatttctttataatggaagattagaaaatttgtctaaggtgggtctaaagacaaaaataactaattataaaaaaatgaagaatggcattaaagccacaaggaatgaaaattgtaatgcttctaaaacacacttagagatataaaatgatcgtatggctcggcctatggtctaaaagaaaagccgagcttatctctcaaaaaatggaaagtgtcgaaaattggggcttggaattaataaggaacctccttgaatccaatatgtccaaggtttt

SEQ ID NO: 2578 - DNA, 305 bp, Gossypium hirsutum
  Clone ID: LIB3083-060-Q1-L1-C7
accaaactccgctctgttcagcccgtgatcttttgatctttctctgtggctaccatgtccaagctctctaaccccaacccagtcgcttctctttcatcatcttccaaacccagatcttcttcatcgcttaaatgcttcgttgggttccctaccaggcctggtttctgctctaagctggtttcatcttctagcttgtcctcgataaacacccaccctttcaggggctccttggttgtcaggtgttctcttgctgatggaaacggtagttcagtgaagaggactactttgcatgatctgtatgaaaa

SEQ ID NO: 2579 - DNA, 177 bp, Gossypium hirsutum
  Clone ID: LIB3083-060-Q1-L1-C8
acttcttgagaattttaaaaccaagtctttaaggggaacagtgatttataaagggtttgggatcttgagtctgataatggcgttctgttctatgacttgttgtgagaaaggtatggctcgcctgattccgaaaggtccgaaacctccgacatttcaaatgccaaatttggtggaata

SEQ ID NO: 2580 - DNA, 304 bp, Gossypium hirsutum
  Clone ID: LIB3083-060-Q1-L1-C9
cttgattgcaacctatggttgaaccttgcctcttttgtgactacatggatggatcctgaatgtgataagcttataatggactccattaacaagaactacgttgacatggatgaatactctgtcaccactgagcttcataatcgatgtgtgaacatgattgcacatcttttcaacgcaccatttggagagtcagaggcagcatttgatgtgagaacagttaggtcatcggaggcaatcatgttggctgaccttgctttcaagagaaaatggcacaacatgcgtaaggcttaaggcataccttatg

SEQ ID NO: 2581 - DNA, 377 bp, Gossypium hirsutum
  Clone ID: LIB3083-060-Q1-L1-D1
tcaacaactactctatacggattctgcacgagaccaaaatcagctttttccatacctttatcaaattgaacatcctctagtgataccatgaccaagctctctaaccccaacccaatctcttctctttcatcatcttccaaacccagatcttcttcatcccttaaatgcttctttgtattccctaccacacctactttctcctctaatctagttccatcttatacctcgtcctccataaacacccaccctttcaaaacctccttgtttatcagctgttctctttctcatcgaaaccctacttaaccgaagaggactacttttcatgatctctattaaacagaaagtcaaaatccatggtatcacaaccttttcatgcc

SEQ ID NO: 2582 - DNA, 285 bp, Gossypium hirsutum
  Clone ID: LIB3083-060-Q1-L1-D10
atgttttcgactattctacactctcagcaattatagatggcacttggctttgtttacatggtggccttgctcctgacattcgaacagtctatcagataagggtaattgaccgtaactgtgaaatccctcatgaaggcccattctgcgatctcatgtggagtgatcctgaagatattgaaacatgggcagtcattccacgtggagcatgttggctatttgggtccagggtcacatctgagttcaaccacataaacaagcttgatcttgttttgctagctcaccaac

SEQ ID NO: 2583 - DNA, 259 bp, Gossypium hirsutum
  Clone ID: LIB3083-060-Q1-L1-D2
cagcgccgccctatttgccacaaaaccctagcgtacatactccacaggcattgtcggttactctcggcatccatggatattgaggctgagatccgtgcactgcagcttgactctgctgaagataataatgccacgctcattcctgaagatgcaaaaccagaagaagttgaaatgacagataaggtggaggaggaaggtatgacggatgaggttgatactaaatctcagccagtccaggctgagccaaaagtgaaagaca

SEQ ID NO: 2584 - DNA, 211 bp, Gossypium hirsutum
  Clone ID: LIB3083-060-Q1-L1-D3
gtttatgccatactatgtcatatatctctgcctcggggccctttatgtctaattcacatacaaagaatgcactatcacccacactaggaatatcacacagaacgccagccgcttaaagcccatgccactgctgtccctgctcacttgaccacaccctataaggattacgatcatgcacataatcatccagagcctgacgagtaacctaatc

SEQ ID NO: 2585 - DNA, 367 bp, Gossypium hirsutum
  Clone ID: LIB3083-060-Q1-L1-D4
aaaattctttgctttgatttcgttaaccatggctcataacactcggcgccctttggtccttttccaacttttactcattagtgtctcactaatgatcggtagccacaccgtctcgacagcggctcgacgtttattcgagacacaaacaacctcatcggagttgccacaattagcttcaaaatacgaaaagcacgaagagtctgaatatgaaaagccggaatacaaacggccaaagtatgacgaaaagtccccaaaaaatgaaagccctgaatttccaaggggggaaaacaaaaacccggccagctaccttaaaaagtcccccaggtaccccaattgaatgagcaccgatagttcccgaaaggaaaac

SEQ ID NO: 2586 - DNA, 302 bp, Gossypium hirsutum
  Clone ID: LIB3083-060-Q1-L1-D5
gcacgagtgccggacaagatgctttgctgcagcctgtaccggaagaggaactagaggcttatgaggcggatgacgagcacagagatacttgatatgaatcacaatgcgaagtgcttactgatccatggttgattggtgtgctcacatagcagccaagggtcatgaacgctaaaacaaaatgtgacatgtggtatcaaagaagcgttgataatctattgtgtgtgtgcagctgcgattcgaatgcattctatacctggataggaatacgcctaaggcacttactttgctgtctctcttttcac

SEQ ID NO: 2587 - DNA, 301 bp, Gossypium hirsutum
  Clone ID: LIB3083-060-Q1-L1-D6
gaaacataaagatttttagtgccaggagtcacactaagcgaaagagggcgaattgtacgagaaagaaaaacccgatttccccaaatgggaaaagcctaaagggcacgagaaacataaagccgaatatcccaaaatacctgagtgcaaggaaaaactagatgaggatacggaacataaacatgagttcccaaagcatgaaaaagatgaggagaagaaacctgacaacggcatattaccctgagtgggttaaaatgcctgaatggccgaagtccatgtttactcagtctggctcgagcactaa

SEQ ID NO: 2588 - DNA, 358 bp, Gossypium hirsutum
  Clone ID: LIB3083-060-Q1-L1-D7
cagatattgaagaatctgctacagaagaaaagaaaaaggtacatgaggatgctgatgctgacattaatggtgaaggggattcaaattcgaagcagcaagaaacaaaatctgaaggcaagacaagtaaagctcctgcaaatgtttccaaaactcaattgtcaagaaccttaaaggagtctggtaatgcaaagaataataaggtgacaaacgataaacctaatctgagaaatgcagttctgatttctcgtaaccagaggcctgttctgtctcaaagtctttcatttcctgcaagaagaatccatgggattgtcttgtgaagagcactgatctaaaacattccaagaggaaagcttaaaaa

SEQ ID NO: 2589 - DNA, 363 bp, Gossypium hirsutum
  Clone ID: LIB3083-060-Q1-L1-D9
gtatctttaaacttgctgataactgtactgggctccagggcttcttggttttctatgctggtggtggtggtactggttctggtcttggatctcttctcttggagcgtctctctgttgactatggaaagaagtcgaagcttggtttcactgtctatccttcacctcaggtttctacatcagttgtagagccttacaacagtgtgctgtccactcattcgctccttgagcacactgatgtcgctgttcttctggataactaagcaatatatgacatctgcaggcgttctttggacattgaacgacccacttataccaatcttaaccgtcttgtctttcaggttatctcatcttttaccgcatctt

SEQ ID NO: 2590 - DNA, 255 bp, Gossypium hirsutum
  Clone ID: LIB3083-060-Q1-L1-E1
ggcacaaatcgaagaattttctacacatttaacaaaaaacgtacaagctgattcaaattgcgacattaatgcgcaaagcgagcaccatctaaacaacaagaaacaaaatcccaaggcacgacaaggcaagctcctgcaaatgtttccaaaacccaaatgtcaagaaccctaaaggcgtctggcaatgcaaaaaataataaggtcacaaaccatcaacctaaactgacaaaagcaaatcccaattcctcgaaccac

SEQ ID NO: 2591 - DNA, 183 bp, Gossypium hirsutum
  Clone ID: LIB3083-060-Q1-L1-E10
ttcatatatagatttttaagaccctaaaatattccctatgccataagtatactttaatcaaccattcataacatccttgcaataacataactacaaacactgaaccaccaatataagaatctagaaaacttacacaaatcacttttattaccaaaccaataatcaattccgcacaatcaacaa

SEQ ID NO: 2592 - DNA, 261 bp, Gossypium hirsutum
  Clone ID: LIB3083-060-Q1-L1-E11
aacatttatagctttttgaggcccgaaagtaagccggaggccattagtagaacttttaatgtggataagtacctccttgttgttcttcaacgacaaataatgaaagagcaagatgaggatctttataagttatatgagacaatattaagtacgaatcatatttcattatcagtcaatgaataacttgatctgcaaacccaactaattcattaccttgaccaacacgttgatgtttcttattctttgactgcttaatactcc

SEQ ID NO: 2593 - DNA, 188 bp, Gossypium hirsutum
  Clone ID: LIB3083-060-Q1-L1-E12
catgacggacttgatttcccccttcattgccaacatccctctcctcctctaccctcatgactgcccccgcagcaagccccatccataggataatgtagacgtttgccatgactgcattcaaatggtgactgacatccatactgctgtacggaccaactccacctttgtccattccttatttgaacatg

SEQ ID NO: 2594 - DNA, 406 bp, Gossypium hirsutum
  unsure (1)..(406): unsure at all n locations; Clone ID: LIB3083-060-Q1-L1-E2
gacaactgcaagcctgcttccaacgacgtttgctctccggtaaacgggaccgtttccaccattcaaggttccgtttcccccgccgttgtcaactgctctgaagccactctaggccgccacctggctaggcggcttgttcagatcggagtgaacgatgttttctctgttcccggngatttcaacttgactttgcttgaccatttgattgccgagcctgggcttaacctcatcggctgctgtaatgaactcaacgcttggtccccccttaatggttttcctcaaccacttgccgttgttccctgcgtggccccattaacggttgtgggcttaaccttttgaaatgcattggccgtgcctaccaggagaagcttccttttaatctgcttggtggaagaccccactttta

SEQ ID NO: 2595 - DNA, 312 bp, Gossypium hirsutum
  Clone ID: LIB3083-060-Q1-L1-E3
ctcatcctccatggttatttctcaaggtattgtcggcgtacagcttggttttgtctaggattctgaatagaggaattttgttttaagtcccttgaaataggccgactatgatgtcctttacctgggacacgtaacatttccaactctttccaaaagattggtgcttgtaccggatgggcaactgcactgcagagtatatggtggatagcaaatactagagaatctattaaggtttcctggctgaattatggcttctgcaaacctaggaaatggtgagcatgtagttcaaggtctgtcaacagttcaaaagtc

SEQ ID NO: 2596 - DNA, 398 bp, Gossypium hirsutum
  unsure (1)..(398): unsure at all n locations; Clone ID: LIB3083-060-Q1-L1-E4
catttttggctggtgttatgatatggtcacaaatcactgacctaccgttttctctgtattcaacttttgtaatcgaggcccgccatggtttcaataaacaaacaatatggttattctttagggaccttatcaaaggaatatgtcttgctattgtacttggtccaccgattgtttctgctattattgtcatagtacagaatggaggtccatatctggctatctatctntgggcattaatgtttgtactttctcttgaaatgataacaattaaccctgttctgatagcttcaatttttaaataagtcaaccctttttcttaaagaaaacctaaacctaagaatgggaaacctggtttcttccttaaaatttcttttaaaaaactatttggtggtgaatga

SEQ ID NO: 2597 - DNA, 237 bp, Gossypium hirsutum
  Clone ID: LIB3083-060-Q1-L1-E5
gacaaatctaacatttctttcaacattatacacaatccttataacggcaaccaatacgaccatataatcacacaattcaaaccaacactattacctccactaataacattaataagttcactactttctaaactcctacataccaccataaacaccacatataatctaccaaaatacccatttacactttaaaccaatataacatcacattacataaacatgaatataccacaaatc

SEQ ID NO: 2598 - DNA, 319 bp, Gossypium hirsutum
  Clone ID: LIB3083-060-Q1-L1-E6
caataattgcgagcaaacaaggctaaaaacattttaaatagctgatttctcagcgtttgccaccatcacccagatgaagtatcgagtgcgggcaatataacatagtagatgtaaatcccataatttacttggttcagggtattcgcctatcaaaacactttgtttcaggctgaaatgtcaaataacttggatcccttctttagtttaaggttccataaatgtagcaaggagttgagttggggaaaaatcaatgaaaaaaaaaggccagcagaatggtttggtcttaaatccttgcatgtaaggtgaccactaaatcatg

SEQ ID NO: 2599 - DNA, 497 bp, Gossypium hirsutum
  unsure (1)..(497): unsure at all n locations; Clone ID: LIB3083-060-Q1-L1-E9
aacagatatagcttgttggggcccgaaagtaagccggatgccatgagtagaacggttggtttggataattccggccttgttggtcttcaacgacaaataatgaaagagcaagatgaggatcttgagaagttggaggagacaatagtaagtacgaagcatattgcattggcggtcaatgaagaacttgatctgcaaacccgactaattgatgacctggaccaacacgtggatgtttctgattctcgtctgctgagagtgcagaaaaacttggcggtattgaacaggcgaaccagagacagttgttcctgtatgtgcatgcttttagctgtgatcgggatcgtgattctggctgtcatcatatacctactcatcaaatacttgtaatatccacatacaccgtacccaacatactngctccttttgttttgttggtggtagaatttgttttttcaactttaatctcttgatatatgctggaaatttgttcggtttccccc

SEQ ID NO: 2600 - DNA, 453 bp, Gossypium hirsutum
  Clone ID: LIB3083-060-Q1-L1-F1
tagaacttgcgcaacaactagtgcgtagtacgagattctgcacgcgggattatgcaaacagttttacagcttattatgctaatattcatgccggggaaaacaacgcttctatttgttatacgtgctaaaacaaataccccccttgaatatttggagcctatactaagggaagatattcaaaagatatggaatgtagttagtaaacctgcggcccataaagatacacccctcagtgaattctttaatgtggaggtcactgctttatcaagctatgaagaaaaagaggagttattcaaagagcaggttgctcaactaatgcagcgttttttcaattctatttctccaggaggacttgctggtgacagacggggtgttgtccctgcctattgattttcttttagcgcacaacagatattgcgagttataaaaaaaaacaaggatctggatctttct

SEQ ID NO: 2601 - DNA, 363 bp, Gossypium hirsutum
  Clone ID: LIB3083-060-Q1-L1-F10
ctcgtgtcgcttgtttgaatctacactgacctaccaacagatgactgatgctgaagctattgagaagtcgatggcaaaacctacttcatcctaagtaagcaaacgaacaaacaaaaattttaaagatttgcctaagcaaggactcgcataaaatgtgctttattcgcaaatgtttcaatttcttttatactttcatttatgaagtcttaaatatatacatatccagttgtttttttttgctatatgccaaatattatttgctgtctttccttgtgttgatagctcactgttagctatgttctcagtatggaattatgttgagacattattagatttctattaaggaacgatatttttttatta

SEQ ID NO: 2602 - DNA, 269 bp, Gossypium hirsutum
  Clone ID: LIB3083-060-Q1-L1-F11
ctgcactagtctaattgaaattttcatcgaaagagtatgtgatgaggatgtcctacgttgcaaaattggtgctggaagtaatcgagagatggacttcgacagttttcttgactttgttctggcccttgagaataaagatactccataatggttaacatatttgttccgttgtcttgatcttaatggtacgggattcctcacaacagcagatattcattctcttttcagagatgtacaccataaatggattgaatgcgtcaactactaat

SEQ ID NO: 2603 - DNA, 437 bp, Gossypium hirsutum
  Clone ID: LIB3083-060-Q1-L1-F2
aagagatataaaagtcaaaaaaaatagaaaaaaaagagaggacagaggcattaggagaatagaggggagggctaagaataatggcaaagaaaaagctggaagaagggggcagtcatccttagcgaccgcaagacatttcgtcacctgtgttgagagttgtcatcctgaaattcttcctttatttcttatcttgtttcttcttgagcttaattaatgaaaaaaaatttgggtggtggggtaaaacttaaatttaattggcaaaccattaaccaaaaatggtaagggttaaaataatttgaataaacccttaattttaataaagggttaaaattaaaatttgattaaactaatggttcctttaatgggattttaagaatggatgcattcggtgcattgaccaatggaccacaaggattttaaaaattacctaagtttga

SEQ ID NO: 2604 - DNA, 344 bp, Gossypium hirsutum
  Clone ID: LIB3083-060-Q1-L1-F3
catttttggaacttttcacccaagctcaatgacacgggcgaacaatgcgcttatacagcacacccagttaccaacccattccattaataccacacagatgctaccactagggcaggtctatcgctatccaccaaggcgtggtctacctgatgtttcaatgcctaacattgctggaggcatgctttctgttccatatgatatgggtggcatgccaatgcgtgatgcatcaaatttctaacccaattccaatagaacccttgccttaaccctaacaaaatctacacccaatcaacagaaaaccaatcttggaaaaaaactttattctctaattgaacaacttgaac

SEQ ID NO: 2605 - DNA, 443 bp, Gossypium hirsutum
  Clone ID: LIB3083-060-Q1-L1-F4
caatatccaaaatctaaagccaatctcaaaaaacccatcaaaaaaggaaaaaataacaaatctcaattttctcaaccctttttccttgtggaagagtaggaaaaaaaaataaaaacatgcaagaagaccctcaagccaagtccttggaacctattgaagattatccaagaagtgatatggtgtttgggtggataaagcccatacacgaataaaagagcagcaagtgtcttggttacattcttgttattaagggcatccaaagatccatccctttgggtttaacccacatttttttaactgccccaacaccttatttccaaaaccgcttcctcaaaattagaaaccttaagtatgggaaatcattgggtccatcttttaacttcacacttgtgacccaagtcaacggtgagaacacccatttcggagagttcaagtttgacaaa

SEQ ID NO: 2606 - DNA, 242 bp, Gossypium hirsutum
  Clone ID: LIB3083-060-Q1-L1-F5
atagagggaaaatgttaaggatatttgtggttgagcttgatggaaggtcttatagaggcaagttttgtagaactcacttggctctccctgatgatcttgtttccaggtctttccattgtcgccggtggaaagcctacctcttcaataatgcgtgcaacataccaagatgacgcctagaaatataagtaatgtctaacaatattgctaactgcgactttgatattttgctactcatgtcagct

SEQ ID NO: 2607 - DNA, 364 bp, Gossypium hirsutum
  Clone ID: LIB3083-060-Q1-L1-F6
ggtgctgctagttctacattgaagctctatcatgccggcggttgaaggttccctacgcattatctttgtgaggttttttcgtgtgtttttcattccaagtgcatgaaaatcttgatgggtcgagaggcctactaaatatttgtaccagtaataaagaagagctattacagagtttctatggccgcataatttggataatatagtttctctattatacatacttgtaagattagcattgcatctcatttttcttccgtggaatgtaccatcaacatgcttttcctgatctcatctaaccttgatcatacttttcgaaaaaaaaaaatttgaatttttttttaagaaaaaaaaacttgaagggggg

SEQ ID NO: 2608 - DNA, 375 bp, Gossypium hirsutum
  Clone ID: LIB3083-060-Q1-L1-F7
tttctttgtaccaatggttcaacaaggccaacagggtcagcgtcccggtggtagaagggctggtgctggtcagcaaaggcagcaaccagttccattaatgcagcatccgatgctaccgctagggcaggtctatcgctatacaccaaggcgtggtctacctgatgtttcaatgcctaacattgctggaggcatgctttctgttacatatgacatgggtggcatgccaatgcgtgatgcattaatttctcaaccaatccccataagagccttggtcataaccctaaccaaagcttcacccgaatatctcaagaccgatcttggagaacatctttaatcttaaatttaacaagtgggcccctattcctcaacttaaat

SEQ ID NO: 2609 - DNA, 330 bp, Gossypium hirsutum
  Clone ID: LIB3083-060-Q1-L1-F8
ctctagacctgcgcttcacgggttctgcacgagcaatatccaacattttaagccaatttcaaaaaacccatctaaaaatggcctaatagcaaaactcaaaatgctccacccttcatccttaacaaacatacacactgtgaaacgtacacatgcaataagaccctacaactaagtcctaaaaacctatagcagattctccaaaaattcaattagactgcacctttaataaaatctatgcgacattgaaacagcttcttccctcaaagtgacatattgatggaaactacatcacaaccttccatacagctcgtgttgacacctgaacatact

SEQ ID NO: 2610 - DNA, 305 bp, Gossypium hirsutum
  Clone ID: LIB3083-060-Q1-L1-G1
ttccgaattctgcacgagtttcttctaccaatttttcaacttttcaacagagtcaccaaccggggggtatatgagctgtttctagacactaaaggcaacaaacattttcattaaatcagcttctccacatacatcactggcaaccctattgatctcctgcttgatcttgcaaaccgaatcagtcctgatttcatgaactcattggagcaaagtgagaatacataagaacataaatacgtaaaagatgctcttttctcttcttacgaaaaaaacattttcacaaagcttaaaacctaacttttcaa

SEQ ID NO: 2611 - DNA, 281 bp, Gossypium hirsutum
  Clone ID: LIB3083-060-Q1-L1-G10
caagactttctcgacatcatttcaatgtttattaaaaaggcaagttgcaaatctatctgcatggtagtatccgtttaatgctgctggtgtaaatatcacattcatgatcattcaaattcttgaccttgatgccttcaaacctatgacatttatccgatcagttttcttacatatatcatcagacaatgtatccacattctacttgctatactgcgtttcattcgcatttatgcacactcaatggctttataaaaatgccacgtacatggagtccaattaat

SEQ ID NO: 2612 - DNA, 278 bp, Gossypium hirsutum
  Clone ID: LIB3083-060-Q1-L1-G11
aagaatttatggatttatacagggagatgctaacatacgtcaaatcgtcagtgtcacgaaattacagtgaaaaatgtataaacaatattatggactttgtttctggatcagctagtcaaaattttgatctcctgcaagaattctatcagaccactcttaaggcccttgaagaggcaaagaatgagagactttggtttaagacaaatctaatgctttgcaagatcttttttgatatgggcgagtatggtcgaatgagcaagatttttaacgaacttcac

SEQ ID NO: 2613 - DNA, 246 bp, Gossypium hirsutum
  Clone ID: LIB3083-060-Q1-L1-G2
cggcacgaggtttttttttttttttttttaaaaatgccttgctgatgactgaaaatgttacaaagtccaacaataacaagcttacacactgtgaaacgtacgtatgaagtaagaaaaaacaaatttgggtgaaaaatgaaaagcagaaacagaagaaatacaattagactgcaccttgaattaaatgtatctgactttggaacataacggtccctcaaagtgtgttattgatggaaactacagcac

SEQ ID NO: 2614 - DNA, 331 bp, Gossypium hirsutum
  Clone ID: LIB3083-060-Q1-L1-G3
cttcatgtggtcgctttgttcctcgtgctgtgctcatggacttggagcctggtacgagggacagtgtccgaactggtccttacggccagattttcaggccagacaactttgtttttggacaatccggtgctggaaacaattgggccaaaggccattacactgaaagagccgagcttatcgatgcccgtcttgatgttgtgaggaaagaagctgagaactgtgacttgctgcaaggttttcaggtatgccactcattgggtgggggaactggttccggtatgggtacattgcttatctcgaagatcagagaggagtaccccgataggatgat

SEQ ID NO: 2615 - DNA, 346 bp, Gossypium hirsutum
  Clone ID: LIB3083-060-Q1-L1-G5
caacataatgaaagttcccgtttcggttcttaacattgcgcagcttgcagagtacaggatcgatgcccactcatccatttataccgaaactgggggacggcttttgaacgacgaggaaaaagcagatccaggccgtcatgccgattgcatccattggtgcttgcctggtgttcccgatacttggaatcaaatatttttagcacatttgtagattactattttcattttttcactccacagaaaccgataagggaattaatctgcttgttatgcgttaattcaaagatcttttgatttgtatattgcacgctgtattcttaagcacatcttgtgcatacaagatgtt

SEQ ID NO: 2616 - DNA, 443 bp, Gossypium hirsutum
  Clone ID: LIB3083-060-Q1-L1-G6
gctatctccacttgtcacgccaatgtgttcacagaaaaccgattagggacgttccgggcggaattccaactgtacgtctaatcacactaaatcaaatgacgtcttttttgacttagtgttgatctgactttatgagctgacaaaatcatactcttaatccggagaagtaataagtactggaattttaggagttaaatgggctcgtgttcgtaactcacgggttttgatgaggttaatttcgggcaaaactgaaaatgggttaagtggctaaggttggtacctgtggtatttgataaattattaaaggaaaatgggtaaaaaggtggttaatttaattgaatttggaagtggaatattttaaagtggggttgctgactattttgaaaaaaaatttgaaaatgaatttctaattgtgatttactactgggaatttaaatttttag

SEQ ID NO: 2617 - DNA, 338 bp, Gossypium hirsutum
  unsure (1)..(338): unsure at all n locations; Clone ID: LIB3083-060-Q1-L1-G7
cttcatgtggtcgctttgntcctttttctgtgctcatggacttggaggctggtacggtggacattgtccgaactggtccttacggccagattttcaggccagacaactttgtttttggacaatacggtgctggaaacaatttggccaactgacattacactgtactatcccactcaattgatgccgttcttgatattgtaaggaaagaagcttctaactgggactggctgctacgattttatgcatgactaataatgcttgacctaatctaatcatgaagctggtcatcaaaacttataatgatgagatcatgccatttttattggcactggttgtgt

SEQ ID NO: 2618 - DNA, 212 bp, Gossypium hirsutum
  Clone ID: LIB3083-060-Q1-L1-G8
ggaaactcgcgcgcatagagggaggctttgaacggcgggatccttaaaagctcgtttgggagcgaaaaagtcatcggctcagcctcgctattagcagctcttgatcagtaggcaattgtggtaacgagcggcgaaaacgaccaaggactattgctgctatcaactattatcattatcatactttgttttctgatcgaatagtattcaatttg

SEQ ID NO: 2619 - DNA, 314 bp, Gossypium hirsutum
  unsure (1)..(314): unsure at all n locations; Clone ID: LIB3083-060-Q1-L1-H1
ctttgtatcaaaaattaaccttctggtttcaacaatcggatggcaccgggtgcatgcatcgagaccatttatgtgctggtcttcatcttctacgcaccaaaaacggagaaagctagaatccttgggctcttcgcttgtgtactcaccgttttctctgctgttgccctcatctccctctttgccctccatggtaatggcagaaaactctnttgtggccttgctgctaccattttctccattatcatgtatgcttcacctctttcaatcatgaggctggtgatcaaaactaagagtgtggagttcatgccattttt

SEQ ID NO: 2620 - DNA, 216 bp, Gossypium hirsutum
  unsure (1)..(216): unsure at all n locations; Clone ID: LIB3083-060-Q1-L1-H11
ttcacgagccangttttgcctttccttaactctttcacacaaaaagagagacttagaggttttttatagattcccctgtcacttcgcaagataaaggagaagacaacacctaaaaaggaaaaaaagcaccaaaatggacgctatgaggaaacagctcgatgtgctgatgggtgccaatctaaatggctatgtacgtgaagtgaatctcaaatacta

SEQ ID NO: 2621 - DNA, 242 bp, Gossypium hirsutum
  unsure (1)..(242): unsure at all n locations; Clone ID: LIB3083-060-Q1-L1-H3
gatgctttggnntattaggtaaacagcatttgcattggaaccatctggtgcaattgacaagacatttcttgacttacataaaaagcttaataattcatcactattcacaccttcataatctgcaactggacaattactccatactaccccctttttattccaactactgctactctcattgtaattccacgcacttcactgatctctatcccggtcttcgtgacttctctgattcgattctt

SEQ ID NO: 2622 - DNA, 326 bp, Gossypium hirsutum
  Clone ID: LIB3083-060-Q1-L1-H4
taagaccctgaccgtcaagaccatcaccctcgaagtcgagagttcggacacgatcgacaacgttaaggcgaaaatccaagacaaggaatggatcccaccagaccaacaacgtctcatcttcgccggaaaacagctcgaagatggccggaccttggccgattacaacatccagaaggagtccaccctccatctcgtcctccgtctacgtggtggcatgcagatcttcgtcaaaaccctgaccggcaagaccataactttggaagtcgaaagctctgacacaatggaccacgtaaaggcaaaaatccagaccagggaaggattccaac

SEQ ID NO: 2623 - DNA, 279 bp, Gossypium hirsutum
  Clone ID: LIB3083-060-Q1-L1-H5
tatgggcttccctttgtatcaaaaatcaaccttatggcttcaacaatgagatccaaccggtgcaatcgacgagaccttgctgatcttattaagaatgcccgaggtatgcactaccccgaggagaaaatctgcaaatggatgactcaattactcttacccgtggactacctacactcgaaccgcgttcttcatagggatctgaaatgttcaaatatattccttacaaaggacaatgacatccggcttggtgactttggacttgcgaaaatacttaacacg

SEQ ID NO: 2624 - DNA, 261 bp, Gossypium hirsutum
  Clone ID: LIB3083-060-Q1-L1-H6
gttttttttttatttttcctatttgccggtgtcatttcgatgcctggatcttgaaatggcatatgagaataacattttatgtttattcatgaaaggagccaatcgtttcatttcataagcttatggttgagatgagtttgtggattgtggtcaatgtttttttcccctggtttttcttacattcttgtatttggtagctggccagaaggcatttcaatggcttctaatacttgtttcatttgcttgcattaatgcttagtt

SEQ ID NO: 2625 - DNA, 326 bp, Gossypium hirsutum
  Clone ID: LIB3083-060-Q1-L1-H7
tgcaggggttctgcacgagctcgtaccgttaatgtcggacccgtctgctccacccaatatcgaccatgaccaaaggcgatcattgtctagaatatacctgcgacgctggactgtcttattaatgataggtagtcacaccttctcgtctgcggctggacatttattccagacacaaacatcctgatcagagctgtcacaattggcttcaaaatacgaaaagctcgaatagtctgaatacaaacagtcaaaatatcacgaagagtacccaaaacatgagaagcctgaaatgcacaagggggaaaaacaaaaaccctgcaaacatcatg

SEQ ID NO: 2626 - DNA, 280 bp, Gossypium hirsutum
  unsure (1)..(280): unsure at all n locations; Clone ID: LIB3083-060-Q1-L1-H8
ctcgtgccgttttgatcctggtattgttgttctagttgaaacccgagttagtggctttaaggtagatcgagtaattgggagtattggcatgtcaaattctcatagagtcgaagccagtggtttttcggggggaatttgggttttgtagaaggataatgttagtataacgatggaagtaaaccaatttcagtttttgcatttgaaagtgtggctttcgaagcttaatgattgagtttattttcactgggatntatgggagtcctcggtggacggtcgggaa

SEQ ID NO: 2627 - DNA, 202 bp, Gossypium hirsutum
  Clone ID: LIB3083-060-Q1-L1-H9
ttaccttcagctcttccacccagaacaactcatcagcggcaaggaagacgcatttaacaagtgtgcccgtcatcactacaccattggcaaggagattgtcgacctctatttgcaccgcatcacgaaacttgctgataactgcactggtcttcaaggataccttgttttcaacgctgtttttcgatgtactcggatcatgtct

SEQ ID NO: 2628 - DNA, 258 bp, Gossypium hirsutum
  Clone ID: LIB3083-061-Q1-L1-A10
tttgcactgtattctctgaaatgccgacacgcaaaggtcagtcttctgcccaacagacaagttgctgatgaagcggtctctacatataaacttgagcacccttcagagaaaaggagcagctcaagagtaaaagtgtaccttgagaagcataaggtcttgcacactgctttattaatcttggttctcctaggaacttgtatggtgattggagatggcgttctcactccagcaatttcagttttctctgctgtctctggc

SEQ ID NO: 2629 - DNA, 275 bp, Gossypium hirsutum
  Clone ID: LIB3083-061-Q1-L1-A11
ccgattcccaagtacctaactggttgcctttgtgggccaattagcaagctgtgaacgtaagcttgaggagatgggctgttggtacccggtgatgtacgatccggatactgaggtgttcatatacgatttcgtgactcatgaatggatacaaggtaaggatatgccttcaaaaagatccttctttgtaatcatggcatgtggatgtcagatttttgttgcagtcgggcatgaccagaacaagatcgtgtcaataaccgcttgggtttaccatctga

SEQ ID NO: 2630 - DNA, 414 bp, Gossypium hirsutum
  Clone ID: LIB3083-061-Q1-L1-A12
tgaagatatagcacgacagtcactttccaataactggctgaagtatggagctaaaggacatcttctaaatgctggcatttgtcaactgtgcaaaggtgatgttgcaatcaccaatgcattacagcggtatcaggaactggatccaactttttctggaacacgagaatataaatttttagctgacattgcttcttccattgatgaggaagatgtcacgaaatttacagatgttgtcaagggaattgacagcatgtctccattggattcttggaagactacccttctactccgtgtgaaggaaaagctgaaagctaaagaaatggaagaagatgatcttacctaaaagaggttcatgtaataacagctttgttttttctttttctttttatctttttcaaaattgatgattgcttt

SEQ ID NO: 2631 - DNA, 223 bp, Gossypium hirsutum
  Clone ID: LIB3083-061-Q1-L1-A9
gaacttctggtgttgtttaaaaacaatgtggagtcaaatagcctgttggattcagtttctttttttatgaagggtatgggataagggttttcgagtgataaaccccagatttgggaaggaaattataatcaattagaggcttttaagacaagggaagtttgaatgagcagtcgccctctggctccgaatgaagcttagtgttcggattggaatcaatgaagtt

SEQ ID NO: 2632 - DNA, 99 bp, Gossypium hirsutum
  Clone ID: LIB3083-061-Q1-L1-B10
tgcagtccgaacttcggtctttttataaccatattccggttacacaacaactttgcaaaatattatgcaaaaaaatttcccaaattgttaatttaaacc

SEQ ID NO: 2633 - DNA, 161 bp, Gossypium hirsutum
  Clone ID: LIB3083-061-Q1-L1-B11
ggaaactcggtaccaatgtgcccccaccagctaggaggagagagacttcaacacttcacctctctgatgaatatttgagcttctggtacacttgcaagaaacaactagagaaagatgaagaagtttacatgcacagaagtgaaaaggcattttgcaatttc

SEQ ID NO: 2634 - DNA, 304 bp, Gossypium hirsutum
  Clone ID: LIB3083-061-Q1-L1-B12
catctctgtgaaagaaggttttgtgtatatagtgtgttgtttggaaggaacgatggaccgctatggacaataattaaacatggtgtactacatcaacaaacgactagacaatgatgaagaaatttacatgcacatacgtgaaaatgcattttgcagtaccgattgctacactgagcacattctcccctacgacgatatgcacaaaacttgcaataattcctcatccgaccgttcttcagaactgatcaatgatcaacatgtctcactaatgcctatgtccattaacatgtcacgtactattgcc

SEQ ID NO: 2635 - DNA, 317 bp, Gossypium hirsutum
  unsure (1)..(317): unsure at all n locations; Clone ID: LIB3083-061-Q1-L1-B9
caccatctatccttctcctcaggtctcaactgcacgtgtggagccttacaatagtgttctgtccactcattcccttcttgagcacacagatgtggccgtgctcttggacaatgaagcaatttacgacatatgccggagatccctcgatatcgagaggccaacttacaccaatttgaacaggctgatttctcaaaccatatcgtccttgacgacttctttaaggtttgatggagccattaatgtagacattacagagttccaaaccaatcttgtgccatatnnctcgatccatttcatgctctcttcttatgcgcctg

SEQ ID NO: 2636 - DNA, 335 bp, Gossypium hirsutum
  unsure (1)..(335): unsure at all n locations; Clone ID: LIB3083-061-Q1-L1-C10
cgaaaacacatcaaatcgtcaggttaccttttgcaaacggaggaatggcctgctgaagaaagcttacgaactgtcaatcctctgtgatgcttaagttgctctcattgccttctccagtccaagccgtctgtatgagtactccaacaacaacataagatcaacaatagacaggtacacgaaagcttgctcagatacttctaacacaaacactgttacttgaatcaatgctcactattatcaacaagaatcagccaagttgagacagcagattcaaatgttacagaaatctaacangcacctaatgggagattccttgagttccttaactgtgaaag

SEQ ID NO: 2637 - DNA, 267 bp, Gossypium hirsutum
  Clone ID: LIB3083-061-Q1-L1-C11
aaaaataccagccactcggaatccttgaattgcgtgtctttcttagcaaaacaactctttgtcttgtcttgtcttgtcttgtcttggcttgtctcgtcttggactttaaataacctaatctaaccgcctacaaaaataaaattcctcaaccaagtccctttaatatctcaaaaatgaagctgctttttttctgcttcttgattctcctatcctctgctttctacacgcccattgcaattcatgtgcccgacgcccatagcacctgaa

SEQ ID NO: 2638 - DNA, 118 bp, Gossypium hirsutum
  Clone ID: LIB3083-061-Q1-L1-C12
ttactatcctcacattttgtctgctattattgcgcgcctttcttaactagccttcagacatcccacatcctatcttcctttaccaccttactcttatactattctatatcattcccaa

SEQ ID NO: 2639 - DNA, 285 bp, Gossypium hirsutum
  Clone ID: LIB3083-061-Q1-L1-C9
aaacaacaaagcaagacatggattcattaaatactgttcgaatcacaaacagacagaatggaaacatgtcatttcttacataccgaaagcaaactttttttttcttatgatttgtactaaaaatgctgggaaaagaagaaacttaatatgaaatatacaacaaatacaacctcaaaacaaaaacagatatttttttaacaattgaagaaacacacaatcccatcagtatttctatgtgaacttgaaatctaagccttttctttatcttcatctgatttggagtgt

SEQ ID NO: 2640 - DNA, 146 bp, Gossypium hirsutum
  Clone ID: LIB3083-061-Q1-L1-D10
tcaaattccaattaatgacatcatcattcaaacactgaaattttttaaatatacatgctccaattatttctgttcactaatcatattatgaccttttccacatcatttatatcaccattttataccactttaaactcacttcatat

SEQ ID NO: 2641 - DNA, 398 bp, Gossypium hirsutum
  Clone ID: LIB3083-061-Q1-L1-D11
cgtcttcaagcgtcgcaatgacggaatctacatcagcaaccttggcaagacctgagagaaacttcaacttgctgctcgtgttattgttgccatcgagaaccctcaggacatcattgtccaatctgcaaggccatatggccagagagctgtactgaagtttgcacaatacactggttgtcatgcaattgctggaaggcacactcctggcaccttcactaaccagctccagacatcgttcattgagcctcgtctctttatgctcacagatcccaggactgaccaccagcccatcaaggaagcagctctcggaaacattccaaccattgctttttgtgatactgactcaccaatgcgatatgttgacattggtatccctgccaatcacaagggaaagcaca

SEQ ID NO: 2642 - DNA, 423 bp, Gossypium hirsutum
  Clone ID: LIB3083-061-Q1-L1-D12
caacatttctcatggctcttgtggtaacctttgttggcagataagtgttttacttgctgctatgttccttgtgttcttctggtttagtgaaggggtctacttatcatcagcactcatgaaagtgcctcaaggaggatgggtgcctcttgtgctgtctgtcatctctatgttggttatgtacatatggcactatgggactcgcaagaagtacaactttgacctgcacaacaaagtatcactgaaatggttgcttggcttgggtcctagcctcggtattgtgcgtgtgcctgggataggcctcatttactccgaactggcaacaggagtccctgcaatatttttccactttgtcacatacctgccagcgttccataaggtgctgcgttttgtttgtgtgaaatcagttccagttccatatgtttc

SEQ ID NO: 2643 - DNA, 393 bp, Gossypium hirsutum
  Clone ID: LIB3083-061-Q1-L1-D9
ttagagttgcattaagcactgaagctaacaaagggggatattcatgttctttagaggtttttcttggtgatgttaaggtatggaattctggtcattactccaagttttatacctctgatgtatgcttccttgaacttactgaagatggagatttacagttgaagggtcctaaaaaccggatgggttggcgaactggtacttctggacaaggtgtagagagattacaaatattgaggactggtaatttggtacttcttgatgttttgaaccagataaaatggcaaagtttcaatttcccaactgatgtaatgttatggggacaaagattagatgtatctacttggttaacttctttcccaaggaacacaacatcattctacacatttgaaatct

SEQ ID NO: 2644 - DNA, 331 bp, Gossypium hirsutum
  Clone ID: LIB3083-061-Q1-L1-E10
ctgaaccacattctaagagaatcaaggtcaagcttggtgttcaaaaagaggttcttaatggagcgattttggagcaatcttatgttgttgagtatgttcaacaagataacatgtgtgactcttgtacgaagtttcaggcgaatcctgaccagtggttggcttctgtgcaacttagacagcgtgtatcccacagacgaaccttcttttatttggaacagctcatcctgaaacatgatgctgcttgccatgccattaaaatcaagcaaatggatcaaggaattgattttttctttgctaacaagaatcatgctgtgaagtttgtcgaaatttt

SEQ ID NO: 2645 - DNA, 314 bp, Gossypium hirsutum
  Clone ID: LIB3083-061-Q1-L1-E11
tagaagattttccttatttcatacacaaaaccaacatcgataatcttcatcttctcattactccaaacacttatacccacacttatgtcattccacacctaaacatcttcttacatcacccataatctactcctattcataacataccttacttaaactctccatacctggatcctacccctcacatataccaccttcttctctaactctctttacatcatatctcattatcccatccacactttaaccacttccctatcccatccataccttttaaactatatcaaccccaatcaatatccaccacttaatct

SEQ ID NO: 2646 - DNA, 407 bp, Gossypium hirsutum
  Clone ID: LIB3083-061-Q1-L1-E12
aaaaggggaagaactgagaataatggagaaaagtcgaaagggtaatggtgttgctcctgctacaaggtctccaatggctttaatggggtcatctagaaatgaaaaccaagaagtgaataccagcatgagaactgtcgagaccatgctgcggttggtgcctatggctttaggggttgctgcacttgttgtcatgctcaaaaactcacagtccaatgactttggctccgtttcatactcagatcttggtgctttcaggtacttggtgcatgctaatggtatttgtgcaggctattcccttctttcagctattatagcagctgtgcctcgtccttctactatgcctagagcttggactttcttcctcctcgatcagattctaacatacataatcttgggagctgctgctg

SEQ ID NO: 2647 - DNA, 394 bp, Gossypium hirsutum
  Clone ID: LIB3083-061-Q1-L1-E9
atttttctttcttttgatggggcaaaacaaacaagggtcaaagtcatctttgcagtgataagaaaccagataccctgtggtttctcatgccacaccggaccatattatgagatcaatcacaatttgtccgggttgatttcataaggtaatgaaatttgccatacctggctcctactggacaagtatcttagctcctggtcaagcactcattaagtggcatctcattatgcttacgccactttcaccactgaccaatcacatccttgtcttttgagctctatttgctccaagtaatattcaccacttcatcagcataatgactaggcaaaatcatgccaagtacctgaatacgttggggttctccttgtccatctcaagataatctcgagtaatc

SEQ ID NO: 2648 - DNA, 246 bp, Gossypium hirsutum
  Clone ID: LIB3083-061-Q1-L1-F10
gtctggtgtgggtctgaagttgtggcgctaatgaagatacctaaagggatagctcaagctagggcaactgacaagatgaaggtttctataaattggtggccgggcatgaagctccgatcactggcggaaccatcgtttttgggaccaatctgctgttttcacggtttcaccctcatgcaaacccatgcaccgtgcaccattcctttatataaatcccagcaggaggcaacataatatcaacacagt

SEQ ID NO: 2649 - DNA, 359 bp, Gossypium hirsutum
  Clone ID: LIB3083-061-Q1-L1-F11
catcactagggaatccacatgtagatctatatacagttaccataaattatgaaattagcttgatcgaattatttactgttgctgacattgaatcacttacaaattctattgttacaattactactgatatgacatcatcttataccggtatgaataaaaaacaattgaacaatagtcaaacaaaattgacaccacctctcaaagtttgataactttctaccactatcaccccatcacatacaaccaaaatggatatctttaagatgaagcacatgacatattcttactgctatgaccataccacatacaaagttccacctgtataatgtgtgatcaatccccatgaatccaaaagactg

SEQ ID NO: 2650 - DNA, 358 bp, Gossypium hirsutum
  Clone ID: LIB3083-061-Q1-L1-F12
tttaattgaagagtgaaggcagatggattttagctgattctttacatccttagggactcctttcgtaatattcatagtgttgatgctgctctttgcatggctttccactaggcaagggaactcggtgctgtattatccgaaccggatcatcaaaggtatggaaccgtgtgaaggcggttcaaggacaacaaaccctttcgcttggataaaggaagccttgtcttccagtgaacacgacgtcatcaacatgtctggcattgacactgccgtctacttcgtcttactcagcactgtattgggaatcttgattttgtctggcattgtactgcttccagttcttctacccatcgctccaact

SEQ ID NO: 2651 - DNA, 423 bp, Gossypium hirsutum
  Clone ID: LIB3083-061-Q1-L1-F9
aatgggtggggactttccctctaagccgatgtcgttgtatgctacaatatgggatgggtctgattgggctactaatggtggcaaatatagagtcaattacaaatacgctccttacgtagccgaattttctgacctgatcctccacggctgcgcagtggatcccattgaattttcgtcgaagaagtgtgacaccacctctcaaagtttggaactttctgccactatcaccccatcacaaagaagcaaaatggatagctttaggaggaagcacatgacatattcttactgctatgaccagaccagatacaaagttccacctgtagagtgtgtgatcaatccccgtgaagccgaaagactgaaaaggttcgatccagtcacgtttggaggcaggcgtcaccatgggaagcgacaccaccgcagcag

SEQ ID NO: 2652 - DNA, 422 bp, Gossypium hirsutum
  Clone ID: LIB3083-061-Q1-L1-G11
ttttaaatcaaatactataatagtattatactagcggaaaaatacagatgcttcacggtgtctatacctctgaaaatttcttgcatgacaagattcagaagcatttgctatattctttgggttttttaaaggctcaaacattactgaccaaggaactacggttgatgacttcagtggaaatcaagttgataaggtcaaaagaactgaccattaagtaaaacatcaacattttaccttcaccagtcatgatgcatccgtaactttgctcacaatagctactgcaagctttacaatgcttgattccggggattgccgaaaccgttctatcaccgggaacaactccgatgaacgaaggaactgtcggcaatttggatatgcgcacatctttcccagtgagaaaagagctatctttaatggtgact

SEQ ID NO: 2653 - DNA, 295 bp, Gossypium hirsutum
  Clone ID: LIB3083-061-Q1-L1-G12
gaaatatatgcagcttttggtccgagttcagtctcgtattcagtcacgccggatccaaatgttagaaaatcaagcacgacgtcaagctcagtttaagaaagacaaggaggccgagagcggcttcggcaaatggacctttggccagtccgagacagggaatgaaaactgggatgatagcttgctgacaaaggaagaaatggaggcaagaatgcagagaaaggtggaggcagtcatcaaaagagaaagggccatggcgtatgcatattctcaccagctatggaaagatgcaatgaaa

SEQ ID NO: 2654 - DNA, 252 bp, Gossypium hirsutum
  Clone ID: LIB3083-061-Q1-L1-G9
agcgaaatcaaaacacgcccaaaccttaattccatggaataattaaaggaaatagcctacaacataaccaaaattatccgttcgttctcctagttctccatctgatcactaccctactctctcaaccccaaaccataactcccctatccaaactactatacccaacacacaccgaccttatcaactatcgtttacgaaactattcttccctcctccctcactaaatacactcttaaccacacatcctctaac

SEQ ID NO: 2655 - DNA, 88 bp, Gossypium hirsutum
  Clone ID: LIB3083-061-Q1-L1-H10
cggcacgagtgatgtcacaggtggtacatcttctccgtatattgacggagaacataaagaaagcacccctcctaatgggttagagaaa

SEQ ID NO: 2656 - DNA, 416 bp, Gossypium hirsutum
  Clone ID: LIB3083-061-Q1-L1-H11
cagccggtgatgaagatgatttcattgaggtcagaggaaagaggcaagtgctgaatgacaggcgtgagcagagagaaaaagaaatcaaagctaagtctcgggttgcaaagccaccaagaaaacctcgttcaatcccacaaagctcaaatagaaattctgcttcagcaagtggagtaatgaacaatgttcgctctgatcttgattgcactgaaggacgaaatctggcaaatagtgaactatcaactgcattcagtgcaactatagtatcccagcccttggctccaatcggtactactgcgactaaaactgatgcacaggctgatataagaacgcaagcagtgaagtcactccatacaagctcccttcaagccacctcaagtggtggacaaagcctggtatcaggattgatgtttgag

SEQ ID NO: 2657 - DNA, 258 bp, Gossypium hirsutum
  unsure (1)..(258): unsure at all n locations; Clone ID: LIB3083-061-Q1-L1-H12
acaacacangctctttgtgatctggcccttcgattgggggaaagaaatgaataatccatgtcccggacctttggggtatcacttctcattgctggtcatgatgagaacgggcctagcttatactatactgatccatctggcacattntggcaatgcaatgcaaaagctataagctctggctctgaaagtgcatatagctctttgcaagagcaatacaacaaggacctaactcttcaagaagctgaaacaattgctctg

SEQ ID NO: 2658 - DNA, 423 bp, Gossypium hirsutum
  Clone ID: LIB3083-061-Q1-L1-H9
gtgaaagcggtgccaccggcggatctgaaccggaagaccgagtggttcatgtacccaggagtatggactacttatattctaatcctattcttctcctggctccttgttctctccatcttcggttgctctcctggcatggcttggaccgtcgtcaatctcgctcacttcctcgttacataccacttctttcactggaagaaaggaaccccatttgctgaagatcaagggatttacaatggcttgacttggtgggagcagatagacaatggaaagcagcttacacgcaataggaagtttctaactgtcgtacctgttgtgctgtacttgatagcctcgcatacaaccgactatcaacatcctatgctcttttttaacacacttgcagtgcttgtgcttgtcatcgccaagttccccaacatgcac

SEQ ID NO: 2659 - DNA, 334 bp, Gossypium hirsutum
  Clone ID: LIB3083-062-Q1-L1-A10
cgacgttccacggttccccattcccaccttccccccttgggtcaattcctttgaactctttctaaaattcccgctgccactttttttcagtgcggcattaaccccactttctctgcaagaaaacgcattgtttctgctgctaacaatggtttcaacacggttaattcaacttcattggggactggccaagatgaagatgattatattccaatgccaattgttttgattgatcaagattcagattcataagcaacagttgtgcagctgagttttggagatcgtttgggtgctctcattgacacgatgagagcattgaaagaattgggattggatg

SEQ ID NO: 2660 - DNA, 275 bp, Gossypium hirsutum
  Clone ID: LIB3083-062-Q1-L1-A11
ctcaggtttaatcgttatcatcaaccttttggcattacggtactttcctgttctttgtctctcacaagatttttatttcttctactttgttctacagtggcctggatcatactgctacacgaaacatatatgttggtacccgaatacggtaaagccttccgcggattttaggatccatggactttggcctaatttcaacaatggttgctaccctttcaacttggaccctaatcaatcgttcgacaaatctcagatatcaagccttattgggaatc

SEQ ID NO: 2661 - DNA, 336 bp, Gossypium hirsutum
  Clone ID: LIB3083-062-Q1-L1-A9
cataagatgaaacatcacaacatccaatgaactcgaatggaaataccttgccaacttttatggagcaagtaaatcacctgaaaaaccccatgagtttctaaagctttttagcataacccaacatgttgctgatacaaattccaacaatggatcatgaactcattgtatgagactcagtgtatagttctttgtcttggcttaaaattatggacttgaagacacatcctgattatgtggagatccaactcactccaactagaaccagctatctttttctctttttcgtgtgaatagaggttctctcattgtgtcatttcatctgattcggtttatcat

SEQ ID NO: 2662 - DNA, 414 bp, Gossypium hirsutum
  Clone ID: LIB3083-062-Q1-L1-B10
agcaggacctcagtctgcatggcaaggacagagagtcaggagctttgaggactccaaaaggcattcctttcttgaagaactgaaatccagcaatgcccgaaaatttgagctctctgatatatttggtcgtatagttgaattcagtgttgatcaacatgggagtcgatttatccagcagaagctggagcattgctgcattgatgacaacgagtctgtttacaaagaagtccttccgcatgcttcaagattaatgactgatgtttttggtaattacgtcattcaaaagttctttgagcatgggagttgccagcagcgaaatgaacttgctgatcaactggttggaaatatgttaaactttagtctgcatatgtatggttgtcgcgtgatacagaatgcgttggaagtgattgatct

SEQ ID NO: 2663 - DNA, 349 bp, Gossypium hirsutum
  Clone ID: LIB3083-062-Q1-L1-B11
cttagtaagggatttgatggcatgatcacgttgttgagggaaaaagaaatcggcaaagcaaaactgttgatcaaagatagtggaagacctaggtttcttgaaatagccttatgaacattgtccgtacagccccctggtaaagtttcttcttagttatgttacttggacttggatgtgccaggattcaggaatgtgtcttatgtgggtatgcttaattttttaaaatcttttcaatgtatttggagaatatgcgattagacacagtgtgagagacagatactttaagaaaaaacgaagtgctggagtaacatagcttcttaggttcctactttcctatatttttttgagc

SEQ ID NO: 2664 - DNA, 191 bp, Gossypium hirsutum
  Clone ID: LIB3083-062-Q1-L1-B9
cttatgtccattcccccaagaccccaaccataccatcagcatcactgtccaccaacatatagcatcactacattttatccatgcctctcaactgcgtagctcctaaacccgaacatgcctgcaatggactagtgcagtcagagacgtctaaatctcagaaaaaggcttcccttgcattcccaatacaacac

SEQ ID NO: 2665 - DNA, 318 bp, Gossypium hirsutum
  unsure (1)..(318): unsure at all n locations; Clone ID: LIB3083-062-Q1-L1-C10
gatgttttgacaagatttctaggcacaactccaatggggggatgaagacgccatagcattattttggagcactctttcggtgggataccctttaacttgccctcatcttccattacaatttgtttcacaaatttcagtgagttctgtgaagtgccttggaccgatgtgagacgtccncatctctcaaggtcccaaaggattgaactgttaaatgcaaaacttgatatatgaataggaggtttcgtatcagcatctgtttctgcatctgtctggttattcatcttacttaggtgccatcctataacttgtgatgaatca

SEQ ID NO: 2666 - DNA, 373 bp, Gossypium hirsutum
  Clone ID: LIB3083-062-Q1-L1-C12
cgtccccaacactttgttttttttactttctcaattaaaagattaatatgggagcattacattaatatggatcctttttggaagtatacaaccatcatcctgaccatcatatgccatcataatatggtggtaagtaccagcacgcatatcatatcatatcatttcctaaccaacatgctacactgtttagaatacgaacctaaagctatttcgatatagcagacggaaagaaccaactttatacaatggctagccgggatgtgtgaatctcccatcggatgaccactgaaaaaggaattaaaagaaaaaacatgaggaaatcgaacttgaagatggctatgagcatggagagtaccagaacagcaacagcata

SEQ ID NO: 2667 - DNA, 305 bp, Gossypium hirsutum
  Clone ID: LIB3083-062-Q1-L1-C9
acctattctggttggttgaaaagaggcaaagaggtattaaagtaacagcaacctacacaaatctgtcaacatctttacgtacagtccaaatattaataaacacaatgatttcgtagatatccattaagcatattcaaaggatgcctcatttgttacttgacattcaatcttccagttaattttctaacaaaaaccatagatttttttctctaacagaattgctgggaaagggcaagggacaactaaaacccctactcacacttgatagacctgtatatgtgacgcacaaagaatagcgaggcacg

SEQ ID NO: 2668 - DNA, 375 bp, Gossypium hirsutum
  Clone ID: LIB3083-062-Q1-L1-D10
taggtaagatctgttgatacctatctctacgttgaacgaatgagcacattattttattccctgttttatacgattcttttataactatttaaggtacaaattatatctgcaacaaccttaatgactactgaaaaagctactaaacctacttcacttccttcatacccacaactcattatgaacgccattgaatcattttaccacaagaattattctaactagacattattatccaaattcattcaatccaagtatgcatatttgaatgctgctcacacttctctgctttctcaccagcttattggtattaaacataccagggaactagtcttattgtataacaattacattagaactcaccctaattcgccacct

SEQ ID NO: 2669 - DNA, 411 bp, Gossypium hirsutum
  Clone ID: LIB3083-062-Q1-L1-D11
cgaatcgtcaggttacgttttgcaagcgcaggaatggggtgctgaagaaagcatacgagctgtcagtcctttgtgatgcagaagttgctcttatcgtcttctccacccgtggccgcctctacgagtactccaacaacaacataagatcaacaatagagaggtacaagaaggcatgttccggtacctcaaacacaaataccgtcacggaaatcaatgctcagtattatcaacaagaatcagccaagttgaggcagcagattcaaatgctacagaattctagcaggcatctaatgggagattcgttgagttccttgacagtgaaggagttaaagcagctagagaatagacttgaacgagggattactagaatcagatcaaagaagcacgaaatgctgctagctgaaattgata

SEQ ID NO: 2670 - DNA, 228 bp, Gossypium hirsutum
  Clone ID: LIB3083-062-Q1-L1-D12
ctaatacttatcgaacgttttgcaagcgcaggaatggggtgctgaacaaagcatactatctggaattcctttgtcatgcacaaattgctcttatcaacttctacacccgtgaccgcctctacgagtactacaacaacaacataatatcaacaatacttaggtacaatatggcatgttacgagtcctgaaacacaaataccgtaacagaaatcaatgctcagtattatc

SEQ ID NO: 2671 - DNA, 303 bp, Gossypium hirsutum
  Clone ID: LIB3083-062-Q1-L1-D9
ttttgatctctctgaaaaatttctaaaattttgaagcttcgttgaacgaatggtcgtcttttttttttcccttttttctttgattcttttggggttttttgaggtgcaaattgcaaaggcagcaaaattaatggctactgaagaggtcaataagccttcttcactttcttcatacccacagctgattatgaacgccattgaagcattgaacgacaagaatgggtttaacaagacatcaatcttcaaatacattgaatcccagtattgatatttgcctgctgggcacactactttccttttaca

SEQ ID NO: 2672 - DNA, 427 bp, Gossypium hirsutum
  Clone ID: LIB3083-062-Q1-L1-E10
ttgatatttgcacgactcagtcagtaataagaagcttataattcatctatggcagccgacggtaacaagagaaagaggcccaacatattggtgacgggcacgcctggaactggcaagacgacgacctcttctgctttggcggaagccaacaatctgcgccacatcaatattggtgatttggtcaaagagaagaacttgcacgacggctgggacgatgatctccagtgccacattatcaatgaagacctcgtgtgtgatgagcttgaggatgtgatggaagaaggtggaaacattgtagattatcatggttgtgatttctttcccgaaagatggtttgatcttgttgtagtacttcaaactgacaacaccgtgttgtatgatcggttgagtaaaagaggttatgaaggtgctaaggctttcaacaaca

SEQ ID NO: 2673 - DNA, 331 bp, Gossypium hirsutum
  Clone ID: LIB3083-062-Q1-L1-E11
gtttgatggagccctgaatgtggatgtgactgagttccggactaacctggtcccatatcccaggatccactttatgctttcttcttatgcccctgtcatttcagctgagaaggcttaccatgagcagctatcggtggctgagataaccaacagtgcttttgaaccctcttcaatgatggccaaatgtgacccacgccatgggaagtacatggcttgctgccttatgtaccgaggagatgttgtgcccaaagatgtgaatgccgctgtggccaccatcaagaccaaacgcacaatccaatttgtggattggtgccctactggattcaagtgc

SEQ ID NO: 2674 - DNA, 382 bp, Gossypium hirsutum
  Clone ID: LIB3083-062-Q1-L1-E12
ctacgtgcaccccccggaccctccgggaggcgggtcaagccttcaaggccctctttccagccctcttagctcttcaacttttcggactacttataatcttatttttcattccattcccgagtatgtctctgattccaagcttctttggcagccgtcgcagcagcatctttgatccattctctcttgacgtttgggatcctttcaaggatttccctttctcttctccttcttcatcactctccacgcgctcttctgaaacctcggcttttgtcaacacccgaatcgactggaaggaaaccccagaagctcacgtgttcaaggctgatgttccaggacttaagaaagaagaagtgaaagtggacgttgaagatgacagagtgct

SEQ ID NO: 2675 - DNA, 234 bp, Gossypium hirsutum
  Clone ID: LIB3083-062-Q1-L1-E9
atctattcgttctattactttttctgggtttttttccacctccttatcaaaattccaagacaaaccacattagattgcccaaaaattcattggaacattaaatccagaacccacaaacaaaatttcaacaaaataatttagtagcaaaagaactcaatggaaatattttcctgggctgacattcaattttttttaaagcagactggataacaccagccagggtctacttgatct

SEQ ID NO: 2676 - DNA, 427 bp, Gossypium hirsutum
  Clone ID: LIB3083-062-Q1-L1-F10
ccgaaatcgcggttttgcttttgtcttgtactacaacgaggcctgcgctgattattcaaggcagaaaatggcaagtgcaaattttaagctggatggcaacaaccctactgtcacatgggctgatccaaagagttcacctgatcattctgctgcttcgcaggtgaaggctctatatgtcaaaaacattcccgataacacttctacagagaagctaaaggaagtatttcagcgccatggggaagtaacaaaagtggttatgccacctggcaaagctggtaagcgggattttgggtttatacattatgccgaaagatcaagtgctttgaaagctgtcaaagatacagagaagtatgaaatagatggccaagtcttggaagttgtccttgccaaacctcaggctgataagaaaactgatgcaacataccct

SEQ ID NO: 2677 - DNA, 330 bp, Gossypium hirsutum
  Clone ID: LIB3083-062-Q1-L1-F11
gtttaatttccttatatcactccactttatcatcacccgggttttatccccctcttttatctcgactttaatctgcacgccttcttcccattacttcattacattctcaagagaaaaacccatagccaaaaaaatggccaaattattgctgttcattgcactatttgtggttccatgccttgttattgctacacgcatggtgaaaaacccgctggtggttcaaggtcaagtttactgttaccattgccgtgctgggtttgaaacaccaaagactagaaacatggctggtgcccaggttaaagtggtatgttccaaccggaagaccggtga

SEQ ID NO: 2678 - DNA, 379 bp, Gossypium hirsutum
  Clone ID: LIB3083-062-Q1-L1-F12
gaagggttgaaattgaatcacgaggtcactgattcagggtctactgtgaaactgaaagatgacatggatgaagaaaatggttggcaattggattctggagaccttctgtctaatgctgaagggttgtcacaatctgtaagcaagaaccatttgccttcaaatatgccggaattgggaaatactgatggggtacctgatgtgaacataggaatgcctgatgctcatgatcagttgacaactactgtaagtgagaaatccaagtccaccggttcatgcagaagtttagtctccaatgatgtgaaaaggacccctcagctaacaagtgatggaagctctgattcagattctgattctgaatcttactctggctctgaaagtg

SEQ ID NO: 2679 - DNA, 225 bp, Gossypium hirsutum
  Clone ID: LIB3083-062-Q1-L1-F9
ggagaaatcagatgtggctacaaaagcagctgatgcagaggaggtcgaaaattcagctaatacttcttccaaggaagtggtgaccgaggaagtcgagactcctgctcctcttgtggaaagtactgaggttcctcctgctggtgctgaagaaaacaccgaaaccaatcctgttgctgaaaacagtgttgaaaatgctcaaattgctgtggaagaaagttatgaacg

SEQ ID NO: 2680 - DNA, 327 bp, Gossypium hirsutum
  Clone ID: LIB3083-062-Q1-L1-G10
ccgagatggctcgaacccagaaaaataaggccacagaggaccatctcggtcagctcaaagcaaagattgctaagctaaggacacaattactcgagccaccgaaaggttctagtggaggtggagacggttttgaagttacaaaatttggtcatggacgtgttgcactaataggatttccgagtgtggggaaatctacccttttgactatgttaactggaactcattcagaagctgcatcttatgagtttacaacacttacatgcattcctggtatcatacattacaatgatactaagattcaactgctcgatcttcctggaattattg

SEQ ID NO: 2681 - DNA, 356 bp, Gossypium hirsutum
  Clone ID: LIB3083-062-Q1-L1-G11
gatgcatctaattatgtcaccgaaaggaaatgggctacggcttcagatggcactcaaattcccatatcaattgtgtaccaaaagaatcttgtcaagcttgatggatctgatccaatgttgctttatggatatggttcatatgagatatgtatagatcctgactttaaggcatcaaggctgtctttattagatcgtgggtttatctttgcaatagctcatattcgtggaggtggtgaaatggggaggcaatggtatgagaatgggaaatttttaaagaagaagaatactttcactgattttatctcttgtgccgagtatttaattgaacagaagtactgttcaaaggaaaaattgtg

SEQ ID NO: 2682 - DNA, 315 bp, Gossypium hirsutum
  Clone ID: LIB3083-062-Q1-L1-G12
ctggtttaaacatgggtatgggtttaaggaatggattgcttttgattttatcttgtgttgttacactttccctctcagttttggggcgacctgccactttccttgaagattttagaatcacttggtctgattctcatattaggcaaatcgatggagggagagccatccaacttgttctcgaccaaaattcaggctgtggatttgcttctaaaaggcagtatttgttcggacgtgtcagcatgaaaatcaagctcatccccggcgactccgccggaacagtcaccgccttttatatgaattctgttacagatgctg

SEQ ID NO: 2683 - DNA, 362 bp, Gossypium hirsutum
  Clone ID: LIB3083-062-Q1-L1-G9
cgttatgtccttctacccactctttcttccgcaatgatcggggccatgtcttatcataaagagctggctgctgcaaaaaaagcagcttctcttgctgctcctctctgtcaaaatgtacaaaaggctttgctgcaatcacatgttcaatccaaaactgataaaactcctgtaacagtagctgattatggctcacaggcactggttagttttgtgcctgagcacgaacttcatgctgaattctcattagttgccgacgaggattctaaacatcttcgcaaagatggtgcccagcaaatagtcgagcgcattacaaaacttgtgaacgattctttaactagtgatggatcatacaatgttacttt

SEQ ID NO: 2684 - DNA, 377 bp, Gossypium hirsutum
  Clone ID: LIB3083-062-Q1-L1-H10
gctagatgcattcttggttcagcatgatatggagaacgggtatatgtgggttttcaaggaaaggcccgaaaatgcacttggtaagatgcagttgaggagttacatgaatggtcactcccggcaaggggagcgcccgtttccgtttagtgttggtaagggttttgttagatctcatagaatgcagaggaaacactacaggggtctttctaatcctcaatgtttacatgggattgaagttgtgccatcaccaaacctctcgaatctcgatgatgaagagaagaggatgtggagagaacttaccggcagggatataaacttctctattcctcctgaagcaagtgattttgcagcttggagaaaccttacgagcacagaat

SEQ ID NO: 2685 - DNA, 335 bp, Gossypium hirsutum
  Clone ID: LIB3083-062-Q1-L1-H11
caaagccaagccaaagaagcacacagccaaggaaatagcagggaagatcgacgccgccacaaccaatagaagcggcggcaaggccggattagctgaccgttcaagtgtggagaaaggtggacatgctaagtaccagtgtcctcattgcaaaataacagctccagatttgaagtcgatgcagattcatcatgatgccaagcattccaaggttccctttgaagagtcaaagcttgtgaatctacatgctgttcatgtggttgagccttccaagcctcgtcctggtgttaagggtagccttaaaaagtgataattaaaaaacccaaaaaatgtggttt

SEQ ID NO: 2686 - DNA, 244 bp, Gossypium hirsutum
  Clone ID: LIB3083-062-Q1-L1-H12
aattcccgagacacaggtgacgagctgattaggggcgcaatgggactcctaagcttattgaaatcctacaatcagatcaggctcctttatgtagaagaaatctcctctgaaaataaatagaaattttcagcaagtcgtctcaagactgacacttgcggtatgctaaagcacagtgacatctttctcagttgagcgtcaaccggaattaaactgccttactgactagctgaactagattgacttt

SEQ ID NO: 2687 - DNA, 367 bp, Gossypium hirsutum
  Clone ID: LIB3083-062-Q1-L1-H9
gaacggcctgtgattcaacacaagatagtccaaaccctgggcaccagcatcggctgccaaggatttcccttctaaaagcgaatcgaatgctcccgaacaagtcacttcatggatcgattacggtgtggagccagcttttctataccagaagatcatcggacagaacggtaacgacgctatcaaaacttctagatctcgaatttcagaaattcgctccaactgctgagctcattgtaatctaaccattgagtcacttaaagatgtcaaatcacaacttgatgtttacgaggatttggcatgtcgcgaacgtaaagaggggattaatattgcagcttcgaatacattgatcaccggcggtgctgctgat

SEQ ID NO: 2688 - DNA, 331 bp, Gossypium hirsutum
  Clone ID: LIB3083-063-Q1-L1-A1
acaaaggaaagcttggagagagacccaaaaacaatgtcgaaggaagtgagtgaagaaggacagggtcgtaaggactatgtggaccctccaccggcacctctgattgatatggctgaactcaagtcatggtctttttacagagccctcatagctgagttcatagccactctcctcttcctctatgtcactgttgctaccgtaattggtcacaagaaacaacaagatgcatgtgatggtgttggtctcttgggtattgcatgggctttcggtggcatgatctttatcctttgttactgcactgccggtatctcaggtggacacattaaccctg

SEQ ID NO: 2689 - DNA, 307 bp, Gossypium hirsutum
  Clone ID: LIB3083-063-Q1-L1-A10
ccaacctactccaagcaggcattttccttacaggttggtttttgtggggataaatcgatatggctagctcaatgtcccttaagcttgcatgtgtggcggtgttgtgcatggtggtgggtgcacccctggctcaaggggccgtaacctgtggtcaagtcacaagctccctcgcaccctgcattggttacttgacagggaatggtgctggtggcgttcccccaggttgctgcggcggcataaaatctctcaactccgccgcccaaacaacaccagaccggcaagcagcttgcaaatgcatcaaaagtgc

SEQ ID NO: 2690 - DNA, 325 bp, Gossypium hirsutum
  Clone ID: LIB3083-063-Q1-L1-A11
cacgagaacaatttgcttggtaagtttgagctttctggtattcctgcagctgctcgtggtgttcctcaaatcaatgtctgctttgacattgatgccaatggtattttgaatgtctctgccgaggataagaccactggacagaagaataagatcaccattactaatgataagggtagattatccaaggaagagattgagaagatggtgcaagaagcggagaaatacaagtcagaggatgaggaacacaagaagaaagttgaggccaagaatgctcttgaaaattacgcttataacatgagggacacgattaaggatgagaagatca

SEQ ID NO: 2691 - DNA, 82 bp, Gossypium hirsutum
  Clone ID: LIB3083-063-Q1-L1-A12
gctatataaagccaatcgttaccgtttacctcgaagagaggcccgttacgcaatgggccctatcatgagtcggattacaatt

SEQ ID NO: 2692 - DNA, 233 bp, Gossypium hirsutum
  Clone ID: LIB3083-063-Q1-L1-A2
gttttttttttttttttttgagaaagagaaacaatggagaggaaagaggttcgttgtttattttattttattaccttttgttattgtttttttctttttatattttaaagttgtgtcgttatttttctagggaggtaatatgtttgcaaattgggtgatttgattgtataggatatagaaaaatgtaatgtatacgtttttttttctttttcaatatatattttggatttttc

SEQ ID NO: 2693 - DNA, 347 bp, Gossypium hirsutum
  unsure (1)..(347): unsure at all n locations; Clone ID: LIB3083-063-Q1-L1-A3
cggcacgagcaagcaaccattttccttacaagtttgttggtcttgtgattaatccatatggctagctcaatgtcccttaagcttgcatgtctgttggtgttgtgcatggtgatgggtgcacccctggctcaaggggccataacccgtgctgatggcttagtcggcctcccacgctgccttccttttttgtcagggaatggtgatggtgctgatgccacaggttgctgtgccatcgtcatgaatgccttgggatcgctctgtggtgatacataggaaccgatctagcttgaaatcgggttcggatttgggtggaatttcaaatnggtgtgttatggaatcccaactta

SEQ ID NO: 2694 - DNA, 270 bp, Gossypium hirsutum
  Clone ID: LIB3083-063-Q1-L1-A4
gttttcagcctcctcttaatactcaacacggaggcccggtttattttgttttctaagcatacctcctatatctttaacacacttgttgcattgtttatacaacatgcattcatcataaaacaccttccacggcttgtagtaatttaatgaaagttgcttactaaacattatcattattagttcttaaataatgttttgctgtttgtcctgatggatacttattaatgagggtatgttggttttctgaacattctgcaactgcttctattt

SEQ ID NO: 2695 - DNA, 351 bp, Gossypium hirsutum
  Clone ID: LIB3083-063-Q1-L1-A5
caaaaaaatatcttgaaacccggagatgtcggacgaggagcaccatttcgaatccaaggccgacgccggcgcctctaaaacctatcctcagcaggccggtactatccgcaagaacggctatatcgtcataaaaaaccgcccatgcaaggttgttgaagtttccacctccaagactgggaagcatggtcatgctaagtgtcactttgtcggaatcgacatcttcactggcaagaaactggaagatattgttccatcttcccacaactgtgatgttccacatgtcaatcgtactgattaccagttgattgacatttctgaggacggatttgtgagtttgctgactgacagtgg

SEQ ID NO: 2696 - DNA, 341 bp, Gossypium hirsutum
  Clone ID: LIB3083-063-Q1-L1-A6
cggcacgagcctagatcgagttaggaagttagctgatagctgcactggtctgcaaggctttatggtgttcaatgctgtcggcggtggaaccggttctggtcttggatctttgttgttggagcgcttgtcggtggattatggaaagaaatcaaagctcgggttcaccatctatccttctcctcaggtctcaactgcagttgtggagccttacaatagtgttctgtccactcattcccttcttgagcacacagatgtggccgtgctcttggacaatgaagcaatttacgacatatgccggagatccctcgatatcgagaggccaacttacaccaatttgacag

SEQ ID NO: 2697 - DNA, 379 bp, Gossypium hirsutum
  Clone ID: LIB3083-063-Q1-L1-A7
tgaccacttattcttttttctgtcaaaatttgagatccgaatctaattccacgattttctttagagttttaaatttgatcttctcttccaaaatcaaatccaaaaagagagaaaatcccaccaaaaaaatggcgatttctaatgacaacaacaacgacgagcaccatgaatcgagtcctcttttgagcaaacaagtggcagaccaagatttgaaggagaaaccaagtggtaaaaaggcaaaagaagctgccgccgaggtgccagctcatccggtagttgctaccggagatgggtttgggtggacagctgatgggttgccgttggtccaccggagtgtcgtcggagaaccccttgggtcgatctcaatggaactcatctc

SEQ ID NO: 2698 - DNA, 342 bp, Gossypium hirsutum
  Clone ID: LIB3083-063-Q1-L1-A8
gaaattttctttctcgattttctctttagccagaaaaagaggcagatcttcgtcaagactctaaccggcaagacgatcactctcgaggtcgagagctccgacacgatcgacaacgtgaagaccaaaatccaagataaggaaggcatccctccagaccagcagcgtctgatcttcgccggaaaacagcttgaggacggccggaccttggccgattacaacatccaaaaggagtcaactctccacctcgtcctccgtttgcgcggtgggatgcaaatcttcgtgaaaaccttgaccggcaagacaatcactctcgaggtcgagagctccgacacgatcgacaac

SEQ ID NO: 2699 - DNA, 363 bp, Gossypium hirsutum
  Clone ID: LIB3083-063-Q1-L1-A9
tctggatctgccctttctgttaccagcggaaggacttggcgcctcactatgctatgatctccgaaacgaacctcccgtgcgaactctacccgcaatacaccaccgtgcaatacacgctccagccggacccgaacaacccttccagtgctcctcaattgccgccggtgtttgtatttgtgttggacgcttgcatgatcgaggaagaacttgagtttgtgaaatcggcgatgaagcaggcaattgggttattgccggaaaatgcgcttgttggggtcgtttcgtttgcgactcaagctcatgtccatgaattggggttttccgatatgtcgaacgtctatgttttcaggggtaataagaaattac

SEQ ID NO: 2700 - DNA, 346 bp, Gossypium hirsutum
  Clone ID: LIB3083-063-Q1-L1-B1
atttgggagctaatcaaaacgccattgatagttcccttgcgtgcaactgggcgtctacatttgcttggccatgtccctcatgctcttcatggagcgggtctacatgggcatagtcattatcctggttaagcttttctggaaaaaaccagagaagcgttacaaatttgagctcattcaagatgatgtggaactcggtagctctaatttccccgtcgttttaatccaaatcccaatgttcaatgaaaaagaagtttacaagatctccattggagcagcttgtggactttcatggccgtcggatcgtctcgtgatccaagtacttgatgattcaactgaccctgcaatc

SEQ ID NO: 2701 - DNA, 384 bp, Gossypium hirsutum
  Clone ID: LIB3083-063-Q1-L1-B10
aacaagggaatccccgggcctgcaggttttttttttttggaaataaaattaatgaaaaaatatattaaataaattttggtaaatgttatgcaaaataaggagaaataagtacaagcaaaagcaacagttttatgaacaagtattctcaaatctcaaccattcaaggcttccaaaataacaataaaaaggtatcaaatggtattaaactttgaagcaatcaaaaccttcctacatgtctccatgttcttaaaattaatgcaaccatttaaaaccaaaataagaatatagaaaatttatcttaaaagctttcacaggccttaagcacgagcaggaactgcaacacctggacgtggtgcttgaccaggctgaccaggctttggcata

SEQ ID NO: 2702 - DNA, 367 bp, Gossypium hirsutum
  Clone ID: LIB3083-063-Q1-L1-B11
atactcttccctcactttctaaacttgaatctgttaatgatttaagtcaatggccgaagaagcagcagtaccatcgacgccgcctcaatcatctgtgccagcattgggatcttccgttataccgctagtgaacaagctacaagacatattcgctaaacttggtagccagtccactatagagttgtcgcaggtggcggtggttgaaagccagagcagtggcaagttccagtgtgctagagtcgctagttggccatgatttcttgcctcgtggttccgataaatgcacgcgtctccctcttttccttcagcttctccagaccaagcgtaaacctgatggttctgatgaagagtatggcgagtgtcttca

SEQ ID NO: 2703 - DNA, 418 bp, Gossypium hirsutum
  Clone ID: LIB3083-063-Q1-L1-B12
tattagttcagtacaaagtcgatgttgtattttccggtggtgtccacgcctatgaacgatcggagcgtatatcgaacatcgcatacgatctcgtaaacggtaaatgcagtcctgtgaaggatctatctgctcctatttacataactatcggcgatggaggaaacattgaaggcatagcaaacaacatgaccgtccctcagccggagtattcagcttatcgagaagctagtttcggtcatgccattttcgatataaagaaccggactcatgcttattatagttggcaccgcaaccatgacgggtattccgttcaaggcgattcgacgtgggttttcaaccgattctggcatccaagtgacgagtctcaatgagaacaacatgtaagttcccttttgaacctcttatttttagaataaaa

SEQ ID NO: 2704 - DNA, 303 bp, Gossypium hirsutum
  Clone ID: LIB3083-063-Q1-L1-B2
tcgagtttttttttttttttttttgattccaataccacagcaattgtggcctgctttcatagaagattatggcaaaaacattaacatcaattatttggtacaatgcaaatttagtcatctcataacttgtaccaagtttaaattgcatggaaaattcaaaatattggttgagcttcacaaattcaacaagaacatacatccaaaaaagccttggcaaaatccaagcttcacattatttgagactgcggtggcatgttaacattagcaggcatcaagatcacggcatggaggaggtttcggatc

SEQ ID NO: 2705 - DNA, 350 bp, Gossypium hirsutum
  unsure (1)..(350): unsure at all n locations; Clone ID: LIB3083-063-Q1-L1-B3
ctcgtgccggttttttttttttttttttttttagataatatgtcgaggtctgtcatcgttcaaacacgcaccataaaagttcaacaagcaatgcactttacaaactaaaaagatcatgctttgaaacagggactcgttcggactcatgactgatagaatcttaaagttactcacaaacgctaggactaggaaggttttataacttaatgtagactaacaggtttattcgctacaaacaccgacaatggttgtgcctacaatgggaatttctagttcttgcttatagcggtagccttacgcactggatacgactnttttcagtagaacaaaaacaggcttacatgatgatc

SEQ ID NO: 2706 - DNA, 359 bp, Gossypium hirsutum
  unsure (1)..(359): unsure at all n locations; Clone ID: LIB3083-063-Q1-L1-B4
aagtaagtggccctttcaaagatgaccctgcgcccactggctttgttcctggtgctgcttaccatactttaatcgaagctttcgggggaaagggttaccttgtcgggacacctgatgaattaaaatctgccctttctgaatccttctctgcaaggaagccggctgtgataaatgtgataatcgatccctttgctggtgcagaaagtgggagaatgcagcacangaattgaggtagtttcagttttgtttcgttaaatttctttttccatcacttaccgagctggtctttctatgtcaatgaataatcggatttgtgctcacttgtgatagaacagatagagatcatgtgttttgacttt

SEQ ID NO: 2707 - DNA, 324 bp, Gossypium hirsutum
  Clone ID: LIB3083-063-Q1-L1-B5
cggcacgagcgagtttttttttttttttttttaaaaaacgagatataccaccaccatatcatatatatttagtgaagaattcaccccaaagtatcccacaattacatggctataccttgttttgaggacaaaggaaaccattgctccctatgtacaatgctccattatcaaaataggtaaacaactaaactcccagattctccctttttctcacctccattaatctcccaatcccgaaccagtcatttcaatggtctacaagtttttattacttcacatatcagaacaagaaaatatacccaccagttgaaaaagacaccgagc

SEQ ID NO: 2708 - DNA, 359 bp, Gossypium hirsutum
  unsure (1)..(359): unsure at all n locations; Clone ID: LIB3083-063-Q1-L1-B6
taggatcaaagcaatttgtcctaaccagatcagaatcgagcaaatggagttcccattcggtcacaatcactctcacactcatcaccacagaaatgatgatgaggaaaaccaagaaagacccccaccaccacatcttcaccaccatgaatttactccgccgtaccctccaccaccaagctaccagcagccacctggctttgatggaccctatcctccgccacctccatcatcatacttgcaccaacctggctttgatggtccacccccaccatcttactttcagcaacctggatttncaccacccccaccacaccaaccaccgtcatatcagtaccaacagccaccccatgtgactcatg

SEQ ID NO: 2709 - DNA, 342 bp, Gossypium hirsutum
  Clone ID: LIB3083-063-Q1-L1-B7
gaaaaaaaaaatactacattgaaaaaggcatgtgccaaaattaacattaaagttaaactcggatattgagaaaaaagaaccctattaaaaccaaacttacttaagtaccaaatagtatattaaccctattacttttgtctatcttgttttcccttgtttgtaggaaacttagtaaaatcatatctaaaatccaagcagctgaacaacctaggttgtgtttagcagtgaagtgggtaaggctggaatgtggttcaagatccaagcaactggtctgatttgcaagtgaatgaatggacacgataaaaccccatgaacaaaacataaataacagtttttctaaat

SEQ ID NO: 2710 - DNA, 394 bp, Gossypium hirsutum
  Clone ID: LIB3083-063-Q1-L1-B8
cagccagccagccagcgagggagcgagcgagcgagcgagcgctagagggtctgcaaattttagggttttggattgggaaggtcaggaagagaaagagccagagacagagtgtgagagatttttttaagagaggatttgtgagatcttttgttttgagtgaattagggatttcaacgcttttcatttctcagctcaatttatcctgtttactcgatggaacggaagcttgtggttttgggaatcccttgggaggtggatactgaaggtttgagggaatacatgagtaaatatggtgatttggaggattgtattgtcatgaaggagcgaactacgggtcgatcccgtggttttggttatgtaacgtttgcatcggctgatgatgcgaagaatgtgc

SEQ ID NO: 2711 - DNA, 348 bp, Gossypium hirsutum
  Clone ID: LIB3083-063-Q1-L1-B9
ctcgtgccgaataattaaaagacagaggagtcgataaaggtaaaagccgtccaaaacccaaaccaggaaaggcaaacgaaaagaaaaaatggctttgaattttaatgccatcgcctcgaaatctcagaagctcccttgctttgctcttccaccaaaggccacccttagatctcccaagttttccatgatctccaccattccttctggctccaaagaggttgggaatctgaaaaagcctttcacgcctccaaaggaggtgcctgttcagatcacccactccatgccgcctcacaagattgagatctttaaatctttggagggctgggctgagaacaacattctgactca

SEQ ID NO: 2712 - DNA, 425 bp, Gossypium hirsutum
  unsure (1)..(425): unsure at all n locations; Clone ID: LIB3083-063-Q1-L1-C1
cgaaagtctattcatatatcagnnnattggttttgggtcttttaccttaatggcaaaagagaaattcanngttgctatttaatgatatgacnccaatatatcanntatcttgaccctgattctnnttggatcccagaataatnnccgaagcganntgagttggttatttagtgccctatagtnntattagcttatactnnngtggtccgcctcattttttttnnttgaatcnnctaagcnctannaaaaacnnccaacganggtcgcaccacctannagcatnaagcaattatttatcaannaatgatcanatnncaaatttttaatttanacncnnttataagaatttaagaaaccctgctcnaatttttttaaatttttaatnggttcaatcannaaaaaatcaaagaaatttgtccattttt

SEQ ID NO: 2713 - DNA, 298 bp, Gossypium hirsutum
  Clone ID: LIB3083-063-Q1-L1-C10
aaaataaaaatgtcttattatttccccccttttcacggagctgactttttataaatatatcaaaatctgttcaaatcagctagatttcaactgattttgaaaccctagcatttggatccatttcgagttgtagatgtgaagcgaacttttctctttgaatagatatttctttttttggttgcattttgtgctgtaaagtggtgcgactaagtgtttggatcggagatggaagaggttgccggcgaagcggcggaggtaagaaccaatgtgaggagtgagtcgccgatgaggatgacat

SEQ ID NO: 2714 - DNA, 362 bp, Gossypium hirsutum
  Clone ID: LIB3083-063-Q1-L1-C11
aaaattttaatgcacaaggttcatcctgcaaacacaaacgagggtacgaagaaaatggattgcatattctcatccatcaccacacatcctttcataactttgagaggaaaactacaacagagcatttgtgttactaacctggcgcatcccaacacaagaatttgctatagcaagcaacccaagaaccgccgttatccgcgtcgcaccaaactccctcctgactttggcgtttacttattcttggagaaacctagaactgaaaccgacatgtccactgacactgaacaaataaagtcaatttacggtcacaatagtgattcaccctgaagaagacgacaaagaagatcatgtgaatcttgatc

SEQ ID NO: 2715 - DNA, 311 bp, Gossypium hirsutum
  Clone ID: LIB3083-063-Q1-L1-C12
gatactcacaagatgatttgctcggaagcaaacaaaggagaactcggttgttctgattcatgggcatcagccttgattgcagaacttgatcaattcaaaaacgaaaagaccgtcaaccgaagcctcccaggttcttccattgagattgatatcatggacgattttcttgagatggaacagcttgctgctttgcctgcaaccaagagtaaaaaccaatgtcttgaatcgaaagctactgccaaagtatctaataacgatggtgataactcgttgttgaaagctgagcttgaagccatgattcatcgaacaac

SEQ ID NO: 2716 - DNA, 304 bp, Gossypium hirsutum
  unsure (1)..(304): unsure at all n locations; Clone ID: LIB3083-063-Q1-L1-C2
atggccgccatggcatcagactctgaagattcatacaggagcagtggccatggaaagctcaacaacaaagtgcanagctttcgtccttcaacgccccctccaacttcggttaattaccgaactgccaaacgaagaaaggggattccccatagagccccaatgggaggactaatcatacaatattaagccataaccatacccatagagctcatcctttttgtcctcgagttgaagtataattatcctaatagtatttgccccacagatgcacaaaatcatggtgccacaatgccccctaatgttt

SEQ ID NO: 2717 - DNA, 315 bp, Gossypium hirsutum
  Clone ID: LIB3083-063-Q1-L1-C3
tgcacagcgatgccagaagtactattgaactggtgcccgctttggaaatggcgtgctgtccttaagattagtgctaatgagccaaccgagcttgcaatccaagaaaatgccaacgggctagctatgtatgctgccatctgccagcaatgtggccttgtccccattgttgagcctgaaattcttgttgacggatcacatgacattaaaaagtgtgctgcggtgacagagcgtgttcttgctgcttgctacaaggctttgaatgatcaccatgtcatgctagaaggtactcttttgaagcctaacatggtgacccct

SEQ ID NO: 2718 - DNA, 379 bp, Gossypium hirsutum
  Clone ID: LIB3083-063-Q1-L1-C4
gaaggatcgggcgtttggttgcgagagttgctggccagagcgatgatattgagctcgttgctgttaacgatcctttcatcaccactgaatacatgacgtacatgtttaagtacgacagtgttcacggtcaatggaagcatcatgagcttaaggtgaaggactcaaagacccttctctttggtgaaaagcctgtcacagttttcggtatcagaaaccctgaggaaatcccatgggctgaggctggagctgagtatgttgttgagtctactggtgtttttactgacaaggacaaggctgctgctcacttgaagggtggcgcgaagaaagttatcatttctgctcccagtaggatgctcccatgtttgtgtgggtgtcaatg

SEQ ID NO: 2719 - DNA, 316 bp, Gossypium hirsutum
  Clone ID: LIB3083-063-Q1-L1-C5
tggcaaagagtgatgccgaagtgaaagttttgggcacgtgggcgagtccattcgtgatgagggtaaggattgccctgaacatcaagtctgtggcctatgaatttcttcaggagaggttatgggaaggcaaaagcgagcttctcctcaaatcaaacccagttcacagaaaggtccctgtcctcattcatggtgatgacaccatctgtgagtctctcattattgtccaatacatcgatgaggtttggccttctgctcccattcttccttctgatccccatgaacgtgccaccgctcgtttttgggctgcttatcttga

SEQ ID NO: 2720 - DNA, 309 bp, Gossypium hirsutum
  Clone ID: LIB3083-063-Q1-L1-C6
cgagttttcttagttttcctttttgtcccttgtttatttgatattgcccccgcatggccgccgctgatgtcgagttccggtgcttcgtcggagggctcgcatgggccaccgacgaccgggccctcgaagaagccttcagtgcgtttggtgaaatcgtcgaatcgaagatcattaatgatcgtgagactggaagatcccgaggctttggattcgttactttccgtgacgagaaagctatgagggacgcgatcgaaggaatgaacggtcaaaatcttgatggaaggaacatcaccgtcaacgaagcccaat

SEQ ID NO: 2721 - DNA, 387 bp, Gossypium hirsutum
  unsure (1)..(387): unsure at all n locations; Clone ID: LIB3083-063-Q1-L1-C7
ggaaggtcttatcccttttgtttacagggctgtggtcgagtacaagagcggaaaagaagatcacgttttagcaacatggttcaacgagtcaccctcggcttcttacatgagactccccaccggagattctgatcgcttccaaatatccgatgatcgaatctttgaatcagataattatgggaagttttccacttcatcatcatcatcatcatcatcttccatggttgctccttctgctagtactaagattattttatcaaccggagttcaatctcctgctgtctgtcgtttgactcctcgccgcgtcgttacatgaaaccatcgcatacttatgggttaatctagggtctgggaatntcatgtatgtagaaaatatatatgtatttc

SEQ ID NO: 2722 - DNA, 303 bp, Gossypium hirsutum
  unsure (1)..(303): unsure at all n locations; Clone ID: LIB3083-063-Q1-L1-C8
aaaaatttgtttctatcagcattgctttgcagtgctgtggcaggagttttgggtcaagctcctantaatcctcctacgtctacgccggcgccacccacaccaccggcttctactcctcctccgacgactcaagcaccgcctacaccaaccgccactccgccactggtttctactcctcctcccacttcatcaccgcccccagtgacagcttctccacccccagtttcaactcctccacccagttctcctcctcctgcaactccaccacctgcttctcctnctcctgcaactccacctccagct

SEQ ID NO: 2723 - DNA, 396 bp, Gossypium hirsutum
  unsure (1)..(396): unsure at all n locations; Clone ID: LIB3083-063-Q1-L1-C9
cgagctgaaggagaggttttcatctgtagtactgagggagaagtgggctcctgtcaacatcaggatgcattaattgaacttggttgttcttgcaaaagtgatcttgctctagtgcattatgcttgtgctctcaaatggtttgttagtcatggatctactgtttgtgagatctgtggaaatcctgcaaaaactatcaggacttctgattttaagaaagttgtagtttctttgaaagactatgaagcattgagagaaaggactgccagtggtgatcctaatcctgcccaaattcattcaagttcaggtgtaaaccctgatgctgttgctgctatttggaggcaacgactaagtgaagattcattngtggtcagtccacatggttataacaacaacaat

SEQ ID NO: 2724 - DNA, 403 bp, Gossypium hirsutum
  Clone ID: LIB3083-063-Q1-L1-D1
ctgactctgaaatgaggacttcagcaagaggatattctgctgttgctgctgctgaggaactctctgtcatagaaaaggctgctgaccaagaagcactagatgatgatatgcttcttgaagatcttagggtgtcaaaggccatgtctaagaagtacttaaaggtgtcaatggctgctactgtaaaagaggcaatgaaatgcatgcatgacaaccatcagaaatttgcgcttgtggtcgatgaagatgaatttctggaggggattatcacacttggtgatattagacggtgtctgtctaagaagcagcctagtgatatctccatgggtgattcaacagctgatgtgaatccatgtctggtttcgtctgtttgcacgaaaagaataagctaccgtgggctggagcg

SEQ ID NO: 2725 - DNA, 373 bp, Gossypium hirsutum
  unsure (1)..(373): unsure at all n locations; Clone ID: LIB3083-063-Q1-L1-D10
aaaaaatgtaaattagataggtaatcattctttgcaaatagcaagacactattttcatagaacaaacagagagcattttacacaatataaatggacttaagcaggtttggccaacagcagacaacttcagaaacaaaataagccatccttgaacaacataaattaggacatacaatgctgcaaacaacctcagcaacctttgcaaacctaccgaagctgctggatatcggagaagacaaaagacgacatcatcatcactcataatgtagaagtttccagtttccatgcctttgatcatcaaataattcagtctcagtcgtccttatttatgcnaaatgaggtcgagaactttatatactagtgtccacttaaa

SEQ ID NO: 2726 - DNA, 245 bp, Gossypium hirsutum
  unsure (1)..(245): unsure at all n locations; Clone ID: LIB3083-063-Q1-L1-D11
atattataacactaaaaccaccttgccannctccnaattgatctcaccttttactaaaagctcccctctgtttctcacacaccgacacttacaatccaccatttttttctactaactagaaatcatttcctatatattcttcaaaagaaaatcccctattaataacacaacttcttcttcttcttcttcttcttcttcttcttggatgtgatatgtgatttgacccacattgcctttgncaactt

SEQ ID NO: 2727 - DNA, 327 bp, Gossypium hirsutum
  Clone ID: LIB3083-063-Q1-L1-D12
gggattataattatatggttggtgattcacatttcatctacaagctggatatcttgcctcatgccattgtaataatgctataccatgccagtgtaaacagtcaaacaacaaatttgttttttcacaacatagctaagcatatgcacaactcttgacattacttgaatgtcaagaaactaaacataaaaatgcaaatgcctatgcagttccttgatccttaaggaacatgtattaacttgagatttaaattgagatgctgtttgggattcccttgcctgtgagtccaccttcttttgagtaatctgaagtgttggggaaaagcaatgt

SEQ ID NO: 2728 - DNA, 186 bp, Gossypium hirsutum
  Clone ID: LIB3083-063-Q1-L1-D2
cgacactgtcttccgtgtaaagctatatacataccattagacggggcggagactgattgcataactactctgagtacataaaccataatttgctctaaaaacagaaaatcagcatataaatctctctaaaattacgcttgcctggaatgttatcacgcaacaacagggccttactttatctgatat

SEQ ID NO: 2729 - DNA, 304 bp, Gossypium hirsutum
  Clone ID: LIB3083-063-Q1-L1-D3
aaatataaatatcactgcgtgcgtagcataaaaaggcattagacaaatcttacaacatgaaaaacagaacaatagcttgtaaggctattcatgttcttatggagcatcataagtaaaagacaagcatttctaacaacaaaaaaatgacaagcaaacatgactaaatttattccataggcataatttgagaaacctcacacgaataagaaagaacaggataccctcacagggtgaacccatcatcttcaaaataaatgatattgcgatagtagcatcaatattcttcaccttcctcttcatcatc

SEQ ID NO: 2730 - DNA, 332 bp, Gossypium hirsutum
  Clone ID: LIB3083-063-Q1-L1-D4
cttctccctttcttggcgttggcgaatttttcttaagcgagaatgagagagtgcatttcgattcacatcggtcaggccggtatccaggtcggaaacgcctgctgggagctttactgcctcgagcatggaatccagcctgatggtcagatgccaagtgacaaaactgtcggaggaggtgatgatgcttttaacacctttttcagtgaaactggtgctgggaagcacgtccctcgtgccgtctttgtggatcttgaacccactgttattgatgaagtgagaactggtgcttaccgccagctcttccacccaaaacaactcatcagcggcaagga

SEQ ID NO: 2731 - DNA, 321 bp, Gossypium hirsutum
  Clone ID: LIB3083-063-Q1-L1-D5
ccatggctttctcaccaaaactcttctctatggctatcgtcttcctttttgccctcttctccatgcaaatccatgctagagagtacttcagcaaattcccaagagttaacaccaatgagaaagagacaacaaccagagagcaagagcacgagaccttcgttccccagaccacccaaaagccagaagagcaagagccaaggttcatccctgaaacccaaaatggttatggcctttacggccacgagtcaggctcaggctcaggctcaggctcaagccggcccagtttcaccaccaaaaaaacctatgaaccctatgtcaccc

SEQ ID NO: 2732 - DNA, 323 bp, Gossypium hirsutum
  Clone ID: LIB3083-063-Q1-L1-D6
ctgtgacagaggttctgtcagtgatgtcttcgtcgtcagctggcggacaagccctttgagaagaaagcagtgcttgtcatggtgctcacgttttccttaatgatcctaaactgtttgtgagaaactgatttttgaggtacccctgttttcatgttttcgggatggaagatattttattggtttctgaaaagagataatatattaataacaaaacgttaagtgtctacgcatgttaacggtattcagcggctagaagtggattttaagcgggctgatggagtctttgtttaattcactcttattataataatgaaaaagacatg

SEQ ID NO: 2733 - DNA, 307 bp, Gossypium hirsutum
  unsure (1)..(307): unsure at all n locations; Clone ID: LIB3083-063-Q1-L1-D8
aaatataaatatcactgcgtttgtagcataaaaaggcattanacaaatcttacaacatgaaaaacagaacaatagcttgtaaggctattcatgttcttatggagcatcataagtaaaagacaagcatttctaacaacaaaaaaatgacaagcaaacatgactaaatttattccataggcataatttgagaaacctcacacgaataagaaagaacaggataccctcacagggtgaacccatcatcttcaaaataaatgatattgcgatagtagcatcaatattcttcaccttcctcttgatcatcttc

SEQ ID NO: 2734 - DNA, 224 bp, Gossypium hirsutum
  unsure (1)..(224): unsure at all n locations; Clone ID: LIB3083-063-Q1-L1-D9
accccaaccccttggaaattttcacagcagcggcataactcaaatggtcaagcaggtaacanaagctcaaataatataggaagaaaccattcctcctcttatagtgctgccggatttactagtcatgattcatatagtcaaagcaacttccagtggggtcccttttctaagacaggtggtacttcaactgcaactcaagctgctagtgtggttcagcaggcata

SEQ ID NO: 2735 - DNA, 384 bp, Gossypium hirsutum
  Clone ID: LIB3083-063-Q1-L1-E1
ggtggataagactacctttcatggcaaagaggggcgaggctaccaaggaaggtcttggattgcacctcctaaggatgcaaaagcaacgaatgatcattgttatataccaaagagattagtacacacttggagtgggcacacaaaaggtgtttcagctattcggttcttccccaaatatgggcacttaattctctctgcagggatggatactaaagtgaagatatgggatgtgtttaattcaggaaagtgtatgaggacatacatgggtcattctaaggcagtaagagatatttcattttgtaatgatggcactaaatttttgactgctggatatgacaagaacatcaagtactgggatactgaaaacccggcaggtatttctac

SEQ ID NO: 2736 - DNA, 332 bp, Gossypium hirsutum
  Clone ID: LIB3083-063-Q1-L1-E10
caaaaagcacccagaaatctcctgggtggggaaatgcaatctctaatctcagcacagcaaaactgatctccgcagcgattcaaacaacgcctcaactgagacctgttatttctttcccctgatttaatcaactcaaaaggtattattatttactaaaggcagaaacttcttctgcttgaggaaacaaagcagagggcaacaatgaagtgggtcgaagtcatagtatctttcatcctcacactatcgttcttggtcgttccttcatgcgggttccaatccgatgagcttctcgttgacgacgaagagttcggactcgagggggctccgcaaca

SEQ ID NO: 2737 - DNA, 341 bp, Gossypium hirsutum
  Clone ID: LIB3083-063-Q1-L1-E11
atgatatctgcttcataactcttaagctcacaaatcccggctttggtgacttgaaccatttgatttcaacaaccatgagtggagtcacatgctgccttcgcttccctggccaactcaattccgatcttcgaaaactagcagtaaacttgatcccattcccacgcctccattttttcatggttggttttgcacctttaacatcccggggttcacaacaataccgagctttaacgatccccgagctaactcaacaaatgtgggattccaaaaacatgatgtgcgcggctgatcctcgtcatggaaggtacttaacagcctcggcaatgtttcgaggcaaaatg

SEQ ID NO: 2738 - DNA, 324 bp, Gossypium hirsutum
  unsure (1)..(324): unsure at all n locations; Clone ID: LIB3083-063-Q1-L1-E12
ttttttttttttttttctnttttttnnttttcnnnnncnncnnnnnnngnggggntcggtttattttttttttttaaaaaaataaatatcactccggtgataccataaaaaggctttatacaatttttaccccatgaaaaacagaacacttttttgtaaggctattcatgtttttatggaactttataagtaaaaaacaagctttttttacaccaaaaaaatgaccagccaccctgacttaatttattccctaggcctaattttaaaaacctccccccaataaaaaagaacaggattcccttacagggtgaaccctttattttc

SEQ ID NO: 2739 - DNA, 85 bp, Gossypium hirsutum
  unsure (1)..(85): unsure at all n locations; Clone ID: LIB3083-063-Q1-L1-E2
ctagaactagggggaggcccccgggcctgcannngaattcggcaccgagccttttctcgtattttcnntctttagccannaaaaa

SEQ ID NO: 2740 - DNA, 284 bp, Gossypium hirsutum
  Clone ID: LIB3083-063-Q1-L1-E3
aagcagctttgccgttgatgaaggatagaaaagacaagggaccagcctccattgctcttatgtcttcaatggccggccaggtgggtacatatggttttgcggcttattcagccactaaatttgggctaagaggattagcagaagcattgcaacaagaagttttggagaataacatccatctttctttaattttccctcccgtgactgaaactccgggatttgaaccagcaaggaaaacaatgccggaaatcaccaaaattatatcgagcacatctgcgggaatg

SEQ ID NO: 2741 - DNA, 303 bp, Gossypium hirsutum
  unsure (1)..(303): unsure at all n locations; Clone ID: LIB3083-063-Q1-L1-E4
ggacaaacagagcatggggtcgatgtatttcaatttcgaacattanggaatgaaaaaagaaaaagaaaagaaaacaatgaataagcaaattgtcaccttgatatatccacattgaccgcaagacaaaatgcagatttcaaactcaaaaactgaaattgtatataaatctgaacaggcaaatgcaattttaaatcacgcttgggaatcggaattaagtggatctgccttgccatggtggaatcttactacaatgcatgttatattgtcggcactccctcgagtaaacgcagtttctgtcaactt

SEQ ID NO: 2742 - DNA, 355 bp, Gossypium hirsutum
  Clone ID: LIB3083-063-Q1-L1-E5
gccacgtacaaatctcagggtgaaacagtacgtgtaagtggggatgacctctatgattcggctgggagatttcggatacctgatcttccagcttttgcattggagtgccttcctaatcgtaactcgttaacttatggggatctgtatgggatcggacatgaagcatccacaatattccgtggaactctccgctatgaaggttttagtgagataatggccacacttgtaagaattggtatattcaatgctgaaactcatccacttctcaaacatgaaggtcgaccaacatttagaaatttcctttgtgagcttctgaaaattgatactgaagacatgaatgaagttgtagttgggg

SEQ ID NO: 2743 - DNA, 265 bp, Gossypium hirsutum
  unsure (1)..(265): unsure at all n locations; Clone ID: LIB3083-063-Q1-L1-E6
gtgaattgtagcttgttcaatcctacaccatgtgtttgtgccatggttgtcaacagatacaagcttanaggcaacattttgagttataatcttggtggaatggggtgcagtgctgggctcatttctatagaccatgctaaacagctgctgcaggtgcaccccagctcttatgccttagtggtaagcatggagaacattacgctcaactggtacttcggcaacgaccgatctatgctcgtctcaaattgcctcttccgcatggggg

SEQ ID NO: 2744 - DNA, 330 bp, Gossypium hirsutum
  Clone ID: LIB3083-063-Q1-L1-E7
cggaagcggggtcggaactcgtgtctctgcagaccagtgtgcgggtgacacagcggctctgcaaagtatagtgcaaaagatataccagaatgttgatttgaagccgttaattattacaccgggagggttctatgacttggattggttcacggaatacattgataagacaaccaagtccctagatgttgtcactcaccacatatacaaccttggaccaggagttgatgaccatcttgttgaaaagattctcgatccatccattcttgagggtgtgtcccgaacattcagtggccttcataacatcatcaagaattctacaacttcagcaac

SEQ ID NO: 2745 - DNA, 374 bp, Gossypium hirsutum
  unsure (1)..(374): unsure at all n locations; Clone ID: LIB3083-063-Q1-L1-E8
ggataaagtgtctggggtatcaagaaagggctaagatttgctagagtccaactgngaaaaagctgtttgagattatggttaagaaagagagtaatctctgtttggcggctgatgttgccactgctgctgagttgcttgatattgctgagaaggttggacctgaaatttgcctattgaagacccatgttgacatattccctgatttcactccagagttcggatctaagcttcgcgcgattgcagaaaaacataacttcatgatatttgaagaccgtaaatttgcagacatcggtaacacagtaacaatgcagtatgaagggggtatcttccgtattttggaatgggctgatatngntaatgctcatataatctct

SEQ ID NO: 2746 - DNA, 261 bp, Gossypium hirsutum
  Clone ID: LIB3083-063-Q1-L1-E9
agcaacccccccacctgcaactcctcctgctaccccaccaccagctccattggcttctcctccagccacagtcccagctatctctccagtacaaacaccattgacctcgccaccagctccgccgaccgaggccccagcacctaccctcggggctgctacgccaggtccagctggaacagacacgagcggagcaaatcaaatgtggaccgtacaaaagatgatgggaaagctagccatgggatgggctctgctcaatctgat

SEQ ID NO: 2747 - DNA, 220 bp, Gossypium hirsutum
  unsure (1)..(220): unsure at all n locations; Clone ID: LIB3083-063-Q1-L1-F1
taaaactctcccctcccctataaatccttccataaacatttccttcctatttcctaaatttttaaaaaccctttcaattatattaaatacaanccccataaccttcaaccaattctaatctatttcttttaatataaaacattcatctaacaaaatccattaaaaacaaaaaacccaattctctttaaaatcttttaaaaaatttacatacttattaaat

SEQ ID NO: 2748 - DNA, 333 bp, Gossypium hirsutum
  Clone ID: LIB3083-063-Q1-L1-F10
aaatgaataaaaagttcctgaaaatcctggatcatccagttttggctactttgtaccctgagtttgaaccttctaatttctcttgcatagttatggagtactgttcagggggtgacctgcattctcttagacataaacaacctcaaaaacgcttctctttgaactccgcaagattttatgcagctgaggttctggtagctctagagtaccttcacatgctgggtattatctacagagacctaaaaccggaaaacgttctagtcagatcagatggtcacatcatgctctcagatttcgacctttcactttgctcagacgcgatcccagccgttg

SEQ ID NO: 2749 - DNA, 321 bp, Gossypium hirsutum
  Clone ID: LIB3083-063-Q1-L1-F11
gtcctggcatttgctgacatgatgaagaagaaaatcgcgatgccggctgagttcatctatgatggcagagattataacttatttgaccactactcagctgttgcccaaagaatcggggtttacactgctaaggactatgttgatatagtatagcacctggtggatcgatggaaggtgaaggagctagctgggctttcagccgaggggcgtacagctcaggactacttgtgttcacttccttcgagaattagaaagttagacgagagagcgcatgacaaggccatggaagcacccagcgtcccattcagttggatatttgat

SEQ ID NO: 2750 - DNA, 336 bp, Gossypium hirsutum
  unsure (1)..(336): unsure at all n locations; Clone ID: LIB3083-063-Q1-L1-F12
accaacttgttcccttacccaagaatacacttcatgctggcttcatacgctccagtcatctctgctgagaaggcttaccatgagcagctatcagttgctgaaatcaccaatagtgcctttgagccctcatctatgatggccaagtgtgatcctcgccatggcaagtatatggcttgctgtttgatgtaccgtggtgatgttgtgcccaaggatgtcaatgctgctgttgccaccatcaagaccaagagaactattcagttcgttgactggcgcccaactggattcaagtgtggtatcaactaccagccacccactgtcgntcctggtggtgatctt

SEQ ID NO: 2751 - DNA, 343 bp, Gossypium hirsutum
  Clone ID: LIB3083-063-Q1-L1-F2
attatggtggaggtgccttttatactactaacgccgggggtgttcctcctgcaacatcaaggctttcaccccttcctcctgaaccatatgaccgtggtgcaactgtagatattcctcttgattctgccaaggatctaaaagcaagagaaaaggaacttaaagcaaaagaggctgaactgaataagcgtgaacaggaattgagaaggaaagaggatgcaatagcacgagctggaattgtaatagaggacaaaaattggccaccgtattttcctattatccatcatgatattgcaaatgaaataccagtccacctacaaaagattcagtatgttgctttcacaac

SEQ ID NO: 2752 - DNA, 333 bp, Gossypium hirsutum
  Clone ID: LIB3083-063-Q1-L1-F3
ggaagggtaccctttcacccccgagaagatccgagaatggaaagatttagaagaaaaggccaagaaggaacagtccatcaaaacaatcttggtttcccgatctcgtgactttgtagttacttctgatggaagtaaggtgccggtgtccgaacttgaggggaagactgtaggtatatatttctcagcgtcttcaatcaagccatctgctgattttactcaaaaacttgctgaagtttatagtaagttgaaagaaaatggggagaaattcgaggtggttatgatatcgcttgatgatgatgaggaatccttcaggcaaagctttggggcaccatg

SEQ ID NO: 2753 - DNA, 380 bp, Gossypium hirsutum
  Clone ID: LIB3083-063-Q1-L1-F4
attgaacattacagcttcatcaaggtatggatgttagcgataatttccctttgttattgttactacatatcatcaaagctccccaaaggcattttcaagctttttctttaaccccaatcttcatcttcttcctttacctccctctcaccgtctccacctttcatcttgttggcatcagcgccttcttcctctcttggttagctaatttcaagctcctcctcttttgtttcgaccaaccaccgctttcaccaccaccgtccaacctttttcacttcatttccttagcgtctcttcccattaaacctaaacaaaaaaccccatctcaaaacaaatctaaaccaccccaaagatcaatctttgttgctataaaaagtctacta

SEQ ID NO: 2754 - DNA, 348 bp, Gossypium hirsutum
  Clone ID: LIB3083-063-Q1-L1-F5
caaatatcacccatacacatcttggattcctgtaactggctacatttgcttgcggaattgtactcagcagcttcgaagttacagtttgactctctttgcgtggcttggcaagataactctggagacttacatttcacaatttcatatctggttgagatcagacatgcctaatggacagcccaagtggcttctttcttttatcccggaatatcccctactcaacttcatgctcacaacagctatttatgtcttgatatctcatcgtctgttcgacttgaccaataaacttaagtcagttttcattcccacaaaagacaaccgacggctgctatataatttcattgctgg

SEQ ID NO: 2755 - DNA, 300 bp, Gossypium hirsutum
  unsure (1)..(300): unsure at all n locations; Clone ID: LIB3083-063-Q1-L1-F7
gagagtgggaaaaacccttgcaagtatattaaatacaagcccgaggaccttgaacgaatgctaagcgagttctttgaaggtaagacatgcgtcgaacaaaagcgataaaaaacaaaaaaccaaatgctggtgagaatctgttaagaaatttagatactgatgaaatggagctttcaactaatcattgtagaatgacgaggttgtgtgtacttttttctgccaggctnngcttgntcttgngtctntttcatctgagtgagttttgtacagttctgtgaaggagattcanatttcaatatt

SEQ ID NO: 2756 - DNA, 435 bp, Gossypium hirsutum
  unsure (1)..(435): unsure at all n locations; Clone ID: LIB3083-063-Q1-L1-F8
attttctcttccttttctctctggaaaatcactgaagagaaaaacgcttggaaccctagaaatagacctatagtgaatgtttagtattaaaattaatcacatttttgtttagtgttttttttagatctcttgataatttgctttctttaggtttcttttttcttttcagtttttggtttcttatctttgaagcttcgtctagccttaattcacatttccacaatgaacgaccttctatcggactcatttgagatccctagaggtcaaggtcaaggatctcatggtggggatatcgaattaggagctcaagcaaatgcagatgaactaggcctttcaaatttcttttaaaaggttcaagagatagattaaacatatgagaagctggacaagctactcanaaaagcttcaggatgcacatgaggaatcaaaagcagt

SEQ ID NO: 2757 - DNA, 425 bp, Gossypium hirsutum
  unsure (1)..(425): unsure at all n locations; Clone ID: LIB3083-063-Q1-L1-F9
agcagctcaaaaagggagctaatgaagctactaagacacggaatagagttatatcggagtttgttgtcatggctgccgatactgagcctcttgagattcttttgcatcttcctttgcttgctgaagataagaatgtcccatatgtatttgttccctcaaagcaagcacttggccgagcatgcggtgtcacaagacctgtaatcgcatgctccgtcacatcaaatgaaggaagccagttgaaatcgcaaatacaacagctcaaggatgccattgagaagctcctaatctaaagatattacgtaactcgtattcggtgtgatgggcctcttggaatgtggtggtcgctcctttagagaacttgacttgataagtcgtgccactatcgagccgctgtttagtattcganctaaaaaaatgtcggtgtg

SEQ ID NO: 2758 - DNA, 346 bp, Gossypium hirsutum
  Clone ID: LIB3083-063-Q1-L1-G1
gatgaatttggtactgaggctgcccagtttttgagtgaggagacactaggaagttcactgcaattcaaggcagtgatagaggaaagggatacttccgggggaaaagtcaagggacagggaactggtacttgtctcgttgtaaccctctttaccgaggatccggaggatagcatcaatgcagcaatgctgaaggacggtcttgctaggttggagaaaaggaagaaatgggaatcgaaggagagaaaattgatgcttaataaattggaagagtgtcaggaggaagcgaaaactggtcggcgtggaatgtggcagtatggagatgtggagtcggatgatgaggatttac

SEQ ID NO: 2759 - DNA, 350 bp, Gossypium hirsutum
  Clone ID: LIB3083-063-Q1-L1-G10
gagatctgagtatgggtgagagtagggtgactgggaaggtaaagtggttcactgaccaaaggggatttggtttcataacgccggatgacggcggcgaggagttgttcgttcaccaatcgtcaattcgttccgacggttttcgtatcctcgccgacggcgaagaagtcgagttcgttatcgattcttctgaaggaggtcgtaccaaggctgttgatgtcactggccctaatgggaaccctgttcgtggcaccacgagatctggacgcagtggtggcggaggtggattcggtggtagaagaagaaaaggaggttatggaggcggcggaggaggatgcttaagtgtggggaga

SEQ ID NO: 2760 - DNA, 365 bp, Gossypium hirsutum
  unsure (1)..(365): unsure at all n locations; Clone ID: LIB3083-063-Q1-L1-G11
caactaggttcnactagtttttatctctgatgaatttaatgagctgttgccaaagtatcttaacttcttgaagggtcttgttgattctgatactctgcctctcaatgtgtcacgagagatgctgcaagcccacagcagtttgaaaacaatcaagaaaaaactcatcaggaaagcccttgatatgattcgtaaaattgccgaggaggatcctgatgagtcgagtggcaaagatgagaaagaagtggaaacatctggtgatgatgatgagaaaaagggacaatacaccaagttctggaatgaatttggaaaatccattaaactcggcatcattgaggatgcaaccaatagaaatcgcttggcaaaac

SEQ ID NO: 2761 - DNA, 235 bp, Gossypium hirsutum
  Clone ID: LIB3083-063-Q1-L1-G12
ctagcacacaatactattcgacgaacatgagtgattagctggtgcagatgagccctgttcacatgaaaatccctgaccttatccataatggtaaacccgtttgtgagtctgtcattcatgttcagtatattgatgaggtctggcatgataaagctcctttgatcccttctgatccttatcaaagagctgttgccagattctgggctgattatctcgacaagaagatatatgacct

SEQ ID NO: 2762 - DNA, 407 bp, Gossypium hirsutum
  Clone ID: LIB3083-063-Q1-L1-G2
tctaagtccacggaggatatgtacacgagatcggaattggaatcctcggcggctaataaggagagcttttttgcgaggaaaatggcggagaacgaatccaggcctgaaggtttaccaccttctcaaggagggaaatatgttgggtttggatcgactcccatgcctacccaaaggattaataatagttctcagggtgatgtgttctctgttgtttctcaggggattgggaggttatctttggtagctgcatccgctgcaaatgttgtccaagcagggacgaaggagttcacctccaaggttaaggagggtggctatgatgccagggttaatgaaacggttggtgttgtcactgcaaagacgagtgaaattggccacaagacttggggcatgatgaaaggagtcatggc

SEQ ID NO: 2763 - DNA, 421 bp, Gossypium hirsutum
  unsure (1)..(421): unsure at all n locations; Clone ID: LIB3083-063-Q1-L1-G3
tgacggctcaaactctgataaacaaaaggaaagatcgggggatccagacgctgtagccaaggcttttgtcgatcactactactcgacattcgatgcgaaccgggccggtttagccaatctctaccaggaaggttccatgttgacctttgaaggtcaaaagatccaaggatctcagagcattgtcgctaagctaaccagccttcctttccagcagtgcaagcacaatatttccaccgttgattgccagccatctggcgccggcggcgtcctcgtcttcgtctctggaacactacaactcgccggcgaacaacatgctctcaagtttagccagatgtttcatttgatgccaacaccacaaggaagcttttatgtgttgaatgacatattcangttaaactacgcgtgaagagacagaaatcac

SEQ ID NO: 2764 - DNA, 378 bp, Gossypium hirsutum
  unsure (1)..(378): unsure at all n locations; Clone ID: LIB3083-063-Q1-L1-G4
ctagtctctcgttctttttcctgttcaatcatgtcttgcttcattagcaaatatgctgatgagttggctaaaaacgctgcttacattggaacccctggaaagggtatccttgctgctgatgaatccactggcaccatcggcaagcgtctttcaagtattaatgtagagaatgttgaagacaacaggcgtgctctccgtgagctcctattcacaactcctggagctcttcagcacctcagtggtgttattctctttgaggaaaccctttatcaaaaaaccgcttcgggcaagcccttcgttgatgttttgaaggaaggtggtgtcctcccttgcatcaagggtgacaagggtacngntgagcttaatggaacccatggc

SEQ ID NO: 2765 - DNA, 359 bp, Gossypium hirsutum
  Clone ID: LIB3083-063-Q1-L1-G5
taaatacatggtcaccttcgacgcatctgttgtctggggcctaatcggaccaaggagacttttcggaccaggagggatgtaccgtaacttagtgtggttgttcctcattggagcgttcttgcctgttcctgtttgggttttgagcaaaattttcccagaaaagaaatggattcccttgattaacataccggtcttatcttatggttttgccggaatgccacccgcaactcccaccaacattgcaagttggctcatcactggaaccatcttcaactattttgtgttcaagtaccacaagcggtggtggcagaaatataactatgttctatctgcaacattagatgcttgaactgcattca

SEQ ID NO: 2766 - DNA, 310 bp, Gossypium hirsutum
  unsure (1)..(310): unsure at all n locations; Clone ID: LIB3083-063-Q1-L1-G6
aaattactaaaaattatggcgaaatcggcggtttatttgcttctttttctgatgacggcggcgacnccatcactattggtggagtcaagcgacgacacgaaccacgcgtacttaccgtgttcggacacgaaagtccagatttcggatgggttcacttttggaatcgcgttcgcatcgagacaatcattcttcttcaacagctcacttcagttgtccccttgcgatcgccgactctctctgtcgaacgccaactctcgcctcgctctgtttagacctaaagttgatgagatctctctcctcaccattaaca

SEQ ID NO: 2767 - DNA, 366 bp, Gossypium hirsutum
  Clone ID: LIB3083-063-Q1-L1-G8
atccccggctgagaaatcgcccaatatggggctttgaattttgtctgatttcgaacccgagaggctgagcccggtttgcgccgtgattgggattgccttttcgctcgtacaatgggttctagtttccaaagtgaagctttctccgggccgggattcggtgaacaatggttcgggcgccaaagacgggtactccgattacctcattgaagaagaagaaggtcttaatgaccatagtgttgttcttaaatgtgctgaaattcaaagcgccatttctgaaggtgcaacttcgtttcttttcaccgagtatcagtaccgtggcattttcatggttgcttttgcaatcttgattttccttttccttggctc

SEQ ID NO: 2768 - DNA, 361 bp, Gossypium hirsutum
  Clone ID: LIB3083-063-Q1-L1-H10
atcttaagtccaacaaaagaaatcactcctctcacaaagctcaaacaatggaagtggtgaagaacttggacatccaaagatacatgggaaagtggtacgagatagcttccttcccatctttctttcaacctaagaagggggagaacaccagcgctttttacactctgaaggaagatgggacggtgcatgtgcttaatgagacttttgttaatggcaagaaagattccatagaaggcaccgcctacaaggctgatcccaagagtgacgaagccaagctcaaagtcaaattctacgttcctcctttcttgcctatcattcctgttactggggattactgggttttatacattgatgagggata

SEQ ID NO: 2769 - DNA, 323 bp, Gossypium hirsutum
  Clone ID: LIB3083-063-Q1-L1-H11
gttttatcttcttgtttcaatcattgttctcttatccggcattgttgtctcaggttcgggttcggtcgggattaactacggtcgtgtagcaaacaacttaccgtcaccggaaaaagtcgtggaactattgaaatcacaaggaataaacaaagtgaagctttacgacaccgacgcgacggttttgacggcgttagcggattccggtataaccgtggtcgtcgcacttcctaatgaactactttcatccaccgctgctgatcagtcgtttgcagacaactgggttgaagcaaacataacaaagttttacccaaagacaaaaatcg

SEQ ID NO: 2770 - DNA, 359 bp, Gossypium hirsutum
  unsure (1)..(359): unsure at all n locations; Clone ID: LIB3083-063-Q1-L1-H12
aaattcggcacgaaggtctcgagttttttttttttttttttttnnttttgggattcagactttgctacaatnnagaataaacattgaagagaagaatggtgaagcttccaatctatatatatggatacatacatatacaatataaatatgtatattagaaattttgggaatgaaaaattgacctttgattgtatctctgcagaattgactacttaaaactatctgccttcctttgtcatcaattgtgaaaatatttggcctgtcgttaagtctaaactaccgatcggatcatctttctctgtttcgttattaccggatgtaagaataatactaggtgttggatgatccattccattcat

SEQ ID NO: 2771 - DNA, 285 bp, Gossypium hirsutum
  Clone ID: LIB3083-063-Q1-L1-H2
cacaactgttcacatctcccctgctggtagcaggcacagtgatattcctgcatccaaatttctactgtagcatgtggtaaatagaatagatttcaactcttatggaagtcggcgtggtaatgatgaaattattgccaggggtacttttgcaaatatcccacttgtgaacaaactattgaaaggagaagttgggccttaaacaattcatatccccactgtaaaaaactatctgtgtatgatgcttccattaagtacaagactgcacgacaggataccataattttt

SEQ ID NO: 2772 - DNA, 254 bp, Gossypium hirsutum
  unsure (1)..(254): unsure at all n locations; Clone ID: LIB3083-063-Q1-L1-H3
ttnccccctcanngtttgacaattttcacatgaaaattgaattacaatttcaattattacaaaaaatacacaacataacctttataaacaaaaaccagtaaaataacttgccttttttgcaatcaaccatttttaccactatcttgccacctttccgttccatcttgtttctcaccatcatgaacaatacggtaagaatccctgagatgatacattcacactatactatgagggtccccgatccaattacaaac

SEQ ID NO: 2773 - DNA, 359 bp, Gossypium hirsutum
  Clone ID: LIB3083-063-Q1-L1-H4
tacaacgcgacactctcagttcatcagcttgtggaaaatgctgatgagtgtatggttcttgataacgaagctctctacgatatctgtttccgtaccctcaagctcactactccaagttttggagatctcaaccatctaatttctgccaccatgagtggtgtaacatgctgccttcgcttccctggtcagcttaactcagatctccgcaaacttgctgtaaaccttattccattccctcgactacatttcttcatggtgggatttgcgcctctcacctcacgcggttcccaacagtacagagccctcactgtccctgaacttacacagcaaatgtgggatgccaagaacatgatgtgtgc

SEQ ID NO: 2774 - DNA, 394 bp, Gossypium hirsutum
  Clone ID: LIB3083-063-Q1-L1-H5
cttatggcttatgaaattctctttcccggtcttgtttaataaggcatcggcctttccaatttcaaagactggggagtgggggcttttgccttttgccttttgccttttcattaaaggtttcatctttttattcttcttcgttcgtctggtgttttctccgttcgtcccaatacaagatcacgaagcctttttcccttcaatgccaactgagcttctgttctggagtggtggcttgctttacgtttcacgctgaatggccttcttctgtcaacctgttgataagcattgatcaagtctgttcttatcatttaaaaaaaaatggatttgaatccaagaagaaattgaaataatgtttccacttttttttaaaaacaaaaaaacttcttcgtgtttt

SEQ ID NO: 2775 - DNA, 345 bp, Gossypium hirsutum
  unsure (1)..(345): unsure at all n locations; Clone ID: LIB3083-063-Q1-L1-H6
caaaagacagctttcgttggatgctttaaaaattaaaatcatcacntataagtaactttaatccaccataggaacagccattatcactaacctcctcatcttcccaaaccgaacccacaacttttctttccttctggattattttgttaatagcaatcagataatacaggaaaatttttatttaaattacacgacactttaatcttgccaaggatcactctctgtccttacttccgatggttcgatcacttggttctctgaagcttcactggcactcgtatcaatttcagcaacactaacttctgatgcttcccacttatcatcggcctcatatctaccccatct

SEQ ID NO: 2776 - DNA, 378 bp, Gossypium hirsutum
  Clone ID: LIB3083-063-Q1-L1-H7
tagtctcgagtttttttttttttttttgttgttttattggtcccggcattgttagaacatggagggggtactgcgcccctggattccaacaaaagattgtgatttccctcattttcttttttttatttgtacgtgtctcccaagtcccaactagtgacgccacctggtatgactagacctgactatgagttatgtcagtttcggctacgccatgataaaattttagatccttttaatagttttgggtttggttggacttaaaagttgggattaaaattttttctaaactcgacttgaataaaaatgttaaaatttaaatttaatctggttttattaaattttttatattattttataaaaaatataatacattaaaaa

SEQ ID NO: 2777 - DNA, 327 bp, Gossypium hirsutum
  Clone ID: LIB3083-063-Q1-L1-H8
gaacttgattggtgctttctaccaacctcaatgtgtgcgcatagacactgacacattgaacacattgccagatagggaactggcttcaggtctggcagaggttataaagtatgggctcatcagagatgctgagttttttgagtggcaggagaagaatatggagaaattgatggcaagggatcctgatgcgtttgcttatgctataaagcgatcatgtgaaaacaaggctgaggttgtgtcactagatgagaaggaaagtggattgagggctacactgaacttgggtcatacatttggtcatgcaatagaaactgggttttggatatg

SEQ ID NO: 2778 - DNA, 322 bp, Gossypium hirsutum
  unsure (1)..(322): unsure at all n locations; Clone ID: LIB3083-063-Q1-L1-H9
ttacttctttaatttgggtttcaagcaaagttaaaccccattcaacattcacatgtaagcttctttttttttctttctctaattcatttacagtcatcaagatctatttagtttctactactgggttttcaaaaacaagcaaaaccccattatttagtgatcaaattctgtttgtttggttgacttattttgagatctgattagtttttgaaattgggttttgaaaaatgaggaaacccacaaaagaatcagagttaaacactgagccaatcggtcaaaatctgatcaaattgattangaatctctggttctctggttttgg

SEQ ID NO: 2779 - DNA, 370 bp, Gossypium hirsutum
  Clone ID: LIB3083-064-Q1-L1-A1
ccttttcctcttacctttctgtgctttacttttgtgtttctatcgttctttcgttcagacagggggttcagtttgcagaacttcattatgcaatcagatcagacacttctaccatatagttaggtcgagtgggacagttgcttacactagtgtttcttcgtcttctaccattaacgcaagcagtcagtttcctaacagtgcacagaacaaggtgcctgcatacttgggtgcaatttcagttttcgtatgctttatggctgctttggtgtcccttggaatttctatttcaattgtgcctcgacaagtgatgccatggactggtttgctcttgatgtatgagtggacgttttcaatcttctttctttcattc

SEQ ID NO: 2780 - DNA, 356 bp, Gossypium hirsutum
  Clone ID: LIB3083-064-Q1-L1-A10
ctgatattcaaactcatgaaggcttatctgcgttcttcgtctcttcggaaggctgctttaagggccctgtctaaaactttgactgtggatgagctgttttacttgaaggagcagtttgcattattggaaccaaataaaaatggcactataagcttagaaaatatcaaagcggttctgatgaaaaatgcaacagatgctatgaaggatgctcgcatccctgagtttcttgcatcgctaaatgcacttcaatacagacggatggactttgatgagttctgtgcggctgcattaactgttcatcagctggaggctcttgatcggtgggaacagcatgcacgttgtgcttacgaaatctt

SEQ ID NO: 2781 - DNA, 458 bp, Gossypium hirsutum
  Clone ID: LIB3083-064-Q1-L1-A11
ggtgattgggggttcttatgctttcatcatcccgaccatttccattgctttatccaggagatatagcatcttcgttgatccccaccggaggtttaaagcatccatgagagatgtacaaggatctctcattgttgcatcattcttcactatggttattgggttctttggtttctggagaattatttcgaggtttttcagccctcttgcagctattcctttggtgattctcaccggactcgggctctatgcacaaggttttccacaattggccagatgcatcgaaatcggactcccggcactggtagcagttgttttcttatctcagtatgttccacatttcctgaaatccaggagaggaatatttgaacgttttgcaatccttttttccgttgcgattatatgggcttttgcagaaattttgacagcagctggtgcttatgataacagagctcctcaaa

SEQ ID NO: 2782 - DNA, 364 bp, Gossypium hirsutum
  Clone ID: LIB3083-064-Q1-L1-A2
gctctttctttctatagaattagtcactcctgtgctagatgaaggttctctccccaattcttgcttgcctagcgcttgctgtggtggtaagccatgctgctctctcacctgagcaatattggagctataagctgccaaatactccaatgccaaaggctgtcaaagaaattctacatccagaactgatggaggagaaaagcacctctgtaaatgtaggaggtggtggtgtaaacgtcaatacaggaaaagggaagcctgggggtgacacccatgtgaacgttggaggcaaaagagttggagtgaacacgggaaagccagggggtggcactcatgtgaatgttggagacccttttaattacctata

SEQ ID NO: 2783 - DNA, 348 bp, Gossypium hirsutum
  Clone ID: LIB3083-064-Q1-L1-A3
gttttgataacctcgtagaagatgctgattgtaaggagcctgcatcatcaaaagatgaaaaggatggggatgcaagtgattgtaagaagcctcccccatcagaaaatggaaaaaatgctgatgctgatgatgccagtaccattcatgataaactaaatggtatggatggtaatgatgaaatcaacaataatgatgatgacgaggaaggcaaaatagaggcggaagatggcaaggagcagaactctaaaagtacggaactcatggaagcagcaacctagaatgcttctggcgcaacagattcttttgtaatggggatgttggtactaatgttaactaacatgatttccg

SEQ ID NO: 2784 - DNA, 374 bp, Gossypium hirsutum
  Clone ID: LIB3083-064-Q1-L1-A4
ggttattgaagctagctagctccacattttctagggcttcaaagcttcttttgattgctgtctttgttcttgatctcattgcttttggtttagctgtggcagctgagcaaagaagaagcactgccaagattgtccaagacagtgaagttaattataactattgtgtctatgactcagacatatcaacaggctatggtgttggtgcatttttgttccttatggttagccaagcccttgtaatggctgcaagcaaatgcttctgctgtggaaagggtttaaaccccagtggttcaagggcctgggcagtcatccttttcatagtctgctggttgtttttcctgattgctgagatatgcttgctggccggatcggtg

SEQ ID NO: 2785 - DNA, 325 bp, Gossypium hirsutum
  Clone ID: LIB3083-064-Q1-L1-A5
gctttttcaatctagctaactacacattctcgagtggcttctaagcggctttcgattgctctctctgttcttgctctcattgcttttggttcacctgctgcagattcacatacactatacactgtcaatattctccaagacactgcacttaattataactattgtgtatatgactcacacatatcaacagactatactgtcaccacatcaatgttccttatggctagccaaccccttgaaacggctgcaagcaaatgcttctgctcacgaaaggttttaatccccactgaatcaagggcctggacacacatccttttcatagtct

SEQ ID NO: 2786 - DNA, 370 bp, Gossypium hirsutum
  Clone ID: LIB3083-064-Q1-L1-A6
caaacaccagtgtttccggcactatttacactgatggtcagcttgctgtttatcaaatcgatcaagttcttcaaccattgcaaatatttgcacctaggcctccagctccagcaccggcaccggcaaagtcgaagaataagaaggctaccaccgttgctgatagccccgatgttaccccagctgataactccaaagcggccaccttgcaaaatgttggtttgtttggagttgctgctctagttattgcactttctttgtgaccatgaaaatggagaaaagaagaagacagtgattttgatggtgatcaagatggcgagtgttttttattttttcaataattatcatttaaaaaatttatgttctgtatgaa

SEQ ID NO: 2787 - DNA, 368 bp, Gossypium hirsutum
  Clone ID: LIB3083-064-Q1-L1-A7
tgaagatctagtcaagatcaagctagaaataccaaaaaaagaaaagcttgtgatggggagggaactcacagaggtgcacatggatgttaagccaaacggtttagtgaaatcgattgttaatcgtgttaacttgcagggcaccgagccaaataacttaactgtcaaaaaaggagcaaccgaaaactcggtcattgaggatggtcaggaaaaggaagatgtgctatgtgttaaaagcacaaattttagtaccgacatccctgaagagaaaaatgaaaaggctgaagatcagaagtctgctgacaataagttaagcactgctgaatcaaaatctactagtgttgaaaatactcatgcgaatgacactactt

SEQ ID NO: 2788 - DNA, 109 bp, Gossypium hirsutum
  Clone ID: LIB3083-064-Q1-L1-A8
ttcactatcgaatatctatctatcctcaactactagctctggtaaacagattggggtgtatcgcattgataactcacttaaacgctcatggatattcagacctacgtct

SEQ ID NO: 2789 - DNA, 372 bp, Gossypium hirsutum
  Clone ID: LIB3083-064-Q1-L1-B1
cggcacgagaatatattggtccccaagcaacaagtgtggtttccattttccaaacggaacccagagtggaccttcaatgtcgagtggaaggaagaaaaacaaggaattggcttccgataactctccggaagaaaaacggcgccggcatcagggaacctctgataccgatgtagcatcgacttccaagaaacatccaaaaccgaaaataaaatataagctgaaagagcttatcgatgagaaacctgtggagacaatcgtgaaagttctgaaggatcgaattgacagaaagatgaagaacgacaagatggcagacatggaatctgttatattggtagttcgaacgatgatggccaataatgcttctcatctatt

SEQ ID NO: 2790 - DNA, 326 bp, Gossypium hirsutum
  Clone ID: LIB3083-064-Q1-L1-B2
ggcaaggggcacttgcaccacaaggctcgacctgcaaggagggcaacctggaagagaaacaacacactctcccttcgccgctaccgttgatcccctggaccgtacttggtgtttttgttactgctatcttggcttcattactattgtagggtttataagaattttgagacagttatattgtgtgtgggacatcttgaaaatcttctatgttagaggctattgagatttatgtgctcactgaaaatgtccaatgctattgtcatattgagattgtgttgtttgatttttttttattaaatactagaaatgggattttagtttttacc

SEQ ID NO: 2791 - DNA, 369 bp, Gossypium hirsutum
  Clone ID: LIB3083-064-Q1-L1-B4
gttcacaagacgatagagttaaagttttgtctaaagaaaaacacgaagtaggtaagggtgagcgtagacggggcaactgcaaggaggataatgtctcaaaaagggatgagatcatctttccacctaaacaggaatttgctgttgaggggtatcatggcagggagcaagcttctgcaaggaagaatgatctcaacattccatcatggcaaaaacaggaagtctctgctggtaaggttgaattttggaatgggaaggatgatgttgccttcaaaacagcaagattgagcagttcttctcatggaaaaataatggaatgagctgatgattgaaccaaattacaagattgtaggcagaaagggacgcctagat

SEQ ID NO: 2792 - DNA, 378 bp, Gossypium hirsutum
  Clone ID: LIB3083-064-Q1-L1-B5
tttttcctctccaattttccgtcactttcccgagaaaatgagagaaatccttcacatccaaggtggccaatgcggcaatcagataggagccaagttctgggaagtcgtatgtgccgaacatggcatcgattcaacgggtcgatatggtggtgactcggagctccagcttgagcgaatcaatgtttactacaacgaagccagttgtggccgttttgttccccgcgcagttttaatggatctggaacccggaaccatggatagcgtaagatccggtccttacggacaaattttccgacccgataacttcgttttcggacagtccggtgcgggaaacaattgggctaagggacattacactgaaggagcggagcttatcga

SEQ ID NO: 2793 - DNA, 300 bp, Gossypium hirsutum
  unsure (1)..(300): unsure at all n locations; Clone ID: LIB3083-064-Q1-L1-B6
gttttgtgctggtgagatagtgggaaggggttttacttttactggttactatccctaaggaaaatcaactagtaaaaggcatggagtctgatggatgtgtatgccttttatcatcgntagcatgattgaattgcggccactttagatgcacatttttctcgattcggtgaaactactgaagctgagaaatcagtggttaacttgctagcctgaataatatgtatagtcaaaatggcttaatctatagtagcctaactggtgcgtatctagatatgtcagcataatgtaatgtaccccatt

SEQ ID NO: 2794 - DNA, 354 bp, Gossypium hirsutum
  Clone ID: LIB3083-064-Q1-L1-B7
aaattccgaaactttcatggctgaacgcgaaaagtccattccctacgaatcttccatggcaaagatcacgatagaagatccatggctcatgattcatcatcatccgcacatgataccgattaccacaatcaatcggaatcttacttcaaggaccaggtgtatcgaatctatggaaaataaaagcccgtccaccatgttctctgtgtagccaaaccggtcgacatttatactgaacccaacaccatgatttcagcaagatcccttgcttacgcacctgtgatatgaccctagaacgaattgcttgaatattacctgctcactctaatgtgtcacttggtgctactcactgttgca

SEQ ID NO: 2795 - DNA, 347 bp, Gossypium hirsutum
  Clone ID: LIB3083-064-Q1-L1-B8
ccgccgcccgttatctcatcgcaatcatgatcatcccagaaaagaaccgcagggagatatcaaagtatctctttcaagagggtgtttgctacgccaaaaaagattacaacttggcaaaacacccagaaatcgatgttccaaatcttcaagtaataaagctgatgcaaagcttcaaatccaaggaatacgttcgtgaaacttttgcttggatgcattattactggtaccttaccaacgatggcattgaatttttaaggacataccttaatctcccctctgagattgttcctgctactttgaagaagcaaactaagcccggtggtggtcgtcccatgggtccttctgat

SEQ ID NO: 2796 - DNA, 341 bp, Gossypium hirsutum
  Clone ID: LIB3083-064-Q1-L1-B9
aaagaaggaaaaaatggttctgctaaccaaattgtggacgatttatgggctggccctaaacctgaacgtggtcttggcaggcttaggaagatcaccacccagcctttgtccatcaaagatgaaggagaaaagaaaaagtcccagaggtcgttgtcgctgccgaatagtccagtgtcaggtccgacacccttgacaccgacaactccgacggcccgtaaggagaacgtttggtggagtgtgttcattccgggtagcaacctagccaccaaaagtttaggttctgatgttttttacaggccccaaccaaactttcttaccgtctttgactggctttacagtgg

SEQ ID NO: 2797 - DNA, 367 bp, Gossypium hirsutum
  Clone ID: LIB3083-064-Q1-L1-C1
ggaacccacatcaagattagggtgccaacagctgataaacctagatatcgaacccgaaaaggtgacatagcaacaaatatgctaggtgtttgtacacctgagatgcaatttgtttatgttcttcctggttgggaaggttcagttgccgatggacgggtgctcggagatgccatcagtagaagacatggactaaaagttcctcatggttgttattatctagttgatgctggatacacaaattgtgagggatttcttgcaccatttagaggacagcgatatcatctgaacgagtggcgtcagggttatcagccaagttctccgcaagagttttttaatatgaaacatgcctcagcacgtaatgtcattg

SEQ ID NO: 2798 - DNA, 394 bp, Gossypium hirsutum
  Clone ID: LIB3083-064-Q1-L1-C11
tacagttgcactagaactaacggatccgtagtgctgataaaatcttgtacgagatgaatttctacatatacaaatatggtgctagataaaaagggtaaatagatgaacatcaacgaggaagagaacaagaaccctaaccctaacactaaatatgaataatatggtgaacttgaagaatgttagatcgcagtttaagaagatgatacgacattctcttctttaaagaaaggtgtcgtctaacagtctgaccagttacagcattcatggaccttttagtatgataacgcttctgctataatcaaaacaagctactttatgtatttctatgcgcgctatttacactttcttcatcttctaacaattctggagtttattcaattacatacatcatcca

SEQ ID NO: 2799 - DNA, 392 bp, Gossypium hirsutum
  Clone ID: LIB3083-064-Q1-L1-C12
cttcttaattacatttctaatcattcattgcttacagggacaacatggagcttatggtccaagtgatttcagaagagattgtaaagccatcatctccgactgccgatagactgcgtcgataccaactatcgttcctagatcaactaaatgcctcgttctataatgctttggtctatttctacccaaaaatatgcgacactgaagccaacaaaatcacagtttccaatcggttgaaacactccatttccaatgccctcacctatttttacccactggctggtcggataacggatgaccagttgtttgttgattgcaacgatgaggggataccctttttggaagttggagtggagtgccaactttcagatgttttaaacaatccaattcccaaa

SEQ ID NO: 2800 - DNA, 331 bp, Gossypium hirsutum
  Clone ID: LIB3083-064-Q1-L1-C2
agcaagcaaacctcatcgaagattatgtcattcatgcaaaagtacataaccagcattgcatgaggagctggaaaacaaatgccaatctttttggtatatgattgtatacaagaaactttacaaaattttacagaatcttggactggggacaaaaatgaaatttaaaaatttatgaatataatatgaaatacgatctatctcctatatcgaaaccttaaagaacacgaaagggaactcaaaaaagaacagaaaaacattacaacggattaagcaaaatgaattcaatggcatagagttcatgaggtgatagcttattagtaagcttccatac

SEQ ID NO: 2801 - DNA, 359 bp, Gossypium hirsutum
  Clone ID: LIB3083-064-Q1-L1-C3
agaacaactcatcagcggcaaggaagacgcagctaacaactttgcccgcggtcactacactattgccaaggagattgttgacctctgtttggaccgcatcaggaaacttgctgataactgcactggtcttgaagggttccttgttttcaacgctgttggcggaggtaccgtgtccgttcttggatctctccttttggagcgtatgtctgtcgatatatggcaagaaatgcaagttgggtttcactgtgtacccatctcctcaagtctccacttctgttgttgtgccttacagcagagttctgtcaactcactccgttgtggagcacactgatgtgagctgactccttgacaatgaagct

SEQ ID NO: 2802 - DNA, 354 bp, Gossypium hirsutum
  Clone ID: LIB3083-064-Q1-L1-C4
ctctgttcgagaaattgaaaacattggcagatcagataaaggtgtatgaagaacaagttgctcaagcagctggacagtctgcgtcttcaaaagacgaaatggatcagagcttacagaaattggcttctctagaaagcacagatgaacaactcacaagcatgatatccgagttcgaaaataaagctcttcagtcttcctcagagaatgaacttttggatcagacaaacattcagttgaagggcagaattgatgagcttaaagaattgctcaattcagctctttctgagaaggaatcaactgatcaagagactgcttctcatatgagcacgattaaagaattatctgaccagcata

SEQ ID NO: 2803 - DNA, 342 bp, Gossypium hirsutum
  Clone ID: LIB3083-064-Q1-L1-C5
gtacagcggatgtattttttcatggagaaggtggatatgatcattgcacgtctttgggcatttcttttaaggctgacacgattggaaaaacttttgaacagaagattaagagaacgacatatgaaagagccaaagaaggatgatgaaattaaccctgaagcagacagtgaagatttgtatgttgaacggatccgtcttgaaaatatggacctaagcatcaagaaattggtgagcaagactacaatccaagagcctacttttgataggattattgttgtctacaggagagcaagccccaaaccaaatacggatcgaggaatatacgtaaaacatttcaaaaat

SEQ ID NO: 2804 - DNA, 369 bp, Gossypium hirsutum
  Clone ID: LIB3083-064-Q1-L1-C6
ccattgtcaacttccaattgtaattgtgtagcttgcccctcacagctctccccttcctttccccctctctttactttttatttatttattttatattttatggtgttattatgatttttctgtgtttaaaaaagacagagccttgggagcgaaggaatcgaagattgggaagttgatggaacttacagtagtagcagttgtagaagtagcggatgagtgtgtattaagttaatgatgggagttgtggggagctttattctgctgctctgttgcgagactccagtacaagtggaagcgtattcatttagaacttagaaacaatgtacagcttgctggtcatcttacagaacctttggaaactcctctttt

SEQ ID NO: 2805 - DNA, 358 bp, Gossypium hirsutum
  Clone ID: LIB3083-064-Q1-L1-C7
cctacgaaaaagggagcaatttatttcactgaagaattcaatgatacaacattctaattacaggacataaattagataaacgggaaactagaaaacacccttcacaaaggaaccctcagctaacctcacctcacctctctctctcactctaattagatccatctcgccgacatcgacaagacaaatcccggttcaagacaatccataatgaactgtcccggcattcctgtgcgctgctacagcgacggctgcagcaccaactgcaccgaactgggactgtgcctggagaagtttagcatctatgggtaaccttcgctcggtcttggcctgagttctgtaataggggttgctgatcata

SEQ ID NO: 2806 - DNA, 367 bp, Gossypium hirsutum
  Clone ID: LIB3083-064-Q1-L1-C8
gatgttgggaaattatggaatgacattggctgcaattgggggagtctatattggtgttgagcagctgttgcagaattataggatgaagagagactttgtcaatggtgccgttggtggtttcgtggctggggcttccattctcggtttcaaagggaggagcatctcaacagctatttctgccggatcagctctggcattcacctctgcggtgattgatgctggaggtcagactacaaggctggacacagggaaggagtattacccatacaccaccaagaaaaggcctgttgagtcataaatcttgcatgtctctgctgagaaggcacttgcagtgaaacgtgagataatcgatcctgttcgatgatct

SEQ ID NO: 2807 - DNA, 458 bp, Gossypium hirsutum
  Clone ID: LIB3083-064-Q1-L1-C9
aagaaaatcgagagttaaaaaaatggggcttgaagaaaggctcaaatgagatgaacatcaacgaagaagagaacaagaaccctaaccctaacactaaagatgaagaagatggtgaacttgaagaaggggagatcgcaggtgaagaagatgatacgacgtcgtcttcgttaaagaaaggtgtcgtcgaacagcctcaccagttggagcattcatggaccttttggtttgataacgcttctgctaaatcaaaacaagctccttggggtagttctatgcgcgctatttacactttctccaccatcgaacaattctggagtctatacaataacatacatcatccaagcaaattggctgtgggagcggacttccattgtttcaaagataaaatcgagcccaagtgggaagaccctgtctgtgctaacggaagcaagtggactgtagttttccagaaggggaaa

SEQ ID NO: 2808 - DNA, 356 bp, Gossypium hirsutum
  Clone ID: LIB3083-064-Q1-L1-D1
gaccagcttaccgatgaccagatctctgagttgaaggaggcctttagcctctttgacaaggatggcgatggttgcattactaccaaggaactgggaactgtgatgcggtcactcggacagaaccctactgaggcagaactccaagatatgattaatgaagttgacgccgatggaaatgggaccatcgatttccctgaatttctcaacctgatggcaaggaaaatgaaagatactgattctgaggaggaacttaaagaagctttcagggtgttcgataaggatcagaacggtttcatatctgctgccgagcttcgtcacgttatgacaaatcttggccagaagcttaccgacgagga

SEQ ID NO: 2809 - DNA, 277 bp, Gossypium hirsutum
  Clone ID: LIB3083-064-Q1-L1-D10
gttcttaattacatttttaaccggagattgcaatcaggggcatcatggtgttgctggaacatgtatagtggcatgatattgggatggcataggatcaaagggctgataaacttggtggatacgaactattactgcctggagtacactagattatgtgtaagaatggaccttattgaaaatcttacacactgatttgcgaatctttagcgtacgatcaaacatttttcaatggggtcgatcgctgcaatttcaaagaccataccgattaggacccaat

SEQ ID NO: 2810 - DNA, 456 bp, Gossypium hirsutum
  Clone ID: LIB3083-064-Q1-L1-D12
gttaattcacgtttattaacccgaggatggtactgacggggaaaccggggatttcgaaccggaagacgacgacctcatggacgaggactccgacgacagggacgcctcacctcaagcctccatgcctaagctcaagtctgccatcactggcggcgcttacgactctctttctggccctaagaagactaaaggccgaggcttccggcaggacgacaccgatcgtcattcccatctcgcctgccgcgactatgactctatcggctctgacggtagccccggtccccagagatctattgaaggatggataattttggtcactggtgtacatgaagaagcacaagaagatgatttgcacaatacatttggtgaatttggtgagatcaagaatttgcatttaaatcttgatcgtcgcactggatttgtcaagggatatgcactgattgaatactaaaagtt

SEQ ID NO: 2811 - DNA, 367 bp, Gossypium hirsutum
  Clone ID: LIB3083-064-Q1-L1-D2
aaagtttctacgccctcatactcaaatctattggacaagtgagtgggtatttggtaaccgagaggatcttgttaaggatgttatttctgaattgcatccagaaaatggagaggaatggtggacatatgtctgcatgggtccatccgatccccatccaaactggcatctgggaatgcgaggaacacagcatcgtgctgttatgtggcgtgtatggaaggaaggtggaactggttttctgtattggggtgccaactgctacgagaaggcaacagttcccagtgccgagataagatttaagcgaggcctccccccaggtgatggtgttttgtactacccaagtgaggtgttctcgtcttcaaagcaacct

SEQ ID NO: 2812 - DNA, 356 bp, Gossypium hirsutum
  unsure (1)..(356): unsure at all n locations; Clone ID: LIB3083-064-Q1-L1-D3
ctaagatgtaccaaggtgccggcggtgacatgggtggtggcatggatgaggatgttccggctggtggaagtggtgctggtcctaagattgaggaagttgactaaatcattgattttcttcacctggtttctctattgttctcttatgttttttgggatttaaactgtttggttttgttgtttggtttctaatcggattgaaatgaacttttatagggtttgttccttttttgggatactctatcagtagcacctgtgattgttgtgttttggaaaacaggtcccttttgaacttattaaagatatcaagacttnttgttaaaaaaaaaaaaaaaaaacttccaggggggccccgta

SEQ ID NO: 2813 - DNA, 264 bp, Gossypium hirsutum
  Clone ID: LIB3083-064-Q1-L1-D4
gttaatttgatggtgatgtaaagcttgttgttgtgttatgatgatgatttatattgtggggaggggggggggtgtctaagggtcatgttacgtttgtgttgatctcctcatcccctttggcactgatgtcttacaactccattccatttatttagctgactctcttggttcaatatttcatccatttagtgttcatcacatatagatgtttcaatggggggatccgctttcagtataaaccatgtatgccattcaagttatatg

SEQ ID NO: 2814 - DNA, 362 bp, Gossypium hirsutum
  Clone ID: LIB3083-064-Q1-L1-D5
caaatttgtctcaatggtctttaggtctccactaaggaaaagaaataccaatttatccaataaacaaaaggcgcagcctttgatgaagtgctttagctttgaggagatctcaactgctacaaacaacttccatccagaaaatatagttggtcgaggcgggtattcagaagtttacaggggtgacctttctgatggaagagctgttgcagtgaagaggttgggcaaggacaacagggatgaaaacaaagagagagaattccttactgagttgggcacaatcggacatgtttgccaccccaatactgcaaccttagttggctgttgcgtggaaaatggactttatttgattttcaacttctccg

SEQ ID NO: 2815 - DNA, 300 bp, Gossypium hirsutum
  Clone ID: LIB3083-064-Q1-L1-D6
caaaaagccaccggaagatgaagagggggacggatccatgccccgtgttcttcaagagagagttcattcgcacttgacctgtcctaggtgcattcgacttcaccgggaccatcatcacagagtgctcacttgaactaaccgaggaagatgctaagaactctccctttgctcagacacacacgatgcgacccagcctagttcaatggcctatatcgtagcagtcactagcaatgagaggctcaggagataacctcagaacttttaccaagtgaacaagtgtggctgacaccattacatcat

SEQ ID NO: 2816 - DNA, 347 bp, Gossypium hirsutum
  Clone ID: LIB3083-064-Q1-L1-D7
cacatatctatcaagcaatggcttgtggtctaggtcttaagaggctggcctcatccaacatcctccctagctccttacgcggcggcatcgctccatccatctccagactctttaacaccaacgccgccacgcctgatgaccacgatgatcgccggcgtgctgacggattcttaccagatctgcaggggcggtgccagggcgccaacaaagatatggtcgatcctttgtctccaacaaggagcccgaacatgatggatccacgtccggggaatcgatttctctccacattccgtgacattccacggctcgggagcgaggccgaagaatcaaacctgggcccgttatga

SEQ ID NO: 2817 - DNA, 371 bp, Gossypium hirsutum
  Clone ID: LIB3083-064-Q1-L1-D8
gatccatctggcaaagacatcaatgcattggagcagcacatacagaacctactgagtccatccactccatttttctttaacactctttatgacccataccgatccggtgctgacttcgttcgtggctaccctttcagtctccgtgagggtgttcccactgccgtctcacacggtctctggctcaacatcccggattatgatgctcccacacagcttgtcaagccactcgagaggaacaccaggtatgtcgacgctataatgacgattccgaagggaaccttgttccccatgtgcggaatgaatctggcatttaaccgagaattgatcggccctgcaatgtactttggactcatgggagatggtcaaccaat

SEQ ID NO: 2818 - DNA, 308 bp, Gossypium hirsutum
  Clone ID: LIB3083-064-Q1-L1-D9
cttaatttcagaggtttcgcacgataaagctattcaccggtgtttcagcatgaatgtttgctgtgaaatgtcgcttctaatcagcattgctttgcattgctgttgcatgatttttgggtcaagctcctactaaatctcctacgtctacgccctcgcctcccacaccaccttcttctactactgctacgactactcaagctacttctacaccaaccgtcactccgtcatctggttctatctctactgccactttattaccgttcccagtgacatcttctccacccccaattacaacttcttcacccatt

SEQ ID NO: 2819 - DNA, 278 bp, Gossypium hirsutum
  Clone ID: LIB3083-064-Q1-L1-E1
cttctatagattacctgcttagcaataggtttggtcgtaagctgatggattcaacccaaaagaccaaacctatccgcatcaagtgcgatccatcaaaaccaaactctgcttggagctggttggagaggtggatgtctgtgtcattgtctaaaaggccatcgacaacagagttatccatagaacaaccagaaagagagaaaagtgacaattgtgactttcaagttactactacagttcctgaatcgtttcctgagtcaaatgagccaaagttatatgta

SEQ ID NO: 2820 - DNA, 327 bp, Gossypium hirsutum
  unsure (1)..(327): unsure at all n locations; Clone ID: LIB3083-064-Q1-L1-E10
tggacatctagagatagcacagtacgtattgtgtaaaggtcctgggggtgcatcatggaccgataagcagggccagacatgctctacatactcctgctaaaggacataatgacctaagtcctggatgcctaactataaggcatatcattatttgataaacatgggtgatgctaatggcaactctgattactatataccatctcatacggctcgactacacatatcggaatagctatttaatgacagtggacttatcctacttctcatctaaaagtctcgccaaacagctcatgactattcanagaaggataaattatctgacattgc

SEQ ID NO: 2821 - DNA, 450 bp, Gossypium hirsutum
  Clone ID: LIB3083-064-Q1-L1-E11
tgtgaatcatccgattagccagaattagttgaaagggaggttaaggggaaagtggatgacaaagacgacaacagtggatttatagacaaggtcaagggtttcattcatgacattggtgagaagatcgaggaaacaatcggctttggcaagcctactgcagatgtagctgagattcacctaccttgtatcaatcttgagaaagcagaaattgtcgttgatgtcctcataaagaacccaaaccctgttccaatccccctcgtcgacattgactacctcattgaaagtgatggtagaaaactcctttcaggcttgattccagatgctggaaccatccatgctcatggtgaggagactgtcaaaataccagttactttgatatatgatgatatcaaaagtgcatatgatgacattaagcctggcagcatcaatccatataggctgaaagttgat

SEQ ID NO: 2822 - DNA, 364 bp, Gossypium hirsutum
  Clone ID: LIB3083-064-Q1-L1-E3
ggcttgtgcaaatggagaactcggggttgattagtatgattgtcgatgaaaaatatgaggacttaggaaggatgtattgcttgtttcgtcgagtatccaatgggcttgttttaatcagagatgtcatgacttcatacattcgtgatactggtaagcagttactcactgatcccgaaaggctgaaggatcctgtcgattttgtgcaacatctgttggatttaaaggacaaatacgacaagattatcacttcagcatttagaaatgacaagacttttcaaaatgcattaaattcctcgtttgaatatttcatcaatctgaattctcggtctccagagttcatctctttgtttgttgatgataagct

SEQ ID NO: 2823 - DNA, 369 bp, Gossypium hirsutum
  Clone ID: LIB3083-064-Q1-L1-E4
tttcgatcgaaaccaaagtggttatattgagagtgaggaactaagagatgccttatccgacgaagttgaaacaaacagtgaagaagtcattagtgccatcatgcatgatgtggacacagacaaggatgggagaataagttatgacgagtttgcagtgatgatgaaggctggtacggattggagaaaagcttcaaggcaatattctcgagagaggttcaacaatctgagtctgaaattgatgatggatggatcattgcaaatgaacagtgagcccagatgaccaaacaccattgacaaagttctactaatgaaaaatggctgttgatttcagtgttacttttagctgttatttgtttcttcttttgggtc

SEQ ID NO: 2824 - DNA, 332 bp, Gossypium hirsutum
  Clone ID: LIB3083-064-Q1-L1-E5
ggttagggataatatatcactacatttttcattaatgacgctacaccaaaaaacacttggaatgtgaacaaaaaaaaaaaacagaatatctgtgactaagatgcacaacctttttaatttatctggacatttattaactcaatattgaaatttaaaatcaaactctcagtttcattttttccctatccccttcacagaactgtacaaaactcactcagatgaaaaagacacaagaagaacaaagcaagccttgcagaaaaaaacacacacaaccttgtcattctacaatgattagttgaaagctccatttcatcagtatctaaatttcttaa

SEQ ID NO: 2825 - DNA, 373 bp, Gossypium hirsutum
  Clone ID: LIB3083-064-Q1-L1-E6
tgaagacccaattagtcaagaaaagaggttattggagaccagaaagaatgctaaggtagagaaggcatctaaatccatctcccaagtcagcttggaagttgataggcttgctggccaggtgtcagcttttgaaacaataatcaccaaaggtgggaaagtagcggagaaagacttgattaattcgattgagctgctgatgagtcagttgcttaaattagatgcgattacagccgatggagatgtaaaattgcaaagaaaaatgcaggtgagaagagttcaaaaatatgttgaaacattggatatgttgaagattaaaaacgctatgccaagcaacaatggaagtcaaatggaaatccaaaatcaacacaagcat

SEQ ID NO: 2826 - DNA, 367 bp, Gossypium hirsutum
  Clone ID: LIB3083-064-Q1-L1-E7
cgtgtagtcaagctacttaggcttcttagacatggcgacatagttgaaattaaacgtataatgttgccaccatcaaagagggagttcaaagacttatttgttgttttcgagctcatggaatcggatcttcaccaagtcatcaaagctaatgatgacttaacacgagagcatcaccagtttttcctttaccaaatgcttcgtgcaatgaaatatatgcatacagccaatgtgtaccatcgtgaccttaaaccgaagaatatactggcaaatgcaaattgcaagcttaaagtttgtgattttgggctagcaagagttgcatttaatgataccccaacgacagtcttctggacggattatgttgctacac

SEQ ID NO: 2827 - DNA, 372 bp, Gossypium hirsutum
  Clone ID: LIB3083-064-Q1-L1-E8
gagcttgttgcagattgtcacctacttgcagcggttgcagtgggagagatggaagggaaagcaatcaaacattatgctttaacaaatgggaaaccaaccgcaactctagcctttttaggtaccagattgggtgttaggccatcaccagtggtggcagcattttcatctagaggaccaaatttcctcacacttgagattctcaaacctgatgtggttgcaccaggggtgaacatccttgcagcctggactggagaattgagtccatcaagtcttccaacagatcataggagagtgagattcaacatattatcagggacttcaatgtcatgccctcatgttagtggaattgctgccttgatcaaggccagacac

SEQ ID NO: 2828 - DNA, 310 bp, Gossypium hirsutum
  unsure (1)..(310): unsure at all n locations; Clone ID: LIB3083-064-Q1-L1-E9
gaagaatgangaggtttaagatgaatatgaacaattagaagatgtagggatagaagagaagagggaccaagaggcgtaagagaagaagtagaacgatgaggtagaagaatatgaagaagaattacaagaacggaagaacgataagatgaaagacattgaggcgaaggagaagaagaaaggacagacgaagaaggatgaagtacaagaagatgaagatgaagaattataagagggaaagaaagaaaagacgaaataccaataggcgaacgagaataagaaagaatagaagaagaatgatgaggtacaagaa

SEQ ID NO: 2829 - DNA, 366 bp, Gossypium hirsutum
  Clone ID: LIB3083-064-Q1-L1-F1
tttatatttttcctctccaattttccgtcactttcccgagaaaatgagagaaatccttcacatccaaggtggccaatgcggcaatcagataggagccaagttctgggaagtcgtatgtgccgaacatggcatcgattcaacgggtcgatatggtggtgactcggagctccagcttgagcgaatcaatgtttactacaacgaagccagttgtggccgttttgttccccgcgcagttttaatggatctggaacccggaaccatggatagcgtaagatccggtccttacggacaaattttccgacccgataacttcgttttcggacagtccggtgcgggaaacaattgggctaaaggacattacactga

SEQ ID NO: 2830 - DNA, 245 bp, Gossypium hirsutum
  Clone ID: LIB3083-064-Q1-L1-F10
agtttataagatctttgcaaagcgcgaatcttcatcacgggaaataggtcctatgataaaggggttaacattcctaactcgacgaccattctatatgagcttcttccgatttccatcgagatgggaaagaggaactcgactggaatttggaactttacaaacacgggagtggtcagtcacaatgagatattaaaaatgttccgtgactacattgaccctaacatcacctggaagaacttcaatct

SEQ ID NO: 2831 - DNA, 327 bp, Gossypium hirsutum
  Clone ID: LIB3083-064-Q1-L1-F2
cagataaagctaagattgaatcagaggcattaatgtaccggaatttggcagggtagctggagtctgatctcaagagtctttcagatgcttacaatagtcttgaacagaccaatatccacctagacatagaggcgaattctctgaagagtgtagggacatcaacatcttccgatatcgacgcaataaaagctgatgctagggaagaagcccagaacgaaagcttagctgagctgtatgatttactcgtgtgcctctgacaagagcatatcatggtagactaacggaacgcaaggatttttcaattaggctaggatgtagacaaactgt

SEQ ID NO: 2832 - DNA, 373 bp, Gossypium hirsutum
  Clone ID: LIB3083-064-Q1-L1-F3
tttcaaataattttcttccaatgttaaaggagttgtggataggcataactgaggttccatttagatgtgcagaagaagtctctttgtgggtattggctgcaatgaatgatgttggaattgggttcttaattgaagtcagctttgctgctttcagcttcgtttttgccttgtaaactatagtcggagcaatgaaaggccaaacgactgaaactggattgttcaatggggctggacttggtgctgttgcaggtgcaatcacagacgttcaattgcttgaatcattggctgatggggagttattatcacaggtagctttattagttacgttagtgagtcagaaagtcttcattgcacgggcgaattcatcaatgct

SEQ ID NO: 2833 - DNA, 377 bp, Gossypium hirsutum
  Clone ID: LIB3083-064-Q1-L1-F4
ctccaaaccttattcccctttcaacaccaagctcatccggatctgtgcttctgttgttctcttcgtcttccttctcattaccaccacctcttccttttccaaatcccccatttcacaatcccatctctccaactccacacaccctgtcgacgacagtgaaccatccccactagattgcccatcccttcccttgaccccaacatgcaccaaaactccaccttctctagccaatgccctcatccactatgccaccaccaacatcaccccacaacaaaccctcaaggaaatctcggtttccgctagagttttagagaagaaagccccttgcaacttcttggtattcgggttaggacatgacagtctgatgtgggcaagtc

SEQ ID NO: 2834 - DNA, 358 bp, Gossypium hirsutum
  Clone ID: LIB3083-064-Q1-L1-F5
aaacataaattgcatactctttcggcatgcagcagctatgtagcttatcatgagagattaagacaaataagttaatcaaacatcaaaccaacacattaacacccaaacaatctccatctcacttctctcttactatgcttttttttatcatcatcatcacaagttttagctgtcgctagggaaggtgcccctcacaaaagaacctcgacggtggccaccaacgatgacttctttaagacgatttatggaatcgagcaccctaccagtcttctcattgttgatgctgagctgccacttaagctgcaatgcctgccacctctcttgttgccaacgctgcccaagaatcacaaggcccatc

SEQ ID NO: 2835 - DNA, 372 bp, Gossypium hirsutum
  Clone ID: LIB3083-064-Q1-L1-F6
attcctttctgttaatgataaatccaatgataagaattctgagagaatgttagctcatctggggatgagcaaatcgagtgatcctgataatgcaagtcaatgcagctcaatttaccatcacgagagaggttttagttctcattcaggagaagaagggagctccggaacggttcgaaagcagtcttcattgtcatatggaggactagtgacggcctctcccttagttggtctgccagaaatttcacatcttgggtggggtcactggtttactcttagggatctcgatcttgccacaaatcacttcgcagcagagaatgtgcttggagagggtggatatggggtggtttacaagggtagactgatcaatggaac

SEQ ID NO: 2836 - DNA, 364 bp, Gossypium hirsutum
  Clone ID: LIB3083-064-Q1-L1-F7
catcatcccagtattgacatttttgaagcattcgactagctgctgcttgtgaaacgaggaggtcgggttatatacggagggaaacttggagtgcgctcgcagattttgatagactatttccagagcattgatggcattccctttattcctgatggatacaacccggccacctggatgcttgaggttacaaaccctgcaatagagcatagaactgatagagactttgcagatatataccaaaattctgaacaatatagggaagtggaaggttccattacacgtttgagtgttccaacacctgattcacaacctttaaaggtttcttccatctattcacaagaccaactgtctcagtttctgattt

SEQ ID NO: 2837 - DNA, 367 bp, Gossypium hirsutum
  unsure (1)..(367): unsure at all n locations; Clone ID: LIB3083-064-Q1-L1-F8
ctcatcatctttctttctccccctaagttctcacttcatatatactttatatcaacgatgtcggtaaaagagtgcggcaatcacgggaaataccgccggaaaatcttccggcgaatcatcgccggcatcctaatcttcattataatcgttctgataacaattcttctcatatgggccatcctccgtcccagcaaacccaggttcatcctccaagacaccaccgtctacgctttcaacgcctncacccctaacctcctcacctccaatttccaagtcactctatcttctcgaaaccccaacgacagaatcggcatttactacgaccggctcgacgtttacgccacctaccagaaccaacaaatcaccc

SEQ ID NO: 2838 - DNA, 214 bp, Gossypium hirsutum
  Clone ID: LIB3083-064-Q1-L1-F9
ctgaatgctaactcaggctggacagcgggttctggcaatagcgagacctcgtcatctgaaccataaccctgtcagcgtactgattcttgacgtaagaaacaacatcacagggactatctgcttcagcatgccttcttgcctgcctgttacaagaaccagacggcctgactcctatcacagctgtacttcttgacgagatcctcctacccaaccc

SEQ ID NO: 2839 - DNA, 345 bp, Gossypium hirsutum
  Clone ID: LIB3083-064-Q1-L1-G10
acgcatttttctcgagctctatgtacctgggctttattgggttgcttcaaaggggacccaagactatataatataggtcctaacagatttgcatatgaagagaaaatatctctcgttatactaatactaacattattactccataatactactgaatataatttaaatccaaaacatcaaccatatcgataatctttgatgtgcaaatagcataactacctcacttcatatatatagatccgctactagaactaaaattcaaagccgatttaaaatgaattatatacaaaaatgaaaatccgaaacactttctagagcattcatagccgtaaactcatggaaact

SEQ ID NO: 2840 - DNA, 351 bp, Gossypium hirsutum
  Clone ID: LIB3083-064-Q1-L1-G11
agtttataaagaacgtgaaaaagggtccgtttgcagagcattcgccactgttaggatgatatcagtgcagttcctaattggaagaaggtgaatagtgcgatgcttaatatgtatcaagctgacgtgctcgaaaaggtccctagtatgcgatacttcctttttgcctgcctcattaattgggaatgatcttggctgcatcttaatggacacaggctggggcaccaaaagaatactattttccacctgatttcatcaacaggtgtggaattagaaaattatcctatgatgattctatcttaccatgaatttatttagatgcatctgcccattctaatcatctatacaagtgtt

SEQ ID NO: 2841 - DNA, 381 bp, Gossypium hirsutum
  Clone ID: LIB3083-064-Q1-L1-G2
tggtcacatatccactccaaaatctactctgtgttccctgcttttccaagcaatgtagttgctcatcaatttctttcctttcaaataaacatcccaacagagtttgctaaagttgataagtatgtcttctagttaactaaagtagcatattttacctaacttcaccctccaatatcctaaataaaaagctcccatttcttatccaatcaaaacatccataaatttttgttcaaggaccacttcttcccttccattttactttgttttagttgccataacgtcaccttccaatacaacccacaatgaggcaacaatatgtcttcactactctcacgttgctcatcctgttttccctcaattgttcaacaacattagcccaat

SEQ ID NO: 2842 - DNA, 371 bp, Gossypium hirsutum
  Clone ID: LIB3083-064-Q1-L1-G3
tatggcaccagctagggtgaacgatcaatacctgacaaagcttcttctgaagatcaatgctcagcttggaggtcttaattcaatgctaactattgagcaaacaccttcaatccctatgatttcaaaggttccaactatcatccttggaatggatgcatatcatggctctcctgggcagtctgatgtgccttcaatagctgcggtggctagctacaggcaatggccattgatttgccgatatagggcatcagatcgtacacagtcttcgaagcttgaaatgatagattctcttttcaaaccagttttctgaccaatgggatgagggtattatgacggaggctcttctagactttcatacaagttcaaggaaa

SEQ ID NO: 2843 - DNA, 377 bp, Gossypium hirsutum
  Clone ID: LIB3083-064-Q1-L1-G4
cagttatggaggtcaaggaagttatggtggtggtaataactatggcaccggtggtgttagctatggtagtgattttggtcaatctggtgtagatggcgggaatttcaatgtaggaggcagtgatagctttgcaactggtggttcgaccgggtatggaggtgactcaatgggatttggtggtggtgaacatgggtacaaaggagcttatgatggaaatgatgccctgaatgacaactcaagagatgaatatgaaagtggcgactttgtcaaaagggcatgaaataaaggtggttgagctttgaggtataatttaatggcggattttttttggattttggtttaactatccttttctacgaactaatcttctttatcat

SEQ ID NO: 2844 - DNA, 365 bp, Gossypium hirsutum
  Clone ID: LIB3083-064-Q1-L1-G5
gaactgttttctaggtttggcgaatttgaagatattgtagtgaacagttcaaagaaaaaggggtctgcgcttgttgtcatggctacaaaacatgcagttgattctgctacaggcagtgttagtgggaatctagataatccattgttagttgtgcctcttaaaccctctgttgcagagtttccagcccccaagaaggaagagcaaagtgatcgattgaataatttggttggagctggttaccaagcttttgaagatgctgttttaaataaactgacaaaggctgccgaaaaacagcaaaaatgatgacaaaaaggtcttaggagcagattgcaaatgcatcagtggcattttatccacagatgttt

SEQ ID NO: 2845 - DNA, 372 bp, Gossypium hirsutum
  Clone ID: LIB3083-064-Q1-L1-G6
aaaaactaaaagaaatcctctgaaagttcctcagccctcttagctccggcccttggccggtttgctccgttcatcgggcctccgtgcccaccctcacacgccgtcaccgactccgccatacatgacggtgactcgcgaagatttcggtggctgggcttgctgtcatggattcgaatctctgcagatacccatatgaccatgaaagagtctcttttgcggagatctcggcgtcaacggaggtaccaaggtcggagatgaggcctgagatcacggtgctggacggtcgtgagagggataagctactagacaacgcattgatggtgcgtcagtgtgcattgatggcctcgatttggggagttgaacagatgctcc

SEQ ID NO: 2846 - DNA, 364 bp, Gossypium hirsutum
  Clone ID: LIB3083-064-Q1-L1-G7
aactcgcacccaaaaaatttgcagctttggtcaacctaacgatgtcgtacgacgacgtggagatagaggacatgcagtggaacgaggagttacaggcatacacatatccatgcccttgcggcgatctttttcagataacaaaagaagagctcaagatcggcgaggaaatcgctcgttgccccagctgttctctctacatcaccgtcatctacaacgccgaggatttcgccgacagaaaatcaaacaacaatcttgagcctccaaaacgacaagccgtcgccgttgcttgagacctttaagatggcaaatggcaaacattacacttgagtataactggttttatagcagattgcaagaatgtttt

SEQ ID NO: 2847 - DNA, 342 bp, Gossypium hirsutum
  Clone ID: LIB3083-064-Q1-L1-G8
ccgtaaagcaactacgatggccggtccgtgccagtctcgggctatagacaccatacgaatgcttctaatacatatggtccttcttatgatcatcggcatagcgctagacgtgaactggacacaatacttgaatcataacacaacaccagatcgggctgggcgatgctgtatttcagtgatcgacgtgtaatctctacataaaagaatagtacgactgcgaggatttcctcgacagaatatgtctcaagactattgcgcctacacgacgaccatccgcttgattggcttgagacctataagatggcaattggcccacatttcgcttgagtgtaactggcttta

SEQ ID NO: 2848 - DNA, 451 bp, Gossypium hirsutum
  Clone ID: LIB3083-064-Q1-L1-G9
cgtgtatttagaaggtgaatatgggtccgtttgcagagcattcgccactgttggaggatatcggtgcagtgcctaattggaagaaggtgaatagtgggatgcttaaaatgtataaagctgaggtgctcgaaaaggtgcctattatgcagcactttctctttggctggctcattaagtgggaatgatcttggtttcatctttatggacacaggctgtggaaccaagagaatactattttccacctgatttcatcaacagttgtagaattagaaaattatcctattatcattctatagtaccatgaatgtatttagatgtttctgcccattctaattagctatacaggtgttgtcactgaacccccacctcttttccttttttttctcttttttggatgaaaagtcacaggttttatttaaatgcttaatgcatggaacttatgttttgccat

SEQ ID NO: 2849 - DNA, 369 bp, Gossypium hirsutum
  Clone ID: LIB3083-064-Q1-L1-H1
gcccattccactacttctgccacctctcgtagcactaggaggagtagtgggtcaggattcaccttcaggttggaggaacgtgctgaaaagaggaaggagtttctttcaaagctagaagagaagatccatgctaaggaagtcgaaaagaataacctgcaggcaaaatcaaaggagaaccaggaggcggaaatcaagcaattaaagaagagcttgacttttaaagctacaccaatgccgaatttctacaaggaacctcctccaaaagttgaacttaagaagataccaactacgcgtgcaatatccccaaagctcggaaggaacaagaataatgttgctgcaacaaataacccttcggaagttgatggttct

SEQ ID NO: 2850 - DNA, 94 bp, Gossypium hirsutum
  Clone ID: LIB3083-064-Q1-L1-H11
gacccgtcatcagcacgcttcgtcacgacaatatatccgaaaacagcggtcaaccctatgcggtctacagactcgctggtcaccaaactatagc

SEQ ID NO: 2851 - DNA, 378 bp, Gossypium hirsutum
  Clone ID: LIB3083-064-Q1-L1-H2
gagataaccaaggcaaaggagctagtttaaaaccccccggcctcaatcttttggtctaaaattggcttttagtttccgttatccgtcttcttctctctttcacaaagtgtatatttttatataaaataataatttgaagtaattcccaattccccaaatctcaatcccaccaaaccctacaatgaaaaccctaattcattttaccctttaatttctgatttgctgctctcaaaattctattctaaagttttgtccacgtattattctcctttttgtttttctttaatatttcaatatttgcatatatatagatagagattaaggatttttgggttaagggggggggaaatctttgaaggggaattttagagtaaccaa

SEQ ID NO: 2852 - DNA, 370 bp, Gossypium hirsutum
  Clone ID: LIB3083-064-Q1-L1-H3
tttctctccaaagcaaaccgtctcttttgctctacaatcatcacaaatggcgtcttttactacgttatctcaatcgcctccaaagctattgtttcgtcagttgttcgagaaagaatcatctacttatacttacctgcttgctgattgttcccacccggataaaccagcgcttttgattgaccctgtagacaggactgttgatagagatttaaatttggttaaagaattggggttgaagcttatttatgctatgaacactcatggtcctgctgatcattgtactggaactggcctcatcaagggcaaggtgcctggggtcaaatcccgtattttaaaagccaattgttccaaagctgatgtttttggtgaa

SEQ ID NO: 2853 - DNA, 370 bp, Gossypium hirsutum
  Clone ID: LIB3083-064-Q1-L1-H4
ccctttcataccaaaaccccttcaacaatggcgattacgaagcaacatttgatcccgcttttcgctatctcatttctcttgtttttccagctccattgctcaacaacttcagcccaggctcccgctcagtctcccgcaccacctggtccaccagacgtcaccaaaatcctgcaaaaagccggccaatactccgtcttcgttcgtcttctcaaatccacccaagtctccgaccgtctcattggcgagctcaaagacacagatgatggggagaccatttttgcccccactgataaggctttctccgccctcaaatctggtgccttgaattcactcaacgatgaacaaaaggttcagctggtgctattttacg

SEQ ID NO: 2854 - DNA, 260 bp, Gossypium hirsutum
  Clone ID: LIB3083-064-Q1-L1-H5
tttattctggagagacccaatagccaccgctttatttgtaattgtctgtctggctgctgctatagtttggtatgtcacacctttccaggttgtggctcttctagcaggattttacattttgaggcatccaatgttccgccataagctttcttcagtgcctctcaatttcttcaggaggttgcctgcaagaactgattccatgctatgaacaagaatgatatcatgtgccagttcccagaagtgggatggagttcggattt

SEQ ID NO: 2855 - DNA, 147 bp, Gossypium hirsutum
  Clone ID: LIB3083-064-Q1-L1-H6
tagctgatatctgttcatggtatgctttctcagctgagataacaggcgcataataagagagcatgaaatggatccgaggatatggcacaagattggtttggaactctgtaatgtctacattaatggctccatcaaaccttaaagaag

SEQ ID NO: 2856 - DNA, 131 bp, Gossypium hirsutum
  Clone ID: LIB3083-064-Q1-L1-H7
ttatctattcatacaattaaactcctctaaggacaatataaaattctcacacacttttaattcatacttcataccacatcacatcaatccacaaatcactgtctcacaccgaactatatcactacccacat

SEQ ID NO: 2857 - DNA, 326 bp, Gossypium hirsutum
  Clone ID: LIB3083-064-Q1-L1-H9
aaattttcactaagcacgcattgccctctatggtatggctatgcaagcggtcgtcttaaatggcttcaaagactagcatatataaacaccacttgctatcctttcacatcccttccactcattgcctattgttcactaccagcaatctgtcttctcacacgaaaatttatcataccaacgctctcaaacctggcaagtgttctctttcttggccttttcctttccattatcgtgaccgctgttctcgagctccgatggagtggtgtcagcatcgaggacttatggcgtaacgagcagttttgggtcatcggtggcgtttcagcgca

SEQ ID NO: 2858 - DNA, 443 bp, Gossypium hirsutum
  Clone ID: LIB3083-065-Q1-L1-A1
tgagcctgaagatttttggtagctgtgcttatttgggtttggtaaattacaaggaatccctaatacgtttggttgttgctggtattacttaattagctatatgctaaaaggctttcttctctccagcacaatatgcttagaattttactgcttggtatggtgtctttttgtttcagcagttgattccatcatactcttatgaaaatcctttgaagatataccgaggcttccagatcttgttggagagattcttggtcagttgctgcataacgccgcataatatcgatagatatgataaaaagcaaaaaggtgaagattgacattattggtcaaggattggaaatctagactcagcatggaagtatgatcatggagccttattcctggcaatacaatgtaagtactctaaacatttacgggcaatgaactgcatggcgttaact

SEQ ID NO: 2859 - DNA, 289 bp, Gossypium hirsutum
  Clone ID: LIB3083-065-Q1-L1-A11
aatatatgcacattgtgcaatgtacgtgagagagactaggggttctttcttgtttttggaggtattaactaaatccagaagcatattatccaaggactcttaccggatcgccaacatgcaacctaaagacaatcagtttgcactattgtacgactaggaatccgaccgatatgtaacttacatgtcatgcgaaaaggtttacatcataggattagatgaaccggactatgattgcttgtagggtcccccaccttattataggacaaagctattgcttttaaccgacccg

SEQ ID NO: 2860 - DNA, 166 bp, Gossypium hirsutum
  Clone ID: LIB3083-065-Q1-L1-A12
atgaaacagattagaacgaatcaccatgcttagggtttgagcagactagtgctaaagctacagatgagacttgtgctgatggtactaactgatatgcccgaactcttaacagatgtgtaaatctctgaaacggtgcaagacgatactaaagactggacagctggtg

SEQ ID NO: 2861 - DNA, 415 bp, Gossypium hirsutum
  Clone ID: LIB3083-065-Q1-L1-A2
attttattgcgttggactgaaacgtgcaaatgagatcatgggtgtcggcactgaagaactcgtgcttaaggcaacacagggttctatttcagcttaatgctatgctacctcggtgaggatggtgagcggaggatatacatgtatgaacctgagccacgtgataatgaggttatcagaaccctaaaatccttgctttatatcatgtgacatgggaactgggatgtgggtgggaagacgtggtccaacaagcagctatgcagttgtgcatattgttgattttagatgtgtgtgtgtattcccttatctcaatctgagggattcatactctgacatctatgtgctgcacattatatttcgcggtatgtggcatgatgcaactacatgaaaattgctaacttcgtttatagtatccatt

SEQ ID NO: 2862 - DNA, 379 bp, Gossypium hirsutum
  Clone ID: LIB3083-065-Q1-L1-A3
ccaatcttgtgatctataccccaaagcaaataagttctgagcttttacgatcacatctactgcttatttattctcatggctcaaggatattctaacttccagcaatacatggctaaagaggaagaagaacataggctgaaatacttcgaattcgagcaagtagcctccgttcacgccgatttgtgcttcaccaacctttacctttacgctaatgaaagatcagggccgttgaaacctaacgtctagaccgcatgatggaacggttaaatgcgtgcctggaccggtttatgataaataccatgatgtccatcttgaattccttaaatccgttgatttcaaagcggctcaatcagtgtccaagctcgatcgtcgagtgcct

SEQ ID NO: 2863 - DNA, 395 bp, Gossypium hirsutum
  Clone ID: LIB3083-065-Q1-L1-A4
catatatagagatagatagagagagagagagagatacagggagatagggagagacagtacatcctttcccttctcttttaatctttcttgtcttctctttcacctctctttgttgtccatcaattgaggattcttgtcaacaaataacgcatggcacaggaagaacccatgaacgttgaaaccgtaaccccctcgcagcaaccactttccgaagcccccaaagactttgcggaggacaaatcggtaatcccaccttctacctctgaacaaaaacctgctgagttcgccgcactccatactgcggttgcacctactgaggaacagatcacggaaagtcctgtagaccgatatgctgtccttgctagagttgcgactgagaatctaatttcactgat

SEQ ID NO: 2864 - DNA, 249 bp, Gossypium hirsutum
  Clone ID: LIB3083-065-Q1-L1-A5
ctaatttttttttttttacttcaacctctatagatttttggggtatattatatattgtctatcttttacaactttctttggacttattatattatctatctacacaaagaaaagaaaatcacaaataaatatacaccaattgccctcgtactgccctctctttttctctgtgcccctttttcgctacgttcttgcctgctacattttgaatttgctcgtctttggcacttactttgtgcataggtttca

SEQ ID NO: 2865 - DNA, 391 bp, Gossypium hirsutum
  Clone ID: LIB3083-065-Q1-L1-A6
cttatacttctgtatactgagctctctcccacaacatagggatggcaaatagggtataccccatacaagcgacaaatggcaccatcgccacatccaacccttcttttacggccactaaagcacaacaatactgagcctcccgccctgactaccgaccacaaccctaacaccaccgctaccgccgttcttgctgttcttgctgcctttggaccaccataactatcctcgatctcatcctcatagccgccgcaacttccgctatattgtacgttctttaccgccctcaccgtcctactttcactgattcctccctcaaaatctcatcactcaacgtaacctcagcttccaagctgatcaccaacatcaacctaaactttacagccgacaaccc

SEQ ID NO: 2866 - DNA, 412 bp, Gossypium hirsutum
  Clone ID: LIB3083-065-Q1-L1-A7
gtttgaggtcagtttgcgagtcctgcctatatgcccatgggatgattcctgatggcaggaatagctgtaattgaaaggtcatatatggcaatgggggctatatgtgaacacattggctgcgaaagaaaacggataaccccagatacctgattgaagatatgcattgcttcagagaatgattattgattcaagagagagatccattacatcgtaaggatctattcgaaagggtatgatgataaaagactccactccataatgaccattgattctttacgttaaacacggctgtactagacacagaagcattttagaggtgaaaatacttatatataccatgccaggaaaatcgactgtccatttcaactcaatgacatgtaattgtactccttactataggtcggactaatgt

SEQ ID NO: 2867 - DNA, 416 bp, Gossypium hirsutum
  Clone ID: LIB3083-065-Q1-L1-A8
ctcgtgccgcgagttttttttttttttttttcctctctgtggaaagtacaagcttaaaagaggacatgagttttcattcacttacgcatataattcatcgacgttacattcgccgaggaaaacttttaagctatatggtgaaccacagtccccttcggcgattagtgctcggtcattggcggccatgtgttcgatgattttgtatatcatttcaatatcgtccggggcatggcaacggtcagcgatttcttgaagcgtcaatgattcggcagggtcttcacagctggcctcgttgagcaccgctaaaacccgcttttgtagagctaatacttcaccagcagcttttttcccagcttccacaccgggttgatgataagcattgatgttgacaagcgaggcgtaaattccaactgctc

SEQ ID NO: 2868 - DNA, 408 bp, Gossypium hirsutum
  Clone ID: LIB3083-065-Q1-L1-A9
cctcgctctaagaaaaaaacaattatggcaagcaaagaacgcgaacacgagcacagagaagatgaagaagctcctgccgccgaggatgaagacactggagctcaagtcgcccctattgtcaagttagaggaagtcgctgtcagtacaggcgaggaaaatgaagatccgatcctcgatctgaagtcgaagctgtatcgatttgataaagaagggaatcaatggaaagagagaggtgctggtactgtgaagctgttgaagcacaaagagacaggaaaagttcgccttgttatgaggcaatctaagactctcaagatctgcgccaatcatctagtgttgccgacaatgacggtgcaggagcacgctgggaatgataaatcgtgcttatggcacgcctctgactatgcagat

SEQ ID NO: 2869 - DNA, 447 bp, Gossypium hirsutum
  Clone ID: LIB3083-065-Q1-L1-B1
cgagaatccctcccgcctgcccactctatttgtcttgacgtcttgcggtcctggggttaaatcatgctgatgctctggtgactcgatcattcgccggttagtattacggctgcacatccaatgtggagactacgtatgttgcagtccgttctctggatgaaaaccaccttggtacatatcacacttgttttcgggatactcttttgcctacacatctatggtacccacttccccatttcttgcagacatggctactaaactaccttgctgggactttgctttacctcatctctggtttcctttggtgcttctatatttactacttgaaacgcaatgtctatgttcccatagatgctatccccacaaataaagccatgctcctgcaaatctatgttgctatgaatgccatgccatggtactgtgctcttccatctcttccgaatacat

SEQ ID NO: 2870 - DNA, 350 bp, Gossypium hirsutum
  Clone ID: LIB3083-065-Q1-L1-B10
gtgaaatcatggataaagactagaatagacagactgaaggggtgggttgacaggaatctacaacaagaggtatgggatccgcaagcgaataaagaacgatttgctccctcttctgttgaagttttgcgaattgtagatgaagctttagaagcattctttttgttaccaatatctatacatgcagcattgcttcctgatttaaccaatggtatcgatagatgtcttcagcattatatatcaaaggcaaagtctgactgtgggacccggagtacttttgttccctcaatgcctgctttgactcgatgttcatcacggtcaaaaaggttcgggttgaatttaaaaaaaaggag

SEQ ID NO: 2871 - DNA, 413 bp, Gossypium hirsutum
  Clone ID: LIB3083-065-Q1-L1-B11
ggatttttcaattacggcgttgccggcgttggtttcatcgggatcgggttctgggaattcatcaactccttaaacccaaccgtaaacccgtttccaactccatcttcttcttcactttcaacccagatcaaatctgcctctatttctaaaactaaagagaaccctttttcttcatcaccatctttcatctttgtatcaatcttttcccttttgattttcttgaattctgtggtttcaatctttgatgctttcagttcaaaggatcgggtgggtacggtgctccagttacaaatgctctcacttgctctgctcttcttgctttactctgctttgggtcttttaaataataagaaaggttcatacttttggcctgattctgttcttgaattagttctgcttttagcttttgttga

SEQ ID NO: 2872 - DNA, 305 bp, Gossypium hirsutum
  Clone ID: LIB3083-065-Q1-L1-B12
gaaaaaagaattcagctataacaaaattcttaaggacctggggaaagcattttgttgtaatggcactgtagtccaagaccctgaattacggcaggttattcagcttcaatgcgatcaaaggaagaatgtttccaccttccttgctcaggccgctattgtgaacaaggataacatcaaaatccacggcttttaaagttgcaacggctataatttctttcacgactatcctattctgtaactcctatatatgcaatgttattattatgcttattgtgggtctgatactgatatatgcaccctgtgac

SEQ ID NO: 2873 - DNA, 419 bp, Gossypium hirsutum
  Clone ID: LIB3083-065-Q1-L1-B2
aagggatcccaccagaccaacaacgtctcatcttcgccggggaacagggcgaagatggccggaccttggccgattacaacatccagaaggagtccaccctccatctcgtcctccgtctacgtggtggcatgcagatcttcgtcaaaaccctgaccggcaagaccataactttggaagtcgaaagctctgacaccattgacaacgtcaaggccaagatccaagacaaggaaggcatcccaccagaccagcaaaggctcatctttgccgggaaacaactcgaggactgtcgcaccttggccgattacaacatccagaaggagtcgaccctccatttggtattgaggcttcaaggtgggatgcagattttcgtcaagacgttgactgggaaaaccataactctggaggtggagagttccgat

SEQ ID NO: 2874 - DNA, 426 bp, Gossypium hirsutum
  Clone ID: LIB3083-065-Q1-L1-B3
aactagtctcaagtttttttttttttaatcagttcatatggaagcagggagacaaagggagcagtgaaaatgtcgaaaaaaggtttgatggagcaagacttaagtaaactggatgtaactaagttgcatccactgtctcctgaagtcatatctcgccaggctactataaatattggcaccatagggcatgtcgcacatgggaagtcaacagttgtgaaagcaatatctggggttcagactgttcgtttcaagaatgagttggagagaaatattactatcaagcttggatatgcaaatgcaaagatatacaaatgtgaagatgaacgatgccctcgtcctatgtgctacaaggcatatggaagtggaaaggaggatagtcctctttgtgatgtgcccggctttgaaaactgtatgatgaagttgctg

SEQ ID NO: 2875 - DNA, 402 bp, Gossypium hirsutum
  Clone ID: LIB3083-065-Q1-L1-B4
ggaaagaaaaaaatgaagctcttgtttctaactttgctgggttgttggcttcttctatgttcttcagtttttgcaccaacaatggctcagcctcgttcacctttttgtgaagggaaatgcaaagggaggtgcaataaagcggcggtttgggatcggtgcttcaaatattgcggcatatgttgcgaggagtgtcaatgcgttccgtccggtacttacgggaacaaacacgagtgtccttgctacagagataaggtgaacaacaagggcaaacccaaatgcccttgaaaatgaaatatattcgagttcgggatttaatcaagcttaaagatcgaggacgaagaggccatatatatatatatatgcatgttgatgatgatgttattataaaaataaacttgtttt

SEQ ID NO: 2876 - DNA, 400 bp, Gossypium hirsutum
  Clone ID: LIB3083-065-Q1-L1-B5
catcattcagttcaggggctttcataaaactcaagacaatatttagaaagaaacttcaaagaaagaaaaatacaagtctgcaaatatccagaaatgcaacagcagttacagcaaaagtaaatgactaattctttcacatccaaaacaggaaaaaaaagcaccagcaactgggagttgagattttgaattgccaaaatggcaataactttccttctccttagtcctcatattcgggttcctcttcttcttcttcgtactcttcatcatcagctgttgcatcttggtactgctgatactctgagaccagatcattcatgttgctctcagcttcagtgaactccatctcatccatgccttcccctgtgtaccaatgcaagaaggccttcctcttaaacatagc

SEQ ID NO: 2877 - DNA, 356 bp, Gossypium hirsutum
  Clone ID: LIB3083-065-Q1-L1-B6
ctaagaacatgatggcagtactgtttgtataggttggatgtatggtttttggaataattgttcttcgttttctctatcgtttcatagacaacaatggcctccctcgaaactggccatttgttgggatgattcccacgttacttctcaacatccatcgccctcatgacaaagttgcccaagtcctcagacgaagcaatggtaccttcttttatagaggactttggtttactaacaccagcttcttagccaccttcgatcctgagaatgtgcgttatatattgagttccaacagttctgtttatttgaaaggtcctgaatggctgaaacagtttgatatcttcggcgaagcacttttc

SEQ ID NO: 2878 - DNA, 408 bp, Gossypium hirsutum
  Clone ID: LIB3083-065-Q1-L1-B7
gggatttgtcccttcaactttccagcaatgatgcccttatggatgttccctgtcgcagttacatgtggtaatacctttgttttaaagccatcagaaaaggatcctggtgagttcaacataataattgtatgatgtagtatcctggtgagttcacatatatggaggacaaaaggttgctataacttgttttattgtggctggtcgttaaagatcttatttggatgttgatgtgccatacatgggtgggacattataattactattgttactaccttaattttttcagttacataagaaaaagacaacttgggttgtctgtcctttgttcttacatgacttcactttactctccaactcttttcttaaaataccattttgttactttccaggggcatccataatgcttgc

SEQ ID NO: 2879 - DNA, 407 bp, Gossypium hirsutum
  Clone ID: LIB3083-065-Q1-L1-B8
gaactttgacaaggttgatcccctgtgttcaggttacagggcacatatcttctctagtgcatcacttgaagatagttttagatgggaaaaatgatgagctccgaaaagatgctgttgatgcactttgctgtctggcccatgcccttggagaagacttcactatttttatcccatctatacacaaacttttgttgagacaccgcttgcagcataaagaatttgaggaaattgaacgtcgtttaatgcgacgtgaaccattaattgtggggagcacagcagcacaaagattaagtcgacgacctccagtggaggttgttagtgacccactaaatgatatggaaaatgatccttatgaagatgggaacgatgtgcaaaaacatcctagaggtcaccaagtcaatgatggg

SEQ ID NO: 2880 - DNA, 418 bp, Gossypium hirsutum
  Clone ID: LIB3083-065-Q1-L1-B9
ggaggctcgtaaacgtgaagaggctgagaggcggaggaaggaagaagctgagcacaaagcaaaaatggatgagattgctgaaaagcaaagacaaagagagcgtgaattggaagagaaagagaggctgaggcgagaagctctcttgggaagggcactggaggggatctctaggccttctgaaattcctgctgggtcccactcaaccgagcctgtagttgtggctccagctgctgctgctgctgctccagctcctgggaaatatgttcctaggttccggcgagaaaggcctgaaagctctggtccagctccaccttctgaacctgatcgatggggcaagccagcaccctcggaacctgaccgatgggctggtggtagcagggctccttcattccaatctgatcgcaggactagtggcagt

SEQ ID NO: 2881 - DNA, 426 bp, Gossypium hirsutum
  Clone ID: LIB3083-065-Q1-L1-C1
tgcttattgagtgcccatcgatatacgagttaatggcttgtccacatttccattggcaacatattccacttcttgagatatggagggagaaagaaggttgtgatggatatcctcgaactattctagaatcttatcgtccgggaaattgcattgatattttcaaggaagctctttctggcaacacggtcgattataacggagagatgattccattaccttttaatttggaaatcttgaaatgggttaaagagactcaaaaggtgttgtctcacgctaaggttccttccggagttaaattctacaatatatacgggatcaatcttgagacaccacacagtgtttgctacggaagtgaggagacaccggtcacgaatatacaggacttacggttttttcagcccaaatatatatgcgttgatggtgatg

SEQ ID NO: 2882 - DNA, 416 bp, Gossypium hirsutum
  Clone ID: LIB3083-065-Q1-L1-C10
aggagatgcagccacttctgctggtaattccgcggcagaggaagaggatgaagcaggaaatgaggatgagtcaattgtacatcattgtgctagtgttggtgatgttgagggtctgaaaactgcactatcctctggtgctgacaaggatgaagaagattcagagggaaggacagcattacattttgcatgtgggtatggcgaggtgaaatgcactcaaatccttcttgaagctggggcaaaagtggatgctctggacaagaataagaacactgccctccattatgcagctggctatggaaggaaagactgtgtggcccttctactcgagaatggtgctgctgtcactctccaaaacatggacggcaagactcccatcgaaattgccaagctcaacaaccagcacgaggtactaaaat

SEQ ID NO: 2883 - DNA, 410 bp, Gossypium hirsutum
  Clone ID: LIB3083-065-Q1-L1-C11
catcactaacattttcttctccaaaaatgtctacgaattggctaccattactcttctcttttgtttttccttgtattaaaactccaaagcttcttcacctatctcctgctgcttttcattaacaacatgtctgctaaaacaaaatctgggttatttgaaactcctaccaaggtttcacctgcaacgcctaaagtggcgagcaaagtaagcaggggactggctaaaccataacccgattcaccctcttccttgccaagtactcgccattcagttgagcgttcaccacgaacatccctcaactcgaagcctacaattgatcgtagatcaccaaaggttgccaccacccctgattaaccacatacacggtgtggctaaaggatcagagatgcagactcaattgaacttggtgc

SEQ ID NO: 2884 - DNA, 396 bp, Gossypium hirsutum
  Clone ID: LIB3083-065-Q1-L1-C2
gaacagaataagcccaatgggtcgacgggctgctgaacagttcactcgcagattgtcgtgctgtttccttctaatatggacagaaataggaaggatgtttttacttatccgaatggcttgtaaagctagcggagctgcactggacttgatgaagttattcaaaggtggatcaagcgttgtacgctacgctccatatccggattcagaggtcgtgacgtttgcataagaggactgtgaaatactcgaaacttgccaaagaacagctatcctatacatcagcctccttcggtattctatgcctctgttgagctctgatcgatccttcgaccactctatctgatcgctacaggatccatgatacactctatgactacaattctcgagatactgggatat

SEQ ID NO: 2885 - DNA, 410 bp, Gossypium hirsutum
  Clone ID: LIB3083-065-Q1-L1-C3
ggcaataatagagattaaaaggtaacaggatggaaataacattaacgcaatgtctcggacaggaccaaaactgatgctactacttctcagttgtaatattctctaattttttaacccaaaacaaaaacagaatggaaaacaaaaaagatattcatgcaaaattacactcaaaaacacgttcatggtttctaacaagggaaatggtgatttgtcttgagagttttttgggggagaggtggggggactcctgactatcgaataaaccacaatggattccaagtgaaaaccattgcggagattgtggtggcggacatcacttgccacccaatgaggggaagtgtccaggatctgcaattgagggagcttgcacattgctggctgtgttgcctgcatatccacctctgggacca

SEQ ID NO: 2886 - DNA, 386 bp, Gossypium hirsutum
  Clone ID: LIB3083-065-Q1-L1-C4
ttcatgccccactacatcacgggttttatggtgggactcgaaaagcatgctgtggagggggtgggccatataatttcaatatctcagcaaggtgtggtcatcctggatctgaagcatgtaaagatccttccgtttattcaaattgggatggaattcatctaactgaagcagcctatcgccatatagccttggctttgatcaatggctcctcttcccttccacccctcatatcctctcctctttcagattgaataacccccctaacatgaacagtcaatcaagggtctcatttagatgttcattagagatccaggaccaatgatacatgtatgcattgactgtacttgaagattttatttgctttataatttagcctcatgattttg

SEQ ID NO: 2887 - DNA, 364 bp, Gossypium hirsutum
  Clone ID: LIB3083-065-Q1-L1-C5
gatttttcatggagtaccatccttctacatagggttcacgtatggttgttcatagatcacgcaaacttcaaagtctcattaaggatgcaaaaaaattatataaaaggactactcacttacaatcagaacccaatcagccgcagtataagcatgttggggtatttctgcacagggtcgatctggaggatcattatggaaagaaatcataacacataaaggagaatatgatattagagcgatctgaaacttcattggcgacacaagaagctcaagcagcttttggcgctttcaagtctcgtgattgcgcagtacatgcttttcacatgaaacaatgaatttacccaacatagtgggccacagaact

SEQ ID NO: 2888 - DNA, 405 bp, Gossypium hirsutum
  Clone ID: LIB3083-065-Q1-L1-C6
cggaattgttgggaaatacggtacccgatatggtgccagggtgaggaagcaaattaagaagatggaggtcagtcaacacagcaagtacttctgcgagttctgtggaaagtatgcagtgaagagaaaggctgttggaatctggggctgcaaggattgcgggaaaatcaaagccgggggtgcttatactttgaacactgctagcgctgtgacggtgaggagtaccattagaaggttgagggagcaaactgagagctgagccaataacattagcatacccaactttcgtaggatgtttttgcatgtttaatctaaacgtattgaaatctttcttttgacaatgatgttattttgtatcaggatctggtgttgaaactttatatgagatattgagttgttggtttcttc

SEQ ID NO: 2889 - DNA, 296 bp, Gossypium hirsutum
  Clone ID: LIB3083-065-Q1-L1-C9
aattaacgcctttttcttctctttgctgagctcggtcccgggacattaccatggcagataggatataccctaaacaagcgacaaatggtaccgacgccgcaaccaaacctttttttccagccactaaagcacaacaatacggagcctcccgccctgtctaccgtgcacaatccgaacgccaccgctaccgccgctcttgctgttcttgctgtctttggaccaccatagctatcctcgttctcatcctcatatccgccgtagcttctgctatattgtacgtcctttaccggcctcac

SEQ ID NO: 2890 - DNA, 429 bp, Gossypium hirsutum
  Clone ID: LIB3083-065-Q1-L1-D1
gaaacaccaactgaaacataacaacaaaaatggcggccgggaagaagacgaagaagacccatgaaagcatcaacaacaggttggctctcgtcatgaagagtggaaaatacactcttggttataaaacagtgcttaagtctctaaggtcctccaaagggaaactgattattatttccaacaattgtccacctctgaggaaatctgagattgagtactatgccatgctttgtaaagttggggtgcatcattataatggaaacaataatgatctgggaactgcttgtgggaagtacttccgcgtatcctgcttgagtatagttgatccaggtgattctgacatcatcaagtctctacctggtgacaattgagtcgtttgacagcagaacaatgtttgtttcttattatattggtcctcgtagccttcttatc

SEQ ID NO: 2891 - DNA, 331 bp, Gossypium hirsutum
  Clone ID: LIB3083-065-Q1-L1-D10
ctttgctgcaaattgtcctaatcttatcagaaagtctagggcaggggataacatgagagtgatccttcatgttcaaggtggacaatgtgggaaccaaatcggttccaagttttgggaggttgtttgcgatgagcacggcataaattcaactggtaggtacattggttgctcggatctgcagttggagcgtgttaatgtttactataacgaggcttcatgtggtcgctttgatactcgtgctgagctcatggacttggagcctggtacgatggacagtgttcgaactgggccttactgccacattttcatgcctgacaactttgtttttgga

SEQ ID NO: 2892 - DNA, 412 bp, Gossypium hirsutum
  Clone ID: LIB3083-065-Q1-L1-D11
cccaacctggggaagtcgttaagcctgatcaatgcaaagggtaaacgatgaaggaatgccgatttatcagaggccatttatgagaggtaaactgtacattcagttcactgttgacttccctgactcgttgaccccggaccagtgcaaggcactagaggctgtgcttcctcccaaggcatcggttcagctgactgacatggagctggatgagtgcgaggaaacaaccctgcatgatgttaacattgaggaagtgatgcgtaggaaacagactcaagctcaacaagaagcttatgatgaagatgaggacatgcatggtggtgcgcatagagtacaatgcgctcagcaatgataaaaaaaagccgaatgtccgagacacaaacggtggtttttggcgatggaatgtactgtggtt

SEQ ID NO: 2893 - DNA, 408 bp, Gossypium hirsutum
  Clone ID: LIB3083-065-Q1-L1-D12
ggattttgacgttttcaatgcgcttgatgtcatgcatagggagtcattcctcaaagaattgaaattcggaccaggcgatgggcaacattactactacctctataattatcggatactaaatgctttgagaccatcagaacttgggcttgtactcttatagttcaatatgttccaactttgttcgggcagttttgttcccaatttgttgcatcatattaattgctccgctgccatccacagccaaggattcggtgtgcagtgcaagcaaaagtagcctttgctgcgtatctgagcttgaattgcctacgcagaatacaatattgcctgtgacaatgcacattgatcaatggacatcaatattgtttagctttttaataaaaaacagtgttcttaaaaaactctaggggg

SEQ ID NO: 2894 - DNA, 421 bp, Gossypium hirsutum
  Clone ID: LIB3083-065-Q1-L1-D2
gtaagttggtgaatagtgttgtaattagtgccaatggctgggattgggacctctgcagctcacattgtgttggcaatatttgctgtggccatgtttgttgtgtccgggaccatggcacaggatattgctccttctcctgcaatggctaccggagcaggctctgctttgccggtttccgctgtcttcttatgctcttccatgttggtctctttaattgctctcttggtgcattgaattcaaagcttttcaagactttatgacattggctacccttaatttcactctcactggtgatgaggggagtagcctctaatcttctccgagataatatttgggtgttatcaattttcaatttctctaaagttttagatatctctatatatatcatgttacattagtgacataaatttgattttgtaat

SEQ ID NO: 2895 - DNA, 414 bp, Gossypium hirsutum
  Clone ID: LIB3083-065-Q1-L1-D3
attatcaacaaaagttctttgattgagtatcagtaggtaatgttcttttcaaggtaaaaacaacaacaacatgatgaacatgaagacaaggattctattgcatccccatggaaatatttacaggtactcaaagaaactacgcagaaagtccagatattttacactatgcttattcccattataaaggccaacaagatttgattctagcactgaagtaatggaactcacatctcggcaaccagtttctctgaatcactggcgtcagatagtgtacccttggtccaccttttcagcatctccaatgctgccttgggctggtccataggaaccatatgacccgcatcatgaaccttaaggaaaccaagagctccatgagttttcaagactccggcttctgcaccatctactatgaaa

SEQ ID NO: 2896 - DNA, 424 bp, Gossypium hirsutum
  Clone ID: LIB3083-065-Q1-L1-D4
ggattcccgacccgaccctacttcatggaccggcgtcacgggcgacgcgaattctgattctatcgtttccctcaacttagatcgtctcggccttgtcggagacctcaagttccacactctcactcccctcaagaacctccaaaacctctccttgtcaggtaacgctttcacgggtcgggtcgcacccgcattggggtcgataacctctctgcaacatttggatctgtccaataatcagttcatcggcacgatccctggccggatcatggacctttacgagttaaattacttgaatttgtcgggtaacaagttcgacggtgggttaccggctgggttccgaaatttacagcaattaagagtgttagatttacacaacaatgcgcttcgaggcgatataggccagttattcactgagttaaggaat

SEQ ID NO: 2897 - DNA, 416 bp, Gossypium hirsutum
  Clone ID: LIB3083-065-Q1-L1-D5
aaaataggcggctattggcgtcctgggtcaaggagcgtggggaactatggctgaagaaccggcgacggctggagctggaagtgggtatcgggaattccgaggaaaagatgaatttccgtccaacatgttgcacggcatatttgctattgcgatgtggattggatctgtgcatttcgacatctttttgctccttttctcctttctattccttcctttttccaaattcctcatggtgctggggtttctattgattttcatggttcttcctatcgacccgtacagtaaatttggccggaagctgtctaggtatatatgtaagcatctttgcagttactttcccatcactctctatgttgaggattttaacgccttcaatcctgatcgtgcttatgtttttggttatgagccacattccg

SEQ ID NO: 2898 - DNA, 130 bp, Gossypium hirsutum
  Clone ID: LIB3083-065-Q1-L1-D6
ttttagttgcgtactttttgtgttttttaacataaggaaggtccggaaataggggatgatacccatgtttgtcacttgtctgtactcttgctttgccgtgtttgatgatagatggtgtgattgagacttg

SEQ ID NO: 2899 - DNA, 423 bp, Gossypium hirsutum
  Clone ID: LIB3083-065-Q1-L1-D7
gtgatcatccatgggttcaggaaactggcttagatcattgatttgtttaaagaaatataaaccaaacagatccaaacaagcaaaggtacactcgagtaatgaaaaatcaaatggtgatgaaagggtagaagaacatgagggtcctgaagtggcagcggctgggagttcacaaagcagtcctggaattgccgttgaacaaagagcggctgctaaaattcagaaggcatttcggtcttacagggcaagaaaagcagtccgccggctgagagatgcggggagattcaagaacatattgatacagggacatacagtgaagaaacaaacaacaagcacgctaagctatttacattcatggtgcaatgtccagtctcaaatccgagctcggagaatatgtatggttacagaaggcaggcttaaacaaaa

SEQ ID NO: 2900 - DNA, 415 bp, Gossypium hirsutum
  Clone ID: LIB3083-065-Q1-L1-D8
ctcctattcttttctctataatgtctccaaaggtcctcgggtcctctcctactctttcttctttcttttcaggtgggctttgagtttcttgcgctcatatttgctagcagttgtgtgatatcttggtgcattctacttaggaagcttgatgggttccagattcccatctcatcaactcatcaatgggctttatgtgtcaagcaggaaagagcagcctaaagaaaggactcctaccatgagctcattaccaatgccctatactggtggagatattaaaaagtctgaagaactggggaaaatgttcgatatccctgtagatggttctaagtcaaggaaatctgggcctataagcagcgctccttcaaggactgactcttttgtggttgctgcttcgcattctggaccgatcatacct

SEQ ID NO: 2901 - DNA, 395 bp, Gossypium hirsutum
  Clone ID: LIB3083-065-Q1-L1-D9
ctgaaaccaataccctgtttgggattaaatattctttccaaaatacctcaaaaatcaatctgccagagaaatctcacgataaagtgaatacaacctatctagaatgttaaaattgacctttgccctgaccatgtctaatatatggtgaaaacttaagttacagctgctcagtgcaaacttcagtcatctatctaggtgatataagcaatgcatctaatggataataacctcatttcccaatatcttaaaaagaaaattgataaatagctctaagctgtttacctacaggttttactctctttctcaatctcttatttcttcaattcaaatggcaaatatatgatagttatgacctactaataatcatcagagccattgtcaacatataagccatt

SEQ ID NO: 2902 - DNA, 427 bp, Gossypium hirsutum
  Clone ID: LIB3083-065-Q1-L1-E1
tatggtttcatccctcgtactctttgtgaagacaatgatgccttggatgtcctgattattatgcaggaaccagttcttccagggtgctttcttcgggctaaagctataggtctgatgcctatgattgatcagggtgagaaagatgacaagattattgccgtatgtgctgatgatcctgagtatcgtcactacaatgacatcaaggaactcccacctcaccgtttggctgagattcgccgcttctttgaggactataagaagaatgagaacaaggaagttgctgtcaatgacttcctgcccgcctcaactgcttatgaggcaatccagcattccatgaatttgtacgcggactacattgtggagagcttaaggcggtagttgttcatagcattccgtctttatagtatattacatagttatgaatatg

SEQ ID NO: 2903 - DNA, 366 bp, Gossypium hirsutum
  Clone ID: LIB3083-065-Q1-L1-E10
gttgagaacaaagcaaactatgatgataacaacgctgccggtgctgccaacaagaagaagaggaaaagggtgaagaaacttgagttgttcaaagggttttgtgaagatattgtgaacaagttgatgatccaacaggaagagatgcataataagctgattgaagatatggtgaagagagatgaagaaaaagttgcaggagaagaagcttggaaaaaccatgagctggataggattaaccaggagcttgaacttagagccaaggaacaagctattgctggtgatagacaggccaccattatcaaaattcttgagcaaattttaacaaacttggatccttttagaagcaatgttttggaagggttaatg

SEQ ID NO: 2904 - DNA, 195 bp, Gossypium hirsutum
  Clone ID: LIB3083-065-Q1-L1-E11
cttagtaggcttcctgatgatgaacccatccttgacaaggggcctaacgttctgcctggagttggccatggagatttcgttgatttcattaggatcgagccagaccttgccgcgaccgcacttgaggacgctagcggcaagccgcttctgcagcttcaaagacaccattgctgttttccggcttctgtgaaatgg

SEQ ID NO: 2905 - DNA, 380 bp, Gossypium hirsutum
  Clone ID: LIB3083-065-Q1-L1-E12
cttcaatgtacctgctatgtatgttgccatccaggctgggctctctttgtatgccagtggtcgtacaacaggtattgtgctggattccggtgatggtgtttctcacaccgtgccaatctatgaaggatatgcccttccacatgccatcctccgtcttgaccttgcaggtcgtgatctaaccgatgccttgatgaagattcttaccgagagaggttacatgttcaccaccactgctgaacgggaaattgtccgtgacatgaaggagaagcttgcttatgttgccctggactatgagcaggaactggagactgcgaagagcagctcatctgttgagaagaactatgagttggctgacggacaagtcattactattggagctg

SEQ ID NO: 2906 - DNA, 366 bp, Gossypium hirsutum
  Clone ID: LIB3083-065-Q1-L1-E2
catggtttttgcgatttgcgtttctttttgggcggtgcagaaagtgattttcttggacaattggaagactggatatgggattcatggattctggcctttcagttggaactgaaggcatcatctattgtgcttgtttttttaggctgctataattcgaactatggtttcgattcagctgggaatttgatatcaattttagatgttgtaatgtactttgggcaaaatactgagcttatagaacgttaatctgctataagttgacatccatgaaagatccatttgctaaagactaactgaccgactaaactgcttatgaggcaatccaagcattccatgaataaatctgcggggggggcccgggaccga

SEQ ID NO: 2907 - DNA, 430 bp, Gossypium hirsutum
  Clone ID: LIB3083-065-Q1-L1-E3
tcgagttctcgagttttttttttttctgttctctttcttcccccctccccctgtcacatgaaccctaaccctacctcaccaatcaggatacaacatgaagggaggtaaatccaagtcagatactaagggctctaggctcgccgtgaacaagaaatctagcgccaaagctggaaagaaatcggggaaggcggctaaggatccaaacaagccaaagaggcctgctagtgccttcttcgttttcatgtaatcattcaaaattctatcctgtatatgtaggttttttttctttatatatttttggtttcaaggaaagctctggcgtttctattcttcgtaaaaacgccgatcgacgagggaggagttccgtgagcaatacaagaaggaacacccaaaaaacaaatctgtcgctgctgtgggcaaagctggtgga

SEQ ID NO: 2908 - DNA, 411 bp, Gossypium hirsutum
  Clone ID: LIB3083-065-Q1-L1-E4
atattgccgaagctcttgcaaaattgggtgctacagaaagtgaaggtttacatttttcacccgatagacaaagggagctggggtttacgttctcatttcctgttcggcaaacatcgatatcgtctgggactcttataaaatggacaaagggcttctcgattgaagatgcagttggtcaagatgttgttggagaattgactaaagccatggaaaggattggcctcgacatgcgtgtgacagctttggtcaatgacacaattggcacattggctggtggaagatataacaacccagatgttgttgctgctgtgatattgggtacaggcaccaatgcagcttatgtagagcgtgctcatgcaattcccaaatggcacggtcttctacctaagtctggggacatggttatcaaca

SEQ ID NO: 2909 - DNA, 417 bp, Gossypium hirsutum
  unsure (1)..(417): unsure at all n locations; Clone ID: LIB3083-065-Q1-L1-E5
cttgcagagagaagaagagctactatctagtgggtggaaggaatatgctgaatgctgtgaaggtccaagaggacgaagtagttctggcaagaagttggacttgggagaagattcatcttcttccaagggtttgcaatcagcccaactatatgggtttgaagaagagagggttggtgtccctgtaaagggagggctctatgaggtagatttagttaagagacactgcttccctgtttactggaatggagaaaataggcgtgttttaagaggtcactggttcgctcgtaaagggggagtggattggcttccacttcgtgaagatgtagctgaacaattggagattgcatatagtaacaaggtttggcatacgagaacattttaaccgtcaggactttntgcagctagagttgatttgca

SEQ ID NO: 2910 - DNA, 414 bp, Gossypium hirsutum
  Clone ID: LIB3083-065-Q1-L1-E6
acgatatcgatttgttgaatcctccagcaggggttgaggggaagaagcacaagctcaagcgtctcgttcagtcccccaattctttcttcatggatgtcaaatgccaaggctgcttcaacataacaactgtgtttagccactctcaaactgtggtggtatgtggtaactgtcagactgtcctttgccagccgactggaggtcgagctagactcactgagggatgctctttcaggaagaagggtgattgatttgctacacaattgctttgaatatgggttcttttttttttttatctttgagatattggtctgaatttcatctttttttttctttttcttttttgtctttgtgcttcaagatgagttggtttttcttgtaagtttaaggatttgatgctaagcttgttacttaatg

SEQ ID NO: 2911 - DNA, 417 bp, Gossypium hirsutum
  Clone ID: LIB3083-065-Q1-L1-E7
ccccttttcccttcgcaagggcatagatcgcccatcgtcggggctccaccttccccaaacgcacaccgcggtggccgacgagccagatatctcggaggcgtgggagcgtggcatggagtagcgcacgattcggaagcttggcgcgcgtcgtacgctgcttggactcgaagcttgcggcgccgatttccttctgctgctggggttttgggttggctttatgttttgtgttttgggttgagagatgtgggttaggttttgggtaatctgttgggctttaagtctgttttgtattgggttttaataggtgtttttatatttgggtttagtttttttatttaattttgcatgtgtgggcctgggcataaattgggctcaacaatagttataatgatattttataattttataattttattt

SEQ ID NO: 2912 - DNA, 416 bp, Gossypium hirsutum
  Clone ID: LIB3083-065-Q1-L1-E8
acaaggtccagagacaacaacttgctcgctaggttcgaggtctctggcatccctcctgctcctagaggtgtcccacagatcactgtctgctttgatatctatgctaatggtatcttaaacgtctctgccgaagacaaaaccactggacaaaagaacaaaatcaccatcacaaacgacaagggccagactctccaaagatgaaattgaaaagatggttcatgaagcatagaaatacaaatccgaatatgaagaacatacatagaaggtcgaggcaaataatgcattgcaaaactatgcatacaatatgaggaacacagttaaggacgatacgattgctgccaaactcccatcaactgataaaaagaacatcgaatatgctattgaacaagccattcaatggctatacagcaaccaac

SEQ ID NO: 2913 - DNA, 414 bp, Gossypium hirsutum
  Clone ID: LIB3083-065-Q1-L1-E9
ctgaaacagaaagaaatgagggggaaaagaaagagaccaggatagtatagccagcacccacattcactatagcacagatgtgagtgagatatttccttgggggttcatacaccgtaaaatagtgatgtgtcagctctgcattttaaacaaattggaaacagttgaaacctctggatttttgctttgctggaactaaaatttgagaaacactctactactagattttcaagctattattctatttctgagaaaataaatgaaattcccatgaatccagaaacctggtcttcactttcacacttagttgagctagtatatggatggttcttgtacttctaacataagcattcctactcgttaataaaacactgttggaaactttaacgcatggatttgcttgacaattatttatga

SEQ ID NO: 2914 - DNA, 397 bp, Gossypium hirsutum
  Clone ID: LIB3083-065-Q1-L1-F1
aattaacaagcatcaaaggacctcatattcatatcccaagtatttatcacatgacaatttagctaaacattaaaattaaacataaacaatctgtaataggcccaatttgcctgggcctataataagccagaaagccaaaaataaaaataataataaaaccgaactaatttaaagtccagtcatttacatttattaacccaacaataaacccaacctaataaacctaaacccaaaataccctaggcccaaaataccaaccaaactttcggccaaccctagccaacagccagggccgcaaacgccatcagtagccctaacgcttcacgccccacatcgacaagctcataagcggcttcgccatgccgtgcctacctgcgtcggcgctgagaaaagctga

SEQ ID NO: 2915 - DNA, 365 bp, Gossypium hirsutum
  Clone ID: LIB3083-065-Q1-L1-F10
caacaacccaccaatatatgagccaaaaccacctaagccgccagtttatgcaccaccaaaggaagaaaagccaaaacctaaaccaccagtttatgagcctacggcacatgagccaccatacggtcactatccaggacattcacctttggggaagcctcaatagaatgctcccatcgactagccattcccaacaattgagctactataaaaattagtatttataataagaggaactgccggctgatgttctgatttattcttgtatggaacgcactaatgttttctttcatgtttgaagaaataccagttgctcatggctgtactcattcgaatgcttattctatatcttatttctttcttaaaaa

SEQ ID NO: 2916 - DNA, 405 bp, Gossypium hirsutum
  Clone ID: LIB3083-065-Q1-L1-F11
cttagtttccctttttgtcccttgtttatttgatactccggcctcatggctgccgctgatgtcgagttccggtgcttcgtcggagggctcgcatgggccaccgacgaccgggcccttgaagaagccttcagtgcgtttggtgaaatcgtcgaatcgaagatcattaatgatcgtgagactggaagatcccgaggctttggattcgttactttccgtgacgagaaagctatgagggacgcgatcgaaggaatgaacggtcaaaatcttgatggaaggaacataactgtcaacgaagcccaatcgcgcaaaagtggatgcggtggctgaggatttggaggaggaaacggtgggtacagccgcggtggaggcggcggcggatatggtgggcgcccaggatgatattgt

SEQ ID NO: 2917 - DNA, 384 bp, Gossypium hirsutum
  Clone ID: LIB3083-065-Q1-L1-F12
aggtcatcagggtcatcttctccagagtcaacaggatcaggtgaaacttccatatcgtctcactttggtggaatgaactatccttcactcttcagttcacgaccaactacttatggggcttcacaaccttcagagagatcaggtggaagtagatttaaccatccttcatcaatgcacgagggttatggttctccaattagagaagaacctccaccctatacatcacctgaacggtatgagtcttttgaaaatcccttagctggccgcgggtcccatagttttgaatccaaggatgatgatcgcatgtcttctggaaatccccaatttgggactgccctgcatgattttactggcagtggagatgatgagttgagcttaacaact

SEQ ID NO: 2918 - DNA, 424 bp, Gossypium hirsutum
  Clone ID: LIB3083-065-Q1-L1-F2
cttcagtccagtattctaaggtgcattttttttcccttcgactttccgtcactttcccgagaaaatgagagaaatcgttcacgttcaaggtggtcaatgcggcaaccaaattggagccaagttttgggaagttatctgcaccgaacatggaatcgactcaacgggtcgatacaacggcgactcggagcttcagctggagcgtatcaacgtttactataacgaaacaagttccagccgctttgttccccgcgccatcttaatggatctggaacccggtactatggacggcgtaagatccggcccgtttggacaaattttccgacccgataacttcgttttcgggcaatccggtgctggaaataattgggccaagggtcattacaccgaaggagccgagcttattgattctgttctagacgtcgtc

SEQ ID NO: 2919 - DNA, 424 bp, Gossypium hirsutum
  Clone ID: LIB3083-065-Q1-L1-F3
tatgggtccgaaagcggtgaaggacaaagcgagctcgatgcgattgagtgaggcagccaagccagcatccatctcccacattgctcgtccggaagtgctaaaagaagaagacaaccggacctccaccatcagacggctaagtgatttgaaaagcgacgatgatgatgcaggctctcctaatagtcaagaaagcacccaacaacaatcctaccaaaataatgctgcaattgagttgatcaatagtgtcacaggtgctgatgaggagggcaggtctcgccaacgggttctcgtatatgctgccaggaggtatgctagtgctctggagagaaacccagaagattatgatgctctttacaactgggcattggttcttcaggaaagtgcagataatgttagtccagattctacatcaccttctaaagat

SEQ ID NO: 2920 - DNA, 230 bp, Gossypium hirsutum
  Clone ID: LIB3083-065-Q1-L1-F4
attctggtgatggtgtatctaacactgtcccaatctgtgaagggtgtgcccttccacatgccatcctccgtctagaccttgctggtcgtgatctcactgattctttgatgaagattcttactgagagaggttacatgttcaccaccactgctgaacgggaaattgtccgtgacatgaaggagaagcttgcttatgttgccttggactatgaccaggacctgaaaactgcc

SEQ ID NO: 2921 - DNA, 339 bp, Gossypium hirsutum
  Clone ID: LIB3083-065-Q1-L1-F5
cttataccaatctatattatcacactgtaccgggcaatgggagatacacacttacaaactctacactccttatacaccttactcttgaatctcatactaatacttcaatgtaaaccctatctgacatatctacactttaatcaccacttcttctattttatatctatttgacaaaaactacaatctaacgcactctacatccttctataaccacgtctcttctgactcataacaacatcaatcatacctaaaccatttacatataactctcaccttctacttataaactaccgtccttcatatattaccatatttcaacaaatctatcattcccaacat

SEQ ID NO: 2922 - DNA, 420 bp, Gossypium hirsutum
  Clone ID: LIB3083-065-Q1-L1-F6
aaaaaaggtattccattaaagagacaaatcgggtatgagggttcaacattctacaaatgacacaagttctgatcgaactcaatataagtttcctaacagacgacaagaattaaaggcacaacgcagagccttttaaatcttcattatgatggtaaaattccaattatgctgtggctgggggaaaaacaaggtacaacacaactcttcatcaaaaacaaaaatcaataggtatgaatcaaactgacccggactccatctgtaatcgattgacatttatgctactgcgggcatgtccttgagccatggatccagtggcttaccaattgagtacactatgaaaccaatctccctcagctcatccgcgttcacgatgttccttccatcgaaaacaaaagccggcttttgcatgttgtcgtatat

SEQ ID NO: 2923 - DNA, 394 bp, Gossypium hirsutum
  Clone ID: LIB3083-065-Q1-L1-F7
ccctgtttgattttgatcatttccgccgggcggtttgaaggtttcttttattggttatgaggtgtaagtgagtactaatggaaagtaagcttcaacgccctcagtcttttcgtttaaaccgtagaggagaccgtaataatcaacgcccttttgctaaagatgatgaaagtggcttgttttcttcaatgaggttgccacaagataatccaatcaagattgtgtggaagcaggggtttattcgattggttcttgtagcaggcattctatggatgctacttattcttattgtattgctatttcatgtttggtcatgccaatcttcaatttctttcttgtcagctatgtgtaacaaagatggcatggtgttcatcgcaatggacttgcttggattggc

SEQ ID NO: 2924 - DNA, 420 bp, Gossypium hirsutum
  Clone ID: LIB3083-065-Q1-L1-F8
gttctatcaagccctgaggttattgaaactagagacgcggttttgcagaagctgcaaaagaataagaatgtacaggttgaaaacagtagtcctgatgcatctcaacagagtggcaattttagtgagacaaaacgagaaacttttgtatctgaggaaaaggtcagtgaaatcgtaaatgcggcagaaggattagagattacctccagcgaggacaacactgagcaatggttagaagaagcagaattttccagtggaagttccctgagcatcaagaaaaacctggaacatgaagaagatgtttcattcagtgatctggaagacgatgataccgatacttctaatagagcatcagtgcgtaagtcaacacagcatgacaaagctctttcatccagtggatccaatgactgggttcagctgaac

SEQ ID NO: 2925 - DNA, 288 bp, Gossypium hirsutum
  Clone ID: LIB3083-065-Q1-L1-F9
cttcgatccaaatataacaagtccgagctgatttcatcgggctgttcttcattctcacctcaatctggctgaaccagttctactacatctttggattcctgttcttggtattcattatcctccttatcacttgtgctgaaataaccattgtgctttgctacttccaattatgcagtgaagattatctgtggtagaggagatcatatcatacatccggctcctcacctctgtacctcttccgctacgctacattctatttcttcacaaagcttgagatcactaagcttg

SEQ ID NO: 2926 - DNA, 412 bp, Gossypium hirsutum
  Clone ID: LIB3083-065-Q1-L1-G1
cggcacgagcttctttggaatttgtaattttccgaaagctgaagtggccggaactgtggcctaacctcaggaatatataaaagggtgaagatgggaagaggaaagatagagataaagaggatcgagaacaccacgaatcgtcaggttacgttttgcaagcgcaggaatgggctgctgaagaaagcatacgagctgtcagtcctttgtgatgcagaagttgctcttatcgtcttctccacccgtggccgcctctacgagtactccaacaacaacataagatcaacaatagagaggtacaagaaggcatgttccggtacctcaaacacaaataccgtcacggaaatcaatgctcagtattatcaacaagaatcagccaagttgaggcagcagattcaaatgctacagaattcta

SEQ ID NO: 2927 - DNA, 391 bp, Gossypium hirsutum
  Clone ID: LIB3083-065-Q1-L1-G10
tatctatccatgcatcatagagtgtttctagaggcatctgcgtggtgacgagttcaaccactgtttagctttgttcctcaatgaaaagggaaacaaccgaaggcgaatttcatctttgaaacgccattgatcttaaatgtgtcgcaaaactccagaaaattcgtcaaatgagtatttggatcctcatcctgcaaaccatcaaactgaacaaactgttgtatcatttgaatcgtgttaagtttcagttcaaaattatttgcaataatagcaggtctaactatactcgattcggctcctgttaaagtaagtttagcataatcatacatagtacggggagcaagattatgattaattggatctgcagcaaccatattaggaagttgattattct

SEQ ID NO: 2928 - DNA, 339 bp, Gossypium hirsutum
  Clone ID: LIB3083-065-Q1-L1-G11
aagaggagaagaaacctgagaaaggcagagtacggtgagtgggttaaaatgcctgaatggccgaagtccatgtttactcagtctggctcgagcactaagccttaagccatatgacactggtgcatgtgccatcatcatgcagtaatttcatgggatatcataattatattgttaataaaaaagatggtgagtgggagatgtgtgtgtgcattcatccatgtagcattgctgaatctctttgatgcatagaagatcttaattgttataggttatgttatatcagttgttctagtgaaattaattttgaatggtgtatgtaatgtttaaaaaaaatatagt

SEQ ID NO: 2929 - DNA, 310 bp, Gossypium hirsutum
  Clone ID: LIB3083-065-Q1-L1-G12
gttggcccttgcgaacagcttgatgctcttgcggagtgagcccagatgggggaacctaggggagccgccgactccaactaccgtccatgtacgatccatactagatctgaccaaccgcccatcctacctcttctacgttcttgacagcccatctttgtctcagtagagtctttcagtggcatgtttcggtcctcttccccattacttagaaaaagtgagccaccggttcaggtacatgatactatcattaccggctggacaattatacacccaaaccgtattttcaacgacccaattgcaagagcggagc

SEQ ID NO: 2930 - DNA, 426 bp, Gossypium hirsutum
  Clone ID: LIB3083-065-Q1-L1-G2
tgggcattgagaatgtggtagatgagagcatcggcaaatggtctggaattcttcatagtgctatgtgccctgcttgctagatggcagttgtgtggatgcagaaccaactgattgagaatcatactcaagaccgcatattggactatgccaatcagctttgtgatcgggtgccaaacccaatgggagaatctactgtcgactgtggaagtctatcttccatgccaaccatttacttcactattggtggcaaagcttttgatcttacaccagacgagtacattctgaaggagggtgaccgtgctgaagctcaatgcatcagtggctttactgctttggatgtccctactactcgtggacctgtctggattttgggagatgccttcatgggtcgctaccacactgcgatcgattctggtaagcatagag

SEQ ID NO: 2931 - DNA, 421 bp, Gossypium hirsutum
  Clone ID: LIB3083-065-Q1-L1-G3
gctaagcaagcagcctttagtttgttgccaatgacatccagccaactgagtaatcacaagaatctctacctgttcttccgcctttacataaaaaaatcccagtaacagtttttcttggtctttaaagtttgacctcaaagtcctaacactaaagctgtataaaggagaagtttcaaatctcttaatggctcaagatacctcttctgttgctgaatcacctcgacggcgctctggtcttctgcgagaccaggtgcagttgattaaaagaaaagactgtgatcgctatgagatcgttccaatcgaagataaactgtccttcgagaaaggatttttcatcgtaattcgtgcatgccaattattggctcaaaagaatgatggattgattttagttggagtaagcggaccatctggagctggaaag

SEQ ID NO: 2932 - DNA, 390 bp, Gossypium hirsutum
  Clone ID: LIB3083-065-Q1-L1-G4
ggaagaccattcaatctgatggcattgctggtctttaccgggggttgaatatctcatgtgctggaattattgtttaccgtggactttactttggaatgtatgattatttgaatcctgttgatttggttggcggattgcaggatagttccttggcaaggttcttgctgggtcggggtatcacaataggcgctggactggcatcttatccaattgatacggttcgtataagaatgatgatgacttctggagatgcaatgaattacaagagctcgatggctgcattttctcaaatcatcaagaatgatggtgccaaatctctgttcaaggttgctggtgcaaacattctgcttgcagttgcaggcgctagtatgcttgctggctatgacaagc

SEQ ID NO: 2933 - DNA, 408 bp, Gossypium hirsutum
  Clone ID: LIB3083-065-Q1-L1-G5
ttgtcattctctgtagcatcaacaggtgagggaaaaaagagaaggatctgatgtacctgccggttgatcttaattatacacaagatcatgatggcccttgaaaataaagaaactatgcagaactgcgaggcaaccttaaaatgcctccagacgaaggggttcccgtacaacctgcgatgtactgggaactcaattgaaggccgtccagagcttaaagatgaaatttgtactcacccaggtggggatgttgtagaacctgtttgctctttaaatgggcagtttatggaataccacaaacctacccttcggcatgagtctggctcttggtcgaccttctatcctgacacccacaagttgcagccatacccaccaaatgcttttggggggcagttttaccactttcccatg

SEQ ID NO: 2934 - DNA, 418 bp, Gossypium hirsutum
  Clone ID: LIB3083-065-Q1-L1-G6
tttgagtttgagtaacattctcctcgatcttggaagtacgctcaaccgaggaatggtgatatttccatcattccactttgtttgcggattcaaggtcaatcctttcgattgattggccttattccctttcttaatagaatagagggaatggaagtctttccttgtccttccgagataggagttgagagcttcaggcagcaccacagccctaggcgcactagaataggtagcacaggtcacagcaagactgaaatcagaacggtgggacccgcctagcttgcgtaatagatggattttcccgactactagcatgattcatcctactttcttaaacacggcaaaggctttctggtcagatcagataaaggctcaaggatcgcttaatgaaaaaggcattctgccgggggaaagagatcaa

SEQ ID NO: 2935 - DNA, 410 bp, Gossypium hirsutum
  Clone ID: LIB3083-065-Q1-L1-G7
aacagcgatagatcgggggagttcccatcggggtcgtctgggaaccggcgattactactcgcctgtgctaattccgagaattcggatgatttgatacggcagctcgtatcggatctcgattcctgttcgattgacgagcaaaagcaagcggctttggagcttaggcttctggcgaagaacaagccggagaatcgaatcaagatcgctaaagctggcgcgattaggcctctgatttcgttaatttcatcctctgatccctatcttcaagaaaacggcgtgacagcgattttgaatctctctttatgcgatgagaacaaagaacttatagcctcctccggagcaattaagccactggttagagctttgagaacaggaacttcaacggctaaagaaaacgcagcttgtgcttt

SEQ ID NO: 2936 - DNA, 428 bp, Gossypium hirsutum
  Clone ID: LIB3083-065-Q1-L1-G8
ctagtgctcgaggttttattttttttgactaaaggggtttctctgaaactggtttttgcctaaaacttaattgcatttagggacattgtcaaagacttaacaagctatgcaaaaagaagaagttgaatcaaacaattagaaacatggcaagtgctaagtgctaacatatgaagttggcattaaacaacatataatggatagataaatatttaagaaatggttcaaacaaccgttaccattaattatgagcctcaatctcttatatgttcaacatcatttgttgagccatttgcttccccatgtatagcatcttcagttggtggatgaacctgctactattctggcaatggttcctccacataatcgctctcgaaagcatcagctggaacctcatagatcctaactggaggcttagattgatccttcac

SEQ ID NO: 2937 - DNA, 360 bp, Gossypium hirsutum
  Clone ID: LIB3083-065-Q1-L1-G9
tgaagattgattgatctgatattgcaacttgagggagattgagtttgtttcattacaaggatgttcagattacacataacagaggaaatcggcgaattaccatttggggttcagttttgaatctttgatcatagaaattgttaattatcttagccacctccatacaggttctatggtggttgttggctatgtatacttgttaattggttccattactattttgtttaagacccttgagagattgttgagaaatctcttctagaattgaaggatccatgtattcacacgcataatagtccttgcaattctgtgaagaatggaattcaaatttgtgtcctttatggattataaaagaaatta

SEQ ID NO: 2938 - DNA, 411 bp, Gossypium hirsutum
  Clone ID: LIB3083-065-Q1-L1-H1
tatatgttcaagattatgatgcaaaggattctaaaactcacgagggaatggacttgacaagggtgtcaactagggcactaattgcgaaatatgggcttgatgataacactgtggacttcattggtcatgcattggcacttcacagagatgaccgctacctggatgaacctgcattggatactgtaaaaaggatgaagctttatgcggagtctcttgcccgttttcaaggtggatctccatacatatatccactgtatggattaggcgagctgcctcaggcttttgcacggcttagtgctgtttatggtggaacatatatgttgaataaacccgagtgcaaggtggagtatgacgatgaaggcaaagtttgtggtgtcacatctgaaggtgaaactgccaagtgtaagaaag

SEQ ID NO: 2939 - DNA, 299 bp, Gossypium hirsutum
  Clone ID: LIB3083-065-Q1-L1-H10
cccacttggaaggcgaacaacaactacaacaacgaaagagggggtctctacttgtgaactacttctttccctttgcaacagcagaattaaccctttttcaagccatttgggggggtttttgttttgttttggtttgcattgccttgacttatcttttttgctcattccgatgctaaaggttaagggttttggtttttctttgcttctttgaatgctcatggaataagatcgaagtatgaatatcttaagattctgatattggatactaaaggctgaatattattttttgactcttcaaa

SEQ ID NO: 2940 - DNA, 166 bp, Gossypium hirsutum
  Clone ID: LIB3083-065-Q1-L1-H11
gtataacgatatgtataatgagataaagatgtagggttgcgtgaatgatgatgatgatgaggaagaggagaatgtgacatatacagatatgaagaatgacatggaggcaaaggagaatatgatttaatagatggattaagtataataagatgaatatgaagaaata

SEQ ID NO: 2941 - DNA, 159 bp, Gossypium hirsutum
  Clone ID: LIB3083-065-Q1-L1-H12
ggggtatgggtgttttttttataacagggaagattggatttttttaaaacttgtcatacagaatattgccttgatatgttctttgggcaaaagttccatttactttcatatcacttaaaatacctcttaccattggctgtttccaaattttatttttct

SEQ ID NO: 2942 - DNA, 423 bp, Gossypium hirsutum
  Clone ID: LIB3083-065-Q1-L1-H2
gagatcaaagatttcaatggtaaggaaaaggttaatcaattagcccctgcccttaagtcgagtttctttaagggtattgaattaaaacgctagatctaagcaatggcgacagattcatcaaatggggaacaaatgacaacctcaaagccaccacctttgacatctccattgagcttttctaagttttatcagtccaacatgaggatcctggttactggaggagctggttttattggttctcacttagttgacaaattgatggaaaatgagaaaaatgaggtgattgctgccgataattacttcaccggatccaaggacaatcttagaaagtggattggccatcctagatttgagcttattcgtcatgatgttactcagccgtgagtggttgaggttgatcagatttaccaccttgcgtgtcca

SEQ ID NO: 2943 - DNA, 276 bp, Gossypium hirsutum
  Clone ID: LIB3083-065-Q1-L1-H3
gattcgtgcggtatgttgttggagatggaacagtctgcagggattacgttgaagccatgacaaacaggagtgtatgaacaagaggaatgatctaaacgtataacaaagccgttgctgcattaagaggacatcttatagggcactattactcccagtagattatgcacaattagtacagccgaaatgtattatggcttcctgagaccgggaacacttgctgaaatgggtctatgccaagacccttcaggctaagtactggatcgacatgcccttata

SEQ ID NO: 2944 - DNA, 413 bp, Gossypium hirsutum
  Clone ID: LIB3083-065-Q1-L1-H4
tttctttcttccctcctttctttccccaaaatcggttccggccccccgtcccatagaaatcctaaaatttcacttgaaatttcttctcttttctttcccattttattgttcccaaaccatttctcccctaccccgattccctttattttttcccccaatttccccaaattggtaactccatgatgttctctctctgatatgtttgcttattggatgtattgctcggactttatattgttgtttgaaatatcttcactgaaattggtcaattgaaccccttatccatgcccgtcgatcccaacccctcctacgccttcagctccctccgtgatcgtagtatggacattctcagcgtcgtcgtcgctctcctcttcggcgtctgctgtggctctatcactgccgtcgccatttac

SEQ ID NO: 2945 - DNA, 418 bp, Gossypium hirsutum
  Clone ID: LIB3083-065-Q1-L1-H5
cctcaatctgctgtctctgctttccaaattagggttggaggagccggtacttcaaacaagactgtcaaacttcccaagaacttcactttacttggtccgggaccaggttacacttgtggtcctgcaaaggtcgtgccatcgaccacttttctcaccccagatcgccgacgaaaaactcaggccctaatgacatggaatgtgacctgcacttattcgcaatttctagctcggaaaaacccgaattgttgtgtctctttctcgtctttctacaatgaaaccatcactccttgcccaacttgtgcatgtggatgccagaacaagaacaactgtgtcaagagtgattccaagtttcttaaaatggtaggattgaacacaccaaggaaagataatgctccactgcttcaatgcacgcaccaca

SEQ ID NO: 2946 - DNA, 431 bp, Gossypium hirsutum
  Clone ID: LIB3083-065-Q1-L1-H6
tgagaccagagatgctggtgaagttgaagacaagcctgtcatgcgtgaaagcgtagaaaatcagactattctatctgtgggtaatcgttcggtgcagccaacttcttggaagagttgctgtggactttttgaagttctaaggcgctctgacagataaattcaagtttggggaaaaaaacttaagcagaatctcaagttcttggtggagtgctttattttaattttttttccagcattttctgcaaaaataatgggtgagaagataagtggagttggttggggaatgaaattagggttttcttcgttgggatgtgcgattgccatacgtggagtgtttgaatttgtatacagtaatatatgtgatgatactgtgatttcaatgtcatttcttgggttttgccttttagaatggtttaagattaacaacacac

SEQ ID NO: 2947 - DNA, 409 bp, Gossypium hirsutum
  Clone ID: LIB3083-065-Q1-L1-H7
tggactatgagcaggaactggagactgccaagagcagctgttctgttgagaagaactatgaattgcctgatggacaagtaattactatcggagctgagagattccgttgtccagaagtcctcttccagccatctctcattggaatggaagctgctggaatccatgaaactacctacaactctatcatgaagtgtgatgtggatatcaggaaggatctctacggtaacattgtgctcagtggtggttcaaccatgttccctggtattgcagaccgtatgagcaaggagatcactgctcttgccccaagcagcatgaagatcaaggttgttgcaccaccagagagaaagtacagtgtctggatcggaggatctatcttggcatcactcagcaccttccagcagatgtggat

SEQ ID NO: 2948 - DNA, 418 bp, Gossypium hirsutum
  Clone ID: LIB3083-065-Q1-L1-H8
gagagagagagagatataattgaaagaaaagagaaatggggctgctagagaaactttgggatgatgtagtggccggtcctcaaccggaacgtggccttggccggctgaggaagatcaccaccaccccacccttgtccaccaaagatgaggcttcatcaatggcgatgccgacgagtccgacgacacctgggacaccatcgacgccggtgtcggctcgtagggacaacgtgtggaggagcgtgttcaatccaggtagcaaccttgcaaccaaaggtattggcgctgaagttttcgacaagcctcaacttaactctcctactggttatgactggctttacagcggggagacccggagcaagcatcaccgttgattatgcggtggctgacggcggcggatggtagcaaaaccactagcaga

SEQ ID NO: 2949 - DNA, 416 bp, Gossypium hirsutum
  Clone ID: LIB3083-065-Q1-L1-H9
caatggtggcctaatggactatgccttccaattcattatcgacaatggtggcattgacactgaaaaggattatccttaccttggcttcaataaccaatgtgatccaacaaaaaaaaacgctaaggttgttagcattgatgggtacgaggatgttccaaataacgagaatgctttaaaaaaggccgtcgcacatcagcctgtgagtatcgccattgaagctggtggtagagctttccaactctatgaatcaggagtttttaatggtgaatgcgggttagctttagaccatggcgtggttgcgggcggatatggctccgatgattacggtcaagactactggattgtgaagaattcatggggcagcaattggggtgaaaatggatttataagaatggagcgtaatattaatgctaata

SEQ ID NO: 2950 - DNA, 354 bp, Gossypium hirsutum
  Clone ID: LIB3083-066-Q1-L1-A1
ctaaaatgcttattgatggtgctgtagagtatgaagatggcacccctgcaactgaagctcagatggggaaagatgtggtgacatttttgtcatgggcggcagaaccagaaatggaagaaaggaagctgatgggttttaaatggatatttgtattgtcattggctttgcttcaagctgcttactaccgacgcttgaggtggtcggttctcaaatctcgcaggctggtacttgatgttgtgaactagcctcctccccctcaagtttctcgctttttgtggatttgattcggcaataattgcttatcaagatgttctaggttctgccatgaccaaagtggtgaagtagtcttttttt

SEQ ID NO: 2951 - DNA, 375 bp, Gossypium hirsutum
  Clone ID: LIB3083-066-Q1-L1-A10
gttatcgtcagataaaaaacaaaccttacccgaagtggcgttattgtcgtggtgttcctgatcccaagattaggatttatgatgtgggaatgaaaaagaagggtgtggatgagttccctttctgtgttcacttggtctcttgggagaaggaaaatgtctctagtgaagctctggaagctgctcgtattgcttgcaacaagtatatggctaagtatgctggaaaggatgccttccacttgcgagtccgtgttcacccattccatgtcttgcgtatcaacaaaatgctttcatgtgctggagctgataggctccaaactggtatgcgaggtgcttttggcaagcctcaaggaacatgtgctagagtagccattggtc

SEQ ID NO: 2952 - DNA, 335 bp, Gossypium hirsutum
  Clone ID: LIB3083-066-Q1-L1-A11
gtccttcaaaacatacaaacaaagggttgttttcttgggggcaagagaaaggaaatctttttggacacccaagtgtggttgaaggcttaaacatcagctgaagaactgataatttttctgttccaagctttgcttttgtactgtatttcctcaaaatttctagcgatgactccaattgggtttctgggtttactgtttttgctgctcgctctatactgtgggatagacccttttaagcacagtgcaatctctgaatttcctgactttgagtcttacaaggtggatttgcctccatgggaactggttccgacagacagggacaaggataatttgct

SEQ ID NO: 2953 - DNA, 347 bp, Gossypium hirsutum
  Clone ID: LIB3083-066-Q1-L1-A12
accttccaaacaagctaatcatgcaaaccagtgtgggctgtcaacaaaaacacattccacagacaaaatcgatgagacttctcaacacccgaaatgaaagaactacgtaaattttctttttatcctagtttcagacttgaaaatgcatgtttcagttcaatcgtgaatgtctacagagggtaaaacaaactcaaagagtatatatccccgaggtttcaggcaatatatccccgaggtttcaggcaatctacaactcatctttgcctgcactttcttttgtctccgactctatctcggtttcttctacatcatcatcgtcttcaattgttgaatcaggactgatatta

SEQ ID NO: 2954 - DNA, 284 bp, Gossypium hirsutum
  Clone ID: LIB3083-066-Q1-L1-A2
aaatataaagatgactccgttgatagcataaaaaggcattagacaaatcttacaacatgaaaaacagaacaatagcttgtaaggctattcatgttcttatggagcatcataagtaaaagacaagcatttctaacaacaaaaaaatgacaagcaaacatgactaaatttattccataggcataatttgagaaacctcacacgaataagaaagaacaggataccctcacagggtgaacccatcatcttcaaaataaatgatattgcgatagtagaatcaatattct

SEQ ID NO: 2955 - DNA, 397 bp, Gossypium hirsutum
  Clone ID: LIB3083-066-Q1-L1-A3
ttctgcctttgctttttgcttcttactctcaaccaaaaatgactgctcagggcggcaaagagatcgaagagatcctggcagctcatctcgaccaacaaaaaatcgattccgagataccagagcaacctgttgttgaagatgacgacgaggaagatgacgatgacgatgatgatgaagatgatgccgaaggtcatcatgagggagaaggagatggaactggtaggtcaaagcaaagccgaagtgaaaagaagagtcgcaaagctatgttgaagcttgggatgaaaccgatcccttgtgttagccgggtcactgtgaagaaaagcaagaatattttatttgtcatcttaaaaccagacgtgttcaagagcccaacatcagatacttatgtaatatttgg

SEQ ID NO: 2956 - DNA, 383 bp, Gossypium hirsutum
  Clone ID: LIB3083-066-Q1-L1-A4
caagcatgctgcacaggatgcacgtgacaccctggacgagcgctctgtcaatggtgtctctgaagtgaatggctttgatggcacaagcaacgagcatgccttttctggagatggtaacttaactggagagaaaacaattgctatgcccccaggtgataaggtgaaatctgcaaccgcgcaaattataagtccagaattagctgctgcaatttctcatattcataacttcgtactgtccctcagaaaagaagcaagggctgttgatgacatatcttttgatggcaatggattaagccacaaaattgatgagttctttgtcacccgcaataaggtcttaagcagcaatgcaagtttggatgatttaatttttgatctttctactg

SEQ ID NO: 2957 - DNA, 431 bp, Gossypium hirsutum
  Clone ID: LIB3083-066-Q1-L1-A5
aaaaagggctgctcttggactttaatggtggaggagctggggaatctcaagcatgggagtgagtatatagacttattctcttttaataatattccttctttaatctacttattgtgtttgaggccatgagttcaaagaaatcaattcagaatctgggggaaaccattcattcactgctgggatttaagtcacatctaacttcaacttgggtgaagtcagtttgtgagatagtaaagaaattaccaagtgggaacgaaaaggatgatgaatcagctgcaaaagaaatttccaagataaaagaagaaatggctgccttaacccactgcataaaccaatcgaacatacagaggaggcagttgttgcatgatttgttggacttgaaagggaacatccgtgtattttgccgagtgcgaccattcacgttggaggaa

SEQ ID NO: 2958 - DNA, 418 bp, Gossypium hirsutum
  unsure (1)..(418): unsure at all n locations; Clone ID: LIB3083-066-Q1-L1-A6
cggaggagcaattaccggcttcaactacagcgccaaatagtggaggaggatggggtggttggggtttctctgctttctccgttctctcagatcttcaaaaggctgccactgttgcagctgaggagatctctcgcaatgcttctgtggttgcagagaaggctgcaaagagcattgcagatatgcaaattgctgaagagtcagaatcttctaaggcagatgaagcagaagaatctccaagtgaaaaggaaagtgaggatgaggatgacaagctacgaaagtctgctctggataagttagagaaagcaagtggcgattctttccttggtcagggtttgaaggtttttgacaactctgtggaaaattttgcttctggtgcatggcaagcactanggagtgcatggaaagggggtaccaattt

SEQ ID NO: 2959 - DNA, 290 bp, Gossypium hirsutum
  Clone ID: LIB3083-066-Q1-L1-A7
aaccagcattgcatgaggagctggaaaacaaatgccaatctttttgttatttgattgtatacaagaaacttcacaaaattttacagaatcttggactggggacgaaaatgaaattaaaaaatttatgaatataatatgaaatacgatctatctcctatatcgaaaccttaaagaacacgaaagggaactcaaaaaagaacagaaaaacagacaacggagtaagcaaaatgatgtcaatggcatagagttcatgaggtcatagcttatttgtaggctcccatgccgacacc

SEQ ID NO: 2960 - DNA, 314 bp, Gossypium hirsutum
  Clone ID: LIB3083-066-Q1-L1-A8
tcttaatgacattcatattgatatcatggattatatgggggctgccgtttgtaccgatgctgcattcaaaactatgtgggcagaatttgagtgggaaaacaaggttgctgttaacactgtaatccaagatgagaaggaattccttaatcatattatcaagtcaaccaatatgaagtgtctcacaccagtatctgcgctagatgatgagtgcggattcctggcagctaacctttacgcgaaaagtgtgtttggggaggatgccttggtaaatttgagcgttgaaaaacaagcagatgggaaacttagtgggtaca

SEQ ID NO: 2961 - DNA, 335 bp, Gossypium hirsutum
  unsure (1)..(335): unsure at all n locations; Clone ID: LIB3083-066-Q1-L1-A9
ctcgtgccgcaaatctaagatttctatgttttgcagagggctagggtttttgtatctcataatttgaccacataaatactcaaacccccacactcaattctcccctcttttcagctttgcttcaaatttcgatctcatttcccctaaattccgtcttttttcttcaaattccccacaaatggccgtcactttctcagatctccacaccgaatctggccttaaatcccttaacgacttcctcaccggcaaatcttacatctctggggataagctgactaaggatgacatanaagtttatgctgctgttttgaaaaatcctggtgattcatttccca

SEQ ID NO: 2962 - DNA, 348 bp, Gossypium hirsutum
  Clone ID: LIB3083-066-Q1-L1-B1
gcaacccttaaagttccagctcatgtacctgccccttctgaggatgctgagcaacttcgtaaagcttttgaaggatggggtacaaatgagcaattgattatcgacattttggctcacaggaatgcagctcagcgcaatttgattcgtaaaacttatcgtgaagcttatggggaagatctccttaagtctttggatgaggaactttcaagtgactttgagcgagctgtggtgctgtttactttggaccctgcagagcgtgatgcatttctggctcatgaagctacaaagaggttcacatcaagccattgggttctcatggaaattgcttgcactaggtcttcacatgaa

SEQ ID NO: 2963 - DNA, 418 bp, Gossypium hirsutum
  Clone ID: LIB3083-066-Q1-L1-B10
gaaacttggtgtgaaacaatggcgtcctcggatcttatgggcaagcttgagactgatgtcgagatcgatatttctcccgaaaagttccaccatatgtggtgccacaggccgcaccatgtccaccacactagctccgaaaaagtacaaggatgcgatttacatgaaggtgaatttggaactcccggcgtcgttatctgctggagatatgtgcatgatggaaaggctaaaactgcaaagcaggtagttgaagttatggaccatgagaaaaagtcaataactttcaaaatgcttgaaggagatctgatggaggaatacaaaagcttcgtgattacaatccaaacttcccccaagagcgacggtaaaagcagtatagtgcactgggactctgattatgaaagctgcacgagggtattggaca

SEQ ID NO: 2964 - DNA, 380 bp, Gossypium hirsutum
  Clone ID: LIB3083-066-Q1-L1-B11
aaaaagataatcgggggctgcaaatagcaagacactaatttcatagaacaaacagagagcaatttacacaatataaatggacttaagcaggtttggccaacagcagacaacttcagaaacaaaataagccatccttgaacaacataaattaggacatacaatgctgcaaacaacctcagcaacctttgcaaacctaccgaagctgctggatatcggagaagacaaaagacgacatcatcatcactcataatgtagaagtttccagtttccatgcctttgatcatcaaataattcagtctcagtcgtccttatttatgcaaaatgaggtcgagaactttatatactagtgtccacttaaaaccattgccatacttaatgct

SEQ ID NO: 2965 - DNA, 436 bp, Gossypium hirsutum
  Clone ID: LIB3083-066-Q1-L1-B12
atttgactgccatttcgtattagaaagaataaacaaaggggttctattttgggtgtgaaccaaaatgcaaagaagatcgattttcttcgcctcttgaaacaaaaagaaaatcatagttacatggcagaaaatttccagcaaaataagtttatatcctcccatgtagctaaattgctgaacagctaaacatcagaaagatccagtactgcaactcatgaagttactcaaaattcaaaccaagtaatccatacaaaagccaaatctcatcagtcagcttaggatatcagagagaaaacaacatttttattcaaaggggaaaccatacaggctaataaaacccagatttctagctatatgactgcactctagaccctccaaacaaagtcaatctgaacccgcatctaattcaaatttgatggctcatattaaccatagt

SEQ ID NO: 2966 - DNA, 399 bp, Gossypium hirsutum
  Clone ID: LIB3083-066-Q1-L1-B2
gccaagtgctttgctgtcttctagtagtgccgaaaatatgcgacagtgcatctcttacagggttatcacaaaagtcttctggttttagaaatccaagtgctgatcatgttaaccactcagcacatgattctgttgaccacaaggtagatacagtcaaagagaataaggctgaaatgccctactctggtggtcacctgcagaaaggtgaagatattacccaaaatgacatttcaactgttcctggtcctcatacagtgttcaaacatccaacccatctggtaacaccatcagagatactgtctaccatggcttcatcgacagagaatgctcagattagtcaagttattaatgacagggaggcaaccgttgaagatgttgtcgagaatgatgcttaaagcg

SEQ ID NO: 2967 - DNA, 372 bp, Gossypium hirsutum
  Clone ID: LIB3083-066-Q1-L1-B3
aagaaggagatacagtgaaaggcttttgttcttcacatgtgagcacttcatggggtcctgcctcttctctcccaactcccattaggtcaaggtaagaaaggtaatgagagatgatgttgttcatggtgtcaacatcacctcgcccacaaacttgatctccatagagcacattcatggtggctccaaaccccgggacccgcttggccaacgtgtcgttcttggtcggtttccagctgccgacaaacacgtcgtgggccgacggttggtgtttcttcaccggtgtcatccatctccagagtgctgcctggaaagctaaggttgcattgttttctatgtattcagggtggttcaataagtccaccttcaatgcgt

SEQ ID NO: 2968 - DNA, 342 bp, Gossypium hirsutum
  Clone ID: LIB3083-066-Q1-L1-B4
gccgctttctctggtgaaaccacagaagtttctcgtgaggcgcatgattaagatatcaacaatgcccatatgtcaagtggggagaatgcggctcctcattatgatgatcatcttaccccatcataaagaccatacattgagcatagggagcaactcgacgttcataggttggctaagcaagctaataaatctcatcgtgatagaatccaggatttcaaccaatatctggcaaacatgagtgagcattatgacattccgaaagttggtcccggttaattcaggcaacaccaaagttatctttttattggttttggaaggaacttctttgtgttatgtaccaaa

SEQ ID NO: 2969 - DNA, 400 bp, Gossypium hirsutum
  Clone ID: LIB3083-066-Q1-L1-B5
aaaaccagaaaaatggcgaaaccccaacttttatttctaggggccttttcccttctctgtctcatttctttttccgccgccgattcctccatcacagccgacttacgtctcaccgattccagtttcccgtcggttcatgcgaagaagctgattagggagttgaatttgtttcctaaaggggaagtcaatgtcgttgacgaacaccgggtttcgttgccggagggtcccaaactggtggagaagcggttcaagttcccaactttggaagtgcccggtggagtttcctttgaggatttgggtcaccatgctgggtattacaagcttcctaattctcatgatgccagaatgttctacttcttcttcgaatcacgcaaatagcaaaagggacccctgtgtaatc

SEQ ID NO: 2970 - DNA, 356 bp, Gossypium hirsutum
  Clone ID: LIB3083-066-Q1-L1-B6
gttacaatgtactcacagggtgattcaaaatttgtatgataaagttaaaaaagaaagaggaagaaaaaaagagcataactctctcaaacctttagcatttcaaagcaaaggaaactatatataattagaaaataaaaaaaaagatcatcacaagaaattaaccgcaaggctcaataaataaaattttagcttcattgttgtttttgccaattaattaattaccataatacttatcatcatattaaagccagtgcttgttttgtttgatgttcttcacaaatcacacatcaaatgtagaaatactgtacgacaggtgatcagggttcgaactcttcctcgctttcctcgaactcctc

SEQ ID NO: 2971 - DNA, 381 bp, Gossypium hirsutum
  Clone ID: LIB3083-066-Q1-L1-B7
ctgaaagttcctcagccctctgagctccggcccttggggggtttgctccgttcatcgggcctccgtgcccaccctcacacgccgtcaccgactccgccatacatgacggtcggtatctgaaaaacttcgtttttcttagccaatctaaaagctatatttctttcctctattttgatgtattatatgcaaactgtttgtaataaaataatgaaatagaagtagaaacgacagatcacctttgcttctctcgaaaaccttctgatatattattcaagaatattcagtgtacaatatcttttggggtgtatttatctcttttgggtattctctctgtttctatctatgaatgcttttctttctggctctctgctaatggccccc

SEQ ID NO: 2972 - DNA, 406 bp, Gossypium hirsutum
  Clone ID: LIB3083-066-Q1-L1-B8
agggaatcctctcttctctagaaaccaccgtcgagccgttgctctaatcacccgaaccactgccaatcgcctccctcacctcctctccctacagcgtgccctcgctattcacaccaccgtcccttctctctcctcttctgccaccccaaccacatacgcccggccttctccgccgtccacctccggcactccctccagtctctctaagcctgctgagtacgtgatctccaaggtcgatgacctcttgaactgggcccgtcgtgggtccatctggcccatgactttccgcctcccttgctgcgccgtcgaaatgatgcacacccgtgcttctcgctccactttcaacgctttgtgtcattttaagcctacccctccccaatccaatgcatgattgttgctggcactc

SEQ ID NO: 2973 - DNA, 339 bp, Gossypium hirsutum
  Clone ID: LIB3083-066-Q1-L1-B9
ctggcttccctcttcgcttcccgttcttattctatcgtggctgttcgcagattcctcagagctccgattacgatggctgctgttaccggatccaatgtcgtcgctctaaaacccgccgcgaggtttgctgatcctactgaccgaaaatttgttcagattcggcaatggtctccgatttccggcggattcggatcggttcaggcgtggccctctatcggtctccagtgccaatcgaaacgatcgtttgcctcctccggtgtaaaagctcaggttgccactgttgaacaagccagtatttgagcagctcaaaacgtagaagctcccgtagccatagttact

SEQ ID NO: 2974 - DNA, 418 bp, Gossypium hirsutum
  Clone ID: LIB3083-066-Q1-L1-C1
ggagacctaattagcctttcagaacaagaacttgtagattgtgataccagcaactatgggtgtgaaggaggatacatggactatgctttcgaatgggttataaacaatggcgggatcgatagcgaaagcgactacccctacactggtgtggatggcacatgtaacaccaccaaggaggaaaccaaggttgtatctattgatggctatcaagatgtagagcaatcagatagtgctcttttatgtgccgttgctcagcaacctgttagtgtgggaattgatggttccgccattgattttcaactttacactggtggaatttatgatgggagctgctcggatgatccagatgacattgatcatgcttgtttaatagttggttatggttcagaagacagtgaagagtattggatagtgaaaa

SEQ ID NO: 2975 - DNA, 302 bp, Gossypium hirsutum
  Clone ID: LIB3083-066-Q1-L1-C10
gggggcgtctagatggatcccccgcgaggaattcggcgagtttttttttttttaaacctctacatgggaaggattcgcctgaattccaatacatgataaacttatccggaattaaaaaaaaaaaattgtttatcggctcccatgaccaacaaatgctcagttaccttataactgataaaaaatgcttgaagaaacaaagattaaaaaaggtaattaactgaggtgaattgatcgggagtttaacttaacaaagaccaactaactaaatttaatgtacccaaaggatgtaaattacatactac

SEQ ID NO: 2976 - DNA, 194 bp, Gossypium hirsutum
  Clone ID: LIB3083-066-Q1-L1-C12
gggaaaggaagatatatcgagcccgagcgcaccagagcgtgagccagcgcccttgttttactctcgttaagtataatctgatcattattgatatatgcgacatggagagatacatttttatgctacatgtgatccagaagaataactatttgctgtccccagagcgtcaacctttctcagcgactatgcatcac

SEQ ID NO: 2977 - DNA, 413 bp, Gossypium hirsutum
  Clone ID: LIB3083-066-Q1-L1-C2
cagctactcaataggaccgaaagcacccaaaatcaaacgcgtggaccatcatcattttggcccaagtatgagttcacacgacaaacagattattgcaaagtctggactctaattcttcacctatccttcttctctgttgcctctcctttcgctgtccactagtccttccatcgcctacgggacctcttctatccagtattcgaggttttcatgtcgacgtccttccatcgccatcccatgagctgccttattagcttcccttggcatatacctaaaactcacacttctgaagataagggctcttcctttaatttctttaaccaaactacttatttcagatttatcttcttctacagtgtttaacttgtgtataactgttaacgaatctccttcgatacaaatatcttggaagc

SEQ ID NO: 2978 - DNA, 261 bp, Gossypium hirsutum
  Clone ID: LIB3083-066-Q1-L1-C3
cggcacgagtggtgacaacgataatgatcataacatgggcgtgtgaagttactcttagcatttttttgttaggtattaacttgtattttgtaggatctgcctgaatccaaatttggctgacacctcatcaaagaaaaaattgtggaaggaaccacactataaattgttcatatgttggtttcaaaaatgattttggttgtatgtagtgtttcaccacaagctctgaaggatttgatgaaataggatgtttagcattttttt

SEQ ID NO: 2979 - DNA, 397 bp, Gossypium hirsutum
  unsure (1)..(397): unsure at all n locations; Clone ID: LIB3083-066-Q1-L1-C4
caaaaggtcatttaagtatgcatgggtgcttgacaagcggagggccgaacgtgaacgtggtattaccatcgatattgccctctggaagtttgaaactaccaaatactactgcactgtcattgatgcccctggacaccgtgacttcatcaagaacatgattactggtacctcacaggctgactgtgctgttctcattatcgactcgaccactggtggtttcgaagctggtatctcaaaggatggtcagacacgtgagcatgctttgcttgcgtttacccttggtgtcaagcagatgatttgctgctgcaacaagatggatgcaacaactccaaaatactccaaggcaaggtatgatgaanatgtgaaggaagtcttctcatatcttaagaaagttggt

SEQ ID NO: 2980 - DNA, 427 bp, Gossypium hirsutum
  unsure (1)..(427): unsure at all n locations; Clone ID: LIB3083-066-Q1-L1-C5
tgcattctcgcggttttcttcatcgagacataaagcccnagaactttttgatgggtctagggcgcaaagcaaatcaggtatacataattgattatggtcttgcaaaaaagtatagggatcttcaaacacacaagcacataccatacagggaaaataagaatcttacaggaacagctcgatatgcaagtgttaacactcaccttggagttgagcaaagcaggagggatgatcttgaatctcttggttatgtgcttatgtacttcctcagggggagccttccatggcagggattgaaagctggcaccaaaaagcagaagtatgacaaaattagtgaaaagaagatgcttactcccatagaggtcctttgcaaatcatatccttctgagttcacatcatacttccattattgtcgatcactacgatttga

SEQ ID NO: 2981 - DNA, 420 bp, Gossypium hirsutum
  Clone ID: LIB3083-066-Q1-L1-C6
accgatccaatagcagctccagctctcctagtgacgagggagaaggtgaaggtgaaggcggagagaagaagaagaagaaaaaggagaagaagggaaagaaagaagaggacagtgcagtcccagtggagaagtgcgatgaggcggcaacagttcaccactcagagacgccggaaaagaagggtttcatggagaagatcaaagacaaactcccaggacagcataagaaagatgaagaggtcaccaccccaccaccagctgctgctgccccaactgagaacgaccaccatgagggagagacaaaagagaagaagggatttttggagaaaatcaaggagaaaattcctggttaccactccaaaacagaggacgagaaggaaaaagagaccactgctccccattaatgaatcaatataatgcatt

SEQ ID NO: 2982 - DNA, 424 bp, Gossypium hirsutum
  Clone ID: LIB3083-066-Q1-L1-C7
agaggagctacaagatctgttagcagcccaagaagccgggactgcattcatactagggcactcacatgttcgagcaaagcaaggatcatctgtttttaagagattggccattaactttgggtacaatttcttgagaaggaattgccgaggaccagatgtggcacttaaggtgccaccagtatctttgctagaggttggcatggtttatgtggtgtaagcctctgatgtaagtagttttggtagttttgcgtgttgcatatggccgacctgtaaagaaatatatataactggtccaagagaggttcacctgctttcgtcacggtccgcacacggctaaagttcctacatccgatgtaatagagaaatgaaattagttttatcacgaaattctcaaattgcacgtcggactcttttaacaagatgc

SEQ ID NO: 2983 - DNA, 252 bp, Gossypium hirsutum
  Clone ID: LIB3083-066-Q1-L1-C8
ccaaaatcttcttttttttttaactcttaatcaaaccgggactatattaatactcccccctttacatatacaacccatccctttatcacattacaataaaaaaattaaattaaacaccccaactatatttgtccaatttattaccaaactccatattcaattctcaaattaccgatcacttccattattaactaccatcatacttaaccctctaaaaccctcaactgcctttactatcaacactacaacatc

SEQ ID NO: 2984 - DNA, 409 bp, Gossypium hirsutum
  unsure (1)..(409): unsure at all n locations; Clone ID: LIB3083-066-Q1-L1-C9
cggcagcctgccagccagccagccagcgagggagcgggcgagcgagcgagcgctagagggtctgcaaattttagggttttggattgggaaggtcaggtcagtgagcgccaaaaagaggagaaaattttcttatacgttctgttaataactaccacaattgatcttctgttttgagaattgaaatttctttttacaaaaaaaaagtggtgaatttgatttcggttttggtgatgattatgtgtgagaaagagcgtgtgcttgttgtatgcaagaagagaaagagccagagacagagtgtgagagatttttttaagagaggatttgggagatcttttgttttgagtgaattanggatttcaacgcttttcatttcttaacttattttaatctgtttactcaatggaacgga

SEQ ID NO: 2985 - DNA, 376 bp, Gossypium hirsutum
  Clone ID: LIB3083-066-Q1-L1-D1
tcgagttttttaaaactttttttttttttttttactttaaaaaaaaaaacaggcggtttattcctacccctccttcgttttgtacattctgtatcaacaaatttcaaggcaacttagtttaattgctgccacaaaactctgtagtatgtataaaccacacatgctcaaacaggggagaagaaatgaagataatataaataaacacttttttaagaggggggaagtgttcgggcttaatgcatgtctctctgaaaaatatccacagaatgtcttttcgacaagttccataatggccatggatgccatcttacataggaaccaaacatacaccaaccatagctcattaatcctcatttccgaagcctgatgtgagggt

SEQ ID NO: 2986 - DNA, 446 bp, Gossypium hirsutum
  Clone ID: LIB3083-066-Q1-L1-D10
tttgtgctctggccgatgttgttagcatgcgctttatagatgggaatgaagggtcaactggtctaatgggaattgactactctacagctttctggctttacaaagagacgggctatagggcttatcgagttgattacatagaagatctcacaaatccatttgtgtccatgtattttggagcggcgtatttagcttggttatcagagtatgaagggagggaaaggagtctgcaattcatctttcatgcttatatttctggaccaaaaaatgtacatctcgaagaaacgtgtccgaagtggctaaagtttgagcaaattttggcccgttatgaacgcacaaaaagccgtgaagggagctgcaacatcatttaacctgatagatatcagtggttcaccatcttttagatagttctcccatgaagttgtgcttgatgcacacaatggaaa

SEQ ID NO: 2987 - DNA, 397 bp, Gossypium hirsutum
  Clone ID: LIB3083-066-Q1-L1-D11
aggatatgcccttccacatgccatcctccgtcttgagcgggcaggtcgtgatctaaccgatgccttgatgaagattcttaccgagagaggttacatgttcaccaccactgctgaacgggaaattgtccgtgacatgaaggagaagcttgcttatgttgccctggactatgagcaggaactggagactgcgaagagcagctcatctgttgagaagaactatgagttgcctgacggacaagtcattactattggagctgagagattccgttgcccggaagtcctcttccagccatctttcatcgggatggaagctgctggaatccatgaaactacctacaactctatcatgaagtgtgatgtggatatcaggaaggatctctacggtaacattgtgctc

SEQ ID NO: 2988 - DNA, 376 bp, Gossypium hirsutum
  Clone ID: LIB3083-066-Q1-L1-D12
ctggggggattcatcctgatcctgattcaccaaataccagaaacatgagttttagtctaaagcaatctgctttagctgcatgcaatgatgtttcaaattcagttcttcagcgaagatcactttcttgcagatcttcaattttacctcctttggttttccaaaacaattcgaaaagaacaaatctttcactgtcaaagcctttgcatgtttccgctgttgagattattgggaaggataaagaacccgtgatcaagtgcagggcttatgaagctgataagtcccagcctattgaggctgcagctgaggaagtgaaatcagaagctgcaaaaaggggtgaaaattgggatttattttgcaacttggtgggctttaaatg

SEQ ID NO: 2989 - DNA, 307 bp, Gossypium hirsutum
  Clone ID: LIB3083-066-Q1-L1-D2
cggaccctccgcgaccgtggaccgtacccggctgaccaggggcttaatgatctcgaccgcagctatcgatctgtggtgtatgatagcaaagctggaagtgtattcgctgcactgggtgcagatgaacgggttaaactctatcggggtgtaacatctgatggatcatctgctgattcaaataactagacgcttataaaagaaagctgcgctaaatcatttgcaccattcccacctgggtgtatgctacacagacagcaaggattgacgacacttgagcattccccgagcagaacgaaggcgatgccaa

SEQ ID NO: 2990 - DNA, 388 bp, Gossypium hirsutum
  Clone ID: LIB3083-066-Q1-L1-D3
ccaaattcataatccccaaagtccaaattttaaaccttgggttttttctttttcttttaataaaattaacagccaaccaagcttggccaaagattagattttttttctttttacccactacgaaaaaaatagcacacagctaccaccttccctgcctttctcccaaaatttatattaattttcttttaatttttacttttttctggatatcaattttcccattttctcctgcttcatcttcttgttattgtgaattttctgttcttttttttctctcttttttaattttataaatgaaattcaaaatgggtttttcttcatcatcatcatcatcatcttcctctcttcttctggtctttctggataacagtcttttgttcaatacgct

SEQ ID NO: 2991 - DNA, 406 bp, Gossypium hirsutum
  Clone ID: LIB3083-066-Q1-L1-D4
atcagaggcaaagattggaggattcagaccaatatttacgggaatggaagcaccagtgttggcagagaagaaagatacaatctttggttcgaccctgctgatgatttccatcagtacactattctctggactgattctcaaatcatattttatatagacaacatccccattagagagtttaaaagaacagctgcaatgggtggggactttccctctaagccgatgtcgttgtatgctacaatatgggatgggtctgattgggctactaatggtggcaaatatagagtcaattacaaatacgctccttacgtagcagaattttccgacctgatcctccacggctgcgcagtggatcccattgaattttcgtcgaagaagtgtgataccacctctcaaaagttggaac

SEQ ID NO: 2992 - DNA, 409 bp, Gossypium hirsutum
  Clone ID: LIB3083-066-Q1-L1-D5
cggcacgaggttgaatcctactggccaagcttgttcggtgaagctttttgagaagtgcaacattgaggatctcataaccaatgttggagctggtggtggtggtgccccagtagctgcagctgcacctgttgctgctggcggaggagccggtgctgctgctccacctcctgctgaggaaaagaaggaagaaccggaggaagagagtgatgacgatatgggattcagtttgtttgattaggtgtgttttggtcaattactagttatatcacatgaaggtagtaacgcttttagagttgtattgctattggtatttgcatgttgattagaaatattacgtttttgttgaatgaaagttgacactaagtagctctttctttgtgatctgtttttttgaatcttcctatatata

SEQ ID NO: 2993 - DNA, 435 bp, Gossypium hirsutum
  Clone ID: LIB3083-066-Q1-L1-D6
gagagattaccaccaaagccaacgtagactatgagaagagtgttcgtgatacatgccgctccattggatttgtttctgatgatgttggtcttgatgctgacaattgcaaggtcttggttaacattgagcagcagagccctgatattgcccaaggtgtccacggacactttacaaagcgtccagaagagattggagccggtgaccagggtcatatgtttggttatgccactgatgaaacccctgaattcatgcctcttagccatgtccttgcaactaagctcggtgcacgtcttactgatgttaggaagaatggcacctgcccctggctaaggcctgatggtaaaacccaggtcactgttgagtactacaatgacaatggtgccatggttccagttcgtgtgcacactgtcctcatctccacccaacatgatgaga

SEQ ID NO: 2994 - DNA, 374 bp, Gossypium hirsutum
  Clone ID: LIB3083-066-Q1-L1-D7
gaaaaaagaggcagaaatttagagaagttgattcagacgcaaagggtgatggaactgagcattcataaaatagaagccttgattaggctaagtacgatagtgatgttggttttaacagcttgtttaattgggttggattctcaaacaaaggtcatcttctacgttcaaaagaaagcttctttcaaggatttgcgtgctcttgttggattgctgtatatcacttcattggctgctgcttataatctacttcaactatgctgttcttcattctcagcttcttacaaaggaacctcgctgcaatcttacgcatatctggcttggcttcgttatattttggatcaagcaatagtgtacgcagtgtttgcgggaaacct

SEQ ID NO: 2995 - DNA, 90 bp, Gossypium hirsutum
  Clone ID: LIB3083-066-Q1-L1-D8
ccacaatccaccttttattctaaatcttaaacaatgcgcgaatttaataactttaacagaaacccatattcaaccactgcctatatcaaa

SEQ ID NO: 2996 - DNA, 316 bp, Gossypium hirsutum
  Clone ID: LIB3083-066-Q1-L1-D9
gagtaaaaatttctagggtgtttattattcatttgatcaatatcaagatacaacaagtaggaaagctagtaggtcctaaagctttctccttgggcaaaaaacccatctgtttttcttgtacttgaaataaaaataccaattgtacttactatatgcaaattcttgtacaaacatccttaccaccctccaatcccaaatcaataccccaatcagaaagcaagaaggaccaataatccagagaccaaagccagtaaccccacctcaaatttgcggcttgcagcaccgaaatttttgtcaatagggtacaggttccccg

SEQ ID NO: 2997 - DNA, 418 bp, Gossypium hirsutum
  unsure (1)..(418): unsure at all n locations; Clone ID: LIB3083-066-Q1-L1-E1
gaaacatggtgcaaaaactagaagctatcaagggcggtggaggatcaattaaggtgggactggggagtaagggaacaatcagttcccttatgacacgggaactggactccgttaaaccggtacctaaaacaccggtgtctttcagacacaaatctcagacaattcctacatcagttgcctgtggttctcctaaaagattacagctagggaaatcttcgtatggagcaagcaccagtggcaatgacaacaattacataagttataaacaccaccaaacttcccagaagacaaaaagcttgtccaaaagtacccatcagattccaatgctttggttttgagaatatagctntagatagaactcctagcagacagaaaagtgacaaaaaagtatctaacattgttgaaattgtggacataa

SEQ ID NO: 2998 - DNA, 360 bp, Gossypium hirsutum
  Clone ID: LIB3083-066-Q1-L1-E10
ccagtttgaggacctttttgcgaagcgtaacacgcgtgtggctcatgcggttgggttctgggattaccattctttcattacggctgctgctcagtatcaacctcatggatttggtaccactggggaaaagctccagaatatgaaggaagtccctgcttttcttggacatgtcggcagcaaaactttatgtggctacggagtcgctaccgggggaccattggcttggggtctttgctacaacaaagaaatgagccctagcataatatattgcgatgattactacaaatacacctatccttgcacaccaggagtctcatatcatggccgaggtgccttgcctatctactggaactacaacta

SEQ ID NO: 2999 - DNA, 397 bp, Gossypium hirsutum
  unsure (1)..(397): unsure at all n locations; Clone ID: LIB3083-066-Q1-L1-E11
gaaaataatggtgggaaagaagagttatttggcaatgaggagtgagcgagaagcaactgatctcatcgcatctgacttccaagatctaatctttgctactaagaagcttgctaaccatgctatcaaattgggttcttggggatttgggaccacccttcttgaatggatcgcttccttcgctgcaatttatctattgatattggaccgtacaaactggaaaaccaatattcttacagcactgttaatcccatacatcttcttgagcctgccttccttcctgttcaacatcttgaggggagaagttgggaaatggattgcttttattgcagtcgttntgcgcttgttcttccctacacgtttccccagattgggctggaacttncttgggagcattgat

SEQ ID NO: 3000 - DNA, 322 bp, Gossypium hirsutum
  Clone ID: LIB3083-066-Q1-L1-E12
accgtgcactgggtgcatagaaaataccaaaaactagtacattatccgaggtattcaaccctgaaaacacccatccaaaatcaacaagaaaatacatcacagtagcaaacggataacggtacatccctcaatactcctcctcatccccttcgtctccttcaccagactcagcgccaactttttaataatttttttccagggcagcgagatcttcacgtgcctgggaaaacttttctttctccatgccctcaccaacataccagtgcacaaatgcacgcttggcatacatgagatcaaatttatgatcaatgcgggaaaacac

SEQ ID NO: 3001 - DNA, 363 bp, Gossypium hirsutum
  Clone ID: LIB3083-066-Q1-L1-E2
agcaaattgcatgtgcttgaggattttatatctagttatccatatttgtagaatcctcaaaacacagaagtcaaaattttaatacaacaaagtactgaccaacaatgtcgcagagcttgagcaagaacttttgaaaaagaaaaataacttagacggagaagaacatagttgtttccgacttgtaagtttaacagtccatggatacccgtcaagcactaactttcttcctaaggagatggtgcaggtcaagtgtgttgatcttggcagcaagtatgaagtcattttccgtaagtccaccaacagcatgcgtccatatttcaactgttacattgttccatccgaccagatgcagatctggatgat

SEQ ID NO: 3002 - DNA, 374 bp, Gossypium hirsutum
  Clone ID: LIB3083-066-Q1-L1-E3
gaaacccaaaatggttatggcctttacggccacgagtcaggctcaggctcaggctcaggctcaagccggcccagtttcaccaccaaagaaacctatgaaccctatgtcacccctgttagattccaccctgatgaaccctataacagcatccccgaatcctccaacaataaagacacttactactacaacaagaatgcctacaagtccactaagcagcaaaaacttgggcgaggccattttcaccgagaaaggatggagcaccaaggaaaaccagaacaacaactactacaacggcaacattaatggcgagaagcaaggcatgagcgatactatgtacttggagaatggaaagtactactatgacgtcaagagtg

SEQ ID NO: 3003 - DNA, 410 bp, Gossypium hirsutum
  Clone ID: LIB3083-066-Q1-L1-E4
cagcagctgaaatcaataaaatatagccatgcagctatgcgcaagagctctgacaagaatcgaggtggagagaagactgattttgccaattgattgcttacctgctttaccacggttcgaagggagctatgaaaatggaatcacgttccaggttatggatgatgtcgagatcttatggaacttccgttgcaagaaacgaaatggggctgcggatagactagctattgaaacagattggattcaatttgtgaatagtaaaaaactccgttcaggtgatattgtcgctttttacaaggacgacgacagagtttcagggacattgtgtaaaattgaagtgaagaggagaacttctatatataacaaagaattgtagcttagtttttttgtgagtgtgtgaaaaagaaagaaaa

SEQ ID NO: 3004 - DNA, 392 bp, Gossypium hirsutum
  Clone ID: LIB3083-066-Q1-L1-E5
accaaggggaaaaaaagcaatagaaaagagcaagcaagggtgaaatcccagatctctctttgttttctctttgaaacccaaattttcccatataagaaaagattctgagaaaatggtgcccaaatcattgatctatgcatttgtatctcgtggaggagttatattagctgagtatactgaatacagtgggaatttcaattccatagctcttcaatgcctccaaaagcttccttcttcaaacaacaagttcacttacaactgtgatggccataccttcaattatcttgttgacaatggatacacttattgcgttgttgcagatgaatcagctggaaggcaagtgccgattgcttttttggagcgtatcaaggatgatttcgtgtcgaaatatg

SEQ ID NO: 3005 - DNA, 429 bp, Gossypium hirsutum
  unsure (1)..(429): unsure at all n locations; Clone ID: LIB3083-066-Q1-L1-E6
agaaagcagcattatttttatattaaaaagaaaaaaacctaaaggcggtgttttctcaaattagatgtgacattttctctctctcttataactcatcaaggatatgcaggacctataaatgaaccaatatttagaacagaattgcaagcaccccttttcccctttgtaactccattcattcctttttatcaatgttcagtaatatgcctaaaattggtttgttttacaaaattggacccatgagttgtaagagatgtgaactaaaatttaaaaaatagaagaaaaaaagaatacctttacagcttcctacaaccttgacaatgtcttggtaaaccagtctgatagacgcctcatctttgaagataggtgagcacttctagcgaaataactctccgcatttgaaagcattanttntatgtcatgcttcac

SEQ ID NO: 3006 - DNA, 377 bp, Gossypium hirsutum
  Clone ID: LIB3083-066-Q1-L1-E8
ataaagagcaagttgttactcgaatgaaagctgctggggctagtaaacaacatggacaggaagacatattatgttcccttatagctgatgcatgcatccaagtctgccccaagaaccctgcaaattttgatgttgataatgtccgtgtgtcaaagcttgttggagggggtttgcataattgtacaattgttagagggatggttttaaaaggtgatgctgtgggaagtataaagcgtatggagaaggcaaaggtggctgtgtttgccagtggcgttgattcatctgccactgaaacaaaaggaactgtattgattcactcagctgagcagctagagaattattctaaaactgaaaaagctaaggttgaggaactcatc

SEQ ID NO: 3007 - DNA, 344 bp, Gossypium hirsutum
  Clone ID: LIB3083-066-Q1-L1-E9
gcttgctgtacatatagtattaagtattaaaccctgggggaaagcgttgtcggcgcagggtcactttctgtcggcattgtctgtatccaacgaggggtattcgtttctaagttattcattcaatttttaaattcagaactgaatttgcattccaaagctgtctgtgtgttgtgtttttttttttctttctcatttgttttcgatgatttggaccttccaccttctttattaaaaaatcaaaccaactacaactattccaccaacttcatgaactattgctcacctcgattcctcatcactgctgtctctttttgtctgccttccccatccctttttttttttca

SEQ ID NO: 3008 - DNA, 308 bp, Gossypium hirsutum
  unsure (1)..(308): unsure at all n locations; Clone ID: LIB3083-066-Q1-L1-F1
ggtantattattaatatgaagcttcagctttgcttacgggagaactttaattaacttattcactgcaattgaaaactactgtaacctttcataaataaaaatcccgcttctaccttatggtgatgatgcaaaccaaatcatctttatttgtttgcaagatcatacctttgtttattaaaatacagcagcatgatagatttactgatggatcaataggcttcagcaatggactattctccatttaataaacaaactgtagtgcataactgtatgtataggattattgaatcaaaggccactttttgcca

SEQ ID NO: 3009 - DNA, 415 bp, Gossypium hirsutum
  unsure (1)..(415): unsure at all n locations; Clone ID: LIB3083-066-Q1-L1-F10
gaagaaaagctgaggaagaggaaccaggagttagagggggaattgaaggagagtagggaaagagaggagcagatgagaaaggaattacgaaagatgtgggaaaggctgagggtggcggaagaggcggaggaaaggctctgttctcagctgggtgacctggaagcagagtccgtcaatcaggcccgtgcttacaacgcccacatactttccctcatggaccagctctccaagggtagcaaccttctcatcaacagccacccatcccctgcatccatctccatcctctgatttttcttttggctggtgttttttttatctatctaagcaaaggcatggggcttctaaatccgttaactttgagtatggtatggatccgtacatagtngttgttctagttttttgctttaattggaaa

SEQ ID NO: 3010 - DNA, 436 bp, Gossypium hirsutum
  Clone ID: LIB3083-066-Q1-L1-F11
ctgatatctgcggctatagcactaagaaagtgcatgctgttctcacctacaatgggacaaaccacttgatcaaaaaggaagttccttgtgagactgaccaactcactcatgtttatacgttcattctccgtccggatgctacctacagtatccttgttgacaatgttgagaaacaaactggtagcttgtacactgattgggatcttctcccacctaagaaaataaaggatcctgaggccaagaagcctgaagattgggatgacaaggaatacatccctgatcccgaagacaagaagcctgagggttatgatgacattccaaaagaaattccagatcctgatgctaaaaagcctgaagattgggatgatgaagaggatggtgaatgaatactttcaactattcccaatccttgatacaagggcccatgggaatcaaa

SEQ ID NO: 3011 - DNA, 384 bp, Gossypium hirsutum
  Clone ID: LIB3083-066-Q1-L1-F12
tcgagttttttttttttttttttttttttggcataattccttttctgggggggaaattgtttgaaccaacctttagtcacttgtccaaaattcatatccaaacatgcagcaacctcacaaaatcatctgtcttttgatttgataggaactcctttgtacatttctacacgatccttcaatgcgtctcgccttgggcgtgctatcttattattaggatcgaaaagcaatacttcttcaaatgctttcagtgcagacttgtagtcttttttcttctcatatgcatcgccaagattgttccaagctgtgacatatcctggttgaatcttcacagcagtttcaaattgattgattcctttctcaagcttcccatcccgaacgtaactg

SEQ ID NO: 3012 - DNA, 350 bp, Gossypium hirsutum
  Clone ID: LIB3083-066-Q1-L1-F2
gtcttcacaaaagacctgtccgtggctgatggaccataggggttaacaatgtagatcaaacatacatagtgtggaatgaatttagaacaaacagaatccggcaaacatttaacttggaactgattgatgatatagtagaattattgaatccaatcactgagaactatttacctaatgaactaaatctttttagcaagtaatcctttatcatatacaatgtgcaagaactaaaagagattcacgttagaagaacctgactgacactgttatttaacacttaccaaatgaccagtcttatattatgctttaacacgctgatcttcttcttgttcaatatgatcatgaatatc

SEQ ID NO: 3013 - DNA, 330 bp, Gossypium hirsutum
  Clone ID: LIB3083-066-Q1-L1-F3
ggcaaattcatcatcccaactctaagcaaccttacaagtgtgtggttcttggcacttttcctctccatcattgcaactggagtgcttgaacttcgatggagcggggttagcatccaagactggtggcgcaatgaacaattctgggtgatcggaggtgtctccgcccatcttttcgccgtcttccaaggcctcctcaaagtcctagctggagtagacaccaacttcaccgtaacagcaaaagcagcagaggatacagaattcggtgaactttatctcttcaaatggacaactctcttaatccctcccacaactctgataatactgaaacat

SEQ ID NO: 3014 - DNA, 437 bp, Gossypium hirsutum
  unsure (1)..(437): unsure at all n locations; Clone ID: LIB3083-066-Q1-L1-F4
gtgaacgttttgaaagcttgtgccaaagcaaaaacagggggcgagtcgtcttgacatcatctgccgcagctgtgtctatcaacacactggatgggacagatctcgtcatgacagagaaagactggaccgatatcgagttcttatcatcagcaaagccaccaacttgggggtaccctgcatccaagacgttggctgaaaaggcagcttggaaatttgctgaagaaaacaacattgatctcattacagttatcccttctctcatgactggtccttccctcaccccaattgtccccagcagcataggccttgctacatctttgatttcaggcaatgaattcctcataaatgctntgaaaggaatgcagatgctgtcaggttcgatctctatcacacatgtggaagacgtatgccgagcccatgtttttctggctgaaaaa

SEQ ID NO: 3015 - DNA, 305 bp, Gossypium hirsutum
  Clone ID: LIB3083-066-Q1-L1-F5
gaaaaacgccttgcacagggacctggtgtgaaagcagcgcgtgcagctgcaccgcaacaggccgagggaattaagaagtcaaagaagtgaatgaagtaatgttttgtttttctctgtaggagtttgaatgcaaaactcggttttcattttgtgttttagatctttagttttatataattatagaattttgatgaaaccactgagctgttataagaaatggaagatgtttgtggtattgtttattagtataatgtactattatgttgaatgtgctatgaaatatttctgatcttaaacttttgttt

SEQ ID NO: 3016 - DNA, 402 bp, Gossypium hirsutum
  Clone ID: LIB3083-066-Q1-L1-F6
agaacccgagtttgcctcaggtttttataaagggaaagtgtggtggtggtgctgatgtgattaaaagcatgtttgaagttggggaattggctaagattcttgaggattttccaaggatacaacagcctgggcttgtttgtgattgttgtggggatgtcaggtttgtgccttgtgggaattgtagtgggagtcgaaaagtgttcgacgaggacgaagggttgcttaagagatgcttggaatgcaatgaaaacggcttgatccggtgccccaattgctgttcttaacactttgattgctgctgcctgcaggatgttaaggtatatatacataatgagcttggtttttttttcgattgtcgaggtatatgaaagatggtctgatgtgttttgtatgaaccctttc

SEQ ID NO: 3017 - DNA, 378 bp, Gossypium hirsutum
  unsure (1)..(378): unsure at all n locations; Clone ID: LIB3083-066-Q1-L1-F7
cttaatgctaccgtggaagagaataaatcccttaacgggaaactttctgaggtttcaaatgagtttcagcaggcacagggcagaatacaacagctcatggctgaattgagtcagtcaaaggaggaactagttgagaaagaaagggaacttttgacactcaaagagttgcatgatatgcatgggagtcaatcatctgctcagataaaagaattagaggcacatgtaacaagcttggaacttgagttggaatcattgcaagcaactaacagagatatggcggagcagctagagaacaaagcangtgaagcagaacagctgggagaacaaaatataagactccaatcccgcatttcagaactcgagatgatgttagaaaag

SEQ ID NO: 3018 - DNA, 323 bp, Gossypium hirsutum
  Clone ID: LIB3083-066-Q1-L1-F8
cttgaatccaaggaggaaaaggcatctgaagcttttgtgagaaagtatcgtcttcatgggaacttgggggaatcagaggacattgatattgtggcactaaagaactacatggatgctcagtactttggtgagattggtattggcactcctacacagaacttcactgtgatatttgacactgggagttctaatttgtgggttccttcatctaaatgttatttctcgatagcatgctatttccatcgaaaatataaatcaagccgttcacgtacctacaaggctaatggtaaaccagcggatatccaatatggcactggagctat

SEQ ID NO: 3019 - DNA, 335 bp, Gossypium hirsutum
  Clone ID: LIB3083-066-Q1-L1-F9
gtccactgcaagctcggctctcgattcccccaaaagggggctcttcctttcgtgaatcaaagattctcaaagatgactcaagatgtggagatgaaagagcaaccagctccgtccaattccgttccttcctcttctccatccactttgcaccatttgaaggaaattgcgtctctgattgagaccggtgcttatgaccgtgaagctcgccgtattttgagggctatacgacttacaatggctttaagacggaagttgaaggcatccgtgcctttctctttcctaagtttcgctcttacccctggatccgaggccttcactcgtctttcttctaatct

SEQ ID NO: 3020 - DNA, 328 bp, Gossypium hirsutum
  Clone ID: LIB3083-066-Q1-L1-G1
gttaaggaaattgagccatcattgaagaggcaacttatcgggtccactgatctcatgactatcggaattgggattgctagttgggtagctcttccatcttcctttaccattttcaattttggagatcagaaagctgtgaagaattggcagctattcttatgtgtcgctgttggtctttgggctggcctaatgatcggttttgtaaccgagtactacactagcaatgcatacagccctgtacaagacgacgctgattcctgcaggactggagcagcgactaatgttattcacggccttgctttgacttataagtcttgcattattccta

SEQ ID NO: 3021 - DNA, 347 bp, Gossypium hirsutum
  Clone ID: LIB3083-066-Q1-L1-G10
ccggagtggtgaatgcgactgtggagaatagagtggttggtgaccggaggatcgccgcttatcatgtggataaggtgcttttgccgatggagagttttgggacagcgcctgagccggctcctgcgcctgttgtcccagagaatggtgggttggtttcgagtcctattgcaacggttaagggtactgatgtagctgttgcggggagctagaaatttcatgctttggcgatgggtttttcggcatttgctgtaatatgagctgtagatgggggattctgattatggatgttatatccgcacgcaatgcgtgaggtactgggatgaatacgtggttgtgattaaaaaata

SEQ ID NO: 3022 - DNA, 370 bp, Gossypium hirsutum
  Clone ID: LIB3083-066-Q1-L1-G11
cttctatcaagatgcttctgaccttcgcgagaaattcggggccaacaagcatgtggaagatcttgatacaatcgacaaaatgatagatgcaggtgaagcaacttataataagtggcggcatcccgatccttatatcgttccttgggctcctggtggttccaagtttactcgaaaccctgtcccaccttctgggatcgagatcgtgtatgattatggtcgagaagaaaatgactaagacatccatcttttcaacttccccagaaataaagttgatgcaggtctaaaagatcgttgagtgtgtaacgagtggtctagggacagcaactaatttgcattacctcaattgaaacgagatagggttttaataaca

SEQ ID NO: 3023 - DNA, 361 bp, Gossypium hirsutum
  Clone ID: LIB3083-066-Q1-L1-G12
tgggaagagaggaaagagtctgtagttgtcgaggggggggacttgagccttaattttgttatggggcttatgaagaaacatccctcaattataccattcatgatatatattacaaatgaagacaaacacttggaaagatttgcagttcgtgcgaagtacatgactttggaccctgcaaaaaataagtatgtaaagtatataaggaatattaggacgatacaagattatctatgtaaacgagctgacaagcatttggtccccacagtaaacaacacaaatgtcgacagaagtgtggcagccatacatgcaacagttttcagttgccttcgcaggcgtgaaagctgggagtcactttatgatc

SEQ ID NO: 3024 - DNA, 394 bp, Gossypium hirsutum
  unsure (1)..(394): unsure at all n locations; Clone ID: LIB3083-066-Q1-L1-G2
cgagcggagtaaggaagaagatgnnaagcttcagctttgcttcaccgtggtcctcctattgattttcgccccccttttcatggcctcatctcaacatcgctgcgtttttgtggggaatataccatatgatgctactgaagaacagcttatagaaatctgcagggaggttggccctgttgtttccttcagactggtgattgatagagaaactggcaaaccaaaaggctacgggttctttgaatacaaggatgaggagacagctttaagtgctcgacggaatcttcaaggttatgagatcaatggccggcaattacgagttgtttttgctgaaaatgacaggctctgaacgaaatcgggaacagactgtagaatttgttcaaaagaaacatgactg

SEQ ID NO: 3025 - DNA, 326 bp, Gossypium hirsutum
  Clone ID: LIB3083-066-Q1-L1-G3
gtggctatgacatgaattgcttccttgattagtgtggaagggttggcagattcagccactcctccattctccattagtgtagattcaatgaagcaattcatgtcatcagctgtggctatgaagagaagactgcatgggggaaagagattggatggatatatggttcagtcactgaggatatcttaacccggcttcaaaatgcactgccgaggatggagatcgatttactgcatgcccttaaggccagcattcaaaggatctgcacccatcaatctgtctgatcgggtgcaccaggttcttcgatgggctcttggatctgttgaaat

SEQ ID NO: 3026 - DNA, 376 bp, Gossypium hirsutum
  unsure (1)..(376): unsure at all n locations; Clone ID: LIB3083-066-Q1-L1-G4
gagaaatccaatgcagatattaatgcggagttgggtgtgtgagatgctgaggaagatggttgtgatggtttaaactataaggaattcgacaagggattcaataataaacgtgtgacagtgccaccaccatcacatttttggcgtattgatagtaacaaatttttgcaccgtggctgtaaaactcaaaccattgatgagataatgatttgccattgcaaacgacctcctgatggtaaccttggttgcggggatgaatgtctaaatcgaatgctgaacattgaatgtgttcaggacacctgtccctgcggggagctttgctcaaatcaacagttccagaagcgaaaatatgcanagatgatgtgggacagatttggta

SEQ ID NO: 3027 - DNA, 381 bp, Gossypium hirsutum
  Clone ID: LIB3083-066-Q1-L1-G5
gttcaagacgattacaatgacggagaagtttaattgtagaggtaggatatatatgagattttgatggatgagaatagatggaaagggtttactcagagtaatgctaggataagtaaagaagtcggtggtcaatttagtattttcgatggatcggttactggtattaacttggagttgcaagaagggaagtttattgctcagagatggagatttgggagctggcccgacgggattgattctactgtaagacttgttttcaatgagcctgagcctggggttactataatcaaactcacgcattcagatgttcccgaggaggacagatatgggaatgcgactgtggtggagaacactgagaggggttggaaagaccttattttc

SEQ ID NO: 3028 - DNA, 422 bp, Gossypium hirsutum
  unsure (1)..(422): unsure at all n locations; Clone ID: LIB3083-066-Q1-L1-G6
aaccagctgagatcatcaagatctaaacaataccatcgggcgttcaaggcagtgaagaaaagaagaagatgtctaacaatatcaaaaaaatatcgtctcgtaagcagacgatgcagaggatgtgttgggtgtttgtgtgggaaaaagatgtgaggatcagatataggcaacctcaaccaggggcctgtccctactgtggagggatgctccaagctatgaatataaagactcattggaagctttgctttttgcccgtctttttctggaagaagaggaagatccattgcagcacgtgcgcaaaatagtttgctgatcctgtcaccaacttttgtttgcaactgacccggcatgctgcanagcttctatggcttctctatccttgaagttgccaggcgtttagcgtaaatctttgtttttaaagc

SEQ ID NO: 3029 - DNA, 385 bp, Gossypium hirsutum
  unsure (1)..(385): unsure at all n locations; Clone ID: LIB3083-066-Q1-L1-G7
gtaaaatcgagatctgaaatatgggtttcttagtaacagccctaattttttctgtgattgcggtaattgcatcactttgtaccagaatctgttgtaacagaggtccctctgctaatctgttacatctaacattggtcattacagcaaccgtctgttgttggatgatgtgggcaattgtatacctagcacaaatgaaaccactcattgtccccattttaagtgaaggagagtgaagagtgtgtgtgtgtgtatatatatattgcacaaaaatcatttggaagattatcagtaaatcagcaattatggattntggccattgagggaatacctgaattccattgtttaatggaatggatgattcagtgtgttctcatatgttgatttt

SEQ ID NO: 3030 - DNA, 389 bp, Gossypium hirsutum
  Clone ID: LIB3083-066-Q1-L1-G8
gaaaaaatgggtggttttgctgctgttaatgatgatggggttcaaaatatactcttcaggttgccagcttcatcgttcgcttcagctgcctgcgttagcaaatcctggaacaaagtttgcgacagagttttgacttgtcccaagcttgcctctgcactgtctctcaacccttctctccctgatgctgtgaaagaggctcttgacaaggttctctccaagccaattcgtcctcagtttgccattgcctccatcgggttacagttcaactttggaagctgctcatcaaattatcaccgaaagactgggctcctaagtaccagtagttaccaatgctgcatgtggaatcattggtagagatgctatcaccaacacaatgagagaggttcgat

SEQ ID NO: 3031 - DNA, 326 bp, Gossypium hirsutum
  Clone ID: LIB3083-066-Q1-L1-G9
gccgtcggatctttggtggggcattttgattcaatcaggattgcttcgttttgaacccaggcgacgatgaagaaggctatcggtcaaactgttagagagcttaagagagaggttaataagaaagttctcaaagttcctggaatagagcagaaggttcttgatgctaccagtaatgagccatggggtcctcatggatcacttcttgcagatattgcaatggctacaagaaactatcatgagtatcagatgatcatgacagtgatctggaaacgtctaagtgacactggaaagaattggcgtcatgtctacaagcttcaggctctgac

SEQ ID NO: 3032 - DNA, 400 bp, Gossypium hirsutum
  Clone ID: LIB3083-066-Q1-L1-H1
gagtgaaggcagatggattttagttcattcttgacgtcggtgagggacgtcttttgtaatattcatagtgttgatggtgctctttgcatggctttcgacgaggcaagggaacgcggtggtgtattatccgaaccggatcgtcaaaggtatggaaccgtgggaaggcagttcaaggacacgaaaccctttcgcttggataaaggaagccttgtcttcgagtgaacaagatgtcatcaacatgtctgggattgacactgccgtctacttcgtcttcctcagcactgtattgggaatcttggttttgtctggcattgtactgcttccagttcttctacccattgctgcaactgatgatggtgtgaagaaaaacgaacatactagtaataatacgagcaatgga

SEQ ID NO: 3033 - DNA, 353 bp, Gossypium hirsutum
  Clone ID: LIB3083-066-Q1-L1-H10
tgccgccgcaacaatgaagtacaacccgcgtgtctcgtgctctcgccgcaagagccgcaaggctcatttcacagcaccttcttccgtccgccgcgtcttaatgagcgcacccctctcatccgatctgaagtccaagtacaacgtccggtctatgccggtgcgcaaggatgacgaggtccaagtggttcgtgggacctacaagggacgcgaagggaaagtggttcaagtgtaccgccgcaaatgggtgatccacatcgagcgcatcacgcgcgagaaagtgaacggttccaccgtcaacgttgggatcaacccatccaaggttgtcatcaccaagctgaggctggacaaggata

SEQ ID NO: 3034 - DNA, 320 bp, Gossypium hirsutum
  unsure (1)..(320): unsure at all n locations; Clone ID: LIB3083-066-Q1-L1-H11
cgaggatgggacgtcacgtttggcggtcattcgacaggtggcttccaggcgtcgcnnggctggtgttgnngaccgtcctnttacgccaccgannaacggaagctctaaaaggggtggaaccgaaagctctccttccggcnagcggcggcaccccagcatgaannaaccttccaaatctatttcgatggaacccagatanatcctacnngaaaccccaacttcaagaaacttcaaaatcgactttaaaaagaaaatgcggacccatgngnntgcttganttgcctttgatcaagaatcaagaacgaagatnnggatccatc

SEQ ID NO: 3035 - DNA, 360 bp, Gossypium hirsutum
  Clone ID: LIB3083-066-Q1-L1-H12
ccacggatggtgagaagtgctatacagcttatttcctcaagctggccttactggaatagaacagagggtgctgatcatttctttgttgtaccccatgattttggagcatgctttcattatcaggaagagaaagcaattgagagggggatccttccaatcctgcagcgtgctaccttggttcagacatttggacaacggaaccatgtgtgcttgaacgagggttcaatcacaattcctccttatgctccccctcaaaagatgcaggcccgccagattccactagatactccacggtctatttttgtctacttccgtggattgttttatgatgtgaataatgaccctgaaggtggctactac

SEQ ID NO: 3036 - DNA, 435 bp, Gossypium hirsutum
  unsure (1)..(435): unsure at all n locations; Clone ID: LIB3083-066-Q1-L1-H2
gccaactgagttccgtgtagataaggttctccagcccttggatgggaacaaattcaacttcaccaaagtcggacaagaagaggtgctcttccagtttgaagcaagtgaagatggcgaagttcagttcttcccaaatgctcccattgatgttgagaatcacccaagtgttgttgccataaacgttagtcctattgaatacggacatgtgctgttgatccctcgaattcttgaatgcttgcctcagaggatcgaccgtgagagctttttgcttgcgctctatatggcagctgaagctgggaatccgtactttagattgggttacaacagcttgngtgcatttgctacaatcaatcacctgcacttccaggcttactacttggctgtggcctttcccattgagaaagctcctaccaagaagataacccttttgaatga

SEQ ID NO: 3037 - DNA, 375 bp, Gossypium hirsutum
  Clone ID: LIB3083-066-Q1-L1-H3
actgctttccttcaattatttcccacttccttttgccttcgaaatttccttgggattcctatggctaccgctgaggttgcatcagttcaaactgcacttcatgaggagaaaactgaagaatcagtgaaggatcaagaagctacaacagatgaagtagttgccgaagctccagcagcggaaccagttgccgaagagccaaaggaagcggagcctgcggcggtggtagtcgaggaacctgaagcctcagttgaagttgaaaccaaggaggtggtagaagaaccaaaggctgttactgaggagccagtagtagaggaggctcctaaggaaacaatgccagaaccatgtgccgaggagatcaaggaaccacttgacaaa

SEQ ID NO: 3038 - DNA, 411 bp, Gossypium hirsutum
  Clone ID: LIB3083-066-Q1-L1-H4
tgcaaacaaatttaatggtcatggattaaatgtttttgcgacttaccttgatggaaagtatgacattaaagatgttaatgatgcggaaaaagatacctcatcctctctgaaataggattcagatgatattgatgcactactcagctcagaagaggaggaacaagaagattatgatgaggaagaagttagcacagcacggacttctggtaattatgaaagtgactctgattctcactctgcctatggctcaaaaccaagaaaaaacagctcatgttcttctactctgaaatcctctggtagcggttttggtactgaccccaaaaagcggctgaaaatgaagaaaatggttaaggttctaaggggaattgtaccaggtgctgatcagatgggtactgtagcccgtctcgatga

SEQ ID NO: 3039 - DNA, 366 bp, Gossypium hirsutum
  Clone ID: LIB3083-066-Q1-L1-H5
atactgcacgagtccaaatccacatgcttgtctcttcacatatatattatcgcgagcaatcgaatacctataaaagacactcctttcaaaatttctccctcttttctcctctcaattttgcctcctgttttgctgatttacatcttaaatcttgtaatttatgtcttctgttcttttaaaacggtgttgaatttgatttgatacgagataaaccagatcttttttgttccgggttttcgaagtttgctgatttatccttgccctaattgtttttagtagaagggttggatcggtaagatttgtgaaaaaatagatctaggtttgtttgtgttttggatagttggagaaaacccatagttattttag

SEQ ID NO: 3040 - DNA, 317 bp, Gossypium hirsutum
  Clone ID: LIB3083-066-Q1-L1-H6
agaaaaggcaaaggcattagaagtaattcaatttctaaaggagggagtccacgagggaacgtgcaatgttgcaataattgatgatgggaaattggacacggagtccgactcaggtgagttctgggtcctctttggtggttttgctccaataggcaagaaagtcaccagtgaagatgatgttattcctgagacaactcctgctaaactttatagcataactgatggtgaagtgaagattgtagaaggtgaactatcggaaggtctcttggaaaacaacaaatgctatctactagactgtggtgtggagatttttgttt

SEQ ID NO: 3041 - DNA, 382 bp, Gossypium hirsutum
  Clone ID: LIB3083-066-Q1-L1-H7
tttttatccaattttttattttctaagggtaaacccgtgagctgaattgaatgtgggtctggagtccggattaagataaaaaaagaaatcatagaatacaaagcttcaacaaacaacactttaaagaaccaaaaaaacaaaaaagggactgtttttagttgaatagtttttacttttgatccatttccaaaaacccagatgttatttcaataaggttttctgggttttttttttgttctagatcttgcctttggatttgctgcatgtttcagatctttagtgggttttgaagcttaaaagctatggcggtttgatcagattcaggctttgagattataagctgcaaactcgtaatcgtacttttatctgaaattttcagaaa

SEQ ID NO: 3042 - DNA, 370 bp, Gossypium hirsutum
  Clone ID: LIB3083-066-Q1-L1-H8
gaacgaggtgagcttgaagttgaagaagcttatgagcaggtcaaggaattcgaggatcagatggtaatggaatacggaaagatgatggaagctgagggcccaccaaaatttgatgagacggctgtaccggacttaaaaaagaacttggatgatccacctggtgagggaccaatccttaggtggcaaactcgggcggtgtttgctcctggtggtgatgcgtggcatcccaaaaacagaaaagtaaagatgtctgttacagtgaaggagctcgggctttcaaagcatcaattccgccggttacgagagcttgttggaaagagataccatccaggcaaaggtgaacttacaattactagtgagaggtttgaca

SEQ ID NO: 3043 - DNA, 424 bp, Gossypium hirsutum
  unsure (1)..(424): unsure at all n locations; Clone ID: LIB3083-066-Q1-L1-H9
ggagtacggtaccttctaaatctaatttatccccttgtatggaaatccacgcgagataaaaatgatcacgtagaatacaccagtgatgctcctctgccatggttagctttttaccaaggtctacccttttattacatcacttcatttaatcaaacccatacagaccccagagtcaaagagacaccgaaagagaaggaaaccctgaatgaaagatcttgcaccggttcaaatacgggctcagttagtcaaatagaaaatagggaaaggaattcggattctgtcgattctcaatgccaaaacccttgtcctcggngaaaaatgacatcccanaagtttagtaaaggatttgtgccatacaaaagatgttaaacagaaagggatatgtcatcattcatgggtgtatccgagggtcgagagagggcac

SEQ ID NO: 3044 - DNA, 331 bp, Gossypium hirsutum
  Clone ID: LIB3083-067-Q1-L1-A10
tgacaatgaagctatatacgatatctgcaggagatggttggacatcgaaaggccaacttataccaacttgaatcgcttgatatcccaaattatctcttctttgaccacttcattgaggtttgatggcgccataaatgtggacattacggagtttcagactaaccttgtgccttatcctcgtatccatttcatgctttcatcttatgccccagtaatctcagctgcaaaagcttaccatgagcagatatctgttcctgagatcacaagtgccgtctttgaaccctcaagcatgatggccaaatgcgatccgagacatgggaaatacatggca

SEQ ID NO: 3045 - DNA, 340 bp, Gossypium hirsutum
  Clone ID: LIB3083-067-Q1-L1-A12
gagaatattgctaagcactggaaatcaaacatgggggaagctgttgagacagcagaggaatggacgcgtttatatgcaagcggtgcatgaagaccggtggaaccgtttgctctcataaaataacatttttatgcaatgtaagctattcaatgtcaattccatattgaaatctggacgaatgacagtttgaaagagtttgatatttgcaaccaaaaacaaagcttccaggtgctacccttttagtagtaattcggtcggaagcaatctctaagcttggatgataatacacatggctctttaaaactcccaaaggctttaactatgggattattctcttata

SEQ ID NO: 3046 - DNA, 308 bp, Gossypium hirsutum
  Clone ID: LIB3083-067-Q1-L1-B10
gaacgaaattatggcttccatgtctttctctgcagcgattccgtctcctcttcttgatttttcccaaacgaaaaagaaccaagttttttcttcatcatggccttccatgtctttctcaatcccttccatcaaatcctcgcttgggtcttcaaaatcagcctttttccaaaatgggttctcgttgctatcgcttactgcttctgggttagtctttaactctagatcttcaggcatttatgcaagagcagctacggataaaaccctatacgactacacagtaaaggatattgatgggaaggatacccctc

SEQ ID NO: 3047 - DNA, 358 bp, Gossypium hirsutum
  Clone ID: LIB3083-067-Q1-L1-B12
ctcccaccccgaccgcttgattttgatcagacgggggtcatgccgatcagaaacatagccgttggccggcctgaagaagctactcatccagatgctcttaaagcagctttagctgagttcatatcaacgttaatcttcgtttttgctggatctggttcaggcatggcttttaataagctgaccgacggcggtgcaacaactccggctggtctcgttgccgcctctctagctcacggatttgcgcttttcgtcgctgtctcagtcggtgctaacatctccggtggccatgtgaatcccgccgttacattcggtgctttcggtggccggaacattaactctttacgtgggattccttaat

SEQ ID NO: 3048 - DNA, 137 bp, Gossypium hirsutum
  Clone ID: LIB3083-067-Q1-L1-C10
ctacgaccggtgcctacacatttcgatgggctcggggtgtctgcataacctgacgacgcagcgacggcggacgtgtctttcgactagtacacagggttcagtgctccatgctaggaatctgcggaaaccgactatcg

SEQ ID NO: 3049 - DNA, 257 bp, Gossypium hirsutum
  Clone ID: LIB3083-067-Q1-L1-C12
tggaattggaaagggtggtggacttggaggtggtgggggcaaaggaggaggccttggaggtggaattggaaagggtggtggacttggaggaggacatggtggtggacttggaagtggtattggcaaaggaggaggccttggaggtggaattggaaagggtggtggacttggtggaggaattggaaagggtggtggcattggaggtggcggcggctttggtaaaggtggtggcttcagtgacgctgctggaagtggtg

SEQ ID NO: 3050 - DNA, 324 bp, Gossypium hirsutum
  Clone ID: LIB3083-067-Q1-L1-D10
caccgtctatccttcacctcaggtttctacatcaggggtagagccttacaacagtgtgctgtccactcattcactccttgagcacactgatgtcgctgttcttctggataacgaagcaatatatgacatctgcaggcgttctttggacattgaacgacccacttatacgaatcttaaccgccttgtctctcaggttatctcatctcttaccgcatctttgaggtttgatggagccctgaatgtggatgtgactgagttccagactaacctgggcccatatcccaggatccactctatgctttcttcttatgcccctgtcatttc

SEQ ID NO: 3051 - DNA, 349 bp, Gossypium hirsutum
  unsure (1)..(349): unsure at all n locations; Clone ID: LIB3083-067-Q1-L1-D12
aaatagtttcccttaaaagtcttatattcttcaatcggtctcttttcactcactcattttctcgctaccccaaaccctgatttctttttctttctaattttaattttagtttgtttcctctcttttactcaggccattagatttccggaaagaaatggaacccaaagcctcgatgaaaaacaatcaaactctcgatgacatcatgaaacaatcctcttcctcaaactccgactcactgtctcacctcgactcgccccactcacctctccgatcagaccacggtgactccgtcccacccgatccccaaaatacctnctctccttatgttcctccggcagtcttcccccca

SEQ ID NO: 3052 - DNA, 308 bp, Gossypium hirsutum
  Clone ID: LIB3083-067-Q1-L1-E10
ctttagttgaccagatgcagaaaccagggggtctgggaactggtcccgggaaggaggtcggattgttggataactgtggcattcttccaagcaattgtctaccttgtcttgcatctactgtttcatctgttgaaaagagaagatcgctcagctctagcccaccaagtgcaaggaaaaagaatgccttaaaacttccatttaaatggaaagaagggcatcccaatgctgccctattttcgtcgaagaggcttcttcagagaccaaaagcagggtctcaagtaccattttgccctacagaaaagagaatg

SEQ ID NO: 3053 - DNA, 294 bp, Gossypium hirsutum
  Clone ID: LIB3083-067-Q1-L1-F11
taccggtccggagttctagagctgacgcatcgcgtcgcgctgcacgtacgtacggctacaagagacgacagaagggttcggtttgtaaacacgggtgagactacggatgcgataggactacacatggacgcggtttcgagaagactacgaagagctccagctgcgatatgaccatcgaaggtgcatgtcaataggcggagcaccagaggtcgttgtcgctgccgaatagtccagggcgatgtacaggatccagtgttacctacgactgcatccgaccgtatagctatcgtatgg

SEQ ID NO: 3054 - DNA, 368 bp, Gossypium hirsutum
  Clone ID: LIB3083-067-Q1-L1-F9
caggccaattctgcttcatttcaacacgaatgtccagcgaaagccttatatggttgattcccctctttgggcaacgtcatcttctcccatccatagaactacgctaccacacagtctctcctaatttcaaagctactctcatcatttccttcaatctctcttcttctataccctcttccttccatgatcatcctctcattcaagttgcccaaataccctcttcatcgcctactccaccagaactcagttccggcccccatcatcatcactcagatttaactcaaggcattgccaatctgcttgaaaataccttccaacctgcctgtgccgtaataaattatatgatggattggacaacatacattttc

SEQ ID NO: 3055 - DNA, 352 bp, Gossypium hirsutum
  Clone ID: LIB3083-067-Q1-L1-G9
tcaatgctaaggttggggggagaaatactgtgctgagcgatgctgttttaaggagaattccgcttgtgactgatgtccctacaatcatttttggggcagatgtcactcatccgccgcctggcgaagactctagttcttctatagctgcagtcgttgcttcaatggattggcctgaggtaaccaagtatcgtggaattgtctctgcacagactcaccgggtggaaataatcgaggatctttataaacaaactagggatccacagaagggtttagttgaaggtggaatggttagggaattggttcttgctttctacaggtcaacgaaacaaaagccttctaaaattatcctcta

SEQ ID NO: 3056 - DNA, 342 bp, Gossypium hirsutum
  Clone ID: LIB3083-067-Q1-L1-H10
aggccagtgaagctctcaagtctggcatttaatcagattttggcgattaaccatctccatatgtttacggacgaggaactagagcgtttactctgtggagaatgtgatatctgggctttcaatgaacttctggaacatatcaagtttgatcatggatatacggctagcagtccaccaatcgttaatctgctggaaattatacaagagtctgaatattcacaaaggcgagcatttctgcagtttgtgactggtgctccccggctacctccaggaggtttggcgtctttaattccaaaattgacaattgttcgcaagcatagtagcaattgtgctgatacggag

SEQ ID NO: 3057 - DNA, 392 bp, Gossypium hirsutum
  Clone ID: LIB3083-067-Q1-L1-H11
accggtccggcgttctagaactagacgccacgcgtccgtccggatgctagaagcctccttatggttccgtttctaaagaatcaccaacaggtatgggcacagctccatcacctgcgttacatccaataccgaatctaacaccttctttcccatgctcacaaccccaaacatggttaccattagggtagtacaccatacggttacacctacgaagatgaaacttgtctattcacatgttctacgactaccaagatatcgtacataaatctccaaggagcttacttgcctgtcatggccgacctacttaaatcatctccgcttactattgaccggatctgttatttatctcaaaccctattggctaatagatggccttcttttcacccccattt

SEQ ID NO: 3058 - DNA, 385 bp, Gossypium hirsutum
  Clone ID: LIB3083-067-Q1-L1-H9
attgatattgccctgtggaagtttgagaccaccaaggactattgcaccgttattgatgcacctggacaccgtgactttatcaagaacatgattaccggtacctcacaggctgactgtgctgttctcattattgactcaaccactggtggttttgaagctggtatctctaaagatggtcagactcgtgagcatgctttgcttgcttttaccctcggtgttaggcagatgatttgctgctgcaacaagatggatgcaacaaccccaaagtactcaaaggcaaggtttgatgaaattgtcaaggaagtctcttcttatcttaagaaaagtgggtacaaccctgagaagatcccggttggtccaatcttcgggtttgaaggtgaccacc

SEQ ID NO: 3059 - DNA, 396 bp, Gossypium hirsutum
  Clone ID: LIB3083-068-Q1-L1-A10
ccgatcaccaagcagtggtgaactccgactgcagcagattgtgaatagccacattccaaaacccagcacccgatgcaacagtgtatccactgaagataagagaaggagagaaacctatacttgaggagcccatcacatttgctgagatgtacaggaggaagatgagcaaggatcttgagcttgccatgctaaagaaactggccaaggagcagcagatggagacgaccaagaagcccgaactggaaaccaagcctcttgagcaaatccttgcataaataaacttcattttacttctgtattagtatcaattaaatgcatttggactcttcttatggctactgcctacattttatgcttgttttctatgctcaaacctacgtacgtaaataaatgaaa

SEQ ID NO: 3060 - DNA, 370 bp, Gossypium hirsutum
  Clone ID: LIB3083-068-Q1-L1-A11
cccaaatgccttctcttggtatggcttcacaaatgccaggatctttgaatccaccttcatcaatgccaacatcacatccaatgccaatgcctggtccaatgggtatgcaaggtacaatgaatcagatgcctccttcaatgccacaaggtcattttatgggcatgaatccaatgcactcaggatcattacccaccagtggtggcccttcagttggaggttttccaaatggtatgcaaaatatgcagggccctggaaatatgggtggtggccaaatgtatccacagggtagtggattcaatcgtgcacaaggtggtcagatgccaatgatgcctgggtacaatccatatcagtctggtggtcagtctggtat

SEQ ID NO: 3061 - DNA, 177 bp, Gossypium hirsutum
  unsure (1)..(177): unsure at all n locations; Clone ID: LIB3083-068-Q1-L1-A12
cccaaatgctttttttagttttcgcagcacaaataccangatgggtatatgcactttcataaaggccaacgtggcattcaaagccaatgcctggtacaatgcctttgcaaggtacaattaatcatatgcctactacaatgccacaaggttattagatgggcaatgaacccatttcat

SEQ ID NO: 3062 - DNA, 176 bp, Gossypium hirsutum
  Clone ID: LIB3083-068-Q1-L1-A9
ttttctttcatgcatttgttatttttttgatttgcacatacccttttacacaaagtgtgtttgttttcccctttgagtaaatactctttctacattattgtttcttgaggtgcccaaaataatagaaaatataattaattttttttttatattattttatatagtatattcctctt

SEQ ID NO: 3063 - DNA, 346 bp, Gossypium hirsutum
  Clone ID: LIB3083-068-Q1-L1-B10
agaagattgattatttgaaggacaaggtccatcctagctttggtaaagaacggagagccatgaagagggaatatgaagaatttaaagtaaggatcaatgcattagtagcaaaagctcataagaaaccagaagaaggatgggtgatgcaagatggcaccccgtggcccggaaataacactcgtgatcatcctggaatgattcaagtctatctaggaagtgccggtgcacttgatgtggatggcaaatagcttcctcgacttgtctatgtttcttgtgagaaacgaccctgttatcagtaccattaagaaagccggtgctttaaaaatgctttttgttttgagttttt

SEQ ID NO: 3064 - DNA, 308 bp, Gossypium hirsutum
  Clone ID: LIB3083-068-Q1-L1-B11
ctccaaggagcttgttttagaagctcataatgctggggtcatggttgttcctcaagttgggagtgttgaggaagcaaaaaaagtaattgatgcgggtgtagatgcgattatcgttcaaggccatgaagctggagggcacgtacttggacaggatggtctaatttcattattgccacgagtggttgacgcagtggctgatcatgatattccggtaattgctgctgggggcattgtagatgctcgtggttacgttgctgtcttggctcttggtgctaaaggcattatgcttggtaactaggtttctttgc

SEQ ID NO: 3065 - DNA, 364 bp, Gossypium hirsutum
  Clone ID: LIB3083-068-Q1-L1-B12
caataatattcttggaaaggatagaactgtatgtctagagcttgcagtatctgggttggaatttcaatatgacatattcacacctggtggagtatctgtgtccaaactttctctttcagtccatgagtttcatctctatgacaagagcacagatgcaccttggaaactggtgctaagatactacgattcaaaagatcatcctagggaatcctcttcaaaggcattcaaactggacctagaggctgtaagaccagatccttctacacctcttgaggaataccggttacgcattgcccttcttcctatccggttacagcttcattaaagccaacttggttttcttatcagcttttttggtgaaaaa

SEQ ID NO: 3066 - DNA, 271 bp, Gossypium hirsutum
  Clone ID: LIB3083-068-Q1-L1-B9
gctgggagaattgactcgtttgcctcccgctcttcattacatgcgtccaaggccaaccctggaggccgatggaggctacacttacagcccaatcaccgtcatcgattgaacagacgaccaacatactattgcagaaagctacttccgttccttcgtgcacggaactaagaacactatcctcttgaaagctgtcatagctagtatcagccaacaactctatgacgcgttggctgccaaattgaagaatgcttttaacagcaagagggggctg

SEQ ID NO: 3067 - DNA, 406 bp, Gossypium hirsutum
  Clone ID: LIB3083-068-Q1-L1-C10
tttctctttgatatctccaggatttcttcatctttattcataacatcaaacatacgcaaacacaacgataactgtaacccccctacccctatcaacattttattgaactgtaactaacataggatacctagttggcctcttaaaacagacaaagaccagaccccaaaccaaaccaaactgctaaacaacaaagcagacagtattgaaaagatcccatccccagattgcatcattttcatttcttagaaaggaggagcatagagctggagaaccttctgccaggacggtctgctgctaatatcatcccaccaagcactcacatgcttcctgctggttatcatgtattcctttcccatttgacccaccaagtactgagttaatggcaggtgggcttatgtcagcaagg

SEQ ID NO: 3068 - DNA, 388 bp, Gossypium hirsutum
  Clone ID: LIB3083-068-Q1-L1-C11
gaatggggcagtcaacccacatgcaatctcaaagtgggatgcctggcggttacaaccctatgatgggtttcagcggctactctgaacagctacatggtggtggcggtggttaccgacttgaattgattgagcaggggagtaacggtagttacatccttgcttgtgacgcaagtgtaaaagggggtgatgttgcttgacacacgtgtttcaatgaaattgcagactttaatgacgtccctctggccatgcgatccatatcttattaccgactgttattgatgatacgagaactggcgcttactgtgagctgttccacccagaacagcttatttgctggatggaggacgcagttttcagctttgtgcgtggtcactacagccttggcaag

SEQ ID NO: 3069 - DNA, 237 bp, Gossypium hirsutum
  Clone ID: LIB3083-068-Q1-L1-C12
gaatggggcagtcaacccactttctatctcaaattattattcgtggcatatacaaccctataaggggcttcagttactacttttaaccccaacatgattgttgtgttcgttacctatcagaatatattctttaagtctctcttttcaacttctctttccttttccttaattcaatactaaattactttacttttaatttttacctaattgttttactattttatttctaattttatt

SEQ ID NO: 3070 - DNA, 60 bp, Gossypium hirsutum
  Clone ID: LIB3083-068-Q1-L1-C9
ggtatcattccctcagagaggtttgagagtcatttatccgggtactttgatacaatcata

SEQ ID NO: 3071 - DNA, 302 bp, Gossypium hirsutum
  Clone ID: LIB3083-068-Q1-L1-D10
caggagttcaatctgccatgggggcttacaagtacgtgtcagagctatggaggaagaagcaatccgatgtgatgaggttcttgcagagggtgaggtgctgggagtaccgtcagcacccttccatcgtgcgagttaaccacccaactcgccccgacaaggctcgtcgattggggtacaaagccaagcagggttatgtcgtctatcgtgtccgtgtaaggcgtggtgggaggaagagaccagttcctaagggtattgtatatggaaagcccacaaaccagggtgttacccagctgaaatttcaa

SEQ ID NO: 3072 - DNA, 295 bp, Gossypium hirsutum
  Clone ID: LIB3083-068-Q1-L1-D11
cacattctgagtttcgagattatattgaccagggttttaggaggcctaggcgctattttccccagaaagaagaggtaaaaatcgaagggaaaaagatggtggctgatggtattgatgcatctcagggacacttggatgataatgctgatgattggctgcctgcagtaagtcgaagtactcataggagatatcttatgaggaaagctaggcgggaattctacgaggcattagtggagaaagattgtcaagaagatatgtaaaaaggcttatagaagagcaacagtgaagatgcaag

SEQ ID NO: 3073 - DNA, 51 bp, Gossypium hirsutum
  Clone ID: LIB3083-068-Q1-L1-D12
aaacaaacactcactttatatgtacttacaaatcgatgcatgtagtttaca

SEQ ID NO: 3074 - DNA, 295 bp, Gossypium hirsutum
  Clone ID: LIB3083-068-Q1-L1-D9
ttagtaaaatagttgaagctttctgatttcgcaggggagttgagagagctgttcaagtgtgcttatgaagcaacgaatacatttttcagattaaagaatttggatcaccaatgtaaattatccataacccaactgctaatatgcgatttgaggagatggtatgtataaatatacctattgtgtgagggtagaatccttttgatacactgtttaataataatgttgttgttaagctcattcctgtttccttcttttatgattttttatctacttttttttataaaattttaactgt

SEQ ID NO: 3075 - DNA, 284 bp, Gossypium hirsutum
  Clone ID: LIB3083-068-Q1-L1-E10
ctgagaagatgagacaagagacagctgcagaaaatggttcagctgaaaagatgaagaaagagacagccttgacagtaaatatctcagctgagaagatgaacaaagagacagccttgacaataaataactcacctgagaagatgaacaaagagatggccaggacagtgaatagctcagctgagaagatgagacaggagacagctccagtaaatggctcggctgagaagatgaagaaggagacggccttgacagtaaagagctcgaccgagaaggtgaagaaagaa

SEQ ID NO: 3076 - DNA, 292 bp, Gossypium hirsutum
  Clone ID: LIB3083-068-Q1-L1-E11
tcaaaaatcaatttgctcatttgctacagtcagaacaagagcagaaactggagatgcaacaatatgattcaacgattcaaacattgcatgcaaaagtaaaaagtcttgaattgcaactcaatgaagccatgtgttctggtgaagctaagtctgttagctcagaaaaggtgtcttgagtttcaacaatattaaaaacagcagcggatggtattgattctttagttgagactaataaacttgatgatgaactcaagaaacttgatgctcttattgagaggttgcttgaagaaaa

SEQ ID NO: 3077 - DNA, 413 bp, Gossypium hirsutum
  Clone ID: LIB3083-068-Q1-L1-E9
aaaacattgagaaggttctggaccgtggtgaaaaaattgagcttttggtggataaatcagaaaatcttcgctcccaggcacaagatttcaggcagcaggggacccagatgaggagaaagatgtggttacagaacatgaaaataaagctgatcgtgctcgggattctgatcgccttgattctcatcatcgtactgtctgtctgtcatggcttcaactgttgatgaatcactcagttgctatattctattcatttgcccactcattgatcggtgttgtagctgtcaccagtaatattgatgctcctcatagttagtagttacagttttctttaattccacgtccttttctgctgtagcctaatatcagaagactctctgcatatatactgagattcgaacttatgaattggattt

SEQ ID NO: 3078 - DNA, 252 bp, Gossypium hirsutum
  Clone ID: LIB3083-068-Q1-L1-F10
tctacaaacatttcgtaagcatacattgagatgcataattatgcactacttttcagagagtgtaatcatacaatgcaaaatggtgcaccgtatcatagatctgttaataataaactgcataatatttctatatgcaactgcaatgctctaattatgaatgtcttacttcatatatggtgggaaccgaatcagttttcgagctggatccagaccgtatttgcaccatcatcttgctccccatcgctcgggctt

SEQ ID NO: 3079 - DNA, 387 bp, Gossypium hirsutum
  Clone ID: LIB3083-068-Q1-L1-F11
tgatgaacttgcaaaggaggtattcgaagcttcagagatcagtggtgagaaattttggaggatgccactagaggaaagctattgggagtctatgaaatcaggagttgctgatatggtaaataccggtggtcgtccaggtggtgctatcacagctgctctgttcttgaaacagttcgttgatgaaaaagtacaatggatgcacattgacttggctggccctgtctggaatgaaaagaagcgcgtagcaaccggctttggcgtctcaactttggtggaatgggtgctgaaaaactcctcttaaatgaagaacttgagaaggattgaaaacctttgtttgttgggtaccgtgagatccatttcatgaataaaacatttgtaattaaaggg

SEQ ID NO: 3080 - DNA, 116 bp, Gossypium hirsutum
  Clone ID: LIB3083-068-Q1-L1-F12
cgataaacgttttaaagagtttatcatagctagatacatcatggtgattaggctctgtcggatgcgactggaggaaaccatttgggaggttatgcctttacgcgtgagtgctatgg

SEQ ID NO: 3081 - DNA, 395 bp, Gossypium hirsutum
  Clone ID: LIB3083-068-Q1-L1-F9
gctcaaatgaggccaacggttgacatttcagtgcaccctgatgctgattttgtgcgaccagagttgcgtcaatctggcaattgagtaggtggaatcttggaacttgagtgggcagctatagtgtgtttaagccaaaactttcacctcgtttataaatgagtgatgtagttttagctatgtctttagggtgtttgaacactaatggcactagattcccttttttttttcttccttatcagcctcttctttgatatgactcctttggatttactcgagaatgcttttggtgaatcttttagactgctttttgaaagttttgttgaagttatatattgagtaagcaaaacagtttattgttggagataaaaaaaaaaaaaaaaaaccttgaggggggg

SEQ ID NO: 3082 - DNA, 363 bp, Gossypium hirsutum
  Clone ID: LIB3083-068-Q1-L1-G10
ctcggaaataattctaaacatgtccggtggataccctcaacaccctcccggctacggttccccaccagctcagccttacacagccgctccatacacagctggagcaccgccgccacctcaaccgtacggtgctccatacgccgctgcaccatacggcgcaccttctgctccctactctgcccctctaggcgagaaaccaccaaaggacaagcaccaggcgcatggcgtcggtggtgctcctcccgttcacagcggaagctatccttccgcaggaggctatgcgaccccgttcgcatctctgttgccgtcggcattttccaccggggactagatcctaacgttcgtttccggcttttaaattgg

SEQ ID NO: 3083 - DNA, 341 bp, Gossypium hirsutum
  Clone ID: LIB3083-068-Q1-L1-G11
cccaaaagcttgaattttccgatctgggtagggtcgatggcagaattggacagtagcagcaccagctcatcatcggggtccacgttcttcaatcgctccttcacgatgcacgcaaatacagctgaacccgatgcccccaaagtccatcttcttctcaacaacccatcgtctcttaatcgagcagcttccatttccaaaatttacaattcaatcgattcagtcaaaggtaaagtcaaaaagctttgcaatttattcgagtccgcgaaatcttcatcaaccagtacagaactttcccctaaagttgttttaagacccgcgaaatcaatcgggtattcatcttc

SEQ ID NO: 3084 - DNA, 350 bp, Gossypium hirsutum
  unsure (1)..(350): unsure at all n locations; Clone ID: LIB3083-068-Q1-L1-G12
ggctagtgaaaacagccttagccaagcagccccatggccctggttgtgtattggtacgatttcatttgttttggcgttgtagcggctgccttcatcgggtcattatgggtactatggaagaaagaagccgcgtctagatgcgatgaggaaagcgtgtacgagagcctattagaggctcgaccggacgctgacggctttatacgtgccacaccgagggctcatgttggttccaaccagttatggaccagttgttggatcagggtgcaccctggatggctagtgctcactcgtttcgtttcattcgcggtcatggcggngttcttggtgtgggatatagtcgaatgggatgc

SEQ ID NO: 3085 - DNA, 122 bp, Gossypium hirsutum
  Clone ID: LIB3083-068-Q1-L1-H10
tagcctttttcttttctttgcttagcctctctcccccaacatcaccgatggcagagtaggatataacccgagaacaagcgaacaaatggacaccgcccgccgcaacccaaccctttcttttc

SEQ ID NO: 3086 - DNA, 321 bp, Gossypium hirsutum
  Clone ID: LIB3083-068-Q1-L1-H11
tcccgatgcatcaattgaggatgatgatgatgatgtagaagaaaccgagacagaatcggacacaaaagacagtgcagtcaaagatgagttgtagattgcctgaaacctcggggacatgccttttgagttagttttaccctctgatgacaagccgaaggaactgtaacatgcattttcaagtctgaaacttggataaagggaaacattacaaacattacttagtagaatatatgtaaaccgtagtcgactgtgaaattaatctgtctgcaatttttgctcttttaatgcatcgcagtggttttaagattttcgcgtattaat

SEQ ID NO: 3087 - DNA, 159 bp, Gossypium hirsutum
  unsure (1)..(159): unsure at all n locations; Clone ID: LIB3083-068-Q1-L1-H12
ttaccaacttcactaaaaggcttttgcngaaaaggcttagaagagggcgtctgcaaatcttacaaaggctcccgtcatccccaatattgattgtgaccactatgttaacaatagcacgtcctttaggaaggcaatgtgcttcctgatggacccacaaat

SEQ ID NO: 3088 - DNA, 369 bp, Gossypium hirsutum
  Clone ID: LIB3083-070-Q1-L1-A10
ctattttgtaatccatggctcataacattcgtcaccctttcttccttttccaactttttctcatttgtgtctcaccaatgatcggtagccacactgtctcggcaacggctcgacgtttattcgagacacaaacaaccttatcggagctgccacaattggcttcaaaatacgaaaagcacgaagagtttgaatatgaaaagtcagaatacaaacagccaaagtatcacgaagagtaccccaaacatgagaagcctgaaatgcacaaggaggaaaaaaaaaaaccctgcaaacaacatgaagagtacgagaaagaaaaacctgagttccccaaacaggaaaagcctaaagagcacgagatacacgaagtcg

SEQ ID NO: 3089 - DNA, 367 bp, Gossypium hirsutum
  Clone ID: LIB3083-070-Q1-L1-A11
tcttctttcatgctgatcaccaacatcaacctaagcgtcacagccaaaaacccaaagaagaaagtcgtctacagttacaacccaatcaccgtatcgcttgtcacagacgacgacatcgctattggagaaggttccttcggtgtccttcgtgcacggaactaaaaacacgaccctcttgaaagctgccataactagtagcaaccaagaactcgatgacgcgtcagctgccaaattgaagaaagctttgaagagcaagaaggggctgccattaaagataaagctcgatactaaagtggaagcaaaaatgggagcattgaaaacaccaaaggttgggataagggttgtttgtgaagggattaaagctact

SEQ ID NO: 3090 - DNA, 305 bp, Gossypium hirsutum
  Clone ID: LIB3083-070-Q1-L1-A9
atgacaacaatacaccaccacggggcttttgcttcttcgaattctcctccatctcacggtaaaaagatctcccttcccctctctttctctccggcggcgatctcaaatcaccggtaaatcgcaccggaacgcccgattacttcgcacctttgggatcttctctgacacctcggggtttcagcttattctaactcgtcgccatcatgaatcccgaatatgattatctggttaagcttttgcttattggtgattctggtgttgggaaacatgtctacttttgagggtttgttgatgattcatatttg

SEQ ID NO: 3091 - DNA, 382 bp, Gossypium hirsutum
  Clone ID: LIB3083-070-Q1-L1-B10
gaaccctctgttaatctcatcgtcatttcctgactgtttgatctttttcttttgctcgatctgaatctggttaaaataacagaagaacaatggaagagctgaaatcagctgtggaggagcacatggaattaatggcggatctagttcagaagctatcctcggagcttcgttcgggcctccgacccgcctatgataactttatgggcttcttccatgcaatcgactggaaggagccatggttaatgtgcttactggcattccatgttttcttattgatagtaacaatcttctcgaggaagaatactaacttccagatgtgtttgttccttctggcattgctcggtgtttattttgcggagttactgaatggattccttggtga

SEQ ID NO: 3092 - DNA, 250 bp, Gossypium hirsutum
  Clone ID: LIB3083-070-Q1-L1-B11
gattaaagtttttattttagagactacagaagacggggtcgtgatgaatttttaaaggactggcgccaataaaatatatttgctaatggtaggaaacctgtatatcatatagtatatgacggaaaaccatagttgttaggaaggtcacctgaactaccaatagagctacagtcattcaatccaccagtggattattattttatagaaattttggttgaaaatgtattctatgtatctattatcgtgcctt

SEQ ID NO: 3093 - DNA, 397 bp, Gossypium hirsutum
  Clone ID: LIB3083-070-Q1-L1-B12
gcatcgcgtattgaactcgggaatcatccttaccaatgaaactccattgaaagatgacaaggaagaggaaatggccaaatccgcattggctttgtttcgagccaaagaagaagagattgagaggaagaagatggaggtgagagacaaggttcaggcttatatgggacgcgtcgaagaagctactcgccgcttgtctgacattcgagaagagcttgatgccctgatagatccaatgagaaaggacattgcatttctgcgtaagaagatagacaccgttaaccgggagctgaaaccattgggacagagctgccagaagaaagaaagagagttcaaagaagctcttgaagcctttaatgacaagaacaaggagaaaacacatcttgtcagcaaattaatg

SEQ ID NO: 3094 - DNA, 222 bp, Gossypium hirsutum
  Clone ID: LIB3083-070-Q1-L1-B9
gttttacggtatattcttacaaccctatacttgaggcccaaggagacttaataacggtctaaagggctttaataatttttctcacacaaaaacctttaaataaacttgccattttaaaattaaaaaatatctttttttttaccgcactgtttattgcacttcattaatgatcatcttttaaacactaacctttaataactaacctccattatatgggtgaaa

SEQ ID NO: 3095 - DNA, 369 bp, Gossypium hirsutum
  Clone ID: LIB3083-070-Q1-L1-C11
gggaattcccccagaccaacagaggctgatttttgctggtaagcaactggaggatggccgtaccctggctgactataacatccagaaggagtccaccctccacttggtgctccgtcttcgtggtggtatgcagatttttgtgaagacacttactgggaagaccatcaccctggaagttgagagctctgacacaatcgataatgttaaggccaaaattcaagataaggaaggtatccctccagaccagcagaggctgatatttgctggaaagcagctagaggatgggaggacccttgcagattacaacatccagaaggagtccaccctccacttggttttcgtctccgtggcgggatgcaaattttcgtg

SEQ ID NO: 3096 - DNA, 199 bp, Gossypium hirsutum
  Clone ID: LIB3083-070-Q1-L1-C12
ggtttttcctttttaccaacagaggctgatttttggtgttaagcaactggaggatgggcgtaccctgtcttactataacattcataatgagtccaccctccacttggtgctccgtcttcgtggtggtatgcatatttttgagaagacacttactgggaagaccattaccctgtaatgtgagagctctgtcacaatcatt

SEQ ID NO: 3097 - DNA, 270 bp, Gossypium hirsutum
  Clone ID: LIB3083-070-Q1-L1-C9
ttttattccttttttgctttttagaatttttcttaatcgagggtgagagagtgcgtggcgatccacatcggtcaggccggtatccaggtcggaaacgcttgctgggtactttactgtcttgagcatggaatccagcctgatggttagatgccaagttgacaaaactgtccgaggaggtgatgatgctttttacacctttttcagtgaaactggtgctgggaagcacgttcctcgtgccgtctttgtggatcttgaacccactgttatttg

SEQ ID NO: 3098 - DNA, 349 bp, Gossypium hirsutum
  Clone ID: LIB3083-070-Q1-L1-D10
gctctgtcaattttttcttaatttttaagttgtatataaaaaaaggttgagaatgtggttggcgatcatctgcggaattatcatttaccagttgttccggcgcttcttttatggtggcaacgatgttttagacgtggaaacctctgattttaatgctattttctccgtcgccaatcgactagaaaagcttttgtggtggaaaagtgtatgtggggcttaacattcctgatgctgacactggttctcgaaagagtatcgatattgttctcgttaccaaaggagaagcagcggttatttctgtcaagaatgtgtcggggtttgtttctataaatgatgatggtagctggac

SEQ ID NO: 3099 - DNA, 393 bp, Gossypium hirsutum
  Clone ID: LIB3083-070-Q1-L1-D11
cacctacaatatataccacccttacacgtcatggatcccgataactgtgtatatatgtttaagaaatgttacccaatccttccgaagctacagtttaaccctttttgcatggcttggaaagattacactggagacctatatctcgcagattcacatctggctaagatccgggattccagatggtcagcctaagctgctcctttctctgatcccagattacccaatgttgaatttcatgcttacgacttccatatacctggcaatttcttacagactctttgacttgacaaatatactgaaatcagcttttgtacctaccaaagacaacaagcgccttcttcacaacttgattactggtgttgtagtctcgagcatattatactctctctcttt

SEQ ID NO: 3100 - DNA, 336 bp, Gossypium hirsutum
  Clone ID: LIB3083-070-Q1-L1-D12
ctttttcttttttttcctaaaacaaaatttgtaggggctaagcaactggaatagagggttctgaaattaacttaaagaacaacaaagaataaacaaccattacttgtaacttcactatgatatggatccaaagaactgtatgattgtgatttaccgattagatttccgagtgtgttctgaaaaatgcaactatatagcagcattcccattactccttactcgaagttcgacactcctcaaatcgcgaagattttgtaaaatctcttgaagaaaatagatccctttatctccttttcttaaggagctgatacaatgttttagaaactccctatctgc

SEQ ID NO: 3101 - DNA, 386 bp, Gossypium hirsutum
  Clone ID: LIB3083-070-Q1-L1-D9
cttattccttttttgctttttagaatttttcttaatcgaaaatgagagagtgcatggcgatccacatcggtcaggccggtatccaggtcggaaacgcttgctgggagctttactgtctcgagcatggaatccagcctgatggtcagatgccaagtgacaaaactgtcggaggaggtgatgatgcttttaacacctttttcagtgaaactggtgctgggaagcacgtccctcgtgccgtcttcgtggatcttgaacccactgttattgatgaagtgagaactggtgcttaccgccagctcttccacccagaacaactcatcagcggcaaggaagacgcagctaacaacttttgcccgtggtcactacaccatttggcaggagattgt

SEQ ID NO: 3102 - DNA, 407 bp, Gossypium hirsutum
  Clone ID: LIB3083-070-Q1-L1-E10
ctacaaaaaaacccaaatcacagacaaaagttcacaaagaacccaaaagttgattacttttttgataacccaaaacacgaaaatgggtgcttctgaatcagttcctcaaaaatcaatccatgaatttacagtcaaggattacaaaaaccaagatgttgaccttagtatgtacaacggaaaagctcttcttgttgttaatgttgcctctaaatgtggactcactgattcaaattatacccagttgactgatctttacaacaaatacaaggaccaaggactggagattttggcattcccatgcaatcagtttttgagccaagaacctggtaccagtcaagatgcacaagaatttgcttgtacaagatacaaggctgaataccctattttccaaaaagttcatgtcaatg

SEQ ID NO: 3103 - DNA, 408 bp, Gossypium hirsutum
  Clone ID: LIB3083-070-Q1-L1-E11
ttttcgtgcttttttttttttagccgaactactcgtcaaatctattgcaggccatatagtcttgaacaaagcttacaagagtcgaagttcacacaatagaataagcaaaaacacacgataaaaggaaacaaatcattgggtagcaaaatgcaagccctccactcaaacattacttatttagtactcatcttcaccttcctcatcaccctcgcctgactcagcaccgacttcttcataatccttctcaagtgcagcaaggtcctcacgagcttccgagaattctccttcttccataccctcacccacgtaccagtgaacaaaggcacgcttggcatacatgagatcaaacttgtggtcaatgcgggagaacacctcagcaacgctggttgagttggaaatcatgcaaac

SEQ ID NO: 3104 - DNA, 417 bp, Gossypium hirsutum
  Clone ID: LIB3083-070-Q1-L1-E12
caagcttgcacatttcgctgttatagtttctcagcagtactcagagaaagaggctgctattagtttccttgaaggggtgattgaaaagcttcaggctactaaagagcagcgcatagaagagccaattctttatattaagatgcagatttccaaattcaagcttgagcaaggtgatcaaaaggagtgcaagaaacttcttgaagatgggaagagtacccttgacagtatgaccgacatagatccatctgtatatgctacctattactgggtttcatctcaataccataaatttcgccaagaatttgctgagttctacagaagtgctctcctttatcttgcgtacacatcagtggagtctctctcagaatcttttaagctggatttagcatttgatctgtccctttctgctcttttggg

SEQ ID NO: 3105 - DNA, 414 bp, Gossypium hirsutum
  Clone ID: LIB3083-070-Q1-L1-E9
cgaaagcgcttgagttaattttaagtgtaggtcagccttaacaaaaaaatgtctcggagatatgatagccgcacaacaatcttttcccctgaaggccgtctctaccaagtagagtatgcaatggaagccattgggaatgctggctctgcgattggaatactatcgaaggatggtgttgtcttggttggtgaaaagaaagttacttccaagcttcttcaaacctccacatctacggaaaagatgtacaagattgatgatcatgttgcttgtgccgtggcgggaataatgtctgatgcaaatatcctaatcaacactgctagggtgcaagctcaacgatacacatatgcttaccaagagccaatgcccgttgaacagttggttcaatctctctgtgatacaaagcatggttatacc

SEQ ID NO: 3106 - DNA, 407 bp, Gossypium hirsutum
  Clone ID: LIB3083-070-Q1-L1-F10
ctcgtgccgcataaagcaaaaatggagaaatctcagatctgggtggcctttggagtcttggccttgctattggcatcggcaacggcggatgacgtcgttgtactaacggaagataacttcgagaaggaagtcggtcaagatcgaggagctctcgtcgagttctatgctccttggtgtggtcactgtaagaagcttgctcctgagtacgagaagcttgggtcaagttttaagaaggctaaatccgtcttgattggaaaggtggactgtgatgagcataagagtgtctgcagcaaatacggtgttcagggctacccaactattcagtggttcccaaaaggctctttggaacctaaaaaatatgaaggaccacgaactgcagaggcccttgctgagtttgtcaacactga

SEQ ID NO: 3107 - DNA, 384 bp, Gossypium hirsutum
  Clone ID: LIB3083-070-Q1-L1-F11
agaacatcgattatagtcgagaaaaggaaaataaagggattggggaagagagcaatgagacggagaagagtgaaggtgagatagagaatgcaggtagctcggatgatcgggttcgtgatggaattgatgggaataatgaagaagcgagagaagaacattacaagggggatgatgcttcaagtgaagtagtccatgatacccaaaatgagacgagtggttcagaaaattccaacgacgctgagcagttggaaaacaaagataagaatgaccgggaggacgaaacaaatagcagtgaagcggccaatgtcggtcatgaagagtcgaatgtgcaagaaaatggaacagcttgaaacaatcaataaagcagtaatgtgagtaacgaag

SEQ ID NO: 3108 - DNA, 326 bp, Gossypium hirsutum
  Clone ID: LIB3083-070-Q1-L1-F12
cctattcccattcaacaacatatccttcaaatacgcgcaactgttgaatcaaaccaagaatcctttggtttaaatcataactttgacgcaattcttacataacccaaaattttctctatctttgttggcttttggtgctcaaaaaggaagacagtattttttttgatcgcctgtcactgcagattacttgcatctcaagctgattcttagtatttgtgctattactttaacttatttttaagtggccttgggagactgtggttgtgattctgaatgataactggtgaagacaagaaggtgaaattaatcatcattatcaaggaatg

SEQ ID NO: 3109 - DNA, 375 bp, Gossypium hirsutum
  Clone ID: LIB3083-070-Q1-L1-F9
ttcgtagtcgacgttgttgttctttgtgggttttcattttatttgaatttttattggacaaagaaagaagttgtagcaagatgatgctcaggattaagagggttccgactgttgtttcgaattaccagaaggatgagactgaagagactgctcgccgcagcagtgggtgtggaaagaattgccttagaagctgctgcatcccaggagcgaagcttcctttatatgctttcaggaaactgaacaatattgagagtgaaaaagtggtgcttggaattgagaacaaagaaccccctgttgcttttcttgactcgctcattcttggggagtgggaagatcggatgcaaagagggctctttcgctatgatgttacctgct

SEQ ID NO: 3110 - DNA, 396 bp, Gossypium hirsutum
  Clone ID: LIB3083-070-Q1-L1-G10
cttcttcccatttcttcattacattgttcaagaaaaaagaagcaaaaaaacatggccaaagttctgttgttcattgcactatgtgtgcttccagctttggttagtgctacacgcattctgaataatcaattggtggtagaaggctatgtgtactgtgatacttgccgtgctggttttgaaacccctaagactagaagcctagctgatgccatggttaggttggtatgctccgacaggaagagcggccaagttgtcttcaaaaaggagggatacaccgacaaaaccggaaaataccagattcgtgtatccgaggatcacttgggatcagatctgtgatgcaagttcttgtgaagagcttccagcttgggtgtgccacaatggcccccccgtcgtgaa

SEQ ID NO: 3111 - DNA, 380 bp, Gossypium hirsutum
  Clone ID: LIB3083-070-Q1-L1-G11
ccgagatacagctgaagaatgcaatggcttccaatgaaacaagtcaagaacatcttaatgaaatggaaaccgttattgattcactaaaagtaagcatttatgaagctgaaagtagagctgaaagtgcagaagctaaggtctcagagttaacagatgcgaacttggaacttaccgaagagttgaattttcttaaaggtaataacgagaaaagcacaaagaaggtgacctcactagagaagcagttgagggaatcggagattcaactacagcatgcaaaagcgtcttccgaagcaagtcaggagcaacaaaacatgctctactctgcaatttgggatatggaaactttaattgaagatctaaaatcaaagggtttaaaaagc

SEQ ID NO: 3112 - DNA, 347 bp, Gossypium hirsutum
  Clone ID: LIB3083-070-Q1-L1-G12
tataatttcaatttattttgttacacaaatgaaacaatattctctggtatgtgacagaaatacaaaccaaaaagaaagaaggtatgacaagcaattgtaaagtaaatcacaatcaccccttagcttatgagttcctagaaactatagcctgtaatagcgatcaaaatggcaatagtcaatcctgtccttgcccaccaaagctttgttcctgccaccaacaatgaatctcctccattcaaattgagactaggtgatggtgctggtgtcgtgtcatctgtagttggcactgcaggtggtgctggagggcttggaactgatggtgctggtgctggtgcatggtggtgtct

SEQ ID NO: 3113 - DNA, 403 bp, Gossypium hirsutum
  Clone ID: LIB3083-070-Q1-L1-G9
gtcaatataaaatttagacccagaaaaactgcaaccccaattgtttgaactgaaattattgtaggataatgttgataacggtcagggaagcttcttcttggcctctcaccttcaacctctcctctttctcttctcctaagccttcgccaatactcaaaaactctgtttgcagagccagtttaagtgttcatccaaaacccacctccaattcccaatcatggaaccttggtcttctttctaacagccaaaaaggatctgtttttgatcctttgggtatcaaccctgacgagtcttcatgtttaaatggtgtttgggatagttttctatccttgttaacacctacatttgagagtacctcaggtactagaaaggagaaaatcttttcagctagaggagtggcagc

SEQ ID NO: 3114 - DNA, 320 bp, Gossypium hirsutum
  Clone ID: LIB3083-070-Q1-L1-H10
cctattcccattcaacaacatatccttcaaattcccgcaactgttcaaccaatcaagaaatcctgtgtttcagatcataactttgacgcaattctcacataacccagaattttctttttcttttttggtttttggtgctcaaaaaggaagtcggtcttttttttgtttgtttgtcactgttgattacttgtttttcaagttgatttttattatttctgctatttttttaactttctttttgttcccttgggagattctggttgtgattatgaataataactggagaagacaaaaaggtgaaattcatcatcatcatcaag

SEQ ID NO: 3115 - DNA, 407 bp, Gossypium hirsutum
  Clone ID: LIB3083-070-Q1-L1-H11
atgacatctgctggcgttctttggacattgaacgacccactgagacgaatcttaaccgccttggggctcaggttatctcatctcttaccgcatctttgaggtttgatggagccctgaatgtggatgtgactgagttccagactaacctggtcccatatcccaggatccactttatgctttcttcttatgcccctgtcatttcagctgagaaggcttaccatgagcagctatcggtggctgagataaccaacagtgcttttgaaccctcttcaatgatggccaaatgtgacccacgccatgggaagtacatggcttgctgccttatgtaccgaggagatgttgtgcccaaagatgtgaatgcgggtgtggcccccatcaagaccaaacgcacaatccaatttgtggat

SEQ ID NO: 3116 - DNA, 363 bp, Gossypium hirsutum
  Clone ID: LIB3083-070-Q1-L1-H12
cgtgttttttttttttttctttttttaataaaaaaaaattacgatacaatgttttcgtcatttgtttcttttaaaatataaaaacattagactacataatttcaacacttttttcatacaattaattcatcgaggaaagttttccagaaaccatgaaacaaacatatgccaattttccaatcattcttcccccccccacccccctttttttctgaaaatgtaaacacaaaaagatcataattattatcaaccagcggccattgaagtaaatttaagctctcacagggtatctatcaatgcaatcaacccatgggttatccctggaaggcttccttacacgacgcatggatcgccaaaccacac

SEQ ID NO: 3117 - DNA, 373 bp, Gossypium hirsutum
  Clone ID: LIB3083-070-Q1-L1-H9
cggactgtctatacggcaatgttttagcagctaagtcctttgcgcgtttcggcgtcacccacatgtttggcgtcgtgggtatccccgtcactggcctcgccaaccgtgcagtccaattgggtatccgttttattgcttttcacaacgaacaatccgctggttatgcggcttctgcttatggctacctcacgggccgacccggtcttctcttgactgtttccgggcccggttgtgtccacggtctggccggtttgtccaatgctatgatcaacacctggcccatggtcatgatctctggctcccccgatcagaaggattccggtcgtggagatttcaggagcttgatcagatcgaagcagtgaaacccttttcg

SEQ ID NO: 3118 - DNA, 278 bp, Gossypium hirsutum
  Clone ID: LIB3083-071-Q1-L1-A1
ccggtgctagcagttgtactagtgaagtggtgatggcagttccagttatgatttaaatgtgagtttgttttacattaaaaacatgtgtggttttagttgaagatttgagtaatctataaattgggtgtttgtgagagatgtagatttgtaaattgtgtatgaaatgaagagggagttggagactcatatttttggtcttgtttcagtttgtatttgatatgctgaactcttaaaacttgcttctgcttctataatcattgtttgaatttattggataa

SEQ ID NO: 3119 - DNA, 354 bp, Gossypium hirsutum
  Clone ID: LIB3083-071-Q1-L1-A10
agcagttatggcttgttgggatcttgagcaatcacttcaaagtttaacaggtgtatctccaggtgaaggcactggtgcaaccatgtctgatgatgaagatgaagttgtagatagtgataccagcttgtttgatggaagttttgatgggattgacagcatggggtttggccccctcgtcccatccgagactgagagatcactaatggagcgtgttaggcaagaactgaagcacgagctgaaacagggttacaaagagaaaattgtggacattagagaggaaattctacgtaagagacgagctggaaagctaccaggcgatacgacctcgtttttaaaagcttggtggcagtcaca

SEQ ID NO: 3120 - DNA, 361 bp, Gossypium hirsutum
  Clone ID: LIB3083-071-Q1-L1-A11
cacaaggcaatcctaatatggtaatggcactggccgggaacaaagctgacttactggatgcaaggaaggtggcagcagaggaagcacaaacttatgctcaggagaatggtcttttcttcatggaaacttctgcaaagaccgcatccaatgtcaatgaacttttctatgaaatagctaaaagattacctcgagtgcagccagcacaaaatcctgctggaatggttctcatgaatagaccttcagaacggactgcaactgcatcttgttgctcttaggcgatggtcgttgttttcccacctgtatcatctaaatagctcttgtaatgctccctggctctgcaaccaaagttttatctttcctt

SEQ ID NO: 3121 - DNA, 358 bp, Gossypium hirsutum
  Clone ID: LIB3083-071-Q1-L1-A12
gagagagagagagagagagagagagagagagagatcccatctgagatatttgtggcaatgaataagaaaattgcaggatcgtcctcgagaccaagaaagcccacaggtacggttttaccataccaaacacagagaataagggaccactatttcttgggcaagaagcttgggcaaggccaatttggcaccacctacctatgtaccgacaaggttactggtatccgttacgcttgcaaatctatcccaaagcgcaagctcgtctgccgtgaagattacgatgacgtctggagggagatccagatcatgcatcatttgtctgagaacccattcgtggttcagatcaagggaacttacgaag

SEQ ID NO: 3122 - DNA, 104 bp, Gossypium hirsutum
  Clone ID: LIB3083-071-Q1-L1-A2
attcggtctgttttcccttggttgtgtattcattgtagcaaaacctgaaataacttgagagctaacttgtaactaaatgtttgttcaagttataagctgcaata

SEQ ID NO: 3123 - DNA, 325 bp, Gossypium hirsutum
  unsure (1)..(325): unsure at all n locations; Clone ID: LIB3083-071-Q1-L1-A4
tgtcgggaaagctcaaaaaaaatctgaaagggaggctgaactgaaacatcgatttgagcaaacaatgaaagaggcaccagataaatttcagggagcaaacttgtatgtcaagaatttggatgatagcataagtgacgaaaagcttanagagctattctctcaatatggtaccataacatcatgcaaggttatgcgggaccctagtggaataagtaaaggatcagggtttgttgcgttttcgaccccagaagaagcttctagagctcttgcagagatgaatggcaaaatggttgtcaacaaacctctctatgttgcacaagctcaa

SEQ ID NO: 3124 - DNA, 361 bp, Gossypium hirsutum
  Clone ID: LIB3083-071-Q1-L1-A5
ctgaaatccgagtcctaggaaagatgcgtgagattcttcatattcaggcagggcagtgcggcaaccagatcggtgccaagttttgggaggtggtttgcgccgagcacggcatatattcaacgggacgctatcaaggggacaatgatttgcaactggagcgcgttaacgtttactacaatgaagcgagttgcgggaggttcgttccacgagccgtccttatggacttggagcctggcactatggatagtgttagatccgggccgtacgggcagattttcaggcctgacaactttgttttcggccagtccggtgcagggaataactgggccaagggtcattacacggaaggggccgagttgat

SEQ ID NO: 3125 - DNA, 363 bp, Gossypium hirsutum
  unsure (1)..(363): unsure at all n locations; Clone ID: LIB3083-071-Q1-L1-A6
gttcgtaaattgattcacctgcaaatggggcgaccatggtttaaggttgtaacaaaaataaaatatctgaaactgttaacggtgatgcttcagtaaaaatttctggcagggaactccagtctgaaaagcagcatgatctatcaccaccagtagatcatgtatcagatgcagacanattgcctgttatgaagcttcgagcacagctctctttggtgcttcaatcaatgtctaaggatgctgatatgcaaaaaattctggaggacatcaagcatgctgcacaggatgcatgtgacaccgtggacgagcactctgtcaatggtatctctgaagtgaatggctttgatggcacatgcaacgagcatg

SEQ ID NO: 3126 - DNA, 255 bp, Gossypium hirsutum
  unsure (1)..(255): unsure at all n locations; Clone ID: LIB3083-071-Q1-L1-A7
tactacagggtctatttatcgggtattactccgtcttatacggcgaccaagtgaagctatcactgaagccatnttccagctattgactcatcggctctcctcttgccatctccctctcctccaatccagttctttccttcgaccgggctccttgtctcggcgtgttcttcaccggtgaaccccacaccatttacggtctaagtggcttccccctccgccttgccctttttcttctactcgtcttggtcctgcttt

SEQ ID NO: 3127 - DNA, 203 bp, Gossypium hirsutum
  Clone ID: LIB3083-071-Q1-L1-A9
accattgtcagtttcagagttgttattctttcaagtaagactctgatttctccaatagtggcaactgtatataatggcgatctggttgcaagacaatctgatctaaaacccattacctttccttcatccaccaccaaaagggtccccatcgtgaaatgcgaagactagttttccaccaccactactacagagctcgagcctgt

SEQ ID NO: 3128 - DNA, 336 bp, Gossypium hirsutum
  Clone ID: LIB3083-071-Q1-L1-B1
gcaacatggtggtctgattcatcccaaggttctggaaattatgggggtgctcaggcaaatggtcctcatggtggacaaggtggttatggtggtgggtatggcggtgcacagggccgacaagctcagcaacagtgattctatcacaagaaagacaacttgatctcaaactcttctgcgcatgaccttctctttgctcttgtaattgtgatggtttcttacgcgagcagcaacaggagaggttcaagttggatgataaatcaccttgggaccggttggattgcttgaaaccctgtagtttgcagtatctgttttgctagtcataataagtagttttga

SEQ ID NO: 3129 - DNA, 346 bp, Gossypium hirsutum
  Clone ID: LIB3083-071-Q1-L1-B10
aaccataaatcatggttttcatagaaagttttatttctcactcgacaaatgtgttataagaacgaaaaagaggagacacttccaagcaagtttctaaataatacatactaccaataacaaaacaaaagaaaaaatgtgaatttcatttctgataaccggcacatgaaacaaacaggtttgcattcttaacccaatagctattttctactaagatcgtgaaattagaccgactttgcaggccatgttgcttgagctgacatgattatacctacgatcaccccgaacagtccaagtgcactgccaaaaatctcaatcacaagaatcttcacaaacagtgaggagtttt

SEQ ID NO: 3130 - DNA, 372 bp, Gossypium hirsutum
  Clone ID: LIB3083-071-Q1-L1-B11
tggcaacagcagcagcttcgacaaagacaatttctcagatttcttgtttctcttcaatcaaccggagatttcagctctatcatcgttcaacttttcgtccggttactcgctcaaagtcatttgttgttacaagtgttgatgggcatggtgctgaaactactggcaatcaacctaaaactacgccaagctatattgctggagaatcaaaagcatttatagaagatatgcctaggacatacccaaatgcagaagagcatgttcctgaaaatacaagtgatttagaagaggaacatggtatcatccaacaaaagagggcagcaaaaatccatgatttctgttttggaattccttatggtggtcttgttctaagcg

SEQ ID NO: 3131 - DNA, 343 bp, Gossypium hirsutum
  Clone ID: LIB3083-071-Q1-L1-B12
attaaaagaaattttgacttgatttaaattttacaaacaacaaataccattattaatggtattattctaaattttcatttttttttcagataaaaaatttatgtatataattatcaaaattaaagtgaagtttatatatgaaagtttgaaacaaaaaacataaaacaagtgattgaagtgtagtttccggtgaacttctcattcttcacataataattatttttttcatgctttgccaatgaattccacgtcaaacaggagaactgaatctgggggtataatgcatgaacctcctttacagcctgcacctttcattccatatccgagctctggtggaagcctt

SEQ ID NO: 3132 - DNA, 336 bp, Gossypium hirsutum
  unsure (1)..(336): unsure at all n locations; Clone ID: LIB3083-071-Q1-L1-B2
tattaaacctcaaaacttacttgtgaatccacatacacatcagctgaaaatttgtgattttgggagtgctaaaatgctggtaaagggagagccgaatgtttcttacatctgctcgagatattatcgtgctcctgaactcatatttggtgctactgagtacacaactgctatagatatatggtccactggttgtgtgatggctgagttgcttcttggacagccactgtttcctggtgagagcggngtcgaccaattagttgaaatcattaaggttttggggactccaacaagggaggagatcaagtgcatgaacccaaactacaccgaattcaagtt

SEQ ID NO: 3133 - DNA, 350 bp, Gossypium hirsutum
  Clone ID: LIB3083-071-Q1-L1-B3
gaaaaaactaaaataaaagtcggtattggcttcgaagcagagccataaaatcacctgtattaagcaatctcttccttaaatccaaccattaaaaaccctcgtttcttaaacatcagatcggatccttgaagcctccatcgattcatttttggtacggttttcgtagtatcgatcaaacatgagtttcctctttgggaagagaaaaactcccgcagagcttctgcgggagaataagaggatgctggacaaatctattagagagatagagagggagagggcaggtctttagaaccaagagaagaaactgattgcagagataaagaaaacttgcaagcaggggcagatgggag

SEQ ID NO: 3134 - DNA, 338 bp, Gossypium hirsutum
  Clone ID: LIB3083-071-Q1-L1-B4
cgtaatttaacatggggcccgtgtttttagttcactgctggaaaaaacctgtaaattagtgcttctcaaggaaataaaataaaattcagggtgtccgagaaacggcagtgaagaagctttaaacaaagagccttttctcttcttcgttaatggcagatctttcgttttcttgatttgcattttgagtttacggcctcgttagtgacttaactgagtttaattgttctgctgagttgaattaggaagtcatcggagatgctggacggaatctggggccgtggttttgcctccaaatgtaagtcattgataaaactgataaagagtcggatcgatgtaat

SEQ ID NO: 3135 - DNA, 354 bp, Gossypium hirsutum
  Clone ID: LIB3083-071-Q1-L1-B5
agcatcattaacaacatatactggctggaccagagatctataccgtgcatgaactggctgagcttatgtatgagacggtccgtgaatggccacgctatgtaaacgtacctttaccggttgcaaaggcaattgccatgcctagagaggtattactcaagaaagtgccattcccactaccaaatcccgacatcttcaatctggatcagatacatgcatttgcaaccgatactgttgtctcagaaaatgcgttaacttttatggatttgggtattgtgccccataagttgaagggttacccagtcgagtatcttattcaataccgtaagggcggtccacaatttggttctacagtca

SEQ ID NO: 3136 - DNA, 357 bp, Gossypium hirsutum
  unsure (1)..(357): unsure at all n locations; Clone ID: LIB3083-071-Q1-L1-B6
ctcttttttgggtttggaaggtgggtgaatagggtggtaattagtgccaatggctcggattgggacctctgcagctcacattgtgttggcaatatttgctgtggccatgtttgttgtgtccgggaccatggcacangatattgctccttctcctgcaatggctaccggagcaggctctgctttgccggtttccgctgtcttcttatgctcttccatgttggtctctttaattgctctcttggtgcattgaattcaaagcttttcaagactttatgacattggctacccttaatttcactctcactggtgatgaggggagtagcctctaatcttctccgagataatatttgggtgtta

SEQ ID NO: 3137 - DNA, 355 bp, Gossypium hirsutum
  Clone ID: LIB3083-071-Q1-L1-B7
gtgtttgtttgattcattccgaatccccaaaacatgactgcaatcgattcatcaaaagaacccatggcaaaccatgactaatattatatttcaaaatggccaactgaagtttagaaaaaataaatgctctagttgccactagcgactgcagggcacattttaaaagttcccatcacaacgatcaaattattaacttaatcaattaaacatgccaccaataattataacccttcttactagttttttgcctttttcttcctattgccttaaaaatacattggacaagattaagtaaattatacgaaaacctgccaataactgataacaaaactaaactaagcatgaatatgattta

SEQ ID NO: 3138 - DNA, 354 bp, Gossypium hirsutum
  Clone ID: LIB3083-071-Q1-L1-B8
tgattttaaggaaaaatggcagaagaattgacgttggatttggaagagcttaggcagcttcaaagcatcgcaaagagaccacgcactctatctcttatttcctctgagattcgcaacttggagaagaccttgaaagagaatgaaaatggggcttctcctgttactgctccacaaattccaactcccatttcaacctcagttaagactccagttaaccctgcactgagttatgttacacttgcctccttcagctgggatcaagataacgataaagtcaagatatatgtctctctggaaggagttgaacaggaaaaaattcagacagagttcaagccaatgtcattcgatgttaaa

SEQ ID NO: 3139 - DNA, 331 bp, Gossypium hirsutum
  Clone ID: LIB3083-071-Q1-L1-B9
agcgaatagccaagtctaaagaacaattatatttggttctcctcaaaatccgggaaaattattcagagttcagagaaatatcaactggctgcagttgcaattattccagttacaaaaacaacactaacaatgccctcaaagtccaaggcaaggaaaagcaaaattctgtaacaaaccttcggcattatctaataaaattataaaacttacgaaaacccaaaggaacgctaccaattcttaaccgataagcagtttgctctcatccaagaaggtgtaagtgggtacttccaggttgtatggtgctggacccttgcgaatcctgccagagaca

SEQ ID NO: 3140 - DNA, 361 bp, Gossypium hirsutum
  Clone ID: LIB3083-071-Q1-L1-C1
gttttgagactcaaggtgtcattcctgacatagttaccatggcaaagggtatcggcaatggattaccattaggtgcagtggtcactacaccagaaattgcacatgtgatggctcaaaaaattcagtttaacacttttggaggaaatcctgtatgttctgcaggtggacttgcagtgctcagagttatagacaaggagaagcgtcaagcacattgtgctgatgttggttctcacttgatcggacgcttgagatctttacaggacaaacatgatatcattggagatgtcagaggtagaggcttaatggtgggtgtggaacttgttaccgacaggaaggagaagacaccggccaaggcagaaac

SEQ ID NO: 3141 - DNA, 358 bp, Gossypium hirsutum
  Clone ID: LIB3083-071-Q1-L1-C10
tttatggctccttccaaagacacggagtcttgatttggatacgctctaacatttgtccgtacagataattcatactaaagatttaaccggaaaccaaagccatggaaatgtccaacgatctcgataggttgctctttttcgagcaagctcgtaaaatttccgaggctacttacgcttccaatcctctcgatgccgataatttgaccagatgggccggagctttactggagttgtctcagtttcaaagcgttccagattctcagaaaatgattcaagatgctatttcgaaactagaggaggctttatcgattaaccctagaaagcatgatgctttatggtgcttgggaaatgctcagac

SEQ ID NO: 3142 - DNA, 292 bp, Gossypium hirsutum
  Clone ID: LIB3083-071-Q1-L1-C11
acataaaagaatcctccattaataaaagctgaatacagcacaactctagggataatttacacacattaacaccataattcaaaatgcagttcaacacaacaaaggactagtaggaacacaaaaagtagatgaagatcccaacacacacacacacacagatttaatcatttcaatctctgggcttgaatggaataactctaatgattatttggtgggaaactggaacaagggcaacttcaatggaagggcccacccagaacacccaatggtcattccaagcatggtctttggt

SEQ ID NO: 3143 - DNA, 357 bp, Gossypium hirsutum
  Clone ID: LIB3083-071-Q1-L1-C12
taatatcgaacgaagaagaatttgttaagcgatcgatctgtggattacgatggaagtgcctgtctcatgggatgctctacgcaaacaggcaaggaaactcgaagctcagttggatgagcaaatgaattcatatcgtaagttggtctccagtaaggcttcgataaaaaatgacttggaagagaatggtattgaatctggtatcgaccgactactaaaacagctacaagaagtaaatatgaaaatgcaagactgggtctcatctggtggatctgaaatggtttctcataccttgactaggcatcaagaaattcttcaagatctcactcaggagttctatcggcttcgctctaaccttaa

SEQ ID NO: 3144 - DNA, 360 bp, Gossypium hirsutum
  Clone ID: LIB3083-071-Q1-L1-C2
gagaaacaggcagcaaaggcagaggccgctgaggaggaggaggcaccaaagcccaaaccaaagaatcctcttgatttgctgcctccaagtaagatggtactggatgactggaaaaggctttactctaacacgaagaccaatttccgagaggttgcgattaaaggattctgggacatgtatgatcccgagggatactcactgtggttttgtgactacaagtacaatgaggagaatacagtttcatttgtcacaatgaacaaggttggaggattcctgcagagaatggatttggcccgcaagtatgcatttgggaagatgttggtgatcggtgctaaccctccattcaaggtgaaaggacta

SEQ ID NO: 3145 - DNA, 362 bp, Gossypium hirsutum
  Clone ID: LIB3083-071-Q1-L1-C3
tcaaagacaaagaaagcggccatggagaaggaaagagagcaacaagtttacttggcaaggctcgctgagcaagctgaaagatacgatgagatggttgaggccatgaagagtgttgctaagttggatgttgagctgactgtggaggagaggaatctgttatctgtgggatataagaatgtgattggagcaagaagggcatcctggcggatactgtcttcaattgaacagaaggaggaggccaaaggtaatgaacaaaatgtgaagaggataaaggattataggcaaagggttgaagatgagctctcaaaaatatgcaatgacattctctcagtcattgataagcacctcattccatcttcctt

SEQ ID NO: 3146 - DNA, 109 bp, Gossypium hirsutum
  Clone ID: LIB3083-071-Q1-L1-C4
tcgtttttttgtctccttccaaaggcgcggaccccgggttttaaattttggaaacccctgattcctttgtcaacggtacttttttattgaccgaaaaccaatgccgtgg

SEQ ID NO: 3147 - DNA, 339 bp, Gossypium hirsutum
  unsure (1)..(339): unsure at all n locations; Clone ID: LIB3083-071-Q1-L1-C5
attcggacggggctttttttctggtgccaaaagatctaaagtctgaaactgatggagaactccaaagagatcggtgaatcaatggattttagagctgagctgtaaactgaagaggcggcaatgataatgttgaaactgaaaggagggtatcttgaatgattcatctttcaagcattctttcagaggatgatgtntcgggaagactgggcagatttactggccctctgcaaatttgctaaggtgcctactaaaacacgttcttcttgacattgaagaacnaaaaccggactcagttaaccattgggcagaaggtgttttgattttgatctncaatgttct

SEQ ID NO: 3148 - DNA, 352 bp, Gossypium hirsutum
  Clone ID: LIB3083-071-Q1-L1-C6
aaaaggatgtcatcccttgatgaagttaataccatcgtgaagggggcccgatcagatgtgtcaaaagttgtcaacgctgatgagtttgaatacaaggatcccgttgatggttcagtttcaaagcatcaaggtattcggtttttgttcgaggacggatcacgattggtcttccgtctctctggaactggttcagaaggtgcaactatccgtctgtacatcgagcaatacgaaaaggatccatcaaaaataggaagagattcccaagaagctcttgctcctcttgtggaagttgctctgaaactttcgaagatgcaggagttcaccggccgatccgcaccaactgttatcacat

SEQ ID NO: 3149 - DNA, 358 bp, Gossypium hirsutum
  Clone ID: LIB3083-071-Q1-L1-C7
cacttggccaaaaaatcgaagacaaagaaacacaggacagagagagaaactaagggtgaaaatggcctggtgtagtttaaggtctattcacgttccaaccgtcgatgtcggattactacgaactcgctccccgttagccgctgtcggtggagtcgttgccggctcttcatttttgcgatcttcctccagaaatggctctccttttgcttgcttaagcctatccacttctcctgggattaaggaggctgtggcaactaacaaagctccagcagcattgggaccatattctcaggccatcaaggccaataatcttctctttgtctctggtgttctcggccttattccagagactggaaag

SEQ ID NO: 3150 - DNA, 354 bp, Gossypium hirsutum
  Clone ID: LIB3083-071-Q1-L1-C8
agatcaccttacctcttttttttggataagagttctgcataaagacccaacttttatttctagggaacacaaatgaaaggaatttttttctttttttcttttagtggtggaatgatctcaaagttgtgaatttgaagctggtttagaggttgaagaaaagggtaaaaaaaaaatggggttcttttttttttttggaagaaatgaagaccaaagtttggaattttacagaggaataatttgaaagtttgggtttttcaaatctactttctaggggaaaggagaaaaaaaaagtgaagaagctgatttagaaaagatcaaagcaagaatttcccaaaaatggcgacgcttgtggag

SEQ ID NO: 3151 - DNA, 332 bp, Gossypium hirsutum
  Clone ID: LIB3083-071-Q1-L1-C9
gatgtattttttaagggtgaaaatggcctggtgtagtgtaaggtctattcacgttccaaccgtcgatgtcggattactacgcactcgctccccgttagccgctgtcggtggagtcgttgccggctcttcatttttgcgatcttcctccagaaatggctctccttttgcttgcttaagcctatccacttctcctgggattaaggaggctgtggcaactgacaaagctccagcagcattgggaccatattctcaggccatcaaggccaataatcttctctttgtctccggtgttctcggtcttattccagagactggaaagttcatcttagaca

SEQ ID NO: 3152 - DNA, 359 bp, Gossypium hirsutum
  Clone ID: LIB3083-071-Q1-L1-D1
tggagtttttaaacagtgataacaatcttgctatagttgaatatgttggtagtcaagctagttcctgtaacaaggaagtgaatggtagagcaggggaatctgatctggtgataccaggtgtgctaatcaaggataaaatttctgatttgaaagtgagttttactggttttgggagaattgcagcgagattctgtgagaatgatggaatctcaaatggtattagcagaatatggagtgaatggctagggaaagaagctcctataaatgatgataggttcaaggttccaaagcatgaatttgctgttgttacttttccttataattgtgatctaggcagaaagggattgcttgatgatgtc

SEQ ID NO: 3153 - DNA, 332 bp, Gossypium hirsutum
  Clone ID: LIB3083-071-Q1-L1-D10
tgtcttggttgtagtagctatgctttgtgcaggagccacagctcaatcaggttgcgctagtgtgttgatcggcatgtcaccctgtttgagttacattacagggtcctcatcaaccccatctcaacaatgttgcacacagctagctaatgtcgtgcgttcatcaccgagatgcttgtgccaggtccttaatggtggtggttcatcatttgggatcaacatcaaccagactcaagctttggccttacctgattcatgcaatgttcagactccacctatcagcagttgtaatgctgcttctccagctccagcaaactctccggtaggatcacctg

SEQ ID NO: 3154 - DNA, 215 bp, Gossypium hirsutum
  unsure (1)..(215): unsure at all n locations; Clone ID: LIB3083-071-Q1-L1-D11
aaaagaagaaaaaggcgggggggtattctaggaggaagggcgccggactttttgccaaaacaaaaacatngatgtctgggttcatcaaaggaaccctacaaaacataaatagaaccaaacagaccacgactctccactactttgtttaaacacatcaagaattactcgcctatgcacaaaccgcagtccctcaaaagaatacatgagcaaaacac

SEQ ID NO: 3155 - DNA, 354 bp, Gossypium hirsutum
  Clone ID: LIB3083-071-Q1-L1-D12
tgttccttctgccaccccatgtgactcatgtccaccgccagcctgaacacagtccatcgaactactctccaccaccagcatctgtttcaaatgtttcccatgaaagtagccaaggaagggttgatgaccatccttcttttagaccccatttgccacctgaattctacaagaaacctactgtgaaagtctattgcaaagctgatcctaattttcatctcaccatcagagacggtaaagttattcttgctccatctgatccctctaatgaattccagcactggtacaaagatgagaagttcaacacaagtgtgaaagatgaagtgggtttcccaagcttttctctgggtaataaag

SEQ ID NO: 3156 - DNA, 356 bp, Gossypium hirsutum
  unsure (1)..(356): unsure at all n locations; Clone ID: LIB3083-071-Q1-L1-D2
gaggatcttgctgctcttgagaaggattatgaagaagttggtgctgaaggtggagatgatgaanaggaaggtgaagaatattgatgctactatcgcaatatcatttattttgaagatgatgggttcaccctgtgagggtatcctgttctttcttattcgtgtgaggtttctcaaattatgcctatggaataaatttagtcatgtttgcttgtcatttttttgttgttagaaatgcttgtcttttacttatgatgctccataagaacatgaatagccttacaagctattgttctgtttttcatgttgtaagatttgtctaatgcctttttatgctatcaacggagtgatatttatat

SEQ ID NO: 3157 - DNA, 359 bp, Gossypium hirsutum
  Clone ID: LIB3083-071-Q1-L1-D3
gaaaacgctttcacatctctcttaactcttgtttcaagatctctcgaggtttcttttccccttttttgtacctgttgtgttatggatccagaaactgcacgaactgcccgagaatccctagatctggcatttcacatgtcaaatattcttgatacgggtctcgatcggcatactctctcggtcctcattgctctctgtgatttgggtttaaaccctgaggctttggctgctgttgtcaaggaacttcagagggaacctccaccatcaaccccgttgtcatcttcttcatcacaagtaccttaacttcggattttggtattttctagtaaacttacgagtaatgccctagaagtttgagt

SEQ ID NO: 3158 - DNA, 351 bp, Gossypium hirsutum
  Clone ID: LIB3083-071-Q1-L1-D4
acgagtcgtatcgaccacgctcttcctgtaccttctgttctcagaagccccttcaaaattgtcgatggtcccgctagttccgccgccggcaaccctgatgagatcgcaaagctgtttccgaatatgttcgggcaaccctcgtctatgctggtgccgaacggagtagacaatattggatctgatcagaagctaaagatcggcgtcgttttgtctggagggcaggcacctggaggtcacaatgtgatttgcggaattttcgattacttgcaggagcgtgctccaggtagcactttgtatggttttaagggtggtcctgctgggatcatgaagggaaaatacgtagaattgact

SEQ ID NO: 3159 - DNA, 333 bp, Gossypium hirsutum
  Clone ID: LIB3083-071-Q1-L1-D5
aaatcgggtccatgtcagttttatggttcattttcaggttcgaggttatcattctcaacagtcatggtgtttatcgtttattatcttgatacaaactaaaccattgcatcctcatcaaaatctaaacacccataaagcttcttcaataagtaattgtttagttgcctagtattgattctttttacatcaagtctatgttcgttttatagttcatgttcagggtttagagttatccttttcaacaatcatggcatttatcctttattatcttgatacaaacactaaaccacccataaaaacttcttcaacaagcaatcatccatatctatttta

SEQ ID NO: 3160 - DNA, 103 bp, Gossypium hirsutum
  Clone ID: LIB3083-071-Q1-L1-D6
ggggttccgccttttttaataaagcccaggttttttggccaaaccaaaaccatggttgttggggttcaccaagggacccctccaaaccttaattggaaccaac

SEQ ID NO: 3161 - DNA, 324 bp, Gossypium hirsutum
  Clone ID: LIB3083-071-Q1-L1-D9
aatagcaaataattttaggagacaaattgaataaaaatggtggttcaatacatacaattttatatgaatgtcgtggacagcacaacaagcatcaaatatatcaaaatctacacacacacaaaaaagcaaatttttaagaccacctaacagcagcaaatcaaacgtatacaactatatataatatcatgaaattgatgggcccttttctcacaccgacatagaccatgattttacaacaacctaattgcccagctcttttattaaattacccttcattgacaactgcattttaacaatgaaattggctgaaccaaagatcaggaa

SEQ ID NO: 3162 - DNA, 360 bp, Gossypium hirsutum
  Clone ID: LIB3083-071-Q1-L1-E1
gaaagatcttttatcaatggaagaagaaaaagaaggaaacttaaatgtgttaatggatggccctgagttgactcaagtcgcttatagcaaagaggagtctcctgaaattcaacctaagcatctggagttctacatcgaaggggatggttgccatttgattccaattgaattgatggcttctgttggcgtggaaagccaaagaatatacaattttagagaggaagatgaaggtattgctggtaatggagatgttattttggactttgatatgcattgtggaacaccattggaactggtagtggagaatagttgcggttcatgagaaaaagtggcattgatttcaccccatgagagtgggga

SEQ ID NO: 3163 - DNA, 359 bp, Gossypium hirsutum
  Clone ID: LIB3083-071-Q1-L1-E10
ttctatacagccaccccatgtgactcatgtgcaccgccagcctgaacacagtccatcgaactactctccaccaccagcatctgtttcaaatgtttcccatgaaagtagccaaggaagggttgatgaccatccttcttttagaccccatttgccacctgaattctacaagaaacctactgtgaaagtctattgcaaagctgatcctaattttcatctcaccatcagagacggtaaagttattcttgctccatctgatccctctaatgaattccagcactggtacaaagatgagaagttcagcacaagtgtgaaagatgaagtgggtttcccaagcttttctctggttaataaagccactg

SEQ ID NO: 3164 - DNA, 354 bp, Gossypium hirsutum
  Clone ID: LIB3083-071-Q1-L1-E11
gagtttataatgtggacatggtccctaagtttatgatggcaaatggcactcttgtgcgtgttcttattcatacggatgttacaaagtatctttacttcaaagctgtggatggtagctatgttttcaataaagggaaggttcataaggtgccagcgactgacatggaggcactcaagtctccacttatgggaatatttgagaagcgtcgtgcacggaagttcttcatatatgttcaagattatgatgaaaaggatcctaaaactcacgagggaatggacttgacaagggtgtcaactagggcactaattgcgaaatatgggcttgatgataacactgtggatttcattggtcatg

SEQ ID NO: 3165 - DNA, 355 bp, Gossypium hirsutum
  Clone ID: LIB3083-071-Q1-L1-E2
atggagagttcgaaaccaacggtggagatcaacggattgagcttcacgtatcctggaatcgacggtcatccaccgccgggatccaagcctcttatcgacggtttctctctcaccctaaacgctggcgatcggtgtctcctcgtcggatccaatggcgccgggaaaacaacgatattgaagattctgggagggaagcatatggtggagccgcacatggttcgagtattgggaagatccgctttccacgacaccgttttggcttcctccggtgatctttgttatcttggaagagagtggagacgtgatgttgcttttgcaggattcgaggttccaattcaaatggacatttcagctg

SEQ ID NO: 3166 - DNA, 360 bp, Gossypium hirsutum
  Clone ID: LIB3083-071-Q1-L1-E3
attttacttgagccacaacaattttgcaggagatataccatattttactcttccgaacttgcagcgattaaatctcgagtataatcaatttactggcagcgtcccttttgccatcagtcagatgccttctcttcagtacctaaatcttgctcataatcagttgcagaatgcgctgaacgacatgtttggaccactttcttccctctccacactggatctctctttcaattctctgaacggtggtctgcccgagagttttaagaatcttaccagtataagctctatgtacttgcaaaacaaccagttttcaggcactattgatgtccttgcaaatcttcccctcgatactctagatgtttc

SEQ ID NO: 3167 - DNA, 360 bp, Gossypium hirsutum
  Clone ID: LIB3083-071-Q1-L1-E4
tgttctttcagccaccccatgtgactcatgtccaccgccagcctgaacacagtccatcgaactactctccaccaccagcatctgtttcaaatgtttcccatgaaagtagccaaggaagggttgatgaccatccttcttttagaccccatttgccacctgaattctacaagaaacctactgtgaaagtctattgcaaagctgatcctaattttcatctcaccatcagagacggtaaagttattcttgctccatctgatccctctaatgaattccagcactggtacaaagatgagaagttcagcacaagtgtgaaagatgaagtgggtttcccaagcttttctctggttaataaagccactg

SEQ ID NO: 3168 - DNA, 101 bp, Gossypium hirsutum
  Clone ID: LIB3083-071-Q1-L1-E5
gggccgcccgcccaaaaccagagggaaccccccggccggaaggaaatccgcaccagggcccgcttgaacccctccgcaaccaagccggaaggccaaccagg

SEQ ID NO: 3169 - DNA, 334 bp, Gossypium hirsutum
  Clone ID: LIB3083-071-Q1-L1-E6
gggaactctaatatatttatagaaccaaattccatagttaccaaaaagcaacatcccatataaaaccatatgcatccgtacgagtctagtatctactgatgtaaagatgttcgtaaacaaaaatacataagccaggaaacaacatttctaacacccaaacaaggtattcaggttgaaagaacagaaacattttccaaaacgttaagaaagcaaacagtaagaaacacacactactactattcctggagttcctcctcctcatcctcctcctcctcataatcatactcctcatcagctgttgcatcttgatattgttggtactctgaaaccagat

SEQ ID NO: 3170 - DNA, 360 bp, Gossypium hirsutum
  Clone ID: LIB3083-071-Q1-L1-E8
taaattacccagatttcaaaattgaaaactttgttgttattgggaaaagaaaggatctttaattgactgtaattaagtttttttcttctgacatagaaattcaataagaaagaaggtagaagaattttctcccccaattagcaaccctggcgttcatagatatatttgttgaagaaaataaacaagaagaagatcaacaaggggaaactgtttggctctttcaagaagaagggaaaagtgagccaaatatggtagctgataatggtgatgaaccagatgatgataataataagttaactcttcatgtccctgaaacttcccatcaaattagtactgattcatggttccaagctggttttg

SEQ ID NO: 3171 - DNA, 360 bp, Gossypium hirsutum
  Clone ID: LIB3083-071-Q1-L1-F1
ccgacctggacgattcgaacctgcacctgcttttggtgctggatctggtgactatggaaggaaacctgaatatgagcaattcgaatctggtcatggacgcaagccggatttcggacgacccggatccgaatttgaatctgattatggccgaagacctgaattcgagcagcctcctgaggagtttggatctgggcatggccggaggccggcatatgagcattcacatcaaccggatttcggatccggccggagatcagaatttgagcagcctccgccgcctgagtttggatctgggtatcgacggagacccgaatttgagcagcctccgcctcctgaatttgaatctgggtatggccggag

SEQ ID NO: 3172 - DNA, 321 bp, Gossypium hirsutum
  Clone ID: LIB3083-071-Q1-L1-F11
ttttcatacatatgtaccttgggttgttgtggatgggcaaccactttacgaggactatgaaaactatataagctatgtgtgcaaggcttataaaggtgctaatatgcccaaggcttgtagtggactgaccttcaatcaaatctacaataggaaaactatccatccagtttgctataaggagataccaccattaacattgtcatcaagaaccatatcaactgttatgtcatggatacggaagatagtaacttctatgtaattgtttcagttttaaggatgcatttcaaaccttgttaatataattatatatctatgtattga

SEQ ID NO: 3173 - DNA, 363 bp, Gossypium hirsutum
  Clone ID: LIB3083-071-Q1-L1-F2
ggaagcgcatctctcaaaatggttgaagaggttcgtcggcaattcaatacaattccaggactaatggaaggcagggtaaaaccagactacgcaaactgcgtcaagatatcaaccgatgcctcactccgcgaaatgatcccacccggtgcactcgttatgcttactccacttatagtaggaatccttttcggggtcgaaactctcgctggtgtcctagctggtgcactagtttctggtgtccaggttgccatctcagcttcaaacacaggaggagcatgggataatgccaagaaatacattgaggcgggagttagcgaacatgcaaagtcattgggaccaaaaggttcagaatgtcacaaggca

SEQ ID NO: 3174 - DNA, 356 bp, Gossypium hirsutum
  Clone ID: LIB3083-071-Q1-L1-F3
agagaatttattgacttgcatgataactttgatcagattggccttgcacaaaagatcgagaaacatgagctgctggagatgaggcgagttgctgcatacatttacaagaaggctggcagatggaagcagtccattgcattgtcaaagaaagacaaccattacaaagatgcaatggaaacagcttcacagtctggtgaacgtgaacttgccgaggagttacttgtttactttattgaacagggtaagaaggaatgctttgcatcatgcctctttgtttgttatgacttacttcgagcagatgtcgttctcgagctagcctggattcacaatatgatcgactttgcattcccgtatct

SEQ ID NO: 3175 - DNA, 236 bp, Gossypium hirsutum
  Clone ID: LIB3083-071-Q1-L1-F5
gatatcttttctgcttttttttttcactatagaaatcacagcaatttctgatctcagccttggtctattctcttcctgattaatttcacttgatctatccaagtactaacatcttagaggaaacatagaccttgtcctagaatctaaattgccaatagcctgcggtgacatggaaaaacagacaaacaaatccttggttcaaaaccttatagaaagatgccttcaactctacatga

SEQ ID NO: 3176 - DNA, 338 bp, Gossypium hirsutum
  Clone ID: LIB3083-071-Q1-L1-F6
aaattccgttcaaaattcagttcttttaatcccaattttcttctttttattaacaatatcatggcctgtctctgtttatgccaagaaaccagtggcgattcctcgaaaagaagacgttcctcatattaaatgtcaagtttgtgagaagatagcatcacagttggttcaacaagttcaatcgaaacaaacccagatctctcccaagaagatctcagaatatcaaatcattgagattgcggagaatgtttgcaatttgaagaaagaagaagctgattggattttgaagattgatatagttgaacaaggggataaattagagctagtgggacaagatgctg

SEQ ID NO: 3177 - DNA, 308 bp, Gossypium hirsutum
  unsure (1)..(308): unsure at all n locations; Clone ID: LIB3083-071-Q1-L1-F8
tagcatttttggcttgnngggatcttgagcaatgacttcaaagtttaacaggtgtatctccaggtgaaggcactggtgcaaccatgtctgatgatgaagatgaagttgtagatagtgataccagcttgtttgatggaagttctgatgggattgacagcatggggtttggccccctcgtctcatccgagactgatagatcactaatggagcgtgttaggcaagaactgaagcacgagctgaaacagggttacaaagagaaaattgtggacattagataggtaaatctacgtaagagacaagctggaatg

SEQ ID NO: 3178 - DNA, 360 bp, Gossypium hirsutum
  Clone ID: LIB3083-071-Q1-L1-F9
gacatgcacaaggatctagctgaaaagtatggagttagtgggtatccaacactgaaattcttcccaaaaaacaacaaagctggtgaagactacaatggtggcaggggtctagatgactttgtttctttcatcaatgagaagtgtggcaccagccgtgatggaaaagggcaactgacttcaaaggctggtattttgtctagtttagatgcactggtgaaggattttgtggctgccaacaatgatgagaagaagacggtcttctctaagatcgaacaggaagttgagaaactcaaggggtccagtgagaggtatggaaagatatacttgaaagctgctaaaagctgtttggagaaaggtgct

SEQ ID NO: 3179 - DNA, 360 bp, Gossypium hirsutum
  Clone ID: LIB3083-071-Q1-L1-G1
ctcgtgccgattttctcaattggtcctttgttcgggcgctattggtattcaagaaatgaaacaactgcaggagagacaccttaccgcagtaaagctgagtacacagaaaagcagctccttttgaatgtatcagctcaactaaccattattggaaaagattatagcaatttttctgttctttttctggagggtctttatgatccgcattttggaaggatgtatcttgttggctgcagggatgttcgagcttcatggaagatcttatctcagaccattgatctagaatcagggttggattgcttgatcgaagtcatagtgtcttacccaccaactactgcacggtggttgttcaacccaact

SEQ ID NO: 3180 - DNA, 292 bp, Gossypium hirsutum
  Clone ID: LIB3083-071-Q1-L1-G10
aaagctcaaaatcaaaaaaccgaagtcagatctaacagtttttttgtcaaaatttcccgcaaaagatatggctctagaatgggtagtgctaggctacaccgccggcgctgaagccatcatgttgctcctcctcacagttccaggccttgacggactccgcaagggcttgatcgccgtcacacgtaacctcctcaagcccttcatgtcggtgggtcctttctgccttttcctcctcatggatatatactggaaatacgagacgcgtcctacctgtgacgccgattcctgtacc

SEQ ID NO: 3181 - DNA, 114 bp, Gossypium hirsutum
  Clone ID: LIB3083-071-Q1-L1-G11
gcattttaatgcatctaagatcaaggaccttcaggctcaagatgatggggttaaagccatgaacgaatcagcatacaaggaccttctcaatgtgagccatgatctctatgttta

SEQ ID NO: 3182 - DNA, 349 bp, Gossypium hirsutum
  Clone ID: LIB3083-071-Q1-L1-G2
ctttgctgctaattctcctaattgtttcagaaaatctaacacatgggaaaaaatgagagagatccttcatgttcaaggaggacaatgtgggaaccaaatcggttccaagttttgggaggttgtttgcgatgagcacggcatagatccaactggaaggtacattggttcctcggatctgcagatggagcgtgttaatgtttactataacgaggcttcatgtggacgctttgttcctcgtgctgtgctcatggacttggagcctggtacgatggacagtgtccgaactggtccttacagccagattttcaggccagacaactttgtttttggacaatccggtgctggaaac

SEQ ID NO: 3183 - DNA, 365 bp, Gossypium hirsutum
  unsure (1)..(365): unsure at all n locations; Clone ID: LIB3083-071-Q1-L1-G3
gggggggnggntctagaactagggggatccccccggccggaaggattccggcccggggccatatggtttttccgatctataccaaaagaccacagggatggatctatggatttcctttttcagcagggtattttctttttcctttttcagtttggttcgatttttttaactaatttcctttctctctccactgtttcaaaccaagctttttttttgtcaaagccatcggagctcggtaattgttctcagcttcaagtgattcaccttcgttcgaatcgattgatcgataatgtaacgacggatttctctcggttgtctcatttaaaagagcttgatttgggttctaacaagttaaatggtgaaat

SEQ ID NO: 3184 - DNA, 260 bp, Gossypium hirsutum
  Clone ID: LIB3083-071-Q1-L1-G5
tttttctcacctctgtctcagcgcctatttgtagcatctccttcaaccattatgatgaaaggttacagaggaaagctacccctttcaatcatcactgttacactctgcggttttgctttccttgctctcttatatactgaaagactcagttttctctcttcaagttcttttctcaaatctaaatcctgtgctagaagaacaagtgctgttgttaaagctaaggatgaaacagcagagaagaacctataaaaccccgaact

SEQ ID NO: 3185 - DNA, 344 bp, Gossypium hirsutum
  Clone ID: LIB3083-071-Q1-L1-G6
gcattttaatgcatctaggatcaaggtccttcaggctcaagatgatgtggttaatgcaatgaaagaatcagcatccaaggaccttctcaatgtgagccatgatcaccatgtttacaaaaggcttttgaaagatctaattgttcagagtttagttagactgaaagagcctggagtcctactccgttgtcgcaaagaagatttgcatttggtggagtctgttctggattcagcaaaggaggaatatgcttctaaagtgaatgttcatccaccagagataatcgttgatgatgtccatcttccccctggcccttctcatcatcatgggtttttccatcatcatgctg

SEQ ID NO: 3186 - DNA, 361 bp, Gossypium hirsutum
  Clone ID: LIB3083-071-Q1-L1-G9
gggatagaacacaagctgaagaacagagaagcgagggacaagagggtttcaagatcttatcagatcaaagctagaagataacatttgatggggagggaactcactgatgtgcatatggatgataagcccaacggtgttgtgaaatcgaacggtgtggtgaattcaaatggtgctctgagagttttggaagacactgagtcaaagaactacgaggtcaaggaatgcactgaagagaactcgattgtccataatggtactgtgaatgaagatgtgttgggtgtcaaaagctcaaattttggtaccgatatccctgatgagaaaaacgaaacgatcggagatcagaagttcaccgaccgtgtga

SEQ ID NO: 3187 - DNA, 342 bp, Gossypium hirsutum
  Clone ID: LIB3083-071-Q1-L1-H1
aagctcgattagaagtcatcaccatcaagaaaggttgtcatccgtaatattaattacatttcttcgaagaggaatggggataagggcagtgattccgaagataattctgatgaggatgagttcattgatggagattctctcaaacagcatgtagaggaggctgttggatcactagggaaacggcacaagtttacctcacaccatcataagaaacacaatggaagcaagcttctaaactgtgtgttctactaatattatttacttgtaacctaatatttctcatggtgtaaaacctatattaatccttttgattcttatcaatattttttttttgctagacat

SEQ ID NO: 3188 - DNA, 356 bp, Gossypium hirsutum
  Clone ID: LIB3083-071-Q1-L1-H10
ataacatttttgtttgagcctttgataattttcaggtggcgaatttaacggagattatgttgaaaaatacatccccatcccggaaggagacagattttgctcttgcggctttaagggagattccttcacagtacaaagcaaccattgagcttaatattctgggtcaaaagggaaatgttctcgagagaattccactacctcctcctacatacggtgcagcatcttttaacagctccaaaccatcctattctactagtgtccaatatggttcagcatctttcagcagctcaaaaccttctcatcctaccggtttctcaccaagtgtccctccttatctggaagagagtaatcccatc

SEQ ID NO: 3189 - DNA, 59 bp, Gossypium hirsutum
  Clone ID: LIB3083-071-Q1-L1-H2
ggaaaaaggtaaagaccgaagtaaaaaagatggaacagatagtgagaattagatatatc

SEQ ID NO: 3190 - DNA, 257 bp, Gossypium hirsutum
  Clone ID: LIB3083-071-Q1-L1-H3
ctgttttttcggtcaccaaaagattgaaattttcgtcgttgaaggaagttgtctctggaaaatgatttctgtcttactctgcgagtaagtagttttgatgcttattcaaagtagaaagagtcgctagatgtctttcgaaacctggtttagtcaaatgttattgatctgagattcatgttggagatgtttgttttaatccatgattttatatgaagttattctgttgaggaacagataaaaaaaaaaaacttgagggg

SEQ ID NO: 3191 - DNA, 356 bp, Gossypium hirsutum
  Clone ID: LIB3083-071-Q1-L1-H4
gcgttatttacttaaagggaaggccataccgatggcggtatctagcatgcgaaggcagaggtatcgtgcccaaacgaaggacttatcggttgcaaggaaatggaaagagggattaccagcatcaaaacctgcaaggaagactaccctaatggcttccaaatgccagttcattatcctcgatactcgaaggccgattacgagaagatggaagaatggaggatcgatatgttgttgaaggaatatggattcagctttaatggtggcaccgtcgatgagaaaagggcttttgccatgggagcttttctttggcctgaccaactttaagttacatatatacatgtatgtagattatgttt

SEQ ID NO: 3192 - DNA, 354 bp, Gossypium hirsutum
  Clone ID: LIB3083-071-Q1-L1-H5
atgtattacagcgtaagacaaaagtaaagaggcgaacagagagcagatctcaaaccatttcattcatgtcttaacatcccaaataatatggatcgattacttaaagctgcaagagcttccggttctctcaacttatccaatcgatctctcagagatgttccagaagagatctacagaagcttggatgctgttggggagggtgaaaaatggtgggaggctgtggagctacaaaagctaattttggctcataacaatatcgagtcattgaaggaagaagtgaggaatttacctttattgactgtgttgaatgttagtcacaataagcttacagatcttccggctggaatcggacag

SEQ ID NO: 3193 - DNA, 349 bp, Gossypium hirsutum
  Clone ID: LIB3083-071-Q1-L1-H6
taattgttaagattgaccccagggaaggattcttgaagaatggaaaatctcctgttctcactatcttttcagccggccatgctttgcatgtttttgtcaatggtcaactatcaggaagttcctatggaagtctagaattccccaaactaacattcaaccaaggcgttaatctgagagctggtgtcaatacaatttcgcttctaagcattgctgttggtctccccaatgttggtccacattttgagacatggaatgctggtattcttggccctgttacattgaatggtctgaatgagggaaggagagatctctcatggcagaaatggtcttacaagatttgccttaaggg

SEQ ID NO: 3194 - DNA, 358 bp, Gossypium hirsutum
  Clone ID: LIB3083-071-Q1-L1-H7
ccatgttggattttttgaaacaaaccgggtcttacttaatggttaatgcgtacccgttttttgcttattcggctaattcggatcagatctcacttgattatgctttgtttaaggataacccgggtgtagtagattcgggtaacgggttgaaatattctagccttttggaagctcaaatcgacgccgtttttgcagctatgtcggctattaaatacgacgacgtaaagatggttgtgaccgaaacgggttggccatcaatgggcgatgaagatgaaataggtgctagtgaatccaatgcggcgtcgtataatggtaatttagtacggaaagttttgaccggtaatgggacccctttaag

SEQ ID NO: 3195 - DNA, 171 bp, Gossypium hirsutum
  Clone ID: LIB3083-071-Q1-L1-H8
ccatcccccgaaacaaaccggggcgggcttatttgctaaggcgtcgcctctaattacttattctcctaatacacattcatatctcacttcattattcttttattaatgataacccctcatttttttattcccttaactcttttaaatactctacccttctctaatctcaaa

SEQ ID NO: 3196 - DNA, 352 bp, Gossypium hirsutum
  unsure (1)..(352): unsure at all n locations; Clone ID: LIB3083-071-Q1-L1-H9
taggtttggaacaagcgaggaacgagtgaccagaagctccgcttaagcgctcgacatgcagttagctcaaaacatgttcatcatgtggccgagcgaagcgcacctgtgtgaagcagcctagcatcactttagatagaagcagaatggataacttacaactgaaagtaagttcttcggatcgatatctcgtacgacgtaatggagatcttggtctagatccggtggttcgcagaattcgggacctaacgatgtttggttcgtcccatgaacgggagcggacaattcccttttcggagaatggctgcaatcacaagcaagtgattgaatgagtggngggctccgaaagcacatg

SEQ ID NO: 3197 - DNA, 288 bp, Gossypium hirsutum
  unsure (1)..(288): unsure at all n locations; Clone ID: LIB3083-072-Q1-L1-A1
aagatgacagaagcgagtaagaaaagcatgagtgcggaaccagttcatgttcaatgcacagcctcgtcaaacgaaacaagatcaaacaacaatctccccaattntcttctntcagtgaggctaaaatacgtgaagctcggctaccattatttaatctccaacgccatgtatttaatgctggtgccgttgttagccattgcttcagctcatctctcaacactcacggtccttgatttcgttcaactatgggaccaactcaagttcaatcttgtctctgttactttatgt

SEQ ID NO: 3198 - DNA, 210 bp, Gossypium hirsutum
  unsure (1)..(210): unsure at all n locations; Clone ID: LIB3083-072-Q1-L1-A10
gtcgntacctcacagcatcagccatgttccgaggcaagatgagcaccaaagaagtggatgaacaggtgatcaatgtccaaaacaggagctcttcctacttcgtcgaatggatcccaaacaacgtgaaatccagtgtctgcgacatcccacctagaggctataatggcataaccttgaggaaactcgactcatccggaatgtcagcagtac

SEQ ID NO: 3199 - DNA, 283 bp, Gossypium hirsutum
  unsure (1)..(283): unsure at all n locations; Clone ID: LIB3083-072-Q1-L1-A2
gttgattggaatcaactatccaggcacanaggctgaactgaaatgctgcataaacgatgtgaagagaatgtacaaatgccttatagagcgctatggattctctgaagaagacatcacggtattgatagacaccgataattcttatgatcagcccacagggaagaacatcagaagggctntgaatgatcttgtgagaatcggctgagcctgggattntctgtttgtgcactacagtggccatgggactaggcttcctgctgagactggngacgatgatgatact

SEQ ID NO: 3200 - DNA, 364 bp, Gossypium hirsutum
  unsure (1)..(364): unsure at all n locations; Clone ID: LIB3083-072-Q1-L1-A3
tttcaagctcccatggccttctntcttatagaaaataggtggagaatgaaagagagaatgaaaaagataaaagcttctccttattttatgatatttctagtcaaattagtcaccaaatttcacctaactgtgaccttacaaattctntatatctgtgttcagccactaacaaatgtgtggtctagtactcaataagaccttattaatgtccatactttacacttactataaacaatttgacttatgcactatctttaaatacatgcatagaatatacaaattaacctttattcttacataaattaaatttcactaatggtgacacttctgcaataggccacataattgttactaactcatacta

SEQ ID NO: 3201 - DNA, 294 bp, Gossypium hirsutum
  unsure (1)..(294): unsure at all n locations; Clone ID: LIB3083-072-Q1-L1-A5
tggaaagggagctgcctattgtttcgtatctagagattgcatattttagatcaaatgtccgcttntttaacctttctttcaccattttggggagantttgagattgtgatagtggttacactcttagtatgaattttcaagtagtgaagttgtgtcttaattcaacagtattatcatataccttgagctgcatgttttttttgtacttggaatttagttgatatttaacttaatataaatggcagcctgttttgtgaatttgtattaaaaaaaaaacaaaaanaaaaaactcga

SEQ ID NO: 3202 - DNA, 280 bp, Gossypium hirsutum
  Clone ID: LIB3083-072-Q1-L1-A6
tccaccaccaacaccctactagatctaaaaagatcgaccacacaccgttcatattctagtttcgccagcaaaataaaggaaggcgccaagaaggaagggagatttggacatcaaaacagttccttttcaagtccatggaataagggtctaagcattacagtggagagataccaatttgataattaggcctcatgaacttcacttttggtgcatgtacacatgctttattattaggctagaggaggggttttattaatatgttactaatatcgtaaaggct

SEQ ID NO: 3203 - DNA, 412 bp, Gossypium hirsutum
  unsure (1)..(412): unsure at all n locations; Clone ID: LIB3083-072-Q1-L1-A7
caagagaagtccctttggaacacaacacaagctgacatgcttttatgaaatacggttcttttcttattctaatatcttaaatcagccgtgaaggaatggcgggcatcatctccgatggtgaaatcaaccaccttcctgattagaagatctatctacacttttcttcaatactatcactacttcactgcaactgatgcaatccttgctttgacatactccctttcacatcttgcttcgcagatctttgtcccctcttctcctctgttaccatcaatccacaatcatctcanagccattttcatggcggccgagtttcctccctcctcggacttcttcacggttctcagtttcaagaatttccacaccatgtcttcatcaatctgtgctcttcctttcaccctttctttcttcc

SEQ ID NO: 3204 - DNA, 196 bp, Gossypium hirsutum
  Clone ID: LIB3083-072-Q1-L1-A8
accgtgcctgagacatctcgggctctattttctttgaacctaacgaccttctctcacggtcgcaccgctcaccggacggaatgacgtgccacgaccaaccctcagtttagtcttcgggccagaggcatctacggacgcgtttttcgcgcgtgcgcttacgagtcctactgctgacctttgacgctgtatatgctgt

SEQ ID NO: 3205 - DNA, 311 bp, Gossypium hirsutum
  unsure (1)..(311): unsure at all n locations; Clone ID: LIB3083-072-Q1-L1-B1
acaacacagcacgaaattgattcattaaatactgctcttatcacaaaacgacagaatggaaacatgtcatttcttacatacgcgaangcaaactnnttttttcttatgatttgtactaaaaatgctgggaaaagaagaaacttaatatgaaatatacaacaaatacaacctcaaaacaaaaacagatatttttttaacaattgaagaaacacacaatcccatcagtatttttatgtgaacttgaatctcaagccttttctttttcttcatctgaattggagtgtttaccaggaagcttatacttgatcttc

SEQ ID NO: 3206 - DNA, 177 bp, Gossypium hirsutum
  unsure (1)..(177): unsure at all n locations; Clone ID: LIB3083-072-Q1-L1-B11
ttctctcttcccanatctctcatgaaccagaagacagacccacttatattcggctgcagcaatgccgcacctactcctncactatctcgctgcaatcacaaccgtacatctcaaatcatgttctttccactcccctaaaccaacggcccatattcacctacgctccaacccaacacc

SEQ ID NO: 3207 - DNA, 358 bp, Gossypium hirsutum
  unsure (1)..(358): unsure at all n locations; Clone ID: LIB3083-072-Q1-L1-B12
acaccgncaccctcaccagcaccggcaccgacaccggcatacacaaatatcaaagacttactctcggtggcaggtccatatcacacgggcctgngctacctcgagtcgactaaattaatcgacaccgttccaaatccaagccaacaacacggttgaaggcattacgattttcgtaccgaaagacagcgcattcaaggctcttacgaagccttcattgtcaaatctaactgatgatcagttcaaatcagtgctcctttaccatgccttgccacgatactatgcccttgcggacttcaatgacctaagtgagaaaggccctattagtacacttgctggtggccaatacactgtgcaattc

SEQ ID NO: 3208 - DNA, 300 bp, Gossypium hirsutum
  unsure (1)..(300): unsure at all n locations; Clone ID: LIB3083-072-Q1-L1-B2
ctcgagtttatatatcaatatttctctttcgcttccgcatcatatttctntgtcatttgctttcaatttcactaaaagccaataactcgctgatgtttcttttatgttttattnggaaggaaagacaatggtgttcgagaaaacaccgatcttttttatggaggttttggttatggtgagtttggatctgtgtttcgggagtgagctcggtatgtcgccggcgcatggtgaccatgggcatcatcatcattgtgatcatagacatgggcatgaccaccatcatcaccaccgacatgtgga

SEQ ID NO: 3209 - DNA, 190 bp, Gossypium hirsutum
  Clone ID: LIB3083-072-Q1-L1-B3
cacaatcttctaacctcgactccgatctcggtttcctcttttcttttacggaggttgtttgcggtgggtggacgacgatcatgatcgcggatcctaaatcttgtgacgtgctgttcgttttcgttttatttgcgattatatcctcttccaacgcctggttcactccctatctaagccatttattaaaaga

SEQ ID NO: 3210 - DNA, 321 bp, Gossypium hirsutum
  Clone ID: LIB3083-072-Q1-L1-B4
cgaggaaaagctaaacagctggagcttttttggctcgaaatatgaatattccgtcgatctctttgataaagctgccaatttcttcaagctggggaaatcctgtgacagagctggatcaatttatgtaaagttagcaaattgtcatttgaaattagaaagcacccatgaagccgctcaagcttttgttagtgctgctcattgctataagaaaacatcgacaaaggaggcgatatcgtgcttgcagcaagcagtgaacatgttttgtgatattggaaggctcagtatggctgcaaggtattataaggaaattgctgaattata

SEQ ID NO: 3211 - DNA, 319 bp, Gossypium hirsutum
  unsure (1)..(319): unsure at all n locations; Clone ID: LIB3083-072-Q1-L1-B5
ctcgtgccgccacaaaatgttgtccgctggatcttcggttaaggctaggtgatcaacctccactacctcgcccattcaaatntaaaaaggcctgaatttgtttgaattttctggcgatactatggatgaatctttcttcgatctaatggaattcttgaagaaacctaccataaccgaaacattcgtcgacattttgttatgtgcggtgcccatatggttagcagtgatgatcgggctcttcatcggttgggcttggcgtcctaagtggaccagctnggtttttctaggtctccgatctaagttccggttcgtctggact

SEQ ID NO: 3212 - DNA, 292 bp, Gossypium hirsutum
  unsure (1)..(292): unsure at all n locations; Clone ID: LIB3083-072-Q1-L1-B6
atagtattagcttatttgaacataacatgattgtgttacatgtacagtttattaagttggtaaatttaatttcaatgccatattcttctcacacgaacaaaccataaattaagaaatggctaagggtagatgtcactaatatccacgcgggcggttcaagtttttctcaacgacggcagtttcctcagagccatggctgaggtagcttagagcggacattcggtatagacaagtaaacactatgatatgcaaaccaattgtgtagaaaaatgcanacgttcgagcatacttg

SEQ ID NO: 3213 - DNA, 323 bp, Gossypium hirsutum
  unsure (1)..(323): unsure at all n locations; Clone ID: LIB3083-072-Q1-L1-B7
tgcggcaatcagatacgagccaagttctgtgaagtcgtatgtgcttaacatggcatcgattcaacgggtcgatatggtggtgactcggagctccagcttgagcgaatcaatgtttactacaacgaagccagttgtggccgttttgttccccgcgcagttttaatggatctggaacccggaaccatggatagcgtaagatccggtccttacggacaaattttccgacccgataacttcgttttcggacagtccggtgcgggaaacaattgggctaatggacattacactgaangagcggagcttatcgattccgttctcgacgt

SEQ ID NO: 3214 - DNA, 275 bp, Gossypium hirsutum
  unsure (1)..(275): unsure at all n locations; Clone ID: LIB3083-072-Q1-L1-B8
tgaagatagcgcatcanatcttgcagaggcaaaggctgcaattcaagcagggttgaggaaagcaaatgctagggacaggtcttcaaggagcaagcttaatagtcctggccatgaaaacagaaganaagacctaacaagtaactgttctgattcgtctagcggttcttcgtgaatatttgatgcacccaaattactttcgagatcaagccaagctagtaatgatgaagaaaatgctaagatagcatcagcatctgtaccactatcaatgttactta

SEQ ID NO: 3215 - DNA, 257 bp, Gossypium hirsutum
  unsure (1)..(257): unsure at all n locations; Clone ID: LIB3083-072-Q1-L1-C1
tatcattatgatttactgataatcacatgctatatactngaaaaactattaagcgaattcgagtcagccatcatgtcttgcaaacaaacgtcaaacacattactcagaagaccacattcttgctgctgggaagatcttatgagtntgcccttgatcatctaggacgactttctgattaggctgccagtactatgatcactatcagaagcacaattgcgaatatcaccaggagcaagcatgccagagaagaaattgat

SEQ ID NO: 3216 - DNA, 181 bp, Gossypium hirsutum
  Clone ID: LIB3083-072-Q1-L1-C12
ctccaagcaagtattttccttacacgtttgtttttcttgtgattaaatcgatatggcttagctcaagtgtgcccttaaaacttgcatgtggtggtggtgttgtgcatggtagtgggtgcacccctggctcaaggggccgtaacctgtggcaagtcaaaactcctccacctgataatactga

SEQ ID NO: 3217 - DNA, 387 bp, Gossypium hirsutum
  unsure (1)..(387): unsure at all n locations; Clone ID: LIB3083-072-Q1-L1-C2
ccacagctactattccgccgaagcccactgaagaggctntaacagtctggattgagcacacttctgcaaatggacgaaggtattattgcggtgggaagacacggcaatctagttgggagaagccattggaattgatgacaccgattgagagggcggatgcatcgactaactggaaagaatatactagtcctgatggaagaaagtattactacaacaaggttacaaatctatcaacatggtcactccctgaagagctgaagttggctcgtgaacaagtagaaatggcgtctgccaaaggaccacagtcagaagtttcttctcattttccagctcctgtacctactgcaagtaaagcacaatctggtgctgatacatcgtctacaataa

SEQ ID NO: 3218 - DNA, 131 bp, Gossypium hirsutum
  unsure (1)..(131): unsure at all n locations; Clone ID: LIB3083-072-Q1-L1-C3
tcactctggngatctgggtgtgaaaaatccagatggatacattgaaataaaagataggtcgaacgacataatcatatcgggaggcgaaaacataagcagcgtggaagtggaaaacaatctttatttgcacc

SEQ ID NO: 3219 - DNA, 217 bp, Gossypium hirsutum
  unsure (1)..(217): unsure at all n locations; Clone ID: LIB3083-072-Q1-L1-C4
gtgattgatagcctcccattaatggcgctttgtattacgttttatactgacaggcattgtccgttgatggacgaacaacctttntcgagaaatgtagtaaattattttaatcggccttggtggggtttattgcatgtttagctctttttaaaacaaagaaataaccgaaagaatactacgaaacaccatctcgggggggcccggaccaattccccta

SEQ ID NO: 3220 - DNA, 263 bp, Gossypium hirsutum
  Clone ID: LIB3083-072-Q1-L1-C5
caccgatgattacgagcgatgaagtcgcggactgaaagtactgcattaacgttcactgagaccgcgagggcaaggatcgagaaggccgatggggaatgtttaacgtttgaccagcttgctcttcgagcacctcttgggcagaacacggttctacttcgaggtacaaagaatgctcgtgaagctgtgaagcactttggaccaactcctggtgtgccacatagccacaccaagccgtatgtgcggtcaaatggaacgaaattcga

SEQ ID NO: 3221 - DNA, 360 bp, Gossypium hirsutum
  unsure (1)..(360): unsure at all n locations; Clone ID: LIB3083-072-Q1-L1-C6
cgagtgcatcagatatntaccatggagatgagatatgccaggagaaatccaagtttttgttggaggaagtaggcatgccaagggggcgtgggccacttagagacatcgaagaatgtgggtacgtgaaggacacaggtttcgtgtggctcaaacaaaagaagagcatcacccacggttcgaaagatgggagctggttctatgcaactgagtacggtgcgtgaaaagagacaaaactgctggtgaaacaaactttggtgatacactgtgttcatgtatctcatggaatattagatctaggttagattctgtacttgatgagacatagttagtagtaaaaatatgcttatagagtatcttatc

SEQ ID NO: 3222 - DNA, 267 bp, Gossypium hirsutum
  unsure (1)..(267): unsure at all n locations; Clone ID: LIB3083-072-Q1-L1-C8
atcgattcanagtatccactaagtaaggctgaggaagcatgggctaagagcattgatggtcatgccactggtaagatcattgtggagcgcgaatctatgaaatattactttatacttactgcagtgatgcttggaggtcatgctgcttgtgtgtataattaggatttgtgtatcttgaaaattatgtgtatgaaatgtatggttaatatacacattggatgacattgcaaaaatttcttaatgtgttataagctgtgtgttcacaaa

SEQ ID NO: 3223 - DNA, 284 bp, Gossypium hirsutum
  unsure (1)..(284): unsure at all n locations; Clone ID: LIB3083-072-Q1-L1-D1
tcctcattgcatatataaggttgctntacccgagaataaggtaactcaagatgatggatctggtgcgatatatcaaaatggcagtgccatcatttcaaatccagcttccaatcctgaggttcctgatgatggaaacctggtctcagaatatgaatcaaaacanatgagcaaattctcttctgaagagttcaaggaattaaagttggaaaacgaanacatggcangggatctntctcaatgcaccgaanatctggagatgaccaagtctcagttacacgaaactg

SEQ ID NO: 3224 - DNA, 517 bp, Gossypium hirsutum
  unsure (1)..(517): unsure at all n locations; Clone ID: LIB3083-072-Q1-L1-D10
ggaactngaacaataagttacttggttngaccgttttacaaacaatacaagatgtttnttgatgggtgcggttatcatgggacatgggggagcagagttaccggtgttacccggcatctttcatcgagaagccgcaaatcgaaagtggtgataaaattataatgcctccgtcggcccttgatcgcttagcatctctgcatattgattatccaatgttatttgagcttcggaatgatgctgccgagcgtgtctctcattgtggagtactggagtttattgcagaagaaggcatgatctatatgccatattggatgatggagaatttggtcctacaagagggagatatcgtgagggtgaaaaatgtaactcttacaaagggaacctatgttaaattacaacctcacacgaaggactttttggatatctcaaacccaaaagctatcttggagacaacactgangacatatcctgttaaccaccggggatagatatggtgcatatataataaaaagataca

SEQ ID NO: 3225 - DNA, 239 bp, Gossypium hirsutum
  unsure (1)..(239): unsure at all n locations; Clone ID: LIB3083-072-Q1-L1-D2
tggttcgatcgcatggcttcctttaatcatcctccttctcatcgcactcacgttcctctcccatctgactcangtggcaatccatgtggggatgaagcttctccggtccctatccatatagtgaccaatgcttctcagctgccggcggagttcttgaacccttcaccggagaagcagtggttgaggttttgactggaggcgtgaccttgcgcaagcactcttgatatgcactgattcag

SEQ ID NO: 3226 - DNA, 178 bp, Gossypium hirsutum
  Clone ID: LIB3083-072-Q1-L1-D3
aacaaacttatatcattaactagtgttttaaaataagatcaatttgtcaaattaaaattacattaatctcattactaaaccatatcataggcaaacctattatttacccataacgacttattccctgaaatagtacccaaatcatgacatgactcatctttaaccacacaaatccctc

SEQ ID NO: 3227 - DNA, 392 bp, Gossypium hirsutum
  unsure (1)..(392): unsure at all n locations; Clone ID: LIB3083-072-Q1-L1-D4
cccgagtaaaacgccaaagaaaacaaaaaatatgagaganatcttgctcatccaatgtggtcaatgtgggaaccagatcggngctaagttgtgggaagtcatatgcgacgagcatggagttgacaacactggaaaatataacggtgactccgaccttcagttggatcgcatcaatgtctactacaatgaagccagtggtggaaggtatgtcccacgcgctgttctcatggatctggagccgggcactatggattccgtcagatactggtcctttggacaaatctttcgccccgataacttcgtcttcggacagtctggtgctggcaacaactgggccaagggtcattacacggagggagctgagctcattgattctgttcttgatgttgtca

SEQ ID NO: 3228 - DNA, 305 bp, Gossypium hirsutum
  unsure (1)..(305): unsure at all n locations; Clone ID: LIB3083-072-Q1-L1-D5
aaatgggagaccgtataaatgagctggagcagagcatcaatgacctaaaagcagagatgggaatggagggctctccatccnctntagccccaccaaagcaaaagtcagacggagcgaatcaagaggatgactctgcataaaactnggccagagattgtatttagcggttaattgtgaatgtaattcgttctaatttggtgatatcttgtttcgagactactttcgtgcaagagagagcagggacattactatgtgtccctgctttccagttnttntacatgtaccaagtttttcttctgtgaact

SEQ ID NO: 3229 - DNA, 183 bp, Gossypium hirsutum
  Clone ID: LIB3083-072-Q1-L1-D6
ccggctgcagaatcggccggcaaaccgatcagacttgcatctatcggctcaaaagaaaaggtctaaatatgggtcgattctcgttggatctctcacacatgaggatcttttgcatcggaaatcgacgcccataaagtacatgcgatgcaacctggtgacacgcgcataaggtcccagttacgt

SEQ ID NO: 3230 - DNA, 286 bp, Gossypium hirsutum
  unsure (1)..(286): unsure at all n locations; Clone ID: LIB3083-072-Q1-L1-D7
aggttntggaaccaccatgaatgttctntatggtgaccaagtttgtggtcaaggtgatagtgattccatgaacaatatgatctctcatgtcgctttattacctatgacctttgngagttggccgagaagaagctggtcctcatgatatgctcacctgtgaagaacaagaacccttcactgtttctccttcatccgcaacatcatcatgaataaaggaaacanactctggtatatgccggattatntcaattngcgtgaatcccacaatggattgctcttaacaatt

SEQ ID NO: 3231 - DNA, 244 bp, Gossypium hirsutum
  Clone ID: LIB3083-072-Q1-L1-E1
aactcaccccaacaactgatgcctcattcatggcatttacccctggaatgaagccaatttcactaccaccaacatcttgcctcatctaaaggcctcgctttctgaaaccctaaacatcttatatccaatttccggtcggatcaaagataacatattcatcgatcatttccatgaaggtgtgccatttttatcagctcaagctggttgtcgattgtctgagtttcttaagcacccatgaggttaa

SEQ ID NO: 3232 - DNA, 259 bp, Gossypium hirsutum
  Clone ID: LIB3083-072-Q1-L1-E2
actaaagccttatatatataaactatttaaataaaatacatatacatttttatcaaaggtggggtcccatacccaatcaggaaatcaacattccacattcaatcaatggagttcctggcatagtaaaagccttgataaacttgtttattgaaaataccatgaactggaaatatacccaaagtgcaaaacccaaaaaaaaaaacatgaattaacacatattcgaagggagcgcctgcttgtatatattctatctctattc

SEQ ID NO: 3233 - DNA, 142 bp, Gossypium hirsutum
  Clone ID: LIB3083-072-Q1-L1-E3
tttttgcaatttcttattctctttcttcttctttccactacagtgcattcttcaagtaatattatttcaggcgaaaacctttctgtactcataaactgtaaggttcaaggcactattatcaattttctcagtctaccaccta

SEQ ID NO: 3234 - DNA, 425 bp, Gossypium hirsutum
  unsure (1)..(425): unsure at all n locations; Clone ID: LIB3083-072-Q1-L1-E4
gctaggaccaatccatattgtttccgatactacgtaatgagggtattatctggtaaaacggatcttgtgctgggtatcagaccaggctcgtccgttatttctctatgattacaatgtcaggcttctttatggtatttatagggctacctcttctggtgctatgaaactagagcccaatgctattggtggggctttccctgctcacgtgcggttcaccgtccattctgattgttttactctggcagagaacaatttcaagaaggctatcaaggaaaattatgatgaaaagaacaaattcaaaactgaacttactgctagacaagttcggaagctcacagaactttntcgaccagttccagttcattcaactgcactaccttttcactccccatcaanggcagcagctcgaatcactgaacaccctg

SEQ ID NO: 3235 - DNA, 334 bp, Gossypium hirsutum
  unsure (1)..(334): unsure at all n locations; Clone ID: LIB3083-072-Q1-L1-E5
gccatccacattnttttctctcttcacattagtacagaaaagtctatatctntatacagttgtggtgctcattgttaatgggaaacgataagggtggtacgatggttatggagcaaagcaataacctccatagccgaccaaaactaggaactctcttcaaatctgaaccttctntgtttcctaccggtgccgaagacgacgaagtccccaatcgcaaaacagcgcataatggaagcccaggtgttcacagtcgacgacgagcgggagggtcgcgatatatgtacctgatcaactctctattaatacatggtataacattatctcaactatatgc

SEQ ID NO: 3236 - DNA, 301 bp, Gossypium hirsutum
  Clone ID: LIB3083-072-Q1-L1-E6
acgaaagactatagttccgcccacgcaaggtacagcttccattactgagctagtaaaccaagacatggcaacaacaacaacaagggcggtgccaatccctacacaagaaaccctattttcatctcaagccccattatttatgtttgaaagtacaatgacaccaattgataaggggtctacttaagatgtaatgtaagagggaggtttcatgaacaactaataaacactgaatatataatatattaacagagtcaattaagtcattccctcttaatttttaaagacaaatatattgcaccat

SEQ ID NO: 3237 - DNA, 264 bp, Gossypium hirsutum
  unsure (1)..(264): unsure at all n locations; Clone ID: LIB3083-072-Q1-L1-E7
gaaacattaccgtcttggtttctatcagcccataatccagatcattatggtggngaacctggaggtctagttgccatgctgagcggcgtgggcacttgcatactatgtagtgctntgtggtaccttggtgtggggtgtggattcctcctcaccgacatcaaaacggcgaccaaaggtccttgnggcgcatttggaatttcttgcgagcgcaatagatggcaaaatatcactnggatgtgagcatgccacttggcatgcgtatgt

SEQ ID NO: 3238 - DNA, 421 bp, Gossypium hirsutum
  unsure (1)..(421): unsure at all n locations; Clone ID: LIB3083-072-Q1-L1-F2
gtcaccccggttcctatattgttaaggtgaaaaggatgaatagaattgatggtgaacaccacaccaaanatggtgataagttcaaacaaggtcgattgaccccactagcacaaactagataagtctttcgaaacttgtacgagatatgagaggaagcaacctcacaagaacaatgttcattaacaaattgcaaaaagtcctcttacatgaaatgagcaactttataccctaaatcctatgatttggattatatgtacactaactaatttgtaattattaacagcacacaacataattgtatctgaatgctaatgcaaatttgtattatctatttctacaaaagattatatgcgctatctctcttctgcaaagtatgctatctagctttttgtattctaagcctctttctattttcattcta

SEQ ID NO: 3239 - DNA, 283 bp, Gossypium hirsutum
  unsure (1)..(283): unsure at all n locations; Clone ID: LIB3083-072-Q1-L1-F3
ctcatcgacgatccatttctcgacanagagggctcataaaccccacaaatacaaaacctgcaaacccaganaaaaagcttaaaatccgccatggaaatgcttaaccgctaaagcanaagggtttgagggtaatataaaaaaggctttgattgtctatgaagacatttcaatcatggaatgcactggtcaagaaaagaaatgctntagctgaagcgcttccattttatgggagtatctgtaccagtatgttgttcattgcgtatagaactacggattatcaata

SEQ ID NO: 3240 - DNA, 302 bp, Gossypium hirsutum
  unsure (1)..(302): unsure at all n locations; Clone ID: LIB3083-072-Q1-L1-F4
acatgcaactaaatcaaataaaggtccttttctgatgaggtgaactaanatatccgagtgaagacgtactggaatgttgcacgacaccaaaaaataagggttcacagttggaatccccttaactcatgctgcatgggatgatagtttataacaaagcatttctctcatagccgactgatgactgcttccacctctgaaggggtgtacagatggtatgtcggtgctactttggcaatatcaacattgttgggagtcaccttttcttccattacttgctntaaaatggacagagcaattgtttc

SEQ ID NO: 3241 - DNA, 80 bp, Gossypium hirsutum
  Clone ID: LIB3083-072-Q1-L1-F5
aacctctcttcattctctatttcctacgagaaagctgctgatgtgctgatccaagtgataaaccagcgtaaacatgagcg

SEQ ID NO: 3242 - DNA, 131 bp, Gossypium hirsutum
  Clone ID: LIB3083-072-Q1-L1-F6
cgcgcaaaaaggaccccgctgcagaatcgcacgagaacctactgccttttttcttgaaacatcattttaatgatcttatgattccctaacttttgggtaaaaaatggttctattattgacgatggtggtgt

SEQ ID NO: 3243 - DNA, 259 bp, Gossypium hirsutum
  unsure (1)..(259): unsure at all n locations; Clone ID: LIB3083-072-Q1-L1-F7
ctactctcacccttcaactngtctttacgagtgcacanacaccagctgcctcaccttccagtacgcgggcgaccaccaccaccactccaccttcaacttcgccaccacctacaactgtcgcaccaccttcttcaacaacctctccacctacaacttcagcaccacctgcttcaacagcaacgcctgcaccttccaccacgcccatcgcgccagctcaaccacctgcaacaactccgcctcccactgttgcaccagctac

SEQ ID NO: 3244 - DNA, 398 bp, Gossypium hirsutum
  unsure (1)..(398): unsure at all n locations; Clone ID: LIB3083-072-Q1-L1-F8
ctcattgtaactactctcacccttcaactagccattacgagtgctcaaacaccagctgcctcaccttccactacgccaaccaccaccgcgcctcctccaccttcaacttcaccaccacctacaacttccgcaccgcctccttcaacaacccctccacctacaacttcagcaccatctccttcaacagcaacgcctccaccttccaccacgcccaccgcgccagctcaaccacctgcaacaactcctcctcccacttgtgcaccagctacaagcccaactgtcccaccgccacanactccaccacctcaaccacctcaaactcctccaaccacagctgcagctcaaccgccagcagtgccaccaccatcaccaccaccagtatcttctgcaccagcacc

SEQ ID NO: 3245 - DNA, 241 bp, Gossypium hirsutum
  unsure (1)..(241): unsure at all n locations; Clone ID: LIB3083-072-Q1-L1-G1
gngagattgagatcgaacgattataactcggccaacatcctgtttttagaactgtaactgttaaatcaatccccggatgtgcagcggggtggttcctaagatagtcctcaaagctagcttggttttccctcgccaatgtcagatctgtgaccatgccttccatctntgaggtgaactgtccaccacattgctgacttatgttagtcagaatactcctttcatgatcatcattagcactacg

SEQ ID NO: 3246 - DNA, 366 bp, Gossypium hirsutum
  unsure (1)..(366): unsure at all n locations; Clone ID: LIB3083-072-Q1-L1-G11
gagacaatgacgattacgaaacaacattngatcccgctattcgctatctcatttctctcgattatacagctgcattgctcaacaacttcagccgaggctccctctcantctcccgcaccacctgntccaccanacgtcaccaaaatcctgcataaagccggccaatactccgtcttcgttcgtcttctcaaatccacccaagtctccgaccgtctcattggcgagctcaaagacacagatgatgggaagaccatatctgcccccactgataaggctgtctaccgcctcaaatctggtgccttgaattcactcaacagatgaacaaacggtcagctggtctatttacgtcatccaagtatatccata

SEQ ID NO: 3247 - DNA, 403 bp, Gossypium hirsutum
  unsure (1)..(403): unsure at all n locations; Clone ID: LIB3083-072-Q1-L1-G2
aatgggttgtacaaatcttgngtcatccaacatggcaaagcttactattggcatcggtgaagaagagaaaaggttcgaaatctntaagcggcacttgagattcattgatgaacataactctaacaacaacactacatataagctngggttgaacaagtttgctgatttaaccaaccaagagtaccgagccaagttcttgggcaccaggactgaccctagacgtcgactcatgaagtccaagatccccagctcacgttacgctcaccgtgccggcgataacttgccggattcagtagactggagagatcatggagctgttagtccggtcaaggatcaaggatcttgtggaagttgttgggcattctcaacaatngcaacagtggaaggcataaacaaaatcgtg

SEQ ID NO: 3248 - DNA, 143 bp, Gossypium hirsutum
  Clone ID: LIB3083-072-Q1-L1-G4
ggatccccggctgcagatcgccggtgtatttgaatttcttttcgattttcttagccaaaatttcagatcttgcaagacttaccggcagacatcactgcgggtcttgctcgcacgacgcactgagacaatcagatggaagcatc

SEQ ID NO: 3249 - DNA, 219 bp, Gossypium hirsutum
  unsure (1)..(219): unsure at all n locations; Clone ID: LIB3083-072-Q1-L1-G5
aatactntattngatttcatcaaanaacaatcccatcatgagagatatcctccacgttcaagccggtcagtgtggaaaccaaatcggaggcgaattctgggaagttgttagcgacgaacatggcattgatcccaaagggaactacgtcggtacttctcgtgttcagcttgagagggttaatggttactacaacgaagctagtggtggtcgtacctaccc

SEQ ID NO: 3250 - DNA, 318 bp, Gossypium hirsutum
  unsure (1)..(318): unsure at all n locations; Clone ID: LIB3083-072-Q1-L1-G6
atgtatgtttcattcctcgcacgatgctatcactcagggcggattggcttagangaagctcatggaaacagtcaagcattacaatataactgcgttattggaaatgaagccgttgttttccataccaatgagacatcttctgtcaactctgacaaggtcgaggaagcacttgaaagtgtgagtaggactatacttaccatacacactaatggtgacaaacaaggtgctagtttgcttctgcatanatactgcaccatgacaaatccattgaatggtgcattgcataagttggaatacattcatgttcccgttgatata

SEQ ID NO: 3251 - DNA, 368 bp, Gossypium hirsutum
  unsure (1)..(368): unsure at all n locations; Clone ID: LIB3083-072-Q1-L1-G8
cggatctgtgcaaatggcttatgccatctccaaggaagctgcttcaaatgctccaagtgtaccagcaggacaggacaattatgtaaatgaaatgtatctgaagggatcaaaatattacctctatgttcacagttatttgtgctatggcctattggcagctcgagcagaaattttgaaggcatctgatgattctggcaaccctngcatcttggagggttttgatggtacttatacatatggaggaaatcagtataaagcatcagctccttcatcgggtgcaagcatggaagaatgcaggagggtgactcacaaggctcttaaaataaatgacacatgcatgcatatgaagtgcacatttggtggtatat

SEQ ID NO: 3252 - DNA, 234 bp, Gossypium hirsutum
  unsure (1)..(234): unsure at all n locations; Clone ID: LIB3083-072-Q1-L1-G9
caacagcgctgataaatatgatttactaaaccagaacgcatctagcacgaattccaagtagagcgtgatcaagacaaccgttcccagggctangtgacgatatcttctgtatgttcgacctattttatgattttctttttcgatcagatgcggttctaaagtagatatagatttgacatgttatgctggttggtcatgctggttttgctatggaacatatggaaaatgcggtta

SEQ ID NO: 3253 - DNA, 241 bp, Gossypium hirsutum
  unsure (1)..(241): unsure at all n locations; Clone ID: LIB3083-072-Q1-L1-H1
gggaccccggctgcagaatcggcacagccatattaatctccaacgcctgtattaagctgggccgttgttgccatgcttcactcatcttacactcacgcctgggttcgtcactatggccaactcagtcaatctgtcttgtactnatgtcaccctttggtttttagccacccttactcatgaccgcccggaagttattggtgattcctgtataaccgacctaacgctgaccagaatttatgaa

SEQ ID NO: 3254 - DNA, 327 bp, Gossypium hirsutum
  unsure (1)..(327): unsure at all n locations; Clone ID: LIB3083-072-Q1-L1-H11
taaacatggacttcgaccattcatgcattntagcctggctcggccactaagccttgaatcatatgacgctggtgcatgtgccatcatcatgcagtaatttcatggtatatcgtaatatatagttaataaaaaagatggtgattgggaaatgtgtgtgtgcattcctccatgcactaatggtgaatctctntgcatacatagaaattctaaatggttatagtttatgttatagtgtatgttggagtgaaaataaatttaaatgttgtatctaatggtaacatcactnggcttggattaaatgtatgtatgtnatttactttaatgata

SEQ ID NO: 3255 - DNA, 229 bp, Gossypium hirsutum
  unsure (1)..(229): unsure at all n locations; Clone ID: LIB3083-072-Q1-L1-H3
gttatanttatctttttttgcaaaaagaagttcaatttgggacatttcccgttcacattagtgagtaataatgcataatatctttcagggcctcgaagttccatccaactctatgtactgcaagttgcaagaataaacaaaagacaacaacacctagggtaaacaaccaagcgctgcagaggacatatatataatataatggcaaccatcactggaaacatttactggt

SEQ ID NO: 3256 - DNA, 165 bp, Gossypium hirsutum
  unsure (1)..(165): unsure at all n locations; Clone ID: LIB3083-072-Q1-L1-H4
gngaagtgggataagtaatggaaaagccacttataacggtcatcaaaatgggagctatttcaatgctttgaacggatcattaaatggtgtgtgcgtcaatggcaatggtgtgtaccattaaggaaagctgcgtggaatggttttgatagaaaagtggttacatta

SEQ ID NO: 3257 - DNA, 190 bp, Gossypium hirsutum
  unsure (1)..(190): unsure at all n locations; Clone ID: LIB3083-072-Q1-L1-H6
ggaccccgaagccgaagccgaacccgaaccgataaagaaccccacatcatactcactctactcaacanaaaccctagtccccccttctgtgatatttatcgccctcttattaccggagcctctcctgctcgctgcgtcttcgtctgcaagatctcaattctcaaatggagcgcccttttatataacaatg

SEQ ID NO: 3258 - DNA, 198 bp, Gossypium hirsutum
  Clone ID: LIB3083-072-Q1-L1-H7
gagaaagacacacctgagttctccaaacaggagatgcctaaagagcttgatacacacgaagtcgaatatccgaaaataccctaatacaaggcgaaaacatgatgaggataagacacataaacatgaagagtaccacgagtcatactaatcgaacgagcacgaagagtacgagaaagaacaacccgagttccctaaatg

SEQ ID NO: 3259 - DNA, 256 bp, Gossypium hirsutum
  Clone ID: LIB3083-073-Q1-L1-A11
ccagtctttgatctcgaagaaatcgaagaagggcttgaaggatacgaagaactggagaaatcgtcgttaatgtcgcagaagaatttcgagaaacgattcgggcaatcaccggttttcattgcctcaactttgatggaaaatggtggccttcctgaaggaactaattccacatcactgattaaagaagccattcacgtaattagctgtggttatgaagaaaaaactgagtggggcaaagagatcggatggatttatg

SEQ ID NO: 3260 - DNA, 256 bp, Gossypium hirsutum
  Clone ID: LIB3083-073-Q1-L1-A2
gatcattatgcgattgatcatgctcggtcttttcttccattatcgagtaacaaaccccgttgacagtgcttttggactgtggctcacttcagtcatatgtgaaatctggtttgctttttcctgggtgttggatcagttccctaagtggtatcctgttaacagggaaacatacattgacagactatctgcaagatatgaaagagaaggtgaacctaatgaacttgctgcagttgacttctttgtgagtacagtggat

SEQ ID NO: 3261 - DNA, 256 bp, Gossypium hirsutum
  Clone ID: LIB3083-073-Q1-L1-A3
ctctgatagaaaaatggagggagcaatcaacagacaacaagttttgcttaatcatttacaaccctcttctcagtctcatcaatcacctgctgctattctatttccttccaactgcgcggcgggggatagcgctgcttatcaccggacggctgcttttggggatgatgttgtgattgttgcggcatgtcgcactgcaatttgcaaagcaaagcgtggaggcttcaaagatacacttgcagatgatttgcttgcccct

SEQ ID NO: 3262 - DNA, 258 bp, Gossypium hirsutum
  Clone ID: LIB3083-073-Q1-L1-A4
aaagaattcgctcaagccgaggggtccgggaagctatctctgcgttcaatgtctcgtctgatgggaagttccttgcagttggaacagtcggaggagacctttttatcatagattctgccaatatgcgggttcagatgatggttaaaaaagctcaccttggtttggttacagcattgacgttctcccctgattcaagggctttggtttctgcatcactggactcaagtgctaggttgaccccaatcaaggacaagacga

SEQ ID NO: 3263 - DNA, 258 bp, Gossypium hirsutum
  Clone ID: LIB3083-073-Q1-L1-A5
gagaaattgagagagatgacgtgggttttagttatcatgagtgtttactgttcagaatagagagaatctagtgagaatagagggaaatggaaggatgggatcctcaaaatctaattctaccggaggtgggtaagctatgtcgatcccagtcagagtacctggaccaacatttcaagacccagaaggatgtttcctcatcttctgtttcttcttcttcttgtcttttgtctgaatggaccaaacgttgtcctgattaca

SEQ ID NO: 3264 - DNA, 247 bp, Gossypium hirsutum
  Clone ID: LIB3083-073-Q1-L1-A6
tctaggaactagtctcgagttttgagtgtttttttttttttgtcacaaaacaacaattataattacaatttcatttttcttaagaaaagaatattttatttccaaatttaatattgatgtgatgcttttttcttttttgctttcttttattattaagctggatttgcccacatggtggactctttatctttcatatttactttacacaaaaccaaatccctttcacccctttatattttcttcccac

SEQ ID NO: 3265 - DNA, 251 bp, Gossypium hirsutum
  Clone ID: LIB3083-073-Q1-L1-A7
ggaaacagcagctgtcgggtgagggttcactttggtggaaaaagcaacgccctggcgctgaacggtggccttagatcggctccaacgttcctgacttcatcctatcaatcactcctccacaagtctggcaatagagggtctcattcaactggcgtgaatagaatggggggagggcattgacatgacgaaccgcattaccttcatgctcaacatatgtacaacttggataggatgaaaaatcagaagctgac

SEQ ID NO: 3266 - DNA, 213 bp, Gossypium hirsutum
  Clone ID: LIB3083-073-Q1-L1-A8
catgcctaatggtctgcggggggactgttaggacggaaatgcatactacaccatctcccaaaaagctaccattgccatctcattcggtacttatctgacctccaattttggcctcggatacgccattgctataatcctgcatttacatctactactgtccaatattcttcttgattactacatttgatcacaatcttcctaacccgttacacg

SEQ ID NO: 3267 - DNA, 254 bp, Gossypium hirsutum
  Clone ID: LIB3083-073-Q1-L1-A9
gccacacggatatacgcgggcttttacagaagcttttctctctcttttgttcctttgaagggaataaaagaggagaggagggaaagtacgtgaaatttgtgaatttgttttacatcttcgttaatctgcgttgagcatttcacacagcctttgtagaggatatatggagaaacaaagaaagaaagagaaaccggcctcttccagacaaatattctgcctttcaggtccttcacacctcacttcagtcgactggg

SEQ ID NO: 3268 - DNA, 248 bp, Gossypium hirsutum
  Clone ID: LIB3083-073-Q1-L1-B1
ataataaagcagggggataatagtatgtattaaccactgtgctcaagattttacatttggccatatcttctgtatcaaccaactggggatagagtgatagtgtatgcaaggcaaaagctgaaatctatatagtctctcatcttgaagccaaagggattataataaaatggaaaaaggccaatgaaaatctcacctcctcttgtgtacctccaaaaaaatgaattagtatggtataagttgggtgataa

SEQ ID NO: 3269 - DNA, 258 bp, Gossypium hirsutum
  Clone ID: LIB3083-073-Q1-L1-B10
cttaagcagctacctaaggaggccatctggaatgtttcaatagctgcaaccatttgggcttttccttctaaagttatagctggtaacacccccttgacatcagtgtcacccaaaattccatcaagaaggttttccatcatagagtagagcttcggataaccatttgtgaatatctctttgacaaaacttgatgcagtaaaagcagactttatttgagtagcaaaggccttaacaagagctttccaaactcgatcagtt

SEQ ID NO: 3270 - DNA, 259 bp, Gossypium hirsutum
  Clone ID: LIB3083-073-Q1-L1-B11
ggaaacagcagctgtcgagggagggttttctttggtggaaaaagcaaagccatggcgatgaacggtggtcttagatcggcttcgaagtttctgacttcgtcctctcaatcacttctccacaagtctggcaatagagggtttcattcaactggagtgaagagaatggggggagggcatgggcatgatgaaccgtattacctccatgctaaacatatgtacaacttggataggatgaaaaatcagaagctgacaatgtctc

SEQ ID NO: 3271 - DNA, 266 bp, Gossypium hirsutum
  Clone ID: LIB3083-073-Q1-L1-B12
tggggtgggcttacatgcaaaaatcaaggtacttgacagcagaggtggtgtatcgaaaagcccagatgatcgacccagatgccaacaaggcctgcagcttgggaatttgcttgatcaaacaaggcagatacgatgatgcacggttggtgcttgaagaaatatcgcaacggaaaatcccaggttcggaagaaattagagccaggaatagagctgcggaattgttaatggaaatcaataccttcgagccgccaccatcggacgtatca

SEQ ID NO: 3272 - DNA, 236 bp, Gossypium hirsutum
  Clone ID: LIB3083-073-Q1-L1-B2
gagagagagagagagagagagagagagagagagagagagagagagagagagagagagtttttttttttttttttttacagtacattcatgattatcattcaatgacaaaacttggttcaatccatacataaactacacaaaaattttcactctagttttattctttcatgtgcatctccattttgcttgttcatacaacatccaaacaaaagactttataagagcaagaatttaca

SEQ ID NO: 3273 - DNA, 257 bp, Gossypium hirsutum
  Clone ID: LIB3083-073-Q1-L1-B3
ccaaaacccagctgttgattggttatgcacctcacatcctccagtttttggatggcatatacatggagaaagacatggatgatgtggtgatgaagactgccattggagtccttggtgatctggctgatacattaggaagtcatgctggttctatgatacagcaatctgtctcgagcaaagactttttgaatgaatgcttgtcttcagaagaccttatgattaaagaatctgctgaatgggccaagttggccattagt

SEQ ID NO: 3274 - DNA, 214 bp, Gossypium hirsutum
  Clone ID: LIB3083-073-Q1-L1-B4
agtatgttaacaagttggttgaccattagaataactcgattaagctgctgccggagccgggtcgttatcgagatcagtggagaggaggattgacaaggaagtgcaacagtgagaaggaggtgaacattgatcatccagtgcggtgaaccaggaagttcgctaaatccggccgacactaatatcaagtatattagcagtgtgccgcgatttaatt

SEQ ID NO: 3275 - DNA, 258 bp, Gossypium hirsutum
  Clone ID: LIB3083-073-Q1-L1-B5
tttcattcttcactgctcgggggccgatcagttcttccccaccatcgattcatcatcataatcggcagatgacatcaaatccgactctatttggagtcgtatcctcctaaccctcatctaacttcgatttcaacgaagcagacaaggattcgaaggccattaaaaggtgcatggtggacgtgggctctgacgtggaggcgcgagtggcgcggcgcacggagccgaaggcagcgcgatgtgtggcgcttgggattggct

SEQ ID NO: 3276 - DNA, 259 bp, Gossypium hirsutum
  Clone ID: LIB3083-073-Q1-L1-B6
ctgagataaccaacagtggtggggaaccctcttcaatgatggccaaatgtgacccacgacacgggaagtacatggcttgctgccttatgtaccgaggagatgttgtgcccaaagatgtgaatgcggctgtggccaccattaagaccaaacgcacaatccaatttgtggattggtgccctactggattcaagtgcggtatcaactaccagccaccaactgttgttccaggaggggaccttgccaaggttcagagagctgt

SEQ ID NO: 3277 - DNA, 255 bp, Gossypium hirsutum
  Clone ID: LIB3083-073-Q1-L1-B7
gattagcactctctaaatgagtacctctaaaaggaggatatgcagacgctcagcttgatgaacgctgcgcagcaggtttcaccatgatggcattacccgttaaaaagttgttgaagcttttatatcctagcttgattcgaatcgatgaatatcttttgaagccatccgctcaagccgatgatttcaaaaacatcatgaagagattgcctttgctcgcagaaagcctagattcaagaggcctttatttgtatgatg

SEQ ID NO: 3278 - DNA, 269 bp, Gossypium hirsutum
  Clone ID: LIB3083-073-Q1-L1-B8
tcgagttttttttttttttttggtccgacaggggggtcatgccggttgctctacacttgatgtttcccaggaactttggcacagttttaagagatggcctataaaaccatccctttattttttttacaggctctcccgacacccgacacaagagctagcctgtttctcgatagccatggttcccggttttaggtttccactcatgatcatcatcacaccaccaccatagctttttccgtcctgctgctacccggtgttttagcttttgt

SEQ ID NO: 3279 - DNA, 256 bp, Gossypium hirsutum
  Clone ID: LIB3083-073-Q1-L1-B9
cgccctaaatgagaggagtggcatatcccacagcattctcactgttcatgttcgtggcacggacataaaaactaatgctgttttgcgcggtagtctacatttggtggatcttgctggcagtgaacgggtagatcgttctgaagcaactggagataggcttagggaggcacaacatataaacaaatccctgtcagctctaggagatgtaatctttgctctggcacaaaagaattctcatgtcccttatagaaacagc

SEQ ID NO: 3280 - DNA, 255 bp, Gossypium hirsutum
  Clone ID: LIB3083-073-Q1-L1-C1
aaaatactttttaaaatatgggtattcaatccctcgagtattttttttaatttcttttttctgcgacgataaaagagccacggttactttacatccacagtcgacgggctgactttgcggcggcccatggcgatcgtcgaccggcatcagcggagctccgaaaggaagatgtttagtctttgtcccttttggcacacttcgaccacgatgaacaactcttcctcttctttttccactaaaaatctcaaccacaat

SEQ ID NO: 3281 - DNA, 255 bp, Gossypium hirsutum
  Clone ID: LIB3083-073-Q1-L1-C10
cacttgttgaacatgcacgagttgtgactcagaagcacagattctcatatggcgagccaatgactgttgagtccacaacacaagctctttgtgacctggcccttcgatttggtgaaggagatgaagaatccatgtcccgtccatttggggtgtctcttctcattgctggtcatgatgagaatgggcctagcttgtaagtatcagatgagttctcgttatgttgattttcatgtagaaaaatctctttcaacatat

SEQ ID NO: 3282 - DNA, 129 bp, Gossypium hirsutum
  Clone ID: LIB3083-073-Q1-L1-C12
cactgtcgagcgaagatggaccgccccgggggctgtctgcactccatggcttaacgcctggtgggttccctaaggaaactcgttctgcgatgctcaaactagataagagcatcacccacaagtaaccaa

SEQ ID NO: 3283 - DNA, 255 bp, Gossypium hirsutum
  Clone ID: LIB3083-073-Q1-L1-C2
gtctctttcatgtccttgacggctgttctttgatcttccatgatctcttttcttgttttcacacgtgttatcttccttttcatgggtgtatagccggtgggtacactgtaagtcggccaatattggccggtatgatagtgagcctccattgtgttatttgtaggggtaatcatataggagttacttcggtggtgcagtgatgttgctaattctcttcagttatggtctttgaatttggtcatgtgtatactacct

SEQ ID NO: 3284 - DNA, 256 bp, Gossypium hirsutum
  Clone ID: LIB3083-073-Q1-L1-C3
caaaactctgcattcagggggaacttcaatctgcaaaatcttcttattctgacagctattaaggcagatccatctagagttatggattatatcaataggctagataattttgatggacctgcagttggagaagtggccgtcgaagctcaactgtatgaagaagcatttgcaattttcaaaaagttcaaccttaatgttcaggctgtcaatgttttattggataacataagaagcatcgatcgggctgtggaatttg

SEQ ID NO: 3285 - DNA, 263 bp, Gossypium hirsutum
  Clone ID: LIB3083-073-Q1-L1-C4
gaatccattatacctgttggggatttacaagttcccttaacaatttacttccaatacagacaacaaaaatatcaagtttcaacccaaacacaaataaaacatgaaaaagcataacatacagtaaaccatttcaagtctttaacaagcttcaaagaatagaagcttgcataacacggaagcaacaggtaataaaagacatcatacgcacactcaatcacaggtacttcttagtactcatcatcttcaccctcatcaccctcagc

SEQ ID NO: 3286 - DNA, 260 bp, Gossypium hirsutum
  Clone ID: LIB3083-073-Q1-L1-C5
tgaacttttggtcaaattggggtccaaaaccctcttctcctgcgcacagtaaacaaaatccatggatcttgaaaacggaactgttcgatacgaagatgaatatataacgaattctcgaggactaaagctatttacatgcagatggttaccagtaaacgaagaacccaaagctttaatctttctctgccatggttatgccatggaatgcagtatcaccatgaacagtactgcaatccgattggtgaaagcaggatatgcag

SEQ ID NO: 3287 - DNA, 258 bp, Gossypium hirsutum
  Clone ID: LIB3083-073-Q1-L1-C6
gcgaagctactataagtgggggcatccgaattgtcctgtaaagaagaaagtcgaaagatcacttgatggccaaatagctgaaatcgtttacaagggtgaacacaatcatccaaagcctcagcctccaaaacgaaactcgtcccaaggattaggatttactagtgatggaaccggtcaagatgccaacaactccttgtggagtaataatcataatgagaggggcgaaggttctgaaactagagctgaaaatcatagtga

SEQ ID NO: 3288 - DNA, 251 bp, Gossypium hirsutum
  Clone ID: LIB3083-073-Q1-L1-C7
tttctctaggcgaatctactataagggggcgctttcaaattgtcctgtcaagaataaagtcgaaagatcacttgatggccaaatagctgaaatcgtttacaagggtgaacacaatcatccaaagcctcagcctccaaaacgaaactcgtcccaaggattaggatttactagtgatggaaccggtcaagatgcctacaactccttgtggagtaattatcattatgagaggggcgaaggttctgaaactatga

SEQ ID NO: 3289 - DNA, 77 bp, Gossypium hirsutum
  Clone ID: LIB3083-073-Q1-L1-C8
ctcctccccaccatgactgacagagtttacccttcatccaaacaacccacaaatggcaccgtccccaccaccacctc

SEQ ID NO: 3290 - DNA, 274 bp, Gossypium hirsutum
  Clone ID: LIB3083-073-Q1-L1-C9
cggggtggggggctctatagatcttgtgtaccccccgctctgcaagtattccgcgcgcggaaatattgagtgaacagggggtgcgaatccaatgtatgtgctctgagtgattcgcgacaacctcaagatcaaacaatcatcaaacgacatgccatgttgacaggatgatgtatttaaggactgatatcacaaatgtgtggtgaatgcagtggctgtgcttaacatccgtcaccgagttagatggactgatctcttaagtcgagagcaagatagc

SEQ ID NO: 3291 - DNA, 240 bp, Gossypium hirsutum
  Clone ID: LIB3083-073-Q1-L1-D10
gtggggcattacaaagagtctcctacgaaaaagggagcaatttatttcactgcgagaattcaatgatccaacattctaattacaggacataaattagataaacgggaaactagcaaacacccttcacaaaggagccctcagctaacctcacctcacctgtatctctctctctctaattagatccatctagccgacatggacaagacaaatccaggctcaagacaatccataatgaactgc

SEQ ID NO: 3292 - DNA, 254 bp, Gossypium hirsutum
  Clone ID: LIB3083-073-Q1-L1-D11
ttcttattcctttattgcgttttagaatttttcttaatcgaaaatgagagagtgcatttcgatccacatcggtcaggccggtatccaggtcggaaacgcttgctgggagctttactgtctcgagcatggaatccagcctgatggtcagatgccaagtgacaaaactgtcggaggaggtgatgatgcttttaacacctttttcagtgaaactggtgctgggaagcacgtccctcgtgccgtcttcgtggatcttg

SEQ ID NO: 3293 - DNA, 257 bp, Gossypium hirsutum
  Clone ID: LIB3083-073-Q1-L1-D12
cggagaatatgtatggggagagaaggcaggcttaagcaaaagaaaatggaaaaccagatgaagcttgaggctaaactccatgaactggaggtagaatggtgtggtgggtctgaaactatggaggaaattctttccagaattcaacagagagaagaggcagcggttaaacgtgaacgagccatggcatatgccttctcccatcagtggagggcaaatgcgagccaatatcttggacaagcatcctatggtgcaggcaa

SEQ ID NO: 3294 - DNA, 258 bp, Gossypium hirsutum
  Clone ID: LIB3083-073-Q1-L1-D2
caacagtggaaagaaaagcagcggaaagtgtaccggcacgccgaggaggctgagaaaaggtttgaaaatttcaaggggaatttgaagtatatcctagagaggaatgcaaagagaaaagcaaacaaatgggaacatcatgtgggattgaacaagtttgctgatatgagcaatgaggagttcagaaaagcttacttgtcaaaggtgaaaaagcccatcaacaaagggataaccctgtcaaggaacatgaggagaaaggtg

SEQ ID NO: 3295 - DNA, 256 bp, Gossypium hirsutum
  Clone ID: LIB3083-073-Q1-L1-D3
gtggaaatatagagtcggagaggcatggagactgccatacctggtagattatctctctcaccaaacaccgtctttaatcctaaaccaggagagaaacggtcactgtgcagaggaccatgtaccaatcgtggcgttctcatggctatatcgaccacaggaccaagtaaaggaggaggaatcttggagaagccagttatagagagaaccactcctggtcgtgaatctgagttcgatctaaggaagtcgagaaaaatag

SEQ ID NO: 3296 - DNA, 258 bp, Gossypium hirsutum
  Clone ID: LIB3083-073-Q1-L1-D5
tatcaagcctgaaagctggggatggtcttggaccgatgtcaagctaacatctcctcagctttccagagaaagcatgtataaattgtctcggaaacatttaacacttcagtgtgtatcttcaagtgaatcaaggaacccttttgtagaaaatgctattcaatatactatagcagctgcacatgcaacatttgacaagaataagaaagaggcattagataaactactcttacaaggtcttgatattacgatcttaggttg

SEQ ID NO: 3297 - DNA, 258 bp, Gossypium hirsutum
  Clone ID: LIB3083-073-Q1-L1-D6
gttttgcaatccttttctgcggtgcgattgtatgggcttttgcagaaattttgacagcagctggtgcttatgataacagagctcctcaaactcagttcagctgccgtactgatcgttctgggctcatcagtgctgctccttggataaggtttccgtatccatttcaatggggaagaccacgttttaatgctggagatgctgttgcagtcatagctgcgtcctttgttgccatcattgagtctacaggtacgtttatta

SEQ ID NO: 3298 - DNA, 254 bp, Gossypium hirsutum
  Clone ID: LIB3083-073-Q1-L1-D7
gttgtggttgcaccaactggtgccgctgtgggtttagcattctttagttatggctttccacaagctggtagttgtatagaagtcagtgttcccttgttgttgctggttcttatatgtaccctgtaccttcgaggaatatccatttttgggcaccgattgtttcgaatatatgcagttcctcttagtgttacaatcacttggatatatgcattctttctgacagccggaggagcttatgattataaaggatgcag

SEQ ID NO: 3299 - DNA, 237 bp, Gossypium hirsutum
  Clone ID: LIB3083-073-Q1-L1-D8
ggtttgccttgtgctgttggggttgctcaccactggaccaaaaggtgtcagatgtgaaaatattggtaaccctttaatccctgggagcaccgcaatggattcttttctggcttacaaatatttaaaaagaggtgccagacattttacttcttcaatcgactacaaggttttgtcacattggtaccgtcgatcaaatacctcaaggcgtgagaaagtgaatccttatgagagaccaca

SEQ ID NO: 3300 - DNA, 259 bp, Gossypium hirsutum
  Clone ID: LIB3083-073-Q1-L1-E1
gttacagagcagaagatgactatgattaccttttcaaagtagtattaatcggtgattcaggtgtgggaaaatctaatttactctcaagattcacaaggaacgagttcagcttagaatccaaatccaccattggtgttgagttcgcaactcgaagcttaaatgttgatggcaaagtcatcaaagctcagatttgggatactgctggtcaagaaaggtaccgagccataacaagtgcttattaccgaggagccgttggtgc

SEQ ID NO: 3301 - DNA, 254 bp, Gossypium hirsutum
  Clone ID: LIB3083-073-Q1-L1-E10
gttgagttcatgcctttcgccttatcatttttcctcacattgagtgcagtaatgtggtttgcttatggactatttattaaggacctctgtgtagctctccctaacgtactaggcttcatcttggggatgctccagatgcttctctacgccatttacagacacagtgaaaaggttaacatagaggaaaagaagctaccagctgaacaaatgaaaagcatcaatgtcgtccttaccacattaggtgcctctgaagt

SEQ ID NO: 3302 - DNA, 254 bp, Gossypium hirsutum
  Clone ID: LIB3083-073-Q1-L1-E12
gggagacgaaaggtttggggtgatatatttcatattgttgcttccaagactgaatgagcatgattttgaggttctatcaagccctgaggttattgaaactagagacgcacttttgcagaagctgcaaaagaataagaatgtacaggttgaaaacagtagtcctgatgcatctcaacagagtggcaattttagtgagacaaaacgagaaacttttgtatctgaggaaaaggtcagtgaaatcgtaaatgcggcag

SEQ ID NO: 3303 - DNA, 240 bp, Gossypium hirsutum
  Clone ID: LIB3083-073-Q1-L1-E2
tttctagatcagtctctgatactgggagattattcacttatgggtggagcaagtatggtcaactaggacatggggactttgaggatcaccttgttccgcataaggtggaatctttagccgacatttttattaagcagatagcaggtggatggagacatacaatggctctcacatctgatggaaaactctatggctggggatggaacaagtttggacatggtttagttggtgtcaacgctt

SEQ ID NO: 3304 - DNA, 257 bp, Gossypium hirsutum
  Clone ID: LIB3083-073-Q1-L1-E3
cagaatgaaggagggtcagagtgatatctactacatcactggtgagagtaaaaaggcagttgagaactctcccttccttgagaagctgaagaagaagggttatgaggtcctttacatggttgatgctattgatgagtatgctgtcggacagctcaaagaatttgagggcaaaaagcttgtgtcagctaccaaggaaggtcttaaacttgatgagagtgaggatgagaagaagaagaaggaagctttgaaggaaaagt

SEQ ID NO: 3305 - DNA, 258 bp, Gossypium hirsutum
  Clone ID: LIB3083-073-Q1-L1-E6
gcaaattaacgccttttgggggtgtttgctgagctctctcccccaacatcaccatggcagatagggtataccccaaacaagcgacaaatggcaccgccgccacatccaacccttcttttccggccactaaagcacaacaatacggagccacccgccctgtctaccgtccacaacccgaacgccaccgctaccgccgctcttgctgttcttgctgcctttggaccaccatagctatcctcgttctcatcctcatagccg

SEQ ID NO: 3306 - DNA, 258 bp, Gossypium hirsutum
  Clone ID: LIB3083-073-Q1-L1-E8
ccaaattctaatttcaagggctgctcatcaaaacttagaaacagtagaaacatttttctaatatcttctctctttttccttcattttctctgtttctttccccagattttttaaaattttacgatttcttttcttctaccaaaaagtagtacagaaaaaaaggatagaattcttttctttttttttttggggaaactgaaattcatcgttcagtttcaggtcttttttccttcaagttttctatatttttttttctga

SEQ ID NO: 3307 - DNA, 268 bp, Gossypium hirsutum
  Clone ID: LIB3083-073-Q1-L1-E9
tctacgagccatttttttttttttagagagggttaagacaggggtattatctgaacatcaaactttaatcaatacagtaactaaagatgtggttcactgaccatttcagcaccacaaaacactgtgttcattcaacaccacatgctactaatgggtttcgccacttaaaacacccacagttccatagaaatgaaaattatgaaaacaagcacaagacacccaattagaaaccaccacggaggcgaatgacaagatgcagagtggattt

SEQ ID NO: 3308 - DNA, 248 bp, Gossypium hirsutum
  Clone ID: LIB3083-073-Q1-L1-F1
ataactacaggaaactttcactctaattttattctgtcttgtgcatctccattcttgtttgttcatacatcacataccataatctaaaagaaccacgcaagatgatttttttcaacagttaatgccacacattgtagtgtctggtcctttggttttcatcacaaatggatcaattcggacccaaagcaaggagaagattgaagccaatagcactgaccatataacaacaatggttggtgtcctgtttt

SEQ ID NO: 3309 - DNA, 255 bp, Gossypium hirsutum
  Clone ID: LIB3083-073-Q1-L1-F10
cttggaagaggaagaaagggggcggagcatttggcgtcgatatttgggactgaaaaggacagagtgaactgccccttctatttcaagataggcgcgtgccgtcatggggatcgctgctcgcgtctccacaccaagcccagcatcagccctactatccttctctccaacatgtaccaacggccggacatgatcaccccgggcgtcgacgcccagggtaaccccatcgatccccgcaagatccaacaacattttgag

SEQ ID NO: 3310 - DNA, 254 bp, Gossypium hirsutum
  Clone ID: LIB3083-073-Q1-L1-F11
tcccgccgttcctgaagcgaaatctgtcggaaaatgagctcctaactggcgttacgttcgcgtcagctggatcaggatatgattatttaactactaggttatccaatgccatcccagtttcaaaacaagttgagatgttcaagagttacataaacaagcttaagggaattgttggaaaagataagggcaacaacatcattggcgaagctgtggtaatcattagtgcagggactaatgatttcgttttcaatttc

SEQ ID NO: 3311 - DNA, 253 bp, Gossypium hirsutum
  Clone ID: LIB3083-073-Q1-L1-F12
cttgtttctaactttgggggtttgttctcttcttctatgttcttcagtttttgaaccaacaatggctcagcctcgttcacctttttgtgaagggaaatgcaaagggaggtgcaataaagcggcggtttgggatcgatgcttcaaatattgcggcatatgttgcgaggagtgtaaatgtgttccttccggtacttttgggaacaaacacgagtgtccttgctacagagacatggtgaataacaagggcaaaccc

SEQ ID NO: 3312 - DNA, 259 bp, Gossypium hirsutum
  Clone ID: LIB3083-073-Q1-L1-F2
tcgaaagatcaaatcaagatgcctgccaaaatgaacgacgctgatgtatccaagcagatccagcagatggtgagattcatccgccaggaagcggaggaaaaggctaacgagatctctgtttccgctgaagaggagttcaacatcgagaagcttcaattggtggaagcggagaagaagaagattaggcaggagtacgagaagaaggagaagcaagttgaaatccgaaagaaaattgagtattcgatgcagcttaatgcat

SEQ ID NO: 3313 - DNA, 255 bp, Gossypium hirsutum
  Clone ID: LIB3083-073-Q1-L1-F3
ctgaaatcctggcgaatgtggaattcatacaggagaagcgcttaatagggaaatactttgaggagatcagtcaagatactgggaagtatgtttttggagtggatgacacactgaaggcgttggagatgggagcagttgagacacttatagtgtgggaaaatctggacataaatcggtatcagctgaagaatagcactactggtgaaattaccataaaacatttaaacaaggagcaggaagccaatgagagcaact

SEQ ID NO: 3314 - DNA, 257 bp, Gossypium hirsutum
  Clone ID: LIB3083-073-Q1-L1-F4
gcgagaaaagctcataggagggtgattcagaacgtaattttgtcaatcattactaaggcggctattcttgcactggcatttgctggtcatccacttgtatgggcagctgttcttgccgatgttggcacatgcttgttggtgatcttcaatagcatgctccttttacacggaacacacaagcatgctggaaaatgttgcaaatcttcagctgcatcacataaagacaagcaaggatgtaaaaccagtcattgccatac

SEQ ID NO: 3315 - DNA, 257 bp, Gossypium hirsutum
  Clone ID: LIB3083-073-Q1-L1-F5
gtttcactgtctacccatcagcccaggtctccacatctgttgttgagccctacaacagtgtcctctcaactcactcccttttggagcacactgatgtggctgttcttcttgacaatgaggctatctatgacatttgcaggcgctctcttgacattgagcgacccacttacaccaatcttaaccgtcttgtctcccaggtgatctcctctttgactgcttcacttaggttcgatggtgccttgaacgtggatgtaaca

SEQ ID NO: 3316 - DNA, 255 bp, Gossypium hirsutum
  Clone ID: LIB3083-073-Q1-L1-F7
tctctgagggtgtcttaggagacgccttcgatttactttcggtttccatttacttctttatttctacgtttttgaatttttagtaagcgaaaatgagagagtgcatttcagttcacatcggtcaggctggtatccaagtcggaaatgcctgctgggagctttactgccttgaacatggaatccagcctgatggccagatgccaagtgacaagactgtcggaggaggtgatgatgcttttaacacctttttcagtg

SEQ ID NO: 3317 - DNA, 252 bp, Gossypium hirsutum
  Clone ID: LIB3083-073-Q1-L1-F8
gcatgcatgcaagttgcatgtattgtgttaccaacaaagaaaaagtgatcaatattcaaatcatatgcatctttggagaagataaacttgtcaaaagatccaccatttcaatctatttgataagcatgtgtatatatgaataaaaccaacacaaattccactaacaaaggaactcaaaaaagtatttttaatcgctggttataaaatcttacatttgtgaagcatgaagcctttcttcggattcctcttgtt

SEQ ID NO: 3318 - DNA, 256 bp, Gossypium hirsutum
  Clone ID: LIB3083-073-Q1-L1-F9
aaaaatgatagcttgaaagtctaaaaggaatttttttttcttttttagttgaagatagaaaagaaaagaacaatggggtgttcattttcagggttgaatgctttatacgacgccgtaaatggtggaggggacgtttggatcaatgacaacaggttcaggatcgtgaggcagttgggtgaaggtggattcgcttatgtctatttggtgaaggaagtcatatccgacgcctcttcagcttcatctgttggcttagcca

SEQ ID NO: 3319 - DNA, 252 bp, Gossypium hirsutum
  unsure (1)..(252): unsure at all n locations; Clone ID: LIB3083-073-Q1-L1-G10
gaaaagtttaaagagtgagctcaagcttatgaggtgctgagtgacccanagaagcgtgagatatatgatcagtatggtgaggacgcccttaaagaaggaatgggtggaggtggtggtgcccatgatccatttgatatcttccaatccttctttggtggcaatccttttggtggtggtggtagcagccgaggccgaaggcaaagaaggggagaggatgtaattcatcccctaaaggtttctttggaagatctc

SEQ ID NO: 3320 - DNA, 239 bp, Gossypium hirsutum
  Clone ID: LIB3083-073-Q1-L1-G11
agtaacccaattatataaatttattactttaaaatgaaatattatcaaggaaaataaaagaaaaagcatttctcaccaaaatgttgcattttatgaattggaacaataccattgaagcagtaaatatccaaaacaatcctaatcctcctcaataacacactcagaggacactacaggcatatttgaccaggcgtggaggttagggaattatgcaatgtagtttccatgtctcacatgat

SEQ ID NO: 3321 - DNA, 265 bp, Gossypium hirsutum
  Clone ID: LIB3083-073-Q1-L1-G12
gagaaacccctagtagataagatacgaaagggatgggctgaggaatttcgggctaagattgatgatgacctagagagagtagagttttggttaaaaaataccattagggtatttgatgagttatcatgcatgcttgaggagtgcgtgaagtgcacagtgtcactcctacgagactcaacttatcaatggtggaacacccttgtgtcggttggaccaagggaaaggatcgcatgggagttcttccaggaggagttctgaaagaagt

SEQ ID NO: 3322 - DNA, 251 bp, Gossypium hirsutum
  Clone ID: LIB3083-073-Q1-L1-G2
aaccacaaagcgttttccatcattacaacacaagcaatcgggtgtggggggaacaaaggtcgcatatcaaaggggaataaattgagaattctttgaaatgaaaggataatcacgggaggcaaaacaacgtgcaaattattcaagttgcttaaaatctaagctccattgattaaggcaagggcatcggccacggttggtagtgcagggattgctccctttttggtcgtcgtgatggctccacatgcatttga

SEQ ID NO: 3323 - DNA, 257 bp, Gossypium hirsutum
  Clone ID: LIB3083-073-Q1-L1-G3
ctagtctcgagtttttttttgactgtttttagtttcttgtttcgcttgtctttctagttgcttcaaacagctgaggtgtatatatatatatataatggagattctggttagatgttttcaaattattgcatgagagaagagcttgtcagagttgagaggaactaaattggaaggaaatggggtgcctgttatcgacgccagaggttgcaggaggagctcgaagaaggccgagaaatattggtgaagttgtagttttt

SEQ ID NO: 3324 - DNA, 257 bp, Gossypium hirsutum
  Clone ID: LIB3083-073-Q1-L1-G4
agaagggcaggatgtgctgcgcttcattgacaacattttccgttttactcaagcaaactctgaagtgtctgccttgctaggtcgtattccatctgctgtcggttaccaaccaaccttggctactgatcttggaggtcttcaggaacgtattaccaccaccaagaaaggttctatcacttctgttcaagccatatatgtgcctgctgatgacttgacagatccagctcctgcaacaacctttgctcacttggatgcca

SEQ ID NO: 3325 - DNA, 306 bp, Gossypium hirsutum
  unsure (1)..(306): unsure at all n locations; Clone ID: LIB3083-073-Q1-L1-G5
ccctggcctgcatgtaattcgttcttcgagcgagttntttttttttttttatgttntaattcaatggcggtcgtccacctcatcggatatatatcacccttctcatcacaattcaactttcagaatttcatatgaccaaaagggtctaccaagtgaaatataacactgtcttatgtgaaggtttaaacatgagaaaaacaagacaaagactgccaaatttagaagaattttaatgactaagcatataaaacttgttccacataagaaactcacaaagcagactctgctaagagggcatggatttca

SEQ ID NO: 3326 - DNA, 257 bp, Gossypium hirsutum
  Clone ID: LIB3083-073-Q1-L1-G6
cgggcatacatgcaagccgagttaccaacattccgagtacgggactgcaatcacatgggatgatgcattacggtcgagcgcacgtaactttgagcacaagagctacaacctcttcacgtgcaactctcacttgttcgtagccaattgtctcaaccgactttgctacgacggatcgatggattggaacatgataaccgtggtggctttagtaattatcaaggggcattgggtcaataacatgtcgataataagatcat

SEQ ID NO: 3327 - DNA, 258 bp, Gossypium hirsutum
  Clone ID: LIB3083-073-Q1-L1-G7
gttcttattcctcacaggggaagtgtaaagattcagtatattcaactttttagtgatcatcttgctgtctctgagcgtgaagaaggtttgcccaaaattactgtttaccatcttccggaagttgaagagccactcgtaaatcttgaagggggtaaatcagttcaatttattgaccctgtatactcagttgatctatcagtatcacagttttcctccaccattttgcggttttcttatagctcattgcggatgcctaat

SEQ ID NO: 3328 - DNA, 256 bp, Gossypium hirsutum
  Clone ID: LIB3083-073-Q1-L1-G8
agccaacaaagatttcggggatggtagacatgctgaatgaagggtcagtggagacaaagatcaattgtacgcgatttatagagaagttaatggatgagaaggaatttcgggctgagagcatctccagccatcggctattggttggtctaatgcgcttagtgaaggataagaggcacacgaatggaatcatgcctggtcttagcttgctcagatctatatgcttacataaacaagtcatgggtttgattgtgagtat

SEQ ID NO: 3329 - DNA, 267 bp, Gossypium hirsutum
  Clone ID: LIB3083-073-Q1-L1-H1
gatccgccttttcccaattcgccctttttttagtcgcattacaattcactgggacgttttttacaacgtggtcactcttaaaaccctgtcttttcccaacttaatctccttgcatcacatccccctttctcctgctgtctttatatctaataggccctcacctatctcccttcccaacattatctcatcctttatttctaatgtcatattgtaagcatttatattttgttaaaattcactttaaattatttttaaatcaatctcatt

SEQ ID NO: 3330 - DNA, 237 bp, Gossypium hirsutum
  Clone ID: LIB3083-073-Q1-L1-H10
aataagagaaaattacaatacaatgttttcttcatttctttcttttaaaatataaaaacattagactacataatttcaacacttttttcatacaattaattcatcgaggaaagttttccagaaaccatgaaacaaacatatgccaattttccaatcattcttcccccccccaccccccttttcttctgaaaatgtaaacacaaaaagatcataattattatcaaccagcggccattg

SEQ ID NO: 3331 - DNA, 237 bp, Gossypium hirsutum
  Clone ID: LIB3083-073-Q1-L1-H11
tgaagcctgagcataagtggaaatcggcatatatgattgtgatcattgctatgggcgggatttcgttgctattggaagctattacatggattgtagtgttgaagagaaagtccaggaaatccacaaaaccctatgatggatacaacaatgctcaatctaatcaacagcctcttgccatgtgatcaaccgattccttgtagtccaacctggttttgtagcaatcgtctccctctctag

SEQ ID NO: 3332 - DNA, 266 bp, Gossypium hirsutum
  Clone ID: LIB3083-073-Q1-L1-H12
tttttattcacttcaagctctttacacaggtggcagccatagaagcaacaacaatgtggagatcaatcataactttcattctcttcgcctttcttttcttccctatttcagcgacgaagataacactctacaacaaatgctcacatccagtatggccagggattcaacccagcgccggcaagccaattttagcccgcggtgggttcaaactcccaccaaacaaagcctactccatgaatctacctccgttatggtccggtcggttc

SEQ ID NO: 3333 - DNA, 259 bp, Gossypium hirsutum
  Clone ID: LIB3083-073-Q1-L1-H2
agaaaatcgatccgtttcctgtactgttctgaggcttcctttctccactcttcctctcctgaaaacttctaatctggtcctcttctcctatcgtaccgagcttgatccatagcatactcaggaactcccctatccaggtaaatttcttctcctctttttaacgtttctgttgctaagatatgtgcaagattatttgcagacctaggtgtatgttgaaatctgatattatcaaatccatatattttctgttgaatgttat

SEQ ID NO: 3334 - DNA, 264 bp, Gossypium hirsutum
  Clone ID: LIB3083-073-Q1-L1-H3
ttcgagaaaaaacaattatggcaatcgaagttctccgaacacgagcacatataatatgaagaagctcctgccgccgaggatgaagacactggagctcaagtcgcccctattgtcaagttagaggaagtcgctgtcagtacaggcgaggaaaatgaagatccgatcctcgatctgaagtcgaagctgtatcgatttgataaagaagggaatcaatggaaagagagaggtgctggtactgtgaagctgttgaagcacaaagagaca

SEQ ID NO: 3335 - DNA, 259 bp, Gossypium hirsutum
  Clone ID: LIB3083-073-Q1-L1-H4
tctctctagagaatttacgggagaaaaaaaaaagaaagaaagaaaactcaaccctcccaaaaatggcgttccctcagcagcagtttcaacaacactaccaacctcaacaacaacaacaacagtcaaaaagtttcaggaacatgtacgcaatcgacgctcaggtttcgccaccacttgcttattacaatacgcctaatttacaagattcctctcagcatcctccatatatccctccttttcatgttgtggggtttgcacc

SEQ ID NO: 3336 - DNA, 137 bp, Gossypium hirsutum
  Clone ID: LIB3083-073-Q1-L1-H5
ttttctaggaaagaacaaagcaatgaaagaaatttaagaagccttgtttcgcgttcttgaacttagctttccatatattcatccatggcttttattcttcctctgattgctttctttttacttatcctggtaagttt

SEQ ID NO: 3337 - DNA, 250 bp, Gossypium hirsutum
  Clone ID: LIB3083-073-Q1-L1-H7
ccggtcagcaaagcacaagggcaggaattgaagctcgaataggggtgatgttttacattcttgggaggtatgatgagtcaaggaactcttttgagagtgcagtaacaaagcttagagcaagtggggagaggaagtcagccttctttggggttgtcttgaaccagatgggcttggcttgtgtccaattattcaagattgacgaggctgccgagttgtttgaagaagcacgagcaatactcgaacaagaatg

SEQ ID NO: 3338 - DNA, 261 bp, Gossypium hirsutum
  Clone ID: LIB3083-073-Q1-L1-H8
agacaaactcccaggacgggataagaaagatgaagaggacaccacccaaccaccagctgctgctgccccaattgagaacgaccaccatgaaggagagacaaaagagaagaagggatttttggtgaaaatcaaggagaaaattcctggttaccactccaaaacagaggacgagaaggaaaaagagaccactgctcccaattaatgaatcaatataatgcatttcaagtaaaagatgtgtagagattgtgtggtttatcaatt

SEQ ID NO: 3339 - DNA, 246 bp, Gossypium hirsutum
  Clone ID: LIB3083-073-Q1-L1-H9
atcggtgaaacacgcacccaaaaaataaaaccctttgaaaaccaaagaaggaagaagaagatgtcgtggcaagcttacgtagatgatcacttgatgtgtgaaatcgaaggaaaccatctctctgccgccgctatcatcgcccacgacggcagcgtttgggcccaaagcgccaatttccctcagttcaagcccgaagaaattaatgccatcatgaatgactttaatgaaccgggtacgctcgctcct

SEQ ID NO: 3340 - DNA, 363 bp, Gossypium hirsutum
  Clone ID: LIB3083-074-Q1-L1-A2
gagatatggaacttcagggaacctccaaatatatggaaaacttagaaaaattgtacatacttgtgttgggcacatctttgtttctgacattcgcatcttagtataggtttttgtagttattttatgttttgttttcttttttcctcttaatctgctatttttatttatttatttttgaatatttctcatttggcaggatgttcattattatgcttcattctttgagatgttggaagccgagagtcttgcaaaggtccttcctggagttaaaaccataaatgaaagtgttcaagtttacaggaagttttacacagaagagaaggaaaagacaaatggtgtagctgcaatttgcgttgcaaaaat

SEQ ID NO: 3341 - DNA, 394 bp, Gossypium hirsutum
  unsure (1)..(394): unsure at all n locations; Clone ID: LIB3083-074-Q1-L1-A3
tttgggagtatcgaaaaacgcttcttaagatgatctaaagaaagcttgtggaggggccgctattaagaatcatcccgataaaggcggcgatcctgaaaagtttaaagagttggctcaagcttatgaggtgctgagtgacccggagaagcgtgagatttatgatcagtatggtgaggacgcccttaaagaagggatgggcagcggtggcggtggccatgaccctttcgatatcttccagtcattctttggtggcaatccttttggtgctggtggaagcagccgaggcagaagacaaagaaagggggaggatgtaatccatcccctcaaggtatcattggaagatctctacaatggaacatcgaanaagctttctctttcacgaaacgtaatatgc

SEQ ID NO: 3342 - DNA, 392 bp, Gossypium hirsutum
  Clone ID: LIB3083-074-Q1-L1-A4
caggttttggagcaattaggcctccctgctgctgggcggcggtcaacggctggatatccgaaaggacttcaaaatggatttacgaatacagttgttaaccggtttttattgcccccttctgattgtgaattcacgctcaattcactcttggatgagttgcaaacggatcaatggcccgtacaagcgggacacagggcgtctaggtgcactggagtggccttaagtgttgcagcacgattgcttggggcctgcttgcctggtactggtgctaggattattgctttggttggtgggccatgtactgaaggaccaagcacgattgtatccaaagacttgtcagaacctgtacgttcacataaagatctttttaaagatgctgcaccatattttaa

SEQ ID NO: 3343 - DNA, 376 bp, Gossypium hirsutum
  Clone ID: LIB3083-074-Q1-L1-A5
ttctaacctcgactccgaattcggtttcctctttggttttacggtggttgtttgcggtgggtggacaacgatcatgatcgccgatcctaaatcttgtgacgttctgttggttttcgttttatttgcgattatatcctcttccagcgccttggtttccactccctatcctaaggccatttctgatttaaaagaggcagttgtgaagggattgggattccaagccgatgattttaagatttcagggttcgatctcagagatgcccttgtgggccattctgtggcatatgaattcgacattgaaatcgataacaaagtgattccttttaagctcttggaggatgtaaatacgtgggaatatgttgatttgcctattttt

SEQ ID NO: 3344 - DNA, 306 bp, Gossypium hirsutum
  Clone ID: LIB3083-074-Q1-L1-A6
atacatctaagcaatcgattaaaccagacgggctgttttaaaaatccctttattttccctgtataatacttgtttcttgtttaacgcataaaaatggcggccaaatctgaaggcaaggcaattgggattgatctcgggacgacatacacttgtgttgctgtatgtcagaatgatccagtggtgattattgccaacgaccaatgtaaccgaacgacaccgtcttacgttgctttcaccgacaccgagcgtctcatcggtgatgctgctaaaaaccaagtcgctattaacccacacaacactgttttc

SEQ ID NO: 3345 - DNA, 343 bp, Gossypium hirsutum
  Clone ID: LIB3083-074-Q1-L1-A7
tcgagtttttttttttttttttttttttgggttgggaaaagaagatacttcattccatttttatgattttaagagaacagtaacaacatcgatcaaaaaagagagaacccaaaccaaacagtaatagagaaacttaaaattactaactactaaacccaaaccaaacccataacaatataggcccaagcccactttgaaacctaaacttaagacctccagctgccttcagatgcaccgccgccttttgagtaacgagatccgccgtcaccatatcctccttcacggcgtccaccttcgtacccaccaccaccataccctgcaccatttccgtatccaccttcac

SEQ ID NO: 3346 - DNA, 364 bp, Gossypium hirsutum
  Clone ID: LIB3083-074-Q1-L1-A8
tcgctctcgcgctttcccttaatcaatcatgttgggtaccatgaagattatagattttttcctgatctcgtcacttctcttctcaatctctagggctgaatctattggatcagttttcttcatcgacagtcctactcatcaattccttcgcgctccatcctctaacgatgcctttcagtcagagccaatgttgttacctgaagttggtgcgactgcatcagtcttgcttggttttccaccacccattacactttcagctgctggctcatctaagctgaatgaggttctcatttctaatccatttgatagacctcgtgccgtttttatgcttgaagatagtggagctgatgatcctcttgttgtt

SEQ ID NO: 3347 - DNA, 388 bp, Gossypium hirsutum
  Clone ID: LIB3083-074-Q1-L1-B1
attttatccccattttgaggccattcttgagagggtgtttgaagctatgcaaggaagtgaaggaaatcagattgcagcttttcagggaccaattccttgaggagaggaagaagcttgcaaccacaaaaagaattgacaacaatgctttgaaatgtgccattgatcacattcttgatgctcaacgaaagggagagatcaatgaaaacaatgttctttacattgttgagaatatcaatgttgctgctattgaaacaaccttatggtcaattgaatggggcattgctgagcttgtgaaccatcccgagatccaacaaaaactccgcaacgaaatcgacaccgtactatgacccggcgtgcaggttaccgaacccgacacccataagctttc

SEQ ID NO: 3348 - DNA, 379 bp, Gossypium hirsutum
  unsure (1)..(379): unsure at all n locations; Clone ID: LIB3083-074-Q1-L1-B2
aaaagatggagcaatatggtttatgtttaaaagaggaaagaaaaacaataaagcatcttaaaatctaatttgaatttagcctttcacagagagacgattgatgaggtctggttgcaaaggttcaactcaaactgcatttaggtttagtttctgagctaatgtcaaagcagttgcaacaaaagttttttggcatgttgattaataagacgcatctttttcccttccttttgcttgtctacctcaaatttgttcatgaaacttacttcttttcccccattaatctcaaaacctcatctctaatatcttcccccacccctccattgtctgtttgatgcccataagaaacctgtaacttgttcattntttattttcttactac

SEQ ID NO: 3349 - DNA, 276 bp, Gossypium hirsutum
  Clone ID: LIB3083-074-Q1-L1-B3
aaaaaatatacatacttgattacttatgttgaaaggccgggggaagaaccataaaaaaaacattaattttaactttaaaaattaaaagaaaaaaattccagaattcttcttttttttttttaaaaattcttaggtttaaaacctccgctttattaaatattattattcaaaaccgcgatttcctctgtttatttggtaaatgacaattaacgatcaatcggaggaattggcttttattggttccccaccgatcacccagcccaccgagatatacct

SEQ ID NO: 3350 - DNA, 381 bp, Gossypium hirsutum
  unsure (1)..(381): unsure at all n locations; Clone ID: LIB3083-074-Q1-L1-B4
catcgaagaaaatctcanatgtggagttcgggtgcggatttgaaagagaatttgcataagatcgcgcttgatgtatacgacgatgaggacgaagaacgcgagatctacggttcagggaatggagatcattcgccattctttgatagaaggaactctcataggtttgcccattcaaagcccgtttcagtctctccgatcgctaatggaaccgattcgccgattaattctgagattgaaagatacagagcagaaattaagaagcttcaggaatccgaggcagaaattaaggctttatcattcaattatgctgctttattaaaagaaaaagaggagcaaatttcgaggctgaaccaagagaatggctcattgaaacaaaatttg

SEQ ID NO: 3351 - DNA, 341 bp, Gossypium hirsutum
  Clone ID: LIB3083-074-Q1-L1-B5
tctcgctctgaaaacccgtacggattctcgaatgggcaacaaatctgcttggtacctggaaaaaccaaagaaaatgaaaagaaatgcatgttgattgacgggaaatttttgttcctctaggctcgactttctgcatcatcaaaaggggagaaattagtcaggaaatgggggtatatctcagcaccccaaaaactgagaagttatcagaagatggtgaaaatgacaagcttcgatttggattgtcgtccatgcaaggatggcgtgcatctatggaagatgctcatgcagcatatctggatctggacgactcaacatcattttttggtgtttatgatggtcat

SEQ ID NO: 3352 - DNA, 367 bp, Gossypium hirsutum
  Clone ID: LIB3083-074-Q1-L1-B6
gtttttggaaaattccacggaggcatgaaggaggggctgagagagttgaaattggagtattagcatttgaagttgcaagcttgatgtctaagcttgtgcatctatggcggtgtctaagtgataagcaggttagtaggttgagagaggagattatgacttgtgtggggattaaaaagctggtatctgaagatgaaagttacattggacacttgatatgtgcagaaatgattgaaactgttacacatgtggcgaagtccgtggctaggcttgcaaagaaatgtagtgacccgggtttgaagagttttgaacttgctttcactgagttagtccagattggggctgacccttattgatggatattttcctt

SEQ ID NO: 3353 - DNA, 386 bp, Gossypium hirsutum
  Clone ID: LIB3083-074-Q1-L1-B7
cactaattctggaggagacaccaccgctaggaagggaaatatccatgggatactgaatactgtgacttgtggaattttgattacacttgcaactattattgctaggtacataacaagctgtgaataccagaaccagcttggttttatctacatgtcctcggccaaatatcagcttatgccatatgaattgcttgctggggaactgatctttagcttggaagcgaattctgtgatattacatattcaacccatagatacatggggattgacctttgcctactatgatactgacaaagtttatgtttatttttatggccataaaaggatcacatgcttcgtttctactggaacatttaccactcacaattttggatacaccatacttg

SEQ ID NO: 3354 - DNA, 358 bp, Gossypium hirsutum
  Clone ID: LIB3083-074-Q1-L1-C1
gtgaagagagatgaagaaaaagttgcaagagaagaagctgggaagaagcaagagctggataggattaaccaggagcttgaacttagagccaaggaacaagctattgctggtgatagacaggccaccataatcaaattcttgagcaaattttcacaaactggatcctctaagaagcaatgttttggaagggttaatgaagatgttgtcaaggtaccaagtgaatgttcaaatcctcctattgcttcttcatctcctttagtggcagtagcagaaaaccctaatcccattgtcactgaccaaaacaaagttgatcaagtgtctaccacttctccatcttccatgatcctcgcccatcaaa

SEQ ID NO: 3355 - DNA, 363 bp, Gossypium hirsutum
  Clone ID: LIB3083-074-Q1-L1-C2
ggaaagttgaggatgttgatgaggagaaagagagggaagagaagaaaaagaagaagattaaggaggtgtcgcacgagtggtctttggtgaacaaacagaagcccatctggatgaggaagcctgaggagattaccaaggaggaatatgctgctttctacaagagccttacaaatgactgggaagagcatttggccgtcaagcacttctcagttgaggggcaacttgagttcaaggctgtcctctttgtccccaagagggctccttttgatctctttgacacaaggaagaagcccaacaacattaagctctatgtgagacgtgtctttatcatggacaactgcgaggagttgattcctgaattcc

SEQ ID NO: 3356 - DNA, 343 bp, Gossypium hirsutum
  Clone ID: LIB3083-074-Q1-L1-C3
gaggcacggtcgatacctcacagcatcagccatgtgccgaggcaagatgagcaccaaagaagtggatgaacaaatgatcaatgtccaaaacaagaactcttcctacttcgtcgaatggatcccgaacaacgtgaaatccagtgtctgcgacatcccacctagagggctatcaatggcatcaaccttcgtaggaaactcgacctcgatccaggaaatgttcaggcgagttagtgaacaatttaccgctatgttcaagaagaaagctttcttgcattggtacaccggtgaaagtatggacgagatggagttcaccgaagctgagagcaacatgaacgatctcgtg

SEQ ID NO: 3357 - DNA, 333 bp, Gossypium hirsutum
  Clone ID: LIB3083-074-Q1-L1-C4
aagtctctactttttcttgtcttcaatcaaatcggtgcgggtacattatatctctatatatctctacctctaaacaagcaactaatattactcggaagccaaccaattacaacaaaagcgaacgctttatctccatactgacagaccatgaacactcactcactgaatctccatagacgctcgatctgaagtctaacttgcttcatttgctaactgactaccaccgtttctatgatttggacaattctaaacctaaactaacatgatcctatcttaaacattcatgaccaagccaactcttgtactgttagagacctttatttgacaatatct

SEQ ID NO: 3358 - DNA, 270 bp, Gossypium hirsutum
  Clone ID: LIB3083-074-Q1-L1-C5
ttttattttaagcgatgcgcaccactctggggcgtggatgacacactcacaggggtgttactattaccaatctggatgataagaagataacttttcagttttactatgaaatggatcttgatacgttaattgatgaaagcccttggacgtacaataatcatttactactttttcatccaataaaggaaagaaatgatccgatcagcattaccattggttagggtggactcatttgttcagattcatcatctcccaatggtgtttgtgttt

SEQ ID NO: 3359 - DNA, 376 bp, Gossypium hirsutum
  Clone ID: LIB3083-074-Q1-L1-C6
aggaaatggggaacagcataggaggaagaaacagggcaaaggtaatgaaaatcgatggtgaaaccatcaaattaaagacaccaattcgggtttgggatgttctaaaagattatccaacaggtcatgttttattagattcacaaactgtgaagcattatgggatccgtgctaagccattagagccacaagagagcttgaaacccaagaaaatatacttcttggtggagctgccgaagcttgccgatgatgaagttcataaggcgccgaggagggtgcggtcaggggggattcatatgagtgctaaagataggttagagtgtttgatgttgtcgagaaagacggtgtcggacctttctatggttcgaccgtcgtcgac

SEQ ID NO: 3360 - DNA, 182 bp, Gossypium hirsutum
  Clone ID: LIB3083-074-Q1-L1-C7
ttcacaaccaaagcttcggtgtcccacatgctctggcctataatattagttattttgatttttttttcctttctggtttctggttgctgagttttcggataagttggcgtctatactacagtgagaaatttgtatataatgattacagaattatagggtctaatatacgagtttcttttatc

SEQ ID NO: 3361 - DNA, 285 bp, Gossypium hirsutum
  unsure (1)..(285): unsure at all n locations; Clone ID: LIB3083-074-Q1-L1-C8
aaaaactacaactattcgatcccctcgactaaangaattcaacacaattttacttttaaaacttcagaatcacacatgctctcgtttattatattaactatcttccttttcctctcatatccaacacattaattctgacttccctcatacccatccatatatactacttttataaatttctatcataacaattacacactcctactgtataatatacaattctctcttatcaaaaaaaataaaataaactctaaactttccaccaccacccaatatcaacctata

SEQ ID NO: 3362 - DNA, 388 bp, Gossypium hirsutum
  Clone ID: LIB3083-074-Q1-L1-D1
aataccctttcgcctttatgttggcatgtgctgggtgtgggttgactatgctagctgattgtgtgatctcttatgtgtacgggaaagggaagaattcatgtaacaatggtgatttggagcttcaaggggctgagcagagcaaaacgaatcctcatggtcaaggcgatccgccagttggtaatggcactgatacaaaatgtgcgcagtcttcatctctcacatctgcaagttctttcggggatagtgttctgttgatcattgcattgtgcttccattcagtctttgagggcatagcagttggagttgcaaaaactgaaactgatgcttggaaagccttgtggacaatctccttgcacaagatatttgcggcgatcgcaatggggatagc

SEQ ID NO: 3363 - DNA, 379 bp, Gossypium hirsutum
  unsure (1)..(379): unsure at all n locations; Clone ID: LIB3083-074-Q1-L1-D2
gaacgatcgaaaataccactagtattttgaaataggctcgaatccatggctaaacggttgatctattccagactctcactctctagactctctgcaatgggtggacccaagaatggaagatttctttcaacagagtctaacaagattgatgagccttttaaagttgaagaagcagagaccgngaatgtacctcctcctccttctgagaagctgctcgtgttgggtggaaatggatttgttggctcccatatctgtagggaagctttgaaccgtggtctggctgttgcaagcctcaacaggtctggcggatcatctttacatgactcttgggctaagaatgtgacatggcataaagggaaccttctttcttctgattcgt

SEQ ID NO: 3364 - DNA, 381 bp, Gossypium hirsutum
  Clone ID: LIB3083-074-Q1-L1-D3
gcctcctgtcactgccccgaattacgacattcttggggaggcttcggctactcattccatgccaatttggcagcctcctcctcctcctgatgcttcaacaagagatgagagtgtgattggtagggtcgaagaaccaccagctagtaaggaaggcgttcaatcgaagaaaaggcaggttgggggtgaccctaagactcccaaggccaaaaagcctaggaagcccaaggataataccaattctagtgtgaagccagcaaagaagagtatggatattacaataaacgggtatgacatggatatttccagcatttcgattccagtttgctcgtgcactggaaccgctcagcaatgttatcgatgggggtgtgggggttggcaatc

SEQ ID NO: 3365 - DNA, 371 bp, Gossypium hirsutum
  Clone ID: LIB3083-074-Q1-L1-D4
ctggctttcgaacctctgggttttgggcagaaacaggatgctactgtggatatacctctggattcaatgaatgattctaagaaaagagaaaaggagctcgcagcttgggaagctgatcttaaaagaagggaaaagtatataaagagaagagaagatgctgtttcccaagctggtgtttctgtagatgataaaaattggccaccaattttcccgattatacatcatgatatagctaatgagataccggttcatgctcagaggctgcaatatcttgcatttgcaagttggcttggcataattctttgccttgtttttaatgttattgcagtgattgtctgttggattcacggtggtggtgttaagattttttt

SEQ ID NO: 3366 - DNA, 384 bp, Gossypium hirsutum
  Clone ID: LIB3083-074-Q1-L1-D5
gaattttcttgtcataattttctgaggaaggcatcgatggcaaccaaagtgtatattgtatactattccatgtatggacatgtggaaaaactagcagaggagataaagaaaggggcggcatctgttgaaggtgttgaagcgaaactatggcaggtccctgagactctgtcagatgagattcttggaaagatgagtgcaccaccaaaaagtgatgtaccgatcattacaccacatgaccttcctgaggctgatgggtttatttttggcttcccaacaagatttggcatgatgtctgcccaattcaaagcatttatggatgcaactggtggtctatggagaactcagcaacttgctggaaaacctgctgggatattctatagcact

SEQ ID NO: 3367 - DNA, 378 bp, Gossypium hirsutum
  Clone ID: LIB3083-074-Q1-L1-D6
tatctttatccaaactgccccatggccctggttgggtattgttacgatttcatttgttttggcgttgtagcggctgccttcatcgggtcattatgggtactatggaagaaagaagcagcgtctagatgcgacgaggaaagcgtgtacgagagcctgttagaggctcgaccggatgccgacgggtttatacgtgcaacaccgagggctcatgttggttccaaccagttatggaccagttgttggatcacggtgcaccctggatggctagtgctcactcatttcgtttcattcgcggtcatggcggggttcttggtgtgggatatagtcgaatgggatgcttccatctttgtgtactacaccgagtggacatttgtattg

SEQ ID NO: 3368 - DNA, 374 bp, Gossypium hirsutum
  Clone ID: LIB3083-074-Q1-L1-D7
ctgattctcgtcatggaaggtacttaacaggctgggcgatgtttccaggcaaaatgagcaccaaggaagttgatgaacaaatgatcaatgtccaaaacaagaactcttcgtattttgtggagtggattccgaacaatgttaaatcaagtgtttgcgacatcccaccaaccgggttgacgatgtcatcgacgtttatggggaactcgacgtcgatacaagagatgtttccacgtgtttcggaacagttcacagtgatgtttacgaggaaagcatttttgcattggtatacaggggaagggatggatgaaatggagtttactgaagcttgaagtaatatgaatgatttggtttctgaatatcaacaatatcaaaat

SEQ ID NO: 3369 - DNA, 309 bp, Gossypium hirsutum
  Clone ID: LIB3083-074-Q1-L1-D8
ttaatttcaccctaaagagacaatgagagggctgcgtgcctttgcctttatttacttcttcttttgggataaaacattagctcaaatagctccggccccgccgttaaaggtggacaacatcacttccatcctcgaaaaacgtggccaattcaccactttcatcaatctattgaaagccacacacgttgctgatcaactaaacaaccacctaatcacaccggaccctaacaacgggataacggtttttgcaccgagtgacaacgcgttctccggactcaaacccggtacgttaaactcactttccgacca

SEQ ID NO: 3370 - DNA, 318 bp, Gossypium hirsutum
  Clone ID: LIB3083-074-Q1-L1-E1
aaggcaaaggtccggtaaaattgaaatggtaattataacacaaccatattcttaacacacaataacattctttttataataacacacagtaacatatatatgaaagaaaatggggtctaaaaatcacagaaaattgagaaccccatatgtgcccccctttcaacataaaattataacgtctcagaaaaagagaaccagccatccacctaagaatgccaaaaccagctgagtccaaatgcccgagttcatcatgatcctaggagatgatgaacccgaaaacgaaggctttgatgaagaaccaagttcttcggattttgc

SEQ ID NO: 3371 - DNA, 234 bp, Gossypium hirsutum
  unsure (1)..(234): unsure at all n locations; Clone ID: LIB3083-074-Q1-L1-E10
gngatgaagaagaagaatacgaggccaaagaagttgaagtagaggaagtgttggatgtgtcggaagaggtcctttcatttgaagagtgagaacctgtagtagaggagcttgattcttcattatgatgttgttgttacctttactttttgattttgttaccgtaagaattttgggtcatgacattgccaagtttagttgattatgatttatttgaaaactgagttaatttagatc

SEQ ID NO: 3372 - DNA, 380 bp, Gossypium hirsutum
  Clone ID: LIB3083-074-Q1-L1-E4
atattgttgggttattgaagctagctagctccacgttttggatggcttcaaagcttcttttgattgctgtctttgttcttgatctcattgcttttggtttagctgtggcagctgagcaaagaagaagcactgccaagattgtccaagacagtgaagttaattataactattgtgtctatgactcagacatatcaacaggctatggtgttggtgcatttttgttccttatggttagccaagcccttgtaatggctgcaagcaaatgcttctgctgtggaaagggtttaaaccccagtggttcaagggcctgtgcagtcatccttttcatagtctgctggttgtttttcctgattgctgagatatgcttgctggccggatcg

SEQ ID NO: 3373 - DNA, 378 bp, Gossypium hirsutum
  Clone ID: LIB3083-074-Q1-L1-E5
caaggaccttttcaagttatatgatcctggcgggggtgagcacttcaatatctttgcagcaggactaaagactgcagacagagtggtcacagttagccatggatatgcttgggagattagaactttggaaggtggttggggtttgcatgggatcataaatgaatgtgactggaaattgcaaggtatagtgaacggaatcgatatggaggactggaatccacaacatgatgttcacctcaaatcagatggttatactaactactccatcgaaacactgcagcctggcaaggctcaatgcaaggcagccttgcagaaggagctcgggctacctgttcgtgaagatgtcccactgattggttttattgggagactggatca

SEQ ID NO: 3374 - DNA, 376 bp, Gossypium hirsutum
  Clone ID: LIB3083-074-Q1-L1-E6
atttatcattgtttgtgacatcccacccggcggtgttacaatgtcatcaacattcatggggaattcgacgtcgattcaagagatgttccggcgtgtttcggaacaattcaccgttatgttccgtaggaaggcgtttttgcactggtatacaggggaaggaatggatgaaatggagtttacagaagcggaaagtaacatgaatgatctggtttcggagtatcagcaatatcaagatgctgttgcagatgacaatgatgaagattatgaagatgaggcaatggaaaattaatgtgatttttttaaaaaaattcaacttcaaaaaaaaaaaaaagccaatggtgtttttggggactacttggtgatttgtcatttgatg

SEQ ID NO: 3375 - DNA, 349 bp, Gossypium hirsutum
  Clone ID: LIB3083-074-Q1-L1-E7
aacaccatctaattttttttatctttttttcattccttgatcgttttttttcaaacaaatattcccttccatttccacttaattacctaaaaaacaaaatttcttaaaaaccatttaacttcacatcctctatcccctttttaaacatccaaattcttcctgctaacttaacttcttctaacatcgcatctatcctccttcccaaattctccgtaatataacttttcaatcaaaaaacaattctttcaacatctttttaaactaaactttaacctttaataacttacctcattctttattttatcatcccgaactctcttaattccttataaataaaactaatacaccc

SEQ ID NO: 3376 - DNA, 379 bp, Gossypium hirsutum
  Clone ID: LIB3083-074-Q1-L1-E8
ttaaaaaacaaattccgttttttcgttaatgtccttccaacgctgatccgatcacagttgccgacatgtcttgttcttcatcatcgggctcggaggaagatgacgagggaatcgactcttacaggaaaggaggatatcatgccgtccggatcggcgatccattcgcctctggtcgttacatcgctcaaaggaagctgggttggggtcagttctccactgtttggctcgcttatgatacccaatcctctaaatatgttgctctaaagatccagaaaagcgcacaacaatttgcacaagctgcacttcatgaaattgatgtcctttcatctattgctgacggagacccctcaaactcgaaatgtgtggtgcgcctgattga

SEQ ID NO: 3377 - DNA, 278 bp, Gossypium hirsutum
  Clone ID: LIB3083-074-Q1-L1-F1
gccatgttccgtaggaaagctttcttgcattggtgtactggagaagggatggatgagatggagttcacagaagcggagagtaacatgaatgacttggtttctgagtaccaacaataccaggatgcaactgcagatgatgaagagtacgaggaagaggaggaatacgaggcagaggcttaaaatctaatggaataatttggatgtttttcgttgtgttttggattgggcttgtggagtgtgttgatgcaatttctcactgcctgtttttgtcttttgat

SEQ ID NO: 3378 - DNA, 433 bp, Gossypium hirsutum
  unsure (1)..(433): unsure at all n locations; Clone ID: LIB3083-074-Q1-L1-F10
gacaaatctaagatntctacgtcttgcagaaatctanggtttttgtatctcataaattgaccacgtggatactcaacccccacactgagtgctcctctcttttcagctntgcttcaaaattcgatcacatttcccctaaattccgtcttttttcttcaaattccccacaaatggccatcactttctcagatctccacacggaatctggccttaaatcccttaatgacttcctcaccggcaaatcttacatctctggggataagctgactaaggatgacataaaagtttatgctgctgttttgaaaaatcctggtggttcatttcccaatgtgagccaatggtataattgtgtgtcttcccatctcgcttctagcttccctgggaaagctgttggcgtntcacttggtggcaaagctgatccagctcaatctgc

SEQ ID NO: 3379 - DNA, 307 bp, Gossypium hirsutum
  Clone ID: LIB3083-074-Q1-L1-F2
gcaaaccgcatgtcattgcctccacaactgtcgcgacctgcaacggtggacaataatctcggctggaccaccgttgcaggttgcgaatgttggcaaaccgcaagtcattgcctccacaactgtcaatccaaaggcttcatacaatgcaggctgtgcaaaggcacctttcgtgtcggaaatgtatctgaggaccccaccgagattattgtgcatgggaaatttgattgcaccattgatccttaccatggtgatcaagcactttgacattcttggtcgattggtttgaaaaatttaagatagatccatc

SEQ ID NO: 3380 - DNA, 309 bp, Gossypium hirsutum
  Clone ID: LIB3083-074-Q1-L1-F3
catcatctcaatatcctgatgtcaaccatgcaactgttatgactccatctggagaaaagccggttcgcgagcttgttaaggatgatgcatggttgaatggagaattcataaccactgtccaacaacgtggtgctgcaatcatcaaagctaggaaactctcaagtgcactatctgctgctagtgctgcttgtgatcacattcgtgattgggtccttggaactcccgaaggtacatgggtttccatgggggtttactctgatggttcatacaatgcaccagctggggtcatctattctttccctgtaactt

SEQ ID NO: 3381 - DNA, 366 bp, Gossypium hirsutum
  Clone ID: LIB3083-074-Q1-L1-F4
agaatcatgagtttattactggaatgctcctcaataagtttagactgttaagagtatgccttacatgaaaacctaaataaagccgcatatgtttaaggccttaatagagtttacataaaactaaccgtagctgatgtagccagtgcaatggctacagcctgttctcttaattttagctcattctccacctctttcctttgtaactcactctgccgcaacagacctacaagttccttaagttgttctttcatttccctgatttctatgcctttttcccataactggtaccttgagtctccgagagaattgaacatatattgaagcaagttctttgcatctaccatggagcgcaactgattccaacgt

SEQ ID NO: 3382 - DNA, 355 bp, Gossypium hirsutum
  Clone ID: LIB3083-074-Q1-L1-F5
ctttcttataacatgatggcagcactgttgtgctgtcttggatttatggattatggaataatttctcttcgttttctctatcgtttcatagacaacaatggcctccctcgaaactggctatttgttgggatgattcccacgttacttctcaacatccgtcgccctcatgataaagttgcccaaatcctcagacgaagcaatggtaccttcttttatagaggactttggtttactaacaccagcttcttaaccacctccgatcctgagaatgtgcgtcatgtattgagctccacttctgtttatttgaaaagtcctgaatggctgaaacaagttgatatcttcggcgaagcacttt

SEQ ID NO: 3383 - DNA, 364 bp, Gossypium hirsutum
  Clone ID: LIB3083-074-Q1-L1-F6
ctcacttcaagctctttccatgggtttcgtccatataaacaacaacaatgtggagatcaatcataattttcactctcttcgcctttcttttcttccctatttcagcgacgacgataacactctacaacaaatgctcacatccactttggccagggattcaacccagcgcctgcaagccaattttagcccgcggtggattcaaactcccaccaaacaaagcctactccatgaatctacctccgttatggtccggtcggttctggggtcgacacagttgttcctttgacgcctcgggtcacggccgttgcccgacaggtgactgcagcggttccttattctgcaacaggctcggcggaaccccacc

SEQ ID NO: 3384 - DNA, 316 bp, Gossypium hirsutum
  Clone ID: LIB3083-074-Q1-L1-F7
ataactaaattgaattctgttttactaaagccttatatatataaactatttaaataaaatacatatacatttttatcaaagttggaatcccatacccaatcaggaaatcaacattccacattcaatcaatggagttcctggcataataaaagccttgataaacttgtttattgaaaataccatgaactggaaatatcacccaaagttgccaaaacccaaaaaaaaaaaaaaacatttaaatctaaaacaacatcatagtcgtaaaggtgtagtcgtccctgaccttctatcagtactcatctccctcatcctcctc

SEQ ID NO: 3385 - DNA, 364 bp, Gossypium hirsutum
  Clone ID: LIB3083-074-Q1-L1-F8
ctcaattgaaatcaaagttgacaaggttggggttgcgagattcaatgatcaaccagaaagcttattcctttctgttaatgataaatcgaatgataagaattctgagagaatgttagctcatctggggatgagcaaattgagtgatcctgataatgcaagtcaatgcagctcaatttaccatcacgagagaggttttagttctcattcatgagaagaagggagctctggaacggttcgaaaacagtcttcattgtcatatggaggactagtgacggcctctcccttagttggtctgccagaaatttcacatcttgggtggggtcactggtttactcttaaggatctcgatctcgccacaagtcac

SEQ ID NO: 3386 - DNA, 246 bp, Gossypium hirsutum
  Clone ID: LIB3083-074-Q1-L1-G1
ttacgatctaaccccgcgtatcggcccgaacctagacaggcacttagggtttgcattgctggagttcttgcaagagcgacaactatacccagatgaacagatcttgaaagcaaagatcgagcttttgaacaagacaaatatggtcgattacgctatggatatccataagagcctttaccacaccgatgatgtccctcaggacatggtcgagaggagagtcgaggttgtcgctcgtctcaaaacttt

SEQ ID NO: 3387 - DNA, 315 bp, Gossypium hirsutum
  unsure (1)..(315): unsure at all n locations; Clone ID: LIB3083-074-Q1-L1-G10
aaaagagaaaacgggtggaaacataaaagattttcagtggctgcaccttcgaaaaagaaagttggtcctttctcttgcattcttacaaagaagcaaaatgcagaagccgccgccacaatcagtagactttgccctaaagcagacctcacccaacatcggggccggcagtcacccgtgataagctttcgtgcacctatgaccttgtggagcanatgcaatacctgtacgttctagttgtgaaggctaaggatttacctggaaaagatgtcactggtagctgtgatccttatgtggaggttaaacttgngaactaca

SEQ ID NO: 3388 - DNA, 363 bp, Gossypium hirsutum
  Clone ID: LIB3083-074-Q1-L1-G2
agttaaaagcagtggatcatatggaagggttacaaattcacaattctgaaagggtaacatgggttgtgtttgaatcctaacaagttttctgtggcctgattatctgtaaaagcactcaggtcttggtgattttttttttttttgcaacaaatacagctttcacaccttttggttcatctacaatacaaagaacatttgttttttcccccacatcaatgggggtttataacaaatgccattctcaagattgcagtttacaagaaaatcattcgcggttgtatttctttcagacgaatcatcaacacaattttctttgtgctcatagtcagaagatacctgctgcatactgatggttctggaaaa

SEQ ID NO: 3389 - DNA, 252 bp, Gossypium hirsutum
  Clone ID: LIB3083-074-Q1-L1-G3
tgctaaccgtatttaacgaaccggtccggttccgggtaactgtgcgcactttaacactccctgctcaagataagcgctcccttcctcttcctcgccggttatctgtttttttcttttgtgtatcgtgaatcgttcgatatttgcgaatggctgagctgactcgggccgaggtgtatacgcctcggtcgatgcaagtatggagggcgcttttgaattggcttgcttttttctttcagatcttcgctcaaatca

SEQ ID NO: 3390 - DNA, 201 bp, Gossypium hirsutum
  unsure (1)..(201): unsure at all n locations; Clone ID: LIB3083-074-Q1-L1-G4
ggcgcgtgagcaagacaggttcttgccgatcgcggacgtgggcaggatcatgaaaaaggcgttgccggcaaacgctaagatctccaaagacgctaaagaaacggtccaagaatgcgtctccgagttcatcagtttcatcacgggagaagcttncgacaagtgtcagcgccgaaaggcggagaacatttacggtgatgatct

SEQ ID NO: 3391 - DNA, 218 bp, Gossypium hirsutum
  Clone ID: LIB3083-074-Q1-L1-G5
caccaaactccttttttattctacttatacctttcgtggctgttttgaatttttcctaccctaaaataaaacaatgcctttatatacacatcttgcaagcccatatcctacttctaaacacatccttgtagctttactgcctatagcattgaatacaaccctttactccaatgccaattgacataactgcatgtggaagataagaagctacttacacc

SEQ ID NO: 3392 - DNA, 294 bp, Gossypium hirsutum
  Clone ID: LIB3083-074-Q1-L1-G6
ctgaaataaaacccaatggcccaaccaatgccatgctttatagaaaatgagattagggtgcttagaacccaaagaaggagattacaagttagagttagacattaattttgggtttccttttgttagtacttgcttttaaagtaaatttccttttgaggtaaaacctggaggatatgggtgggggaaaaaggttgtacaggatctcctctagttagcagctagcaaatgtagcacgaaatatgatgctactatatacagccttttctttttatttatttcttgattgttggcttc

SEQ ID NO: 3393 - DNA, 257 bp, Gossypium hirsutum
  Clone ID: LIB3083-074-Q1-L1-G7
ccgcagatgaggcattagccgacccttactggaggggcttgtctaaaatcgagagggaaccttcttgtcaaccaatatcaaaattagagttcgagtttgagagacgacgggtgacaaaagaggacgtaagggaattaatttacagggaggcactagaatatcatcctcagctgctcaaagactacctgaacggacatgaaggatccaatttcctttatcctagtcctgtcggtcaattcaaaaagcagtttgcatat

SEQ ID NO: 3394 - DNA, 376 bp, Gossypium hirsutum
  Clone ID: LIB3083-074-Q1-L1-G8
acggtttagtcgattctaggactaacatagcacgcgtgagtctatctatacatgccatgttatatatgacgatagtgtgataacttctgacatttgaaaatgtgttttcatatagcgaaagcatcttgatagagctatagctgatgatatcgagagtgtagcgcctactcccgcgcaagggacaatgccggttgattcttaccaacttcgagtaatcaagagagtgaggctaaataagccttttaccaaatgatgaatgactggttgactcaatatatgcagactaatccggctgctgaacaacctctacccctaattaatccatcttcgattcctgttatgcctcaaataagtgatccgttgagattgtgtaagc

SEQ ID NO: 3395 - DNA, 380 bp, Gossypium hirsutum
  Clone ID: LIB3083-074-Q1-L1-H2
gcggaatctgaaggcaacttgaagggaattcttggttatgtggacgaagatttagtctcaactgacttcatcggagacaacaggtcaagcatttttgatgccaaggctggaattgctttgaatgacaactttgttaagcttgtgacttggtatgacaacgaatggggttacagttcccgtgttatcgacttgatccgacacatgtctaacgcttaagtgagtgagtgattgtgctttgcgtatccaagctttagcaattttaatttagaagagatgttatgagagaataaacgaattgtacggagcatatttttgtgtgaagaagggttgtttcagttttattacccaagtacttgaatgtttcaagtttcattgcagtt

SEQ ID NO: 3396 - DNA, 383 bp, Gossypium hirsutum
  Clone ID: LIB3083-074-Q1-L1-H3
cagacacggaaaacagatctgagagtcatatggccgcctcttctgtgttaaatcctgttcatgaaaatttgcctgtgaaagaactacaaacaaaaactgtggaagaaactgcttcccatgaggcctgcagtttagcagattcaaagcaagaaaatattgaagcttcagatgctatgacagtttcaaactctagtactgtggaacatgctctagtttcgtctaatgctggtgttggaacttctctggaggttacaacaggacacagtttccatactgatactgaatccgataggtttcatgtcctgaattctgttgatcttactaatgagaggatgcatgcatctgagccaaaagaggcaatgtctgatgtggctgttatgaat

SEQ ID NO: 3397 - DNA, 321 bp, Gossypium hirsutum
  Clone ID: LIB3083-074-Q1-L1-H4
caaatttttaatttatatcttatagtcatatggcgtgctgttgtgtgttaaataccctcatcaaaacacaaatgtgaaagaactacaaacattacctgagtatgaaactgtttgctatttttcctgcgcaaaagcagattcaaagcaatgagaatatttgaccttcttgtgctattacagtttaaaactctaatactgtaaaacatgctctataattttctaatgcatttgtttgaacttatctgaatgtttcaacagtacacatttggcatactaatactgaatcctataggtttaatgtactaaaaacaaaaaatctta

SEQ ID NO: 3398 - DNA, 256 bp, Gossypium hirsutum
  Clone ID: LIB3083-074-Q1-L1-H5
acaatttccgatttgctgctgcagaaagcggggccgtttgccttatagcccgactcgaaatctacgaaactcaataaccaatcttcaaaacagattctaagaaccgagcttaaatcagacacattgctgacaaatttgatgacagaaaagctatattctacagaacttgaagtcgaacaaatgccacccgatgtggaacacactgtaagatgtaatgatatccttcgatgccaattacagaatgcaacggacaaca

SEQ ID NO: 3399 - DNA, 347 bp, Gossypium hirsutum
  Clone ID: LIB3083-074-Q1-L1-H6
agaagctgctgttctctctctctttcccatgagtgggccccgtttttaatccatccctcaccaaaatattgggttggaaggaggaattcagggacattcccagaaaagtaaaaaccttccgggcggccctttgaacgatgacatgcttattctctatggactgtacaagcaagccactgttggaccaatgaataccggccgtgctggaatgttcaacatgagggaaaagtgcacatgggatgcatgtaaagctgttgaaaggaaatcaaaagaggaagcaatgggggattatatcaccaaagtaaaacaactgtttgaggctgctggaagatcttgatgtgtgtgtg

SEQ ID NO: 3400 - DNA, 277 bp, Gossypium hirsutum
  Clone ID: LIB3083-074-Q1-L1-H7
ccaaagtctgcgatgaggtttgccagctaggatcatcactccttgagggagttttagttggaattgtgttgcttttaatcttaatatcaggcctttgctgcatgatgggcattgatactccaacaagattcgaggcaccccaagaaaattgatctgtctttttggtacaacctaacatctttatgttgtaataaggctactgtccttatggtatctacaaaatggttctttgaaactgcacaagatcatccatgacgtgaaacaagcaccacaagct

SEQ ID NO: 3401 - DNA, 261 bp, Gossypium hirsutum
  Clone ID: LIB3083-076-Q1-L1-A1
acagtacattcatgattgtcattcaatgacaaaacttggtacaatccatacataaactacacaaaaattttcactctagttttattctttcatgtgcatctccattttgcttgttcatacaacatccaaacaaaagacttcataagagcaagaatttacatgtataatctagacaaccacgcatcaaagaaggaacgggaacactttttttttcggagagggggttcagcagttgatgccacattgtgtggtgtctggacc

SEQ ID NO: 3402 - DNA, 227 bp, Gossypium hirsutum
  Clone ID: LIB3083-076-Q1-L1-A10
attgatatatatatagatatatgtgatcaaagggggttaaagtggaggagatttcaatagaggaaagatcatggtgattttaatgtttttttggggtttggtttttagagtattttcaatgattattagtagtaggggaattgtgcttattggggtttaatttgtataacctatccaatgcaaagcaaaatattattaatgtattttgaggttttagtttttttttt

SEQ ID NO: 3403 - DNA, 270 bp, Gossypium hirsutum
  Clone ID: LIB3083-076-Q1-L1-A11
ggcaagttggtcccggcgttggagaaggtggcatgttagaaagacatgacttcgccgccgccaatttgcattctaaaggaacgctagatttgaaaaatggacagagtagcactaattctggaggagacaccaccgttaagaagaaaaatatccatgggatactgaatactgtgagttggggaattttgtttccacttggagctatgattgctaggtacataagaagctttgagtcagcagatccagcttggttttatcttcatgttttct

SEQ ID NO: 3404 - DNA, 273 bp, Gossypium hirsutum
  Clone ID: LIB3083-076-Q1-L1-A12
ccagcagaagaatatacagaggggtagaagatgagttcgggggaacctagtttcgaagaattgttggaggagaagaagcgtgtcaggaaccctcttgtccctgtcggtgcacttattaccgctggagtgctcactgcggggttgatcagttttagacaaggaaattctcagttgggtcagatgctgatgcgagctaaggtggtagttcagggagctacagttgctcttatggttggcactgcatactactatggggataatccctggaaatca

SEQ ID NO: 3405 - DNA, 249 bp, Gossypium hirsutum
  Clone ID: LIB3083-076-Q1-L1-A2
tcgagtttttttttttttggttttcttcaataacatctcaacttaaataacggaacattcatattatgtctggaacataaaataggtaacttataaagtactgaatgaaaaaacaaaagtgtccaccgccatggtttatgcgaactcctaccaattcctcaacgattggccttggcaactctctcaatttcgtccttcttcttgatggcatagctgttagatgatccctttgctgcgttaataagctca

SEQ ID NO: 3406 - DNA, 274 bp, Gossypium hirsutum
  Clone ID: LIB3083-076-Q1-L1-A3
ttcactagcggcaatgcagatggaaggctggcagtatcagaggatgatggaagaacaatctgagtatgaccaggaagctttgcagcttcttaatgagcttatggtcaagagggagaaagagaaggtggagctcgagaaagagcttgagatatatcgcaggagggtgcaggactatgagaccagagagaaaatgataatgctgagaagaaggaaagatgatggcactaggagtgctacttccggtacttgcagcaatgctgaggacagtgacagt

SEQ ID NO: 3407 - DNA, 252 bp, Gossypium hirsutum
  Clone ID: LIB3083-076-Q1-L1-A4
cgacaatggtgacaatccgtttgtttgtcctaaacatcctccttttcctctccagctccgcggctacaccaaagagcggtgcatatcacgacctggtccgttcatcatgtgtccacgccagctatccaagcctctgttttcgcaccctttcttcctactccggcccagccaacaccctacgtgagttagcccaagccgccgtaaaagtcagcctgtcccgtgcccgtaaagtgtcgaactacttgtcgacga

SEQ ID NO: 3408 - DNA, 248 bp, Gossypium hirsutum
  Clone ID: LIB3083-076-Q1-L1-A5
gcgggaacacaacatgcagggtggtgatttaaggggaggacgggctaccaaccatacatagaccacacagaaatgcagactctaaatgaactcatggatgagcgggagaatgaggatggggcattcaacatacagacagagaactttagaagggcgggacttgacatggataaccgagacaaccagacattgctgaaagaacggaaacacgatggttctaggagagcgggttcagcaactggcgccac

SEQ ID NO: 3409 - DNA, 251 bp, Gossypium hirsutum
  Clone ID: LIB3083-076-Q1-L1-A6
gattccaatataaaggatccatagagttaaattgaatgttattgaaacaaatggatgtttcgggtaaaagcttacattccactaatgtgtaaagtaatagatgttcctccaaataacaaatatatatacacacaatttcaaaacaaaaagctgattctcagatgttacctacatgctaactagttggtttcctcccaaaaattaaacccacaactcaaacaagcattaggttttgtgtgtgtgtgcgtgtg

SEQ ID NO: 3410 - DNA, 269 bp, Gossypium hirsutum
  Clone ID: LIB3083-076-Q1-L1-A7
cgtgcgaggaaaatttgctcaggccttgttgaagatactagaggtgtacttcaattatcatcatgatgcatacagcacaaaaggtgtgtaccttcatgatccaacagccatgcttgcagccattaatccttcacttatcacctacgtggagggtgctgtcagagttcaaacaaatggcatcacacggggactaacactattatacaacaagcagaagaggtttgctgaaattacgaagtggtccgatcaaccatcggtgaaggtggcgg

SEQ ID NO: 3411 - DNA, 235 bp, Gossypium hirsutum
  Clone ID: LIB3083-076-Q1-L1-A8
gttgccactgtgaaacccagaagagggaagttgcttgaggctgcatgccgaatgcttgtggctattggacaagattcacgtttcacctcttgccgactatgaacacaacaattacttcccccatatcataaacaaatcttcaaacaacaaaaaaaggtgaaccagcatagtataaagtcctggaatgatgttttgctctctgcattaggattttagttgtctttatttcttcttt

SEQ ID NO: 3412 - DNA, 250 bp, Gossypium hirsutum
  Clone ID: LIB3083-076-Q1-L1-A9
cttggtttggccactttggtggggaaaaggaaaaaagaggcagaaatttatagaagttgattcaaacagaaagggtgatggaactgagcattcagaaaatagaagccttgattaggctaagtacgatagtgatgttggttttaacagcttgtttaattgggttggattctcaaacaaaggtcatcttctacgttcaaaagaaagcttctttcaaggatttgcgtgctcttgttggattgctgtatatcac

SEQ ID NO: 3413 - DNA, 261 bp, Gossypium hirsutum
  Clone ID: LIB3083-076-Q1-L1-B1
atttcatcaaaaaaaatggcatcatgagagaaatcctccacgttcaagccggtcagtgtggaaaccaaatcggaggcaaattctgggaagttgttagcgacgaacatggaattgatcccaaagggaactacgtcggtacttctcgtgttcagcttgagagggttaatgtttactacaacgaagctagtggtggtcgttacgtacccagagctgttttaatggaccttgaaccaggaaccatggatagcttgcgtactggtc

SEQ ID NO: 3414 - DNA, 282 bp, Gossypium hirsutum
  Clone ID: LIB3083-076-Q1-L1-B10
ttctactagcaaattctatacttcaaagtcggcgatcttagggagaaaacgtaacacaaattgctatcaattgaggatcaaaatgagagagatgcttcatgtgtcaagggggacaatgagggaaccaaatcagtttcaagattagggagattgttcctatgagcgcttaatatatccaacctatacgaaccaaagctccttatatctagatgttggaggcggttaaagtttactttaacgaggcttcatgtggtcgctttgttcctcgtgctgtgctcatgg

SEQ ID NO: 3415 - DNA, 274 bp, Gossypium hirsutum
  Clone ID: LIB3083-076-Q1-L1-B11
cacagattgttttgaaaaacagcatctttcttgtgaattctgcaacctttggagtaacttaagaagaaatgggggaaaagagtttaattgccaaggatgtcaccgaattgatcggtaacacgccactggtatatctcaacaatgttgtagatggatgtgtggctaaaattgctgccaagttggaggcaatggaaccctgctccagtgtcaaggacaggattggatatagtatgattgcagatgcagaggagaagggtctcattgtaccaggcga

SEQ ID NO: 3416 - DNA, 273 bp, Gossypium hirsutum
  Clone ID: LIB3083-076-Q1-L1-B12
ctcggattgggacctctgcgggtcacattgtgttggcaatatttgctgtggccatgtttgttgtgtccgggaccatggcacaggatattgctccttctcctgcaatggctaccggagcaggctctgctttgccggtttccgctgtcttcttatgctcttccatgttggtctctttaattgctctcttggtgcattgaattcaaagcttttcaagactatatgacattggctacccttaatttcattctcactggtgatgaggggagtagccta

SEQ ID NO: 3417 - DNA, 254 bp, Gossypium hirsutum
  Clone ID: LIB3083-076-Q1-L1-B2
gtgtaattttacactgaaggacggttcctttgatttcgagagtagatcttcgctcgcttctctctttcgtcgaactccgcgtaataatcgctcatatttctcgcagacgtgaagaatggggctgtctttcacaaagctgttcagccggctttttgccaagaaggagatgcgtatattgatggttggacttgatgctgctggtaaaaccaccattctttacaagctcaagttgggagagattgtcaccacaattc

SEQ ID NO: 3418 - DNA, 272 bp, Gossypium hirsutum
  Clone ID: LIB3083-076-Q1-L1-B3
tttactagtctacccccccctcctttgacggaagcttatctatatgtatatattaggatgcgcaattgcataggtaacccaaaaatctccacatgctttccaataacacctaagcttaccttaaagcaaatatggtggtgaagagcatcaaagagaaatccagttcctttttcctatatttctgctcaaaagggttcaaaaaaccagcctctacacaacaaggaaccaagggaaatgctgtgtcatcagagcagaaaccgcccggaggatgg

SEQ ID NO: 3419 - DNA, 238 bp, Gossypium hirsutum
  Clone ID: LIB3083-076-Q1-L1-B4
ctgtctctcgttctttttgctgttcaatcatgtcttgcttcattagcaaatatgctgatgagttggctaaaaacgctgcttacattggaacccctggaaagggtatccttgctgctgatgaatccactggcaccatcggcaagcgtctttcaagtattaatgtagagaatgttgaagacaacaggcgtgctctccgtgagctcctattcacaactcctggagctcttcagcacctcag

SEQ ID NO: 3420 - DNA, 268 bp, Gossypium hirsutum
  Clone ID: LIB3083-076-Q1-L1-B5
acgagcgagcaccaaaaaacatcgcaggaagcgagacatcctatacgtctaagccaacatgggaggaaactacatttgttgcaaattgtgctatgtatttatctgccaacatggaataaggctctaaactaactacctatgcactaatcaagtttagcttgttaaggttgatgtttagtaccatggagcttggcttatccgtccctgccactactaaaccctatcgatcatttaccatgatcaagcctgcgccaattttccatccttt

SEQ ID NO: 3421 - DNA, 231 bp, Gossypium hirsutum
  Clone ID: LIB3083-076-Q1-L1-B6
ctcattctgaacaagcttcgtgctggaatcaaggtgtgtgccattaaggccccaggttttggggaaaataggaaagctggcttgcaggaccttgctgctcttactgggggccaggtaataactgaagaacttggtcttgacattgagaaagttggagcagaagtgcttggctcttgcaaaaaggttacagtatcaaaggatgacacaattatccttgatggcgctggagac

SEQ ID NO: 3422 - DNA, 257 bp, Gossypium hirsutum
  Clone ID: LIB3083-076-Q1-L1-B7
ttagcgaggcatactggactggggagacactagtttcgaccccgtttcctaacaagtcatttcctaactcccaaccgagaatggtatacttcttgacaacagtgtattgcgtaaaagatttggcattggtgtagctcacaagcgcttaccgctgaactcatcaggggctatagttcgaccagcgagtgcatttaatccaaaactaaccttagcttctgctttttgaaagaatgaattaaggtcatcccatctattca

SEQ ID NO: 3423 - DNA, 261 bp, Gossypium hirsutum
  Clone ID: LIB3083-076-Q1-L1-B8
tgtacgagctgaaggaaggagagggatgtgcagcttctgctcatgcatgtactgagtcttgtatgcttgagtttgacctaagatgtgcatatgctgctatcaaacaggctaattgggatgcttctaaagttagggaaaaactgcaacgcgatattgatgctcacttattatctgttcgtgatgcgaaattgtcagaattggttgccagatatgaggaaaaacttagacagttattatgtgaaccagtggagtctctttttg

SEQ ID NO: 3424 - DNA, 238 bp, Gossypium hirsutum
  Clone ID: LIB3083-076-Q1-L1-B9
ttactagcaaatactttgctgcaaagtcgcccaaatttttcagaaaatctaacacaagttgttatcaattagggaaaaaaatgagagagatccttcatgttcaaggtggacaatgtgggaaccaaatcggctccaagttttgggaggttgtttgcgatgagcacggcatatatccaactggaaggtacattggttcctcggatctgcagttggagcgtgttaattgttactataacga

SEQ ID NO: 3425 - DNA, 267 bp, Gossypium hirsutum
  Clone ID: LIB3083-076-Q1-L1-C1
tagcggcacgaggcttatggggcagcacctcctctatcacaattaccctacctgggtgctagaccaattgttccagaagctcctgcaccaccaaataacatcctgtttgttcagaatcttcctcatgatgcaaccacaatgatgctacaaatgcttttcaatcaataccccggtttaaaggatgtcagaacagtggaaacaaaaccaggtatagcctttgtcgagtatgaaaatgagatgcaatcaaccgtcgctatgcaggcactg

SEQ ID NO: 3426 - DNA, 249 bp, Gossypium hirsutum
  unsure (1)..(249): unsure at all n locations; Clone ID: LIB3083-076-Q1-L1-C11
ggggggggaaaaggggatcccccctcttcaaaaaatcattaccagtagtccccactnttatgattttttttttaagaaaaaccaccccaaaaaaacatttaccacaatccacaaactcatctcaaccataagcttattaaatgaaacgattggctcctttcatgaataaacataaaatgttattctcatatgccatttcaagatgcaagcatccaaatgacacccccctatcggataaattaaaacaaa

SEQ ID NO: 3427 - DNA, 274 bp, Gossypium hirsutum
  Clone ID: LIB3083-076-Q1-L1-C12
ataaaatccaaacatttcgaaaatgcaaaagcaaaaatggggttatcagtccaaacagtggcaccatctttagccttaatcagtcatcaaacaagcatcaaattcctcatatctcgggaatcaacaatcttcattttcttattccaaaaagatggacccaatatacaagtagttgttttgttctcagattcccctttcgctcttagaatttctccccagacttcttttccgctttgccctcgtttttctcggtctcaccctcctcttccttctt

SEQ ID NO: 3428 - DNA, 223 bp, Gossypium hirsutum
  Clone ID: LIB3083-076-Q1-L1-C2
gatcggttcaaaaccttcgttatcgccgaccgacggccctgatttctcggctctcccttttgacatcttgacgaaaatcgcggcgtcgtttaattttccgaaccttctagcggcttcgctggtttgccggtcatggagggacgcgctccggccgttgagggaagcgatgatgctgctgcgttacgggaagcgattcaagcatggccgttgcggtgttcggcgt

SEQ ID NO: 3429 - DNA, 262 bp, Gossypium hirsutum
  Clone ID: LIB3083-076-Q1-L1-C3
ggagattcttggttgaaagaacatgaacagaacaaggagtattattctgctgtcttctttagagagagctgggctaagctccctgttcattaaagccgagaagggttaattatgttatcaggcggccgggccaatgctcgcgatcttgcaagaaaaggctaacgacttttaatgaacctgctgaagaaactgcaaaaaagcaccctgggtccgttatcccaagaagagatttgagggagaagacatgccaactaatagtgca

SEQ ID NO: 3430 - DNA, 275 bp, Gossypium hirsutum
  Clone ID: LIB3083-076-Q1-L1-C4
ttgttgatggtaatatcattactgctgctacttatattggtcatcccgagtttatcaggctgtttgtgaaagcattagggggcaccatatccaaatcgaacaaaaggatcctatttctttgtggggattatatggaagattatgaagtaactgtgcctttccaatcacttcaagctctaggctgccatgtagatgcagtttgtcctaagaagaaggctggcgatttgtgtccaactgctgtccatgatttcgaaggtgaccaaacttacagcgag

SEQ ID NO: 3431 - DNA, 247 bp, Gossypium hirsutum
  Clone ID: LIB3083-076-Q1-L1-C5
ctagcgagattttttttttggggacggaacagagaaataacattatccaatcatgggtgctacatacagttgctctagagtgttgctacacaatctatataacatgacagtacgacaaaaacactaaactcatgttgcagcttaaatgcacctaaacacagaactgagccaaaacattgtatactgggctggcttaacagactacacaataatacctgtggaccttgagaaaaatgagaacgagatg

SEQ ID NO: 3432 - DNA, 229 bp, Gossypium hirsutum
  Clone ID: LIB3083-076-Q1-L1-C6
gttgcctggaataggcaacagataactgaagcttctacaagggaagtcattcttggtacagagaatggtcaactgtatgaaattgctgtagatgagaaggacaagagggaaaagcatataaagcctttatttgaattagcagagcttccagaagctatcatgggtttgcagatggagacagctatcgtgagcaacggatctagatattatgtgatggctgttactccca

SEQ ID NO: 3433 - DNA, 313 bp, Gossypium hirsutum
  Clone ID: LIB3083-076-Q1-L1-C7
gggcggtctagaaatagcgaatccatccccctgcctgaatgcattactagcgggcctgtctcttggtcgccgagcatgtgtgtaagaactagtaatccgtactttctctcttacggcatttctggttaaaagagattaccgtaaactttacgattttttgtaccactcgattggttatgatcaagatgaacctgagaaactcggtatctgtcaagaagaagtgcgacataatctgtgatacggcacgtactataataccgcttgacagacgaagatatatttatggaacgtgctcaatagcattatcagggct

SEQ ID NO: 3434 - DNA, 249 bp, Gossypium hirsutum
  Clone ID: LIB3083-076-Q1-L1-C8
ttacgaggtttttctttgttgcagtttaatacttgttcattcataaaaaaatcccatcatgagagaaatcctccacgttcaagccggcagtgtggaaaccaaatcggggcaaattctgggaagttgttagcgacaacatggaattgtcccaaagggaactacgtcggtacttctcggttcagcttgagagggttaatgtttactacaacgaagctgtgtggtcgtacgtacccagagctgttttaatgg

SEQ ID NO: 3435 - DNA, 263 bp, Gossypium hirsutum
  Clone ID: LIB3083-076-Q1-L1-D1
cgggtctgtctcttggtcggccaacatatgtggaagaacttgtaatccgtacttttcctcttccgccatttctggttaaaaaagattaccggagactttacgattttttctaccactcgtctggtttcgttcaagatgaagctgagaaactcggtatctcgcgagaagaagtttgccataatctgttattcgccacgtgctttaataccttcggtggcatgaagattttcttccccaacatgctaaagtggattagcagggct

SEQ ID NO: 3436 - DNA, 275 bp, Gossypium hirsutum
  Clone ID: LIB3083-076-Q1-L1-D10
tggaaactccgagacacagggcccaggtcaatgcgcatggccattccaccagcccatctacggaccacagaacccacctttggttgcacccaacaatgatatcggtcttgatgggatggtgatcaacctggcaagcctcttggctgggacagtgaccaacccgtttggaaatgggtactaccaaggtccaaaagaggcaccactggaggctgcatctgcttgtcccggtatttatggtaaaggagcatacccaggctatgctggagaccttccgg

SEQ ID NO: 3437 - DNA, 246 bp, Gossypium hirsutum
  Clone ID: LIB3083-076-Q1-L1-D11
ctggattttacgttctgtttggatcaggtctgatgctatcatttattctctcaatctatatcttgcagtcatcaagggacaaattagcaaggttcgtaatggagactgttgcggaaagcagtgcacctggagttggagttgcaaaggtcgagtgattccttcagtttcgagaaatgaacaaaaatgtggtggttaagtgatgtgtattatggcaaggatgttggaaccccacgaattgagatagtt

SEQ ID NO: 3438 - DNA, 274 bp, Gossypium hirsutum
  Clone ID: LIB3083-076-Q1-L1-D12
gggagttctaagatgtggggcgggtacaacaaacgatacaagcatttcactcccaccctcggctgttccctgactttccatatctacttccctccttgttcttatccttcccacacgttccctatactttactggctctctggacttacttgcactgatgagactttcataatcaaggcaggagcacaacgtgctgcttcagctgaaggcgttgctctaattgctcctgatacatctccaagatgcctgaatgtggaaggagaggctgacagct

SEQ ID NO: 3439 - DNA, 268 bp, Gossypium hirsutum
  Clone ID: LIB3083-076-Q1-L1-D2
caagagaattccagacatgaccataataaacaaacaactcggtaggttggaaccccaagacatccctttgggacttgctcgaatctaccctaacctaccaacacaggacttatgccgaggctattaagaaatccatagcaaaaccttctgcatcctaaaggaggctagatgtttaaaccacggctaagaaaggatcatgaaatgtgctttatggcaaatgtttcaattcttctttcccccgctttttttaggaagtctttaaatatat

SEQ ID NO: 3440 - DNA, 263 bp, Gossypium hirsutum
  Clone ID: LIB3083-076-Q1-L1-D3
ctagctttgaaaaccctaggccgcccaacgaagaagcacagccgcattttctttgacaaatatccgaaacacgaatggttggcacatacaacgatctgagttatgctgctggcttgaagaagctggatgagcatcaacatacacgcagttacatttgtggataccaagcttaagaggatgattttaccgactacgcatatctatctggtgcctcatcatctaactacggcaatgattatcaatggtacaaacacattgatgcc

SEQ ID NO: 3441 - DNA, 266 bp, Gossypium hirsutum
  Clone ID: LIB3083-076-Q1-L1-D4
gaaatggagagatcaacagcatcgcggcttcgcactttgggtattcagctatcgctttgctttgctctctacattggtctcaacttgggtcagcctcaaacgttggtttacaacgataatgggggcccctttgacctgtactttatcagcgatagaggtggctctagatcactttaagaacagacccatcttctcaaactgatggggaatgtggccaaagcttatgatttgaactttgaggtgaatattagctagcttggtgagga

SEQ ID NO: 3442 - DNA, 263 bp, Gossypium hirsutum
  Clone ID: LIB3083-076-Q1-L1-D5
cttcgcgttgctaaggctaccggaggtgcacctaacaagctttctaacataaaggtggtgaggctgtccattgctcaagtactgactgtaatctcacagaagcagaattctgcattgagggaggcatacaagaagaagaaattcttgcctctctatctccggaccaagaagaccctagctatccgtagaacgcttaccaagcaccacgcatctttgaagaccagaaagggagaagaacaaggaaatgtacttaccaatgagga

SEQ ID NO: 3443 - DNA, 262 bp, Gossypium hirsutum
  Clone ID: LIB3083-076-Q1-L1-D6
aactcggtggcatagctaactgagacagagatgaactcaccgcagcttccacagacgcgtgggcgcgtgttatcctcatccgagataaacaaatccccagccgggtcaggaggagatcttgaatcttctttaatccaaatctaccaccatcaccaccacaactccctcaagctccgggatcaggccgagaaagcgaagaaagatgcgattaagaaagcggggagagtgtcggatttgttggtggaggcggtgaacggaggtg

SEQ ID NO: 3444 - DNA, 271 bp, Gossypium hirsutum
  Clone ID: LIB3083-076-Q1-L1-D7
ctgtcgcgagcgaagaaaggagagggtggtggtgctaaaacacgaatgccgccctattgagcacaagagcaccatccgatgctgtgcacaaatctcggcggctcagaagtagatccatcaataaatgcaaacagatcatagtcattagcaataaacctaacctattgcttacattgaaggaatgttccttcatcaagcttcacaacttcatgccgaggaaaggaattcaccacccgatcagtagcaaagaccgagccatttaattcaacag

SEQ ID NO: 3445 - DNA, 278 bp, Gossypium hirsutum
  Clone ID: LIB3083-076-Q1-L1-D9
ttttctagagggaggcccacttttctggggggattcggctgataaacaaccttgcattggtaccggtggtatgataccgtggaaacttcaagtgacggggatgctttttcacagtgggttaccacacatggctataaatgcattggagcttggcatggaagcacttaaagaaatccagctactgtcttataaagacttgccacctcatcccgatgagcaagtatctggatgtgcttcaccattaaccatgaaaccaacgccttgggattggccatgtg

SEQ ID NO: 3446 - DNA, 265 bp, Gossypium hirsutum
  Clone ID: LIB3083-076-Q1-L1-E1
ttactagaagaaagggatagagaaggggaaggggatcagctgtctttattgacgcttttggtggctgcttttaggaagtctttgattgggtgtagcctttctggaagtaaagagctttgttcaatggaaattgggttgcctaccaatgttagacatgttgctcatgtgacttttgataggttccatggatttcttggtttgccggttgaatttgagcctgaggtccccaggagagctccaagtgccagtgcgagtgtatatgggg

SEQ ID NO: 3447 - DNA, 276 bp, Gossypium hirsutum
  Clone ID: LIB3083-076-Q1-L1-E10
cccagatatggtgaggggccaaatgaactttaagaggcttcaattgactgatttcaaaattgacattcctcgtgttccaaagaagaagacactgattgaagcaatggaaaaagctgatgttaaaaacaagtgggagaatagctcatggggtaaaaagctgattgttcaaaagaagagagcatctctcaatgacttcgaccgattcaagatcatgttggccaagatcaagaaagctggagttgtgaggcaagagcttgctaagttgaaaaaggagaa

SEQ ID NO: 3448 - DNA, 269 bp, Gossypium hirsutum
  Clone ID: LIB3083-076-Q1-L1-E2
ggttaatgccgtgttatgggttgtggtcgcgatggctctggtgctcggaatagccgagagtttcgacttccatgagaaggatttagcatcggaggagagtctgtgggatttgtacgagaggtggagaagccatctcatggtttctcggagtctagacgagaaacacaagcgtttcaacgtgtttaaacaaaatgtcaaacatgtgctccacaccaataatgacaacaagccttataagttgatgctgaacaagtttgcagacatgacaa

SEQ ID NO: 3449 - DNA, 269 bp, Gossypium hirsutum
  Clone ID: LIB3083-076-Q1-L1-E3
ttcgaggacaaatctcccaaacaaaagcggtctctgccaatgatgtcaagcagggtggaagtccaatttctagaatggaatcaacttcaagctgtgagggaagtgttaccggaattcagatttctagaagggaatcaactcccacttctggtgggctcattactggcgatcaacttcctagagcggaattaacatacactcctgctaaggtcattattggaaaccaaacttctagaagggaatcaactcccacttccggtgggatcgtt

SEQ ID NO: 3450 - DNA, 269 bp, Gossypium hirsutum
  Clone ID: LIB3083-076-Q1-L1-E4
gtctgctggtagcagcagtgctaggcctggtgagcctacaacttcctcaacgactcctagttttgctgggttagctcgttcttcttcatggtttgacatgaatggaggtcatctgcctttaacgttcagaactcctcctgttagcccccctcggcaaaattttttgacaggaatgcgtagagtttgctctttagaattcaggcctcatctgatgaattctccggactccggattggctgacccacttctagggtcttcttctggggttt

SEQ ID NO: 3451 - DNA, 257 bp, Gossypium hirsutum
  Clone ID: LIB3083-076-Q1-L1-E5
cttggactccaaagagtgactacgaaatgaacgcattatctgctgaagccaccagcaggcatgctgatgttgaaataaccggtgccaatgataagggtcctgatgctaaaagacttgggaaatccgaggggaaatttccgaataaagaagttcgttctagagtttcaaatggacctcttgtcaagagcaaatctgatgtagtatcaaagagcaggaaaccaccaacaggaagcaaaaccatgatacggagaactaag

SEQ ID NO: 3452 - DNA, 224 bp, Gossypium hirsutum
  Clone ID: LIB3083-076-Q1-L1-E6
tgcaaccgatgggcaaaagcggtgacgaatgtggcgcggcgtttgaagaaacacggatgcgatttgaaatcgttgtcaaaaacaaagtcttatggcgttccgggtcggaaagatgggacgaggtctacagtcccatacgttactcatgttcaaggggttcttgtaaaccaagattggttgctgctttggactgagacagactaaaattgttggaatttggaaag

SEQ ID NO: 3453 - DNA, 219 bp, Gossypium hirsutum
  Clone ID: LIB3083-076-Q1-L1-E7
ccggcatcaatgaggggggggaaaatagggcggagatatgccagaaaatcaagaaggcttgtgaaaattggggtatcttccaggtcgaggatcatggactcgacactaaactcatttttgagatgaccggtcttgccagagagttcttcgctttgcccgccgaatataagcttcggttcaatatgtctgatggcaagaaaggtgggttcatcttctcca

SEQ ID NO: 3454 - DNA, 267 bp, Gossypium hirsutum
  Clone ID: LIB3083-076-Q1-L1-E8
agaaccctaacattgggcctaaattccacgaggctgctgcctctgtctcgatcattgcagactttctccctccccgatcttccttacgactatggcgctcttgagcccgccattagtggagagatcatgcaactccatcaccaaaaacaccatcacacttacatcactaactataacaaggctttagagcagctccatgaggctattcagaaagatgattcttccaccgtcgttaagttgcaaagcgctatcaagttcaacggcgga

SEQ ID NO: 3455 - DNA, 256 bp, Gossypium hirsutum
  Clone ID: LIB3083-076-Q1-L1-E9
ggggttctaagttttcaaagctttcatggcttcttccattacatccaagcctttccttggagctactaaacccaattcttctctttctcctgatcttcaaagactttctttttcctctcttcgcatctcaatcaaaccaagaacccacaaaaagcttcagatacaagcagctgggagcacatttggaaattatttccgtgttacaacttttggagaatctcatggaggtggtgttggttgtatagttgatggatga

SEQ ID NO: 3456 - DNA, 303 bp, Gossypium hirsutum
  Clone ID: LIB3083-076-Q1-L1-F1
gaggcgcgtggaacagtggggccccggctgaggaattcttactggagagaactcatctctggggggttcatttttattcacttcaagctctttacacagtttacagccatagaagcaacaacaatgtggagatcaatcataactttcattctcttcgcctttcttttcttccctatttcagcgacgaagataacactctacaacaaatgctcacatccagtatggccagggattcaacccagcgccggcaagccaattttagcccgcggtgggttaagactcccaccaaacaaagcctacttc

SEQ ID NO: 3457 - DNA, 274 bp, Gossypium hirsutum
  Clone ID: LIB3083-076-Q1-L1-F10
ggaaattgcttgttgatgcttgagctcatggcagttctcagcctgttcatcttgaaatagatattagtaactatgttggagagaatggaaatggaaattactctgctcagtataagaatttagataagttggtgagtaatttggataaagaagttatatccaagttatatggttcggtttcgacttcgggttcatcaagcaatccatctagcttagaaacagggtcaaggcgcaatgtgaacggtgatggtgttagaataaatgaaccgacagg

SEQ ID NO: 3458 - DNA, 268 bp, Gossypium hirsutum
  Clone ID: LIB3083-076-Q1-L1-F11
tactagggaaagcacgcgtggaggggggatcttatgagaggtggaacactccaccccgcgcaataaacacacacttctgctcgagaaagactgggacctcaaagaggctatgtgagttcaagaagatgaaaacagtgttgccctacaagaaagaggaagcccttaccacgctctctctcattcgagagacctttggggccgaaaaagccgttgaaatcacaaaaatgcgagaggcaaggggaccaagaaacaagctgaaatctcggaa

SEQ ID NO: 3459 - DNA, 202 bp, Gossypium hirsutum
  Clone ID: LIB3083-076-Q1-L1-F12
tctttagcgaaatccctccttgatagtggtttttataaaacgtgtcacccccttcccttcaaaatacactttcaagtctttcacaaccatcattgaatagaaaattgcttaactcagtatcatcatgtaaataaagacatcactcactcacttaaacacagcatcttcttaaaactaattatctatacccttatcaccctta

SEQ ID NO: 3460 - DNA, 153 bp, Gossypium hirsutum
  unsure (1)..(153): unsure at all n locations; Clone ID: LIB3083-076-Q1-L1-F2
gacacacnnggagacggcggggacacgacacaaagcncananaaggaagnnagaanngannacgagacaangggacaangangaanngagnccagagcaaggcaaagacgngaaagacnncnnggangannangnggaacgnaancaggagga

SEQ ID NO: 3461 - DNA, 264 bp, Gossypium hirsutum
  Clone ID: LIB3083-076-Q1-L1-F3
ttttctaggaactagtctcgagttttggttgttttttttaatataatctaatttctaatttattaataatagaaatgttatgcgataaaattaaaattttatgacctgattgaaagttcatgatggagaatataaatgatccatatcaatcacaattcaaaagaaaacaaagcaaaccgtgtagttataagctcaatccaaaggaaaccaaaagccagttgtgttgaaaccgcatggcaggtatgtgaatccatcacatcttac

SEQ ID NO: 3462 - DNA, 270 bp, Gossypium hirsutum
  Clone ID: LIB3083-076-Q1-L1-F4
gaagaattggccaaaacttccattggggatcagacttctcattgctgctcattctatgtctgtggatgcttttagccgctacgatggcaacgcagtaaatcgacgtctcatgaatcttttcgaccctaaagcctctccatcaagaaaacctgataatggcgttgtgtcttccgacgtcgtggttgacaccacccgcaaactttggttccgcctatacagcaacactaccaccgctggcaaaatgtccattcccattatagtctacttcca

SEQ ID NO: 3463 - DNA, 263 bp, Gossypium hirsutum
  Clone ID: LIB3083-076-Q1-L1-F5
tgtacgagtggccaccattgatgttcgtgagcaggtttcagttcttgcagatgcagaagctcttagaaaggcttgtaaaggatgggggacagatgagaaggcaataatttcagtgttgggtcacagaaatgcagttcaaaggaagcaaatcaggcttgcttatgaagatctttatcaggaagatctcatcaagcgtcttgaatcagagctttctggtgatttcgagaaagcagtgtatcgttgggtattggatccagcagatc

SEQ ID NO: 3464 - DNA, 265 bp, Gossypium hirsutum
  Clone ID: LIB3083-076-Q1-L1-F6
attgctttagggtctgcaaaaggactggcatatcttcacgaggattgtcatcctaagatcattcatcgtgatattaaggcggctaatattcttttggatttcaagtttgaggctaaggttgctgattttggactggcaaagttctcttctgatgccaacactcatgtctctactagggtgatgggtacttttgggtatttggctccggagtatgcttcaagtggaaaactcacagacaagtcagatgttttctctttcggagtca

SEQ ID NO: 3465 - DNA, 267 bp, Gossypium hirsutum
  Clone ID: LIB3083-076-Q1-L1-F8
gagaagcagaagcaggttatcgtggagaagcttggtgagccaactgagagctatgaagattttactaaatgtcttcccgctgatgaatgtcgttatgctgtgtacgattttgattttctaacagccgagaacgtcccaaagagcagaatctttttcatcgcatggtctcccgatacatcaaggatcaggagcaaaatgatatatgctagctccaaagacagattcaagcgagaactggatggaatccaagtggaattgcaagcaaca

SEQ ID NO: 3466 - DNA, 277 bp, Gossypium hirsutum
  unsure (1)..(277): unsure at all n locations; Clone ID: LIB3083-076-Q1-L1-F9
cgatggcctcgcgtgacaagaagacctgcgaagccgtcgagcagccgtgccggtggaatacgcacgctctcggatctgaaccggccctctggacccgattccgacagcgattccgatgatccccaggagtactacactggaggcgagaaaagtggcatgcttgttcaagatccttcaaagaaaaatgatgtagatgaaattttcaatcaagctaggcaanctgggagctgtagaaggtcctctcgagcatcctcgtccatcaagttcaacaagtttt

SEQ ID NO: 3467 - DNA, 201 bp, Gossypium hirsutum
  Clone ID: LIB3083-076-Q1-L1-G1
cttccaattgttggaaaagcgatagtagacatccagaatctgaaggatgccgtcggttcagcggttgatgtgatgcacgcaatggcatcctcaatatgctcattatcatcaaaggtgaaggaaatgaattctttggtgaacgaactcgtgagtgtggccgcaaacgaaaggattttgctcgaacaatgtaaagaacatttg

SEQ ID NO: 3468 - DNA, 276 bp, Gossypium hirsutum
  Clone ID: LIB3083-076-Q1-L1-G10
atggatttagcatggatgggggcttggaagttaaaaaaatagagagagtaactaatcatgatgtaaaagcagtcgagtacttcttgaaacagaaatgccaatcacagccagaaattgccaaggtccttgaatttttccattttgcttgcacatccgaggacataaacaaccttgcccatgcattgatgttgaaagaagcaatgaccaaagtcatgtttccaaccatggataaattggtcgaggcaatatgtaagctggctaaggctaatgcaagcg

SEQ ID NO: 3469 - DNA, 274 bp, Gossypium hirsutum
  Clone ID: LIB3083-076-Q1-L1-G11
aaaaaatggtttttgatcggaacaacgtttcccggcacttgcagtcgaacacgttcctagtgtcaatctccgactgaaaaatatggggaatgcaaacggaagacaggacggagctaacggcggtgtcgacgatctatccggaagatccaatggcggcgaggccgttgttcctggagccgctgcagttggaattcgcgtgccatcgtctgattcaatggtgaatactccgccgcagagccctgggcggtctcgatccccgcttttattcgctcct

SEQ ID NO: 3470 - DNA, 275 bp, Gossypium hirsutum
  unsure (1)..(275): unsure at all n locations; Clone ID: LIB3083-076-Q1-L1-G12
cctagcttgacctttttggtctttgtgaaacatcaaatcgcanagatggatctttcatagatttcgcctcagatctctttctctttgtaaaagaaaattgggtttacttatttatttggatcggattgggttggtttggttttagaaaagaaggaaggcgatgtcaaccccagcaaggaagaggctgatgagagacttcaagaggttacagcaggatccacctgctggtattagtggggctcctcaagataataatatcatgctttggaacgctg

SEQ ID NO: 3471 - DNA, 270 bp, Gossypium hirsutum
  Clone ID: LIB3083-076-Q1-L1-G2
gaaatgttggcaacccgcggactttcttccagatcctaattctgatggatttcatgagcaagtcaaagagcttagggaaagggcaaaggagatcccagatgattactttgtagttttggttggtgatatgatcaccgaggaagccctttcaacttatcaaacaatgcttaataccttggatggaactcgtgatgagacaggtgctagccttaccccttgggccatttggaccagggcttggactgctgaagaaaacaggcatggtgatct

SEQ ID NO: 3472 - DNA, 155 bp, Gossypium hirsutum
  Clone ID: LIB3083-076-Q1-L1-G3
tttacgtggctcgagattgttcgcgcggagcgcaaatgatgggctgctgttgctgtacgatctgatcaccctcaggggggttatccctgcccaccactcaagatcattattcttgatgaagcctattcgatgacagaagatgctcagaatgcctt

SEQ ID NO: 3473 - DNA, 215 bp, Gossypium hirsutum
  Clone ID: LIB3083-076-Q1-L1-G4
aaactacagattcttggggctggttttaaagaaacacagatatcacaccaccattgtcctcctcttcctctgatgttcttagaaaagctcgactgttttcctacgtctgtacggtgttagcttaccttgctttcgggactatgccttatggacaagatctcatgtgcattctaggacaactggaaccaattacaggccgagccatgtactaaacc

SEQ ID NO: 3474 - DNA, 246 bp, Gossypium hirsutum
  Clone ID: LIB3083-076-Q1-L1-G5
agaaaatacgcccggcacaagaatgatggtttttgagtatgttcctaatggatcactctttgagcatctacatatacaagaagctgagcacttggactggggaatgcgcctaaggatagccatgggaatagcgtactgccttgagcatatgcatcagcttactccccctatagcccatagaaacttgcagtcttgctctgtgtatctgactgaagactatgctgcaaaaatatctgatttcagctt

SEQ ID NO: 3475 - DNA, 268 bp, Gossypium hirsutum
  Clone ID: LIB3083-076-Q1-L1-G6
aaacggggaatgctgatcgcaggaagaatcagtagaccgaaagcccatttgtggtgtcctcctggccagaaaatttctaaaataaactttgctagctatggaatgcctgaggggagttgtggaaacttccgtgaaggaagctgccatgcccacaagtcctatggcgcattccaaaagaattgcatcggaaaacaatcgtgttcggtaaccgtggctcccgaagtattcggaggagatccatgtccaggtagcaggaagaagctatcag

SEQ ID NO: 3476 - DNA, 188 bp, Gossypium hirsutum
  unsure (1)..(188): unsure at all n locations; Clone ID: LIB3083-076-Q1-L1-G7
aattctttctttaagcagtagcctntgcgagggttaatattcgctggtgtaaaacataactcaaatagctccggcgccgtctatataggcacacaacatcactttcattcttgaaaaaggtggccaattcaccaatgatatcaagctattgaatgccacacaccgtgctaaccaactaaacaaccagc

SEQ ID NO: 3477 - DNA, 238 bp, Gossypium hirsutum
  Clone ID: LIB3083-076-Q1-L1-H1
ttacgtgaaagctgctagcctttgcgtttggtttcttcttcttttgggataaaacattagctcaaatagctccggcgccgccgataaaggtggacaacatcacttccatcctcgaaaaaggtggccaattcaccactttcatcaagctattgaaagccacacaggtggctgatcaactaaacaaccagctaagcacaccggaccctaacgacgggttacggtgtttgcgccgagtgac

SEQ ID NO: 3478 - DNA, 246 bp, Gossypium hirsutum
  Clone ID: LIB3083-076-Q1-L1-H10
gctatttcaacagttgatgtggtgacccctaaagtttttattggcttgcttgtcggggcaatgcttccttactggttttctgctatgaccatgaagagtgtgggaagtgcagctttgaagatggttgaggaagtgcgcaggcaattcaacacaatcccaggtctcatggagggtactgctaaacctgactatgctacctgtgttaagatctctactgatgcttcaatcaaagaaatgatcccacct

SEQ ID NO: 3479 - DNA, 279 bp, Gossypium hirsutum
  Clone ID: LIB3083-076-Q1-L1-H11
tagaaaagccggaatacaaacagcgaaagtatgacgaagagtacccaaaacatgagaagcctgaaattcacaaggaggaaaaacaaaaaccgtgcaagcaacatgaagagtaccacgagtcacacaaatcgaaggagcacgaagagtaccagaaagaaaaacccgagttccccaaattggaaaagcctaaagagcacgagaaacacaaagtcgaatatccgaaaatacccgagtacaaggaaaaccaagatgagggtaaggaacataaacatgaagagt

SEQ ID NO: 3480 - DNA, 253 bp, Gossypium hirsutum
  Clone ID: LIB3083-076-Q1-L1-H12
ggcagaggaagttttttgtatgtgttggccgggatccacttattgaggtagctattagtttggagaaggccgcattatctgacgaatattttattaagaggaagctttatccaaatgttgatttctattctgggttaatataccgggccatgggatttccaccagagttcttcactgtgttatttgcaatccctcgaatggctgggtacttggcacactggcgcgagtctctagatgatcctgatacaaagat

SEQ ID NO: 3481 - DNA, 258 bp, Gossypium hirsutum
  unsure (1)..(258): unsure at all n locations; Clone ID: LIB3083-076-Q1-L1-H2
tagttttttttttttttttggggtggttttttaaaacatgaaaaagcataacatacagtaaaccatttcaagtctttaacaagcttcaaagaatagaagcttgcataacacggaagcaacaggtaataaaagacatcatacgcacactcaatcacaggtacttcttagtactcatcatcttcaccctcatcaccctcagccgactcagcaccaacttntttataatccttctccaatgcagcaagatcctcacgagcc

SEQ ID NO: 3482 - DNA, 244 bp, Gossypium hirsutum
  Clone ID: LIB3083-076-Q1-L1-H3
tttacgttcgattttttttctttttggtttgtttttttcttgggtttttttttttttttttataattttttttctttaaaaaccgaaaaacacccacatttttataaattattaaaaacctgtaccccccttcccaaccccacctttattttctcggctttttattttttgtaaaaaataactttataaaagttcccccccccaacccccccctaaaaaaaaaaaaaaaggtttgttttttttt

SEQ ID NO: 3483 - DNA, 233 bp, Gossypium hirsutum
  Clone ID: LIB3083-076-Q1-L1-H4
ttcactaggtcattgccaggttcgaggctgtgccgtgcttactaatgcacccttcatattgaatctggattgtgatcactatattaacaacagcaaggctataagggaagcaatgtgctttttaatggatccccaatttggaaagaagctttgctatgttcaattccctcagaggttcgacggcattgatcgtcatgatagatatgctaatcggaacgttgtcttcttcgata

SEQ ID NO: 3484 - DNA, 246 bp, Gossypium hirsutum
  Clone ID: LIB3083-076-Q1-L1-H5
ggttttccttttcgtttgggcttaaacgtcccagtactcaatttgttattcccatactcgatagaaaaattgtcaagtgaagaatccagactccaaatcaattgttatgtcatgttctcccaaaaaaaaaaaaaatcgaatgcgcaattgaaaattacatgcaaaaccacaaaaagatgagattcaaatctcacatcaatccacatatgatagtaagcatcgggctgcattacccaaagctaaaaa

SEQ ID NO: 3485 - DNA, 266 bp, Gossypium hirsutum
  Clone ID: LIB3083-076-Q1-L1-H6
attaaatcggagtgcgggggatccatcgcggaatgcctgatgctaagcggggaatattcctcggacttcgacgccgaattcgccatggactccgagatcaacaggcgcattttagcggcgaggcgttacattagctacggtgcgctgaggagaaacacggtgccatgttcgcgacgcggtgcgtcgtattataactgccggccgggagctcaagcaaatccttactcacgcgggtgcagtagaattacacgctgtcggcgttagat

SEQ ID NO: 3486 - DNA, 159 bp, Gossypium hirsutum
  unsure (1)..(159): unsure at all n locations; Clone ID: LIB3083-076-Q1-L1-H7
gagccccccccctgcacgaaancattactttccgagattaaatctttgtggtggggttcaatcgcgggaggcctcaagctattcttcatatattccacggacggaaacaccaaaaacgacacccacaccgagatcaacaggtacaaaatgggggccccg

SEQ ID NO: 3487 - DNA, 151 bp, Gossypium hirsutum
  unsure (1)..(151): unsure at all n locations; Clone ID: LIB3083-076-Q1-L1-H9
ataatactaantttggacacaaataatttatgactacacaaagtttcctgtcatatcttacatcccatctcaaatatttattgttatttatctactcttgcggattgacccacttccacaagcttcttctaatttaatatcatccaaccta

SEQ ID NO: 3488 - DNA, 258 bp, Gossypium hirsutum
  Clone ID: LIB3083-077-Q1-L1-A1
ctgattcctagttcctagggctagtaaacttgactgaaacaagtaatgctaggagtggattaagtaatattacagtgatgggttgacaattttgaaatttaacacttatgattgtattgttatgttatgttgatagagttggtgagtcgttatatgcatactacattgcattagatgtgattgaagttagggatgaaaaaccctagactagactctgaggcttaccagccttataaatgaaggagcttttgttttttt

SEQ ID NO: 3489 - DNA, 268 bp, Gossypium hirsutum
  Clone ID: LIB3083-077-Q1-L1-A10
ctgcttctactgctataggggttggtgatcgtttgctagttgcaaatgttggagattcccgagctgttatctgcagaggaggcaatgcttttgctgtgtcccgtgaccacaagccagatcaaagtgatgagcgacaacggattgaggatgctggaggatttgtcatgtgggctggaacttggagagtgggaggtgtccttgctgtttctcgtgcatttggtgacaggctcttgaagcagtatgttgttgctgatccagaaattcagga

SEQ ID NO: 3490 - DNA, 250 bp, Gossypium hirsutum
  Clone ID: LIB3083-077-Q1-L1-A11
aatagcagaatttaaccataaaacaattacaatactatgtcaaaattcataaaagtttaattatagtcaatttaaaggattaaattccaccattcaacaagcatataacacaacatgagtaaatggaagtatccagcaacacataaatgcataaccataataacaaactaaagaggcattgcaagtgtctttttgttagattcagtcatgcaaaatcgaactaaactaccaccattatacggaaaatgac

SEQ ID NO: 3491 - DNA, 272 bp, Gossypium hirsutum
  Clone ID: LIB3083-077-Q1-L1-A12
aaggaacaagagagaaaatgagtcgaggaagtggtggcgggtacgatcgccatattaccatcttctcccccgaaggtcgtcttttccaagtcgagtatgcgtttaaggcagtgaaagccgctgggatcacatcaattggtgttcgagggaaagactccgtctgtgttgttactcagaagaaagttcccgacaaacttttggatcagactagcgtcactcatcttttccctattactaagttccttggattgttggctactggcatgacagct

SEQ ID NO: 3492 - DNA, 383 bp, Gossypium hirsutum
  Clone ID: LIB3083-077-Q1-L1-A2
ctttttggtgctttgaagttgcaaagtagaaaaatgggaattccatcagaaataagggatgtttggatacagagaaaaagaaattccttcataattccttcccctgctgaagacgagaagaatttgagagccaagcaattctctcaagaaggaattcgtgccggtgtcaaggcggctgcggtcgccgccgttgtcagcgccgtacctaccttgattgcagtacgtaagattccttgggcaaaggcaaacctcaaccatactgctcaagctcttatcatcagtggagcatcaattgcggcctacttcattaccgtagataaaactgttttggaaagtgctaggagaaattctcgagcacagttcgacaaaactgtttgaatgct

SEQ ID NO: 3493 - DNA, 389 bp, Gossypium hirsutum
  Clone ID: LIB3083-077-Q1-L1-A3
aaattgagcggttgcagcgcatgcttgacaagtggctaagcccagcaaaagctgatgaattcacgatcaagaagaacatcctatcaacatttgcatcttcttagatcaatgtatttcacctcgtctagtgctgcggtgggttcaagtttcatcgacgttttcaaggactgggaacatcttagcgttttatgttttgggtatctttcagcagcaaatcgctaggccttgattaggacttgagcaccatttgcgtgccgcagcaccagtaactagtaaaagttcttatgatggaattctctcctaaaactagttttgaccagtgatttcactcggcatttattcgaatttttgctcctgtttttactattatagatttcctggaaacttat

SEQ ID NO: 3494 - DNA, 386 bp, Gossypium hirsutum
  Clone ID: LIB3083-077-Q1-L1-A5
tggagatcacaaaagggctgccgttttgagggaattcggcaccaacttgccagatttggggctaggagacagagaaaccgaccatgatttcatgtcattatgcaaggaaggatacatggtgccaagaaccaaatgcgaaccattgccaaggaacaagcttctaagccatgttatattttatgagggccgcctagtccaaaggccaacccctttggctgctctgttgaccttcctatggcttcctataggcttcatcctctccctactcagggtctacaccaacatcccgttaccggagcgaattgctcgatacaattacaggttgctggggatcaaattgattgttaagggtacccctccaccagcacctaggaaaggccaaagtg

SEQ ID NO: 3495 - DNA, 383 bp, Gossypium hirsutum
  Clone ID: LIB3083-077-Q1-L1-A6
aagaatcagcaaagcttcttccggatcggatctgaccaaagctccaatccctactgatgttcaaggcatgaagaaatcagatagcgaaaatcgactctctgaggtggatattagtggtttagtatctcaactaaaggacttgcagaagaaaaatgcagaattagaagaaaataaccagatgttatctgtggagcttcaagctaaggaagctgagcatgaaacactgcaaacacggtttaatgatctggaacagaatactgtaccatctctaagaaaggctctgaaagatgttgctatggagaaagatgctgctgttgttgcgcgggaggacctctcagcccaacttcgcatgctcaagaaacgcctgaaagaggcagaagatg

SEQ ID NO: 3496 - DNA, 385 bp, Gossypium hirsutum
  Clone ID: LIB3083-077-Q1-L1-A7
aaaaatcctaaaaagccaccccctaaatgaccatgaccactaccaccaccactacccctaccatctccaccaatgtctccgccgatgcctcaaatccctcccaaaaactacccttttctcttccccaaagtacaatcctctgttctctctgacccttctcgtttcttctccccaaacctcctctcatcccctctccctactaactctttcttccaaaacttcactctcaaaaatggcgaccagcctgaatacatccacccttatctcatcaaatcagccgactcttctctttctatttcctacccatccttctttcacaacccttctttcatttaccaaattttcgtccctgatttaaccatctctgctaccgataaaaccacct

SEQ ID NO: 3497 - DNA, 364 bp, Gossypium hirsutum
  Clone ID: LIB3083-077-Q1-L1-A8
gaaagtaatagtgggggtagaattaatgaaagaatctttatttttcaaaagctgaatccacttggaacatatcacctcaatcccatctttgaaagtgggaaatttatgtaacatattatgaaccaagaataatatctggatcaaagaaaaaaaataaaaagaaccccattgcagaaaatcaacacagcaatgacattggatcgttttacaaagtttttttcattgaagcagcagtgatgcacactgagatcattacgactcagctgcaatctccgtggttgtggttgtggttgatgttgcagcaggggcaggaaccttattggcggcggtggcggcttgtttctctcgttcggtctcgagttgg

SEQ ID NO: 3498 - DNA, 358 bp, Gossypium hirsutum
  Clone ID: LIB3083-077-Q1-L1-B1
ccagggcagggtttctgcaaatcttcgaaaaatcatactgaaaaaacatcaatcaaagacataactaatgagcttggtaattttgaataactttaacacttccacactcctcaaagttttacaaaacctatggcattccataaaccaacagcatctttctaatgctcaaacaaacaacatcaagtaacccgtcctggagcatgcgacgaaccaaaaccgtttcccgatgacttttgtcatgagtcatcatcttctggatctgctgtacaatctgtacatgatgtgtgcgcagctggagattacatagcacctggggcatctctcatgcttatattcacactgtttcgcatggttcgtc

SEQ ID NO: 3499 - DNA, 267 bp, Gossypium hirsutum
  Clone ID: LIB3083-077-Q1-L1-B10
atgcaatctactcaggcatgaaaatatcatcttctgtttatatatcaaaatgagtattgaccatcatctatgaccttatacaaaatgagtatcatattcatcatatgagccaacacattatggctaactaacaaaacaataaataaatactcgagtccctatacatgccagaaaacaaaacaatgaaactagctataccaaggtcttgagtgatagtgtaaatcgaagcctttgatgtcactagatccccgatgctagcttggcagc

SEQ ID NO: 3500 - DNA, 198 bp, Gossypium hirsutum
  unsure (1)..(198): unsure at all n locations; Clone ID: LIB3083-077-Q1-L1-B11
tttacgagcaacagctctctccgcaagcattctaatattatnnnatctatctatactaaaactccaatagacacacagggatgaccataaacatactgagcttcctccccactatacgaacccacacatcctggctaatctacaaaaccttaaacaagctctcgggcccatattcacgccagaaaacaaaccaatgaa

SEQ ID NO: 3501 - DNA, 280 bp, Gossypium hirsutum
  Clone ID: LIB3083-077-Q1-L1-B12
tgtcacgagtgacaacaggcgacaaaggtgtgctatattttcaaccgtgtggttggtttggagctggccggtatgagattgatggatacgtgtataattccgctgaggagccaaagatattgatgactgggaaatggaatgagtcaatgagttatcaaccttgtgatagtgaaggggaaccacttccaggcactgaactaaaggaggcatggaaacttgctgatgctccaaaaaatgataaattccagtatacacattttgcgcataagattaacagctt

SEQ ID NO: 3502 - DNA, 390 bp, Gossypium hirsutum
  Clone ID: LIB3083-077-Q1-L1-B2
cccaatcgtgaagcgtatgcaaccgtactacatgcttcggaatcctacgtttgtggtgcaataaccctagcccaaagcctcctaaaatccggcaccaaccgcgacttaatcctcctcctcgacgactccatctccgaaccgaaacgtcacgctctcgaattggccggttggcgtctccgtttcatcaaaagaatccgaaaccctcgagcccaaaaacacacctacaacgaatacaactatagcaagttccgactatggcaactaaccgattacgaaaaggttatcttcatcgatgctgacatcatagtgttaaaaaacctcgaccatcttttccatttccctcaattgacggccaccggtaacgacgtttggttattcaattcaggcata

SEQ ID NO: 3503 - DNA, 363 bp, Gossypium hirsutum
  Clone ID: LIB3083-077-Q1-L1-B3
gacatattatttttgtggaattgggaagccgaaggggaggctacttcgattgcgattgccaactcattcttccgtcatgggcaactgtggcactagagaggaatctgacgttgttacttatgctcaagttcaacagctccacaaccacatcgtatccgacaagaagcttactcaaagtcagagccagactcaaaatcgtaccctctcagatctgagcgactttgaggattccaggaaaaatgcgcttctctatacccacatcattgccttcactttattcgagcttgagactattaccaaaagcttccgttctgactatattctcggggaaggtggcttctgaaccgtctataaaggtttcat

SEQ ID NO: 3504 - DNA, 348 bp, Gossypium hirsutum
  Clone ID: LIB3083-077-Q1-L1-B4
cccaatcttttttcgtatgcaaccgaactacatggttcggtttcctacatatctggcccaaccaccctatcccaaaacctactaaaatcccacaccaaccgaaacttaatcctcctcctatactactccatatccgaaccgaaacgacactctctccaataagccgcttaccataaccttttcatcaaaataatactaaaccctctaacccaaaaacacacctactaataatacaactatagcaagttcctactcttacaactaacccattacaaaaaagttatcttcatctattctcacatcatactgttaaaaaacctcaaccatctattccattatcctcaaatt

SEQ ID NO: 3505 - DNA, 301 bp, Gossypium hirsutum
  Clone ID: LIB3083-077-Q1-L1-B5
ttaatttctactcttcttgtaaaagaacctgtggtgtctcggaatcagtagtgtatctgccaaggtctagcagaacagctaattacggcatacttactactcgtcgctcaacttaaacagatccagtgatcacattctgctgctcttaatttctctttctttaattttcctctgttttatgttgcatatgaggacaaggatggatgatgtctgtaatatataatatgaatagaaagctgaaatgttgcctctgccttttgtcttttttaatgaatgaatgaaggaattgggctgtttgatc

SEQ ID NO: 3506 - DNA, 318 bp, Gossypium hirsutum
  Clone ID: LIB3083-077-Q1-L1-B6
ctattttttaagccactctagtgccaacggggggggtgcaaaaaattgatctttatgaaatacaaaaaaccacataactcaaatccagagagaaccaacttcacttgggatatatacacatggagggcggattctcttacattccaatggtaataaccgccgtggtgtaaaactaaaacattttttctcataagggcaacgggctccaatgaaaaaaccatgctcgaaaacctataaccatgtatacatatctatgtctatatataaacctatcccatatattactaaaagcatactaccaacacatcatttccaaaa

SEQ ID NO: 3507 - DNA, 383 bp, Gossypium hirsutum
  Clone ID: LIB3083-077-Q1-L1-B7
ctcctttttaccattgctgtaagggaagatccattagattatgttcgtaatgctaaggccatcatcgaccgaaagaaacgctcccttgaagctttttgcactttctatattgctgactgggcactcaaccttttcggcatcaaggcggcaagtgcactgtcccacaaagttatatctcgcacaacaatgtgcttctcgaatatggttggacctgtggaggaaattggtttttgtggtcatcccatggctttccttgctccaagttcttatggtcaaccttatgcactaatgataaacttccagagttacatcgacaaaatgaccattgttctgtcagtggatgaaggaaccatacccaaccctcaccagctatgtgatgatat

SEQ ID NO: 3508 - DNA, 381 bp, Gossypium hirsutum
  Clone ID: LIB3083-077-Q1-L1-B8
ctaattttaagaagcacaagcatccctgggggcggtgcctaagctcacagtccaaagaagccaaactcactcgccttatccttctcaaaagtctcaaaatactgattgatgattgtgactgcgagaagaatacccgtccctgacccaattgctcccataagatcagccaatactgtgagtgcaccaatgcacatgcctccgaatgcagcagctgtgggaatgtaacggtttaactctttctgtaagcttccctcacgatggccaggcataaccatttgttgttccctgagctgcttggcaacatctctagcagatgaccctgagacttcaatccaagtttttgagaacaatgcacatgctgataacataaacacaagatag

SEQ ID NO: 3509 - DNA, 269 bp, Gossypium hirsutum
  Clone ID: LIB3083-077-Q1-L1-B9
aaacatgtcactctcctggcaatcttcgccttcatcatttctctcttcttctctaccaaaattaagattgggatttgcaaatgggtgttcttcttccagcctactcgtcaaattcaacgcatcttttccagctattcgtgcttcctcgggcttctcttcttctctcgacactgggttaagaactgaattggatgctgtgtctactttcagtgagatagttcctgacactgtcatctttgatgattttgaaaagtttccaccaacagctg

SEQ ID NO: 3510 - DNA, 55 bp, Gossypium hirsutum
  unsure (1)..(55): unsure at all n locations; Clone ID: LIB3083-077-Q1-L1-C1
gaaccataagtgtatattggtatttactannttccatgtatgggacgagtggtgg

SEQ ID NO: 3511 - DNA, 278 bp, Gossypium hirsutum
  Clone ID: LIB3083-077-Q1-L1-C10
caattttatataataaattatctgttcatgtgattcgtttaaatgttacagaattagaagatgcgcgtgtttcttcacaatcatctaataaaagaaccctgctcatcctcacatatatctcagtatgttcaaaaaaaaaaaactcagtatatatataagccatgtatgtatgtagaagtttcagggtcttgttaagtccacgtcgccttttgggcctctccgtcgtcttttttacatacgacctacctccattttcttcccacaaaccagaaattcct

SEQ ID NO: 3512 - DNA, 273 bp, Gossypium hirsutum
  Clone ID: LIB3083-077-Q1-L1-C11
tagtctcgagtttttgttggttttttttaagaaaaaccaggggaaaaaaacattgaccacaatccacaaactcatctcaaccataagcttatgaaatgaaacgattggctcctttcatgaataaacataaaatgttattctcatatgccatttcaagatgcaggcatcgaaatgacaccggcaaataggaaaaataaaaacaaaattcaattagcaagaggggttcttaacaatcagaaacttgaaaacaacagtggagaggagatcaggaaa

SEQ ID NO: 3513 - DNA, 165 bp, Gossypium hirsutum
  Clone ID: LIB3083-077-Q1-L1-C12
tttttacaaaaaccaaacatttcagaagatttttaaaaaaaatagccctttcaaaccaacccttatcaccatctttatcctcaatcaatcttcaaacaaacatcaaactcctcatatctcctgaatcaacaacattcattttcttattccaaaatgatggaccca

SEQ ID NO: 3514 - DNA, 387 bp, Gossypium hirsutum
  Clone ID: LIB3083-077-Q1-L1-C2
caactttcatatgattcacccggacagacctttggggcgtttgaaaagccagagggggtctcagctgttggaaagttttcaaatatgctgaggttcatcgtaaaagaggttgatccaagtactggcgaggctgaggacgatggagttgaggacgagtaccaactggaggaccttgaacttgttgcagccgattacatgttgaaggtgggtgtctctaatttcaggaatgcatgggaaagcatgggtgtggactttgaacacgtagatgaatatggccttggcccaagggatagcctagctgaagctgtaaatgctgtcattaatcttctcggcatgcaaccctgctagggcacagaggttgtccctccaaattcaaggtcacacact

SEQ ID NO: 3515 - DNA, 379 bp, Gossypium hirsutum
  Clone ID: LIB3083-077-Q1-L1-C4
ccattttccttacaagtttgtttttcttgtgattgatcgatatggctagctcaatgtcccttaagcttgcatgtctgttggtgttgtgcatggtgatgggtgcacccctggctcaaggggccataacccgtgctgatggcttagtcggcctcccacgctgccttccttttttgtcagggaatggtgatggtgctgatgccacaggttgctgtgccatcgtcatgaatgccttgggatcgctctgtggtgatacataggaaccgatctagcttgaaatcgggttcggatttgggtggaatttcaaattggtgtgttatggaatcccaacttaatcgtgtttaagggtgggatccaattgtgtgatacattacagagcatg

SEQ ID NO: 3516 - DNA, 380 bp, Gossypium hirsutum
  Clone ID: LIB3083-077-Q1-L1-C5
ctgaattcctccaagctaggagtttggagagcggtgaccgctgaagcaaaacaaatttcttgggggaaaagaaaatggagttatccatgatttttatgattagcttctctgtattgattttgtgctcctaactggcatatgggcaagttgcaatgaccacaaacccgacaccgtcaccctcaccaacacccttaccgacgccggcatacacaaatatcaatgacttactctatgtggcatgtccatatcacaagttcctgcgctacctcgagtcgactaaattaatcgacacgttccaaatccaagccaacaacacggttgaaggcattactattctcgtaccgaaagacagcgcattcaaagctcttacgaagccttca

SEQ ID NO: 3517 - DNA, 290 bp, Gossypium hirsutum
  Clone ID: LIB3083-077-Q1-L1-C6
cttcatcaactctactctggctggcggcttgcagcggtcgacacggtgactttcttcaccaactctctcccgtgacagtctgtcaccttcccaaataccgccaccgctttaggcggcttccgccgctccatcacttgccgaagccgcccttcaccaagtgccataaacaaaagagagaggtcattaagcaaatacagtgagaaatggtgtgtgggaatgtgttctccacgttgatcataacatcatcattagctctaattacctacaatatattgatctcagtcaatgct

SEQ ID NO: 3518 - DNA, 372 bp, Gossypium hirsutum
  Clone ID: LIB3083-077-Q1-L1-C7
tttgttttagggagtgtaaacagacacatgcgaggtgctttaactaggaataggccattcttgcatgtggcatgccatggtgaggaactagggactgatccgtggaacaacataaacagaacggacatgcacgactattacgagttggatgaactaaaacaattgctgcaggaaggagagtgggaaagtcattataaaaagatggaggaggctgaaaatgattcagatgcggagggggaaagaattctgctcgtatttttacttaagatatgttggttgtaagtgtaacttgctactgctgaatgtgctggtaacttaatagtgggagtcacaatggatagcgaatattcaacttgattgttgttgcggatt

SEQ ID NO: 3519 - DNA, 362 bp, Gossypium hirsutum
  Clone ID: LIB3083-077-Q1-L1-C8
gctgagctctctggggcaacatcaccatggcagatagggtataccccaaacaagcgacaaatggcaccgccgccacatccaacccttcttttccggccactaaagcacaacaatacggagccacccgccctgtctaccgtccacaacccgaacgccaccgctaccgccgctcttgctgttcttgctgcctttggaccaccatagctatcctcgttctcatcctcatagccgccgtagcttctgctatattgtacgttctttaccgccctcaccgtcctactttcactgtttcctccctcaaaatctcggcacttaacgtaacctcagcttccaagctgatcaccaacatcaacctaaacgtc

SEQ ID NO: 3520 - DNA, 257 bp, Gossypium hirsutum
  Clone ID: LIB3083-077-Q1-L1-C9
gttgggatcacaaagttgagctattttcaattgaatgacaaaacttatagttggtacaatgaatatataactacacaaaactttcactctaattttattctgtcttgtgcatctccattcttgtttgttcatacatcacataccataatctaaaagaaccacgcaagatgatttttttcaacagttaatgccacacattgtagtgtctggtcctttggttttcatcacaaatggatcaattcggacccaaagcaagg

SEQ ID NO: 3521 - DNA, 144 bp, Gossypium hirsutum
  unsure (1)..(144): unsure at all n locations; Clone ID: LIB3083-077-Q1-L1-D1
cagattttgatccatcatgtcacggcgatcatcagggacgtggttgaggttatgcctcgtaatatttgcggtagtttcagcacntggcagtaatgtggacctgctcttttattggaggattcaagaaaaactgtcagaattcgt

SEQ ID NO: 3522 - DNA, 272 bp, Gossypium hirsutum
  Clone ID: LIB3083-077-Q1-L1-D10
cgatcgcgtaagccactggggtgccaacaaggcggatgagatagatttagcatcaggggagactttgtacccgggactcagctacggcgagaaccaactccggtggggttttatccgcaaggtgtacggcatcttggcggcgcagctggttctaaccaccgtggtctccgccttcgtggttctttctgctccggtcaacgagctccttcgtggaaattctggcctcttgctcttcctctgtttaatccccttcgtcttgttatggcccttgc

SEQ ID NO: 3523 - DNA, 272 bp, Gossypium hirsutum
  Clone ID: LIB3083-077-Q1-L1-D12
ataggtaaatatgcggattccattcaaagagaaaccatacatagatgcaaccggtaaacaaagactagaaattatttaaaaggccattacagggcacagtccttcacgtaaaaccagaaaacccacattaagggagaccttaaggcttagaacccaccacgaagacgaagaacaaggtgaagagtggactccttttgaatattgtaatcagccaaaagtccttccgtcttccagttgtttcccagcaaaaatcaacctttgctgatctggtg

SEQ ID NO: 3524 - DNA, 390 bp, Gossypium hirsutum
  Clone ID: LIB3083-077-Q1-L1-D2
gagaactcgaagatgcctaaattcagaagtcctcttgaatgagttattatatctaacgattacaaacctccgaaacaaaagtgggtgcaggcaacggcaccgattgccagggtcataaggtggcatagcaagacatgggtctctgattctcatttgctgcaaaagtcagactctcatgataccatgtgctcatcgccacatcagaatagtaaaatggaattgcgatctggatagagcataatgactttgaggttccccatgcagtgagtcttcgcaactggatgggtctttgattctcatttctcttgggaacacaatatgtgaagggaatccaagatgtctgccacatttccatgaattctcctaatatgctgagccaattatagcctt

SEQ ID NO: 3525 - DNA, 389 bp, Gossypium hirsutum
  Clone ID: LIB3083-077-Q1-L1-D3
caaaaaaaaaaaaaacccccgctagaaaattaaggggagggaatactaacaagagaagagggagtttgggagatttcctttttctttttggatttttgatggcgagcagcagaggctattactcgagaccgaactaccgctttctgtccagcgatcaacaactgcaatcgccgttgagtcacgactcggcgtcggcatttgagttagacgagtcagatatctacaacaacggtgtctcgactcgctctgactcgcctgagttcaggtccaccagtcgagtggcgaagaagcagtccaacaagcgcggcggcggagggaattccgtcgtcggaggggcgccggcctccctgccggtcaacataccggactggtcgaagatcttgagggaa

SEQ ID NO: 3526 - DNA, 156 bp, Gossypium hirsutum
  Clone ID: LIB3083-077-Q1-L1-D4
gcttgtatgatcatattgtgagggaagttgaaaggcctggattaatgcttcacaagaaggaaacttgcgaagcatttaccatttttgagacccctcctatggttgttgttggagttatcacttatgtcaaaactccccttttttttcctactttaa

SEQ ID NO: 3527 - DNA, 135 bp, Gossypium hirsutum
  Clone ID: LIB3083-077-Q1-L1-D5
ggaagttgagagaattatagaaaatcgtgtcttcgcttcttcagccttctctttcttttttgcttcttttctccaattcctttctctatctctttctcctttgcttcttattagcaaagaagagaacggtagagt

SEQ ID NO: 3528 - DNA, 365 bp, Gossypium hirsutum
  Clone ID: LIB3083-077-Q1-L1-D6
ggaatgaacatgctgaggtattatatgccattgggaaaatgtaaacgatgaatggcaaatgtctattcaagcacgccatctgtttcgagtaaggacaaacaagaaaatgaacagtttgtgctgactgctgccgagtcaatctcgaaaattttcaaacataaatcaaaatgaagaataacatgtaaaaatccagatttctagatgtgaattggcttgtcataggtggccattgcagcttccttcaatgcctcactcatcgtaggatgtgcatggcacactcgagcgatgtcctcacttgatgcatcataattaatggcaagaactgcttcatgaatgagctctcccgcatttggtgccataatatg

SEQ ID NO: 3529 - DNA, 365 bp, Gossypium hirsutum
  Clone ID: LIB3083-077-Q1-L1-D7
tcgtaatcgttcacgtaaattaccacccggatgggcttcgaagaatgaaagcagtggtagaattcttcgttaacggcaagcaagatgcattggatccatacccagatggctctgagtgagatagcaacaacaccatcaaggatctcatctcgacctacggatgatggatggactctccggttctcgctcgttccaaaagctacatgattatgggtatgtaattctgatattatcttacgagaagagtgtctgaatatatttctttactcactttctttttaacttaaagctttgtattacttgctgtaactttttttgtcaaactttacaagcagtttaattagtacacttgtgctatattatgc

SEQ ID NO: 3530 - DNA, 268 bp, Gossypium hirsutum
  Clone ID: LIB3083-077-Q1-L1-D9
tgcttgcttacaagggttggagatttgtcattctttgggaggtggaactggttcagggatggggacactgttgatatcaaagatcaaggaagaataccctgatcggatgatgctgactttctcggtttttccgtcgcctaaagtgtctgatacggtggttgagccctataatgcgactctatcagtgcaccagcttgtggaaaatggtgatgaatgcatggtgcttgataatgaagctctctatgatatctgttttagaactctcaag

SEQ ID NO: 3531 - DNA, 386 bp, Gossypium hirsutum
  Clone ID: LIB3083-077-Q1-L1-E1
gctgttttggttcttaaagcaatatacaaccccgtttcgtttctacgactgcaggcgctattctccctgctggaactggaaatgatatggccagggagctgtcctggggaggtggtttgggcgcaatggacagacacggaggcctttgcatggtgttccaacagatagagcatgctgcagcgaccattcttgatcgctggaaagcatctattctaaatcaacaggggaagcagctttaatctccaaaatttatgaacaactatcttgtgataggttgtgatgcaaacgaagctttggatattcacaacttaagagaggataatcctccgaagctctataatcagtttatcaataaagcgctatattccagagaaggagcaaggagt

SEQ ID NO: 3532 - DNA, 272 bp, Gossypium hirsutum
  Clone ID: LIB3083-077-Q1-L1-E10
tctctctctctctctgtcgctagatttcacccgttaggtttctctttccacacagagacagagagagaatcagaggagcttaatcgagatttgatattcctcaccacagatggatcagatattgaacaaggtgggctcctattggctcggccagaaggccaacaaggagatcgattccgtcggcgacgacctcaactcattatccaccagtattgaagggggagccaaatggttggttaataaaatcaaaggaaaaatgcaaaagccgttgc

SEQ ID NO: 3533 - DNA, 222 bp, Gossypium hirsutum
  Clone ID: LIB3083-077-Q1-L1-E11
ttttaccagcccctacctctctaagtagttatatttaaccctttacccccctctccccacacatatacaaacaaacaatcatactcccttaatcaaaatcctatatccctcaccacacacttatcacacaattaacaatctcatctcctatttactcttccaaaattccaacaattacatccattacctcttatacaacctcaactcattatccaacatttt

SEQ ID NO: 3534 - DNA, 260 bp, Gossypium hirsutum
  Clone ID: LIB3083-077-Q1-L1-E12
gttgcaccaacaacaaaggtttaccaacatccatatacaaatattccaaatgtctatttgccacataatttcttcaaaagtaacaccataacatcaacaaacccaaaaaaaacaaaaaaacagtaaccatagcatctatattctaaatgggactctagtagttctcaccatcttctttcatcatgagtatgtttgaaaaccaaataattggtgccccatttcatttaatatgttcatcaagcctttattcggataacaaa

SEQ ID NO: 3535 - DNA, 269 bp, Gossypium hirsutum
  Clone ID: LIB3083-077-Q1-L1-E2
gcgagttgcttttggcaagcctcagggaacatgggctagagtagccattggtcaggtcctcctttcaattcgttgcaaggacagcaacagtcattatgctcaataggccctccgacctgctaagttcaagttccctggtcgccaaaagaatattgtcagcaggaagtgtgttttcacaaacttcatccttactgattatttaaaatataagtcatagaataacatatttcctgctgcgttaacaagcgtaacttctgtatatatggacc

SEQ ID NO: 3536 - DNA, 384 bp, Gossypium hirsutum
  Clone ID: LIB3083-077-Q1-L1-E3
taacattttgctacatgtcagcttgtgcttttctgagttgcgtctctattgtgtgcatgaaacttgtccctcttcaacctatcaaatccaggcctcagttcctaaagattgcaactttaagtgttgtcttttgtggttctgttgttggaggtaacatttccttaagatacctccctgtctcttttaaccaggctgttggtgctaccacaccctttttcactgccttatttgcttacttcatgacattcaagagagaagcttgggttacttatggtgctcttgttcctgttgttgctggggttgtcattgctagtgggggtgaaccaagttttcactggtttggattcattatgtgcttaagtgcaactgccgcaagggccttca

SEQ ID NO: 3537 - DNA, 383 bp, Gossypium hirsutum
  Clone ID: LIB3083-077-Q1-L1-E4
aaaatgtctcggagatatgatagccgcacaacaggcttggcccctgaaggccgtctctaccaagtagagtatgcaatggaagccattgggaatgctggctctgcgattggaatattatcaaaggatggtgttgtcttggttggtgaaaagaaagttacttccaagcttcttcaaacctccacatctactgaaaagatgtacaagattgatgatcatgttgcttgtgctgtggcgggaataatgtccgatgcaaacatcctaatcaacactgctagggtgcaagctcaacgatacacatatgcttaccaagagccaatgcctgttgaacagttggttcaatctctctgtgatacaaagcagggttatacccagtttggtggtct

SEQ ID NO: 3538 - DNA, 378 bp, Gossypium hirsutum
  Clone ID: LIB3083-077-Q1-L1-E5
gaaatgaatctcttacagaaacttcaatttcggggtatacaagcaaacctcatttctttttctttttttatcttcaacaactcaatgaaaactataacatctattttctttttataaattatttcttcttgacacaaacaaacaattcataaccaagtgctggtgtttaggctgttccttttcttcaagtgttgacaaatcggcaattcttccttacttcaccattgataaagcgatccgaattcataatattccccagtttcaccattgaatccgagaactgattgaagaaagcaacagggtcagctgcatatttttggacaaggcttttggtttcgattccaaataggctggagtacaattcttggtctgaattaa

SEQ ID NO: 3539 - DNA, 379 bp, Gossypium hirsutum
  Clone ID: LIB3083-077-Q1-L1-E6
aaaatacttgccaagcttcatcaagaaacagctggaaactggtgccagcatagttagtggaacacgatatgtcaaaggcggtggtgtgcatggatggaatctgattcgcaagctaacaagtaggggagccaatgttcttgctcagactcttttgtggcctggtgtatcggacttaaccggatccttcaggctttatcagaaatcagtgcttgaagatgtcatttcctcctgcgttagcaagggatacgtatttcaaatggagatgattgttagggcttcaagaaaaggctatcacatagaagaggttccaataacttttgttgatagagtatttggaagttcaaagcttgggggatccgaaattgtagagtatctaaaa

SEQ ID NO: 3540 - DNA, 327 bp, Gossypium hirsutum
  Clone ID: LIB3083-077-Q1-L1-E7
caatttaaatcttaccacactccatcaaaaaacggctggcttctatataccaccatcaccaaccaaacacaaaatccaaacaacgaaactcttcatatcatccaatctacatcgcaatctaacacttacttttatcccattttctaactcaaactcttcaaaccccaacaatatcttacataacctaaaacctcagaatataacaaaaaccatctctcaaaaattccattctctattgccataccattcatgcctttttcaaatataacaaaacgataattttaaaaaaaaaaattattacatataacatatcactataacaaacct

SEQ ID NO: 3541 - DNA, 385 bp, Gossypium hirsutum
  Clone ID: LIB3083-077-Q1-L1-E8
cttttatctccttttctctttaaagaaagggtggttttcgatttcattttcaattttatatattttggattagatttggttggtcttagggaaaaacaaaggaaagggcaatgtcaaccccagcaaggaagaggctgatgagagacttcaagagactacagaagatccacctgctggtattagtggggctcctcaagataataatatcatgttttggaacgctgtaatttttgggcctgatgatactccttgggatggcggtacgttcaagctgactttgcagttcatggaggattatccaaataagcctccaaccgttcggtttgtctcacggatgtttcatccaaatatctatgcagatgggagtatttgtcttgatatttta

SEQ ID NO: 3542 - DNA, 270 bp, Gossypium hirsutum
  Clone ID: LIB3083-077-Q1-L1-E9
ctcttacttgttgaaggagtaaggacctctgctgtctatctctaagccctctgtaattctagctgtcttaagtgctctaatcgctgaagcctaagtaagccctaaaggcctttacagaccagtaacagcctaaacgccactattcctttattaacttcatagtctttttttgcacgagcacgaaagtaactagcttacatgttgatacttccttccccgcctatcactctggattagtggatttagatacctcgtccaatccagattttg

SEQ ID NO: 3543 - DNA, 389 bp, Gossypium hirsutum
  Clone ID: LIB3083-077-Q1-L1-F1
gctaatacttattttttgcatgcgcacataattagttatgcgttaaataatacaataggcgaatatcaggacaaccaaacgagggagacgcgagtatcacccaggcaacaaggaagtgaatgctttctttttgtccttttgcaatttcgaaatgttcaaatttcaacaattggttaaaaaattaaaaaccagagaaaatcactataactctctcgcaattattccaggctctatttgccattcccttacttgccttgggcaaatatcacaaaaggataattaaaaagataaaaataaatcaaaatcacagaggattttgaaaaaccttcttttcaaatccccacagttaatgagtgtttcaagctccccacatgcagcaaatgttgtcc

SEQ ID NO: 3544 - DNA, 269 bp, Gossypium hirsutum
  Clone ID: LIB3083-077-Q1-L1-F10
tttcacgagcgctttgttcctcgggcggggctcatggactgggagcctgctacgatggacagtgtccgaactggtccttacggccagattttcaggccagacaactttgtttttggacaatccggtgctggaaacaactgggccaagggccattacactgaaggatgccgagcttatcgatgccgttcttgatgttgtgaggaaagaagcttataacttttactgccttgcagggtttcaggtatgccactcattgggtgggggaactg

SEQ ID NO: 3545 - DNA, 240 bp, Gossypium hirsutum
  Clone ID: LIB3083-077-Q1-L1-F11
ctcatggactgggagcctgctacgatggacagtgtccgaactggtccttacggccagattttcaggccagacaactttgtttttggacaatccggtgctggaaacaactgggccaagggccattacactgaaggagcctagcttattcgatgccgatctcgatgttgtgaggaaagaagctgataactggtactgcctgtaaggtttcagttatgccactcattgggtgggggaactggt

SEQ ID NO: 3546 - DNA, 381 bp, Gossypium hirsutum
  Clone ID: LIB3083-077-Q1-L1-F2
gtttatcattatctccttacaggtgataagctccgctgggactctatcccatacaacgaaatctataatggaatgttctggaaagtcgagggaaagaggattaaccaaggagctgtcaatgaacatattgaggctaacccttctgcgaaacgtggtgataataatgaaggcgttgacgatcaaaccatcaacgttgttgacatcaactacactttcatacttcacgagcaacctgcttttgacaagaaccagtttgtgaccttcatcacagaggtacatcacgaacttgacacccaaattacagcctgataagcaagagtctttcacgaataacatatagggggctactaaatttttgatttcgaagcttaaagatctcca

SEQ ID NO: 3547 - DNA, 387 bp, Gossypium hirsutum
  Clone ID: LIB3083-077-Q1-L1-F3
gaaagttttgagtgcttcagaaagaaagaaaaagggcggtgcacgtgtttgtatattcgggggaaaagcatttgccacttatgttcaagccaagagaattgtgaaattcattaccgatgttggagctacagttaatcatgatcctgatataggtgatttactgaaggttatttttgttcctgactacaatgtgaatgtggctgaattgcttatccctgcaagtgaattatcacaacatatcagtactgctggaatggaggcaagtggaaccagcaatatgaagttcgcgatgaatggttgcattttaatcgggaccttggatggtgccaatgttgaaatacgagaagaggttggagaagaaaactttttcctcttcggggctaaagc

SEQ ID NO: 3548 - DNA, 389 bp, Gossypium hirsutum
  Clone ID: LIB3083-077-Q1-L1-F4
cttagattcattcttcaaaaaaatttcatcatcggctgcgtcacacagatccatcaagctttcattttaatttttccatttttttttcaaattttttggcgcgaaaaaagggcatgagagtcgaacgattccagggaaaggtttacgaggcggctgaactctcgccgccacggcctaattctccaattaccaccgaagatgataacgataacaacggcgaggagttgttcgtgcctcccttgaatttcgctatggtagataatggagttttcaggtctggtttccccgattacgccaattttagcttcttgcaatcactagggctccgatctattatatatctttgcccggaatcctatccagaagccaacaatgagtttttaaaggct

SEQ ID NO: 3549 - DNA, 384 bp, Gossypium hirsutum
  Clone ID: LIB3083-077-Q1-L1-F5
ctttgtttggctttcgcatcagctccatggatcgggcccagctcctcctcgtaggattacctctcttcctcttcgccaccgatctcttcagcctcttcactcctccgcccccaaagccgccgtcccatcaccatcaccaccatcatccccacctacccaaacctccactcaatcctgaaaccctagatatttctttacagaaacccagcgctattggaggaatcggctatggcagcacggttaatatcaatttctgcgcttcatgctcttacaggggaactgctgtgacaatgaagaagatgttagaagcccagtttcctggaattgatgtaatccttgataactatccaccatcattgccgaaacgtttgctttcgaaagtgg

SEQ ID NO: 3550 - DNA, 384 bp, Gossypium hirsutum
  Clone ID: LIB3083-077-Q1-L1-F6
gtccaatccaatttgttgaggaatcagacgaaggtttaggttatttgctgataatattttgaagaaaacatgacaactgctgctagaccgacatggcaacctgccaaaggtgggaatgaacaaggtggtactcgcattttcggcccatctcagaagtattcgtcgagggaccttgctgctcatactactctaaagcctagaaaggatgggcaggacacccaggatgagttgcagaagagaaacctccgtgatgagcttgaagagcgtgaaaggaggcatttctcgtcgagggacaagtcctataatgatgaaagagatcataggaagggaaaccatcttcttttggaaggggcgaaaagggaggctgaagaccgaattgttccg

SEQ ID NO: 3551 - DNA, 301 bp, Gossypium hirsutum
  Clone ID: LIB3083-077-Q1-L1-F7
gaagtttacttattcgagggggaaaaatgcttgttctttttaagttaaaaagattttaaaagacccaaaaaaagtaaaataaaaatgtctgttgcatagctgaaagagaagcacgccgtggctactgagaccgtgaataatctatgagaacgattaaagcaaatacttcaacagttgttcgacactgatgttgctacctatgcacgatcacaagggaagagtccagttacttttggtcctaccgatctggtttgttgcaagaccttgcaaggtcacactggcaaggtctacttcttggatt

SEQ ID NO: 3552 - DNA, 270 bp, Gossypium hirsutum
  Clone ID: LIB3083-077-Q1-L1-F9
cgctttgttcctcgtgctgtgctcatggacttggagcctggtacgatggacagtgtccgaactggtccttacggccagattttcaggccagacaactttgtttttggacaatccggtgctggaaacaactgggccaagggccattacactgaaggagccgagcttatcgatgccgttcttgatgttgtgaggaaagaagctgagaactgtgactgcctgcagggtttccaggtatgccactcattgggtgggggaactggttccggtatg

SEQ ID NO: 3553 - DNA, 390 bp, Gossypium hirsutum
  Clone ID: LIB3083-077-Q1-L1-G1
tgatctatctctcaacaaggaagtttacttttttgattggaaaaatgctttttctttttaagttaaaaagattttaaaagacccaaaaaaagtaaaaaaaaaatgtctgttgcagagctgaaagagaagcacgcggcggcgacggagacagtgaataatctaagagaacgattaaagcaaagacgtcaacagttgctcgacactgatgttgctacatatgcaagatcacaagggaagagtccagttacttttggtcctacggatctggtttgttgcaggaccttgcaaggtcacactggcaaggtttactccttggattggactccggaaaggaaccggattgttagcgcgtctcaggatggacgattaattgtgtggaacgctctaact

SEQ ID NO: 3554 - DNA, 222 bp, Gossypium hirsutum
  Clone ID: LIB3083-077-Q1-L1-G10
tttcacgagtttttttttttttgatgtctttaaatcagccgtcgcctgcaatctcctttcatcatctccgatggagaaatcaccctccttcctaattaaaagatctatctacactttccttcaatactatcactactttactgcatctgctcaaatcctaggttttccatactccctttcggttcttgtttctcaaaaaattgaaccactttctcctttttt

SEQ ID NO: 3555 - DNA, 270 bp, Gossypium hirsutum
  Clone ID: LIB3083-077-Q1-L1-G11
gttattgggtctagcgaagaacaatacgccaagacggtcaatgtgagcctggtcatcaggcggcgtatggacacggtggatggaagacttgaggaagttgcctgtcagagcttgcagcgcatcgcagatgttgattgtgatggtctcgtcttgcggcttgacccacttccactgctgctccgaattcaagatctgcaaagcggcgacaggctggcggaatagaagtgtgatacttccgagatcagtgtgacctggtgagtaaagctcgcc

SEQ ID NO: 3556 - DNA, 256 bp, Gossypium hirsutum
  Clone ID: LIB3083-077-Q1-L1-G12
ggtggacatgaatgaaacaaagtatttttcactaataattttgattaatttaattgacaacccatcttaaacaataaaagaatatttacaagaactaagggggaaaactcgagaagatcaaacggaaacaccattcaaaatcacccaaataaaacttaagtattaaaagaaaaaaaatcaagaaaaaaagtcaaattcatatatatatcaatataactcttttcaaattaaaaaaaaaagaagctttggggttttc

SEQ ID NO: 3557 - DNA, 393 bp, Gossypium hirsutum
  Clone ID: LIB3083-077-Q1-L1-G2
ccagtttctattttctaaaaacaaaactgaaaggggctggctgcggaggaaactgtggctgcagctctggttgcaagtgtggcaatggctgtggaggatgcaagatgttccctgacataatagagaagactacaactgagactattgttcttggtgtgacaactcagaaaatgcactttgagggatctgagatgggagttggggttgagaatggatgcaagtgtggagacaactgcacttgcaacccttgcaattgtaaataagagggggggaaaatgaacaacaaagagaagcagagaggcctttgtctttttaactaaataaattctattactttagtatgtatcagcaaatcttcatgaggatttggttcttaattatgtgtaatgtggg

SEQ ID NO: 3558 - DNA, 389 bp, Gossypium hirsutum
  Clone ID: LIB3083-077-Q1-L1-G3
ctgatttttattctactcaacaagaacatagcaggtcgggatatgtatcgaaggctgctccagtttcgtatgaaccagatgacctttacatggtgattgggcgtggttcagcagaagagactgccatgacatcttggactccagagattgactacgaaatgaacgcgttatctgctgaagccaccagcaggcatgctgatgttgaaataaccggcgccaatgaaaaggggcctgatgctaaaaaacttgggaaatctgaggggaaacttccgaataaagaagttcgttctagagtttcaaatggacctcttgccaagagcaagtctgatgtagtatcaaagagcaggaaaccaccagcatgaagcaaaaccatgatacggagaactaag

SEQ ID NO: 3559 - DNA, 391 bp, Gossypium hirsutum
  Clone ID: LIB3083-077-Q1-L1-G4
gttcatcgggaaaaatatcaactgcctcaattcgggagcgtccaccatgagctccccggggagtggaatattcagtggatttacaaagctatgcaagggactaacggtgatactaatcggtggccacattgttgttcggcttctcccttcttctgttatttaccttgctcttattccggccaggacaatcccttttggttggaacctcataacagctggttatattgaacaatcattacatggggtggttgtgagtgttattggtcttcttttcatggggaagttgcttgagcctatatggggttctaaggagttcttgaagttcatcttcatagttaactttctaacttctgtctgtgttttcactactgctatcgccttgtactacata

SEQ ID NO: 3560 - DNA, 375 bp, Gossypium hirsutum
  Clone ID: LIB3083-077-Q1-L1-G5
catcttttcaaatcgagggaaactcattggataggtgaatatgcatgagcatctgaccgctaaaactatgaatacatgacccagaggaagcctagaaaagcacctttttcgcaaggctggatgcaatcacacttggtcaacagggatcatgaatgatctaaaagcaccataaaggctagcacttctacatggggtcgacactcctattatttcatatgccataacacacatgaaacattttattgcatgcggactctaatgcatagctcgctgactgaccactcgcagacacactaccaacggtaaatccttcccacgtactaacacaagggaccggcacatacgcgcatgctactactgaatatataatgactg

SEQ ID NO: 3561 - DNA, 388 bp, Gossypium hirsutum
  Clone ID: LIB3083-077-Q1-L1-G6
tcacactttctagtattcctacttggaggggggagtcttaccactcccacatttggtacctatgagtcaccaaattatgggaaaccccctactcctgtattcaagcctcccaaggtgaaaccaccaccatatgaacctaagccaccagtgtatgaaccaccaaaaaaggagaagcctgaacctaagccaccggtttatgcacctccaaagaaagagaagcatggacccaaaccaccaatgtatgaacctccaaagaaagagaagcctgagccaaagccaccagtttatacacctccaaagaaagaggagcctaaacctaaaccaccagtatatgaacctccaaagaaggagaaacctgagccaaaaccaccgatttatacacctccaa

SEQ ID NO: 3562 - DNA, 393 bp, Gossypium hirsutum
  Clone ID: LIB3083-077-Q1-L1-G7
caatccacactattttttttccagactaaccacatcccattgtcccgtttacattttatgctttctcctcatacccctgtcatttcaactgagaacgcttaccatgagcagctattcgtggcttatataaccaacactgcttttgaaccctcttcaatgatggccaaatgtgacccacgacacgggaagtacatggcttgctgccttatgtaccgaggagatgttctgcccaaagatgtgaatgccgcttttgccaccattaataccaaacccacaattcaatttgtggattcgttccctacttgattcaagtgcggtatcaactaccatccaccaactgttgttccacgaagggaccttcccaatgttcataaaactttctgcatgaactcc

SEQ ID NO: 3563 - DNA, 254 bp, Gossypium hirsutum
  Clone ID: LIB3083-077-Q1-L1-G9
gaggtcttaaaatcagccggggaagggaatagcggttcatcatctccgatggagaaatcaaccaccttcctcattagaagatctatctacactttccttcaatactatcactacttcactgcaactgctgcaatccttgctttgccatactccctttcggttcttgtttcgcagttctttgtcccctcttctcctctgttaccatcaatccacaatcatctcaaagccattttcatggcggccgagtttcctcc

SEQ ID NO: 3564 - DNA, 384 bp, Gossypium hirsutum
  Clone ID: LIB3083-077-Q1-L1-H1
atgtgtctgagttccagactaacctggtcccatgtgcccgggatccactttatgctttcttcttatgcccctgtcatttcagctgagaaggcttaccatgagcagctatcggtggctgagataaccaacagtgcttttgaaccctcttcaatgatggccaaatgtgacccacgacacgggaagtacatggcttgctgccttatgtaccgaggagatgttgtgcccaaagatgtgaatgcggctgtggccaccattaagaccaaacgcacaatccaatttgtggattggtgccctactggattcaagtgcggtatcaactaccagccaccaactgttgttccaggaagggaccttgccaaggttcagagagctgtctgcatgatc

SEQ ID NO: 3565 - DNA, 131 bp, Gossypium hirsutum
  unsure (1)..(131): unsure at all n locations; Clone ID: LIB3083-077-Q1-L1-H10
tgaacaatcanattgtcaggttgttcaaaaggactatctaacaggtgttttatctaaaaccagtggcgaggattcataaccaaaccataacagagagcacgatcatcatggccatggatgctctcaaagtg

SEQ ID NO: 3566 - DNA, 269 bp, Gossypium hirsutum
  Clone ID: LIB3083-077-Q1-L1-H11
ctttccatctctttggtcgtttcataatcatgaacaggggaagcaagctaaagcagccaccccccttcccctttttctacaattattatctttattcatccattattctctctctgtgtctatgcttttgttcttctcatagccttctcagtgttgcctaaatggcgtctttgagctactttttcccttctggttaatggagtcctttggttattggatgatttgaggttatatcagttctaagttgtaacagatactagtagaaactc

SEQ ID NO: 3567 - DNA, 252 bp, Gossypium hirsutum
  Clone ID: LIB3083-077-Q1-L1-H12
cctcaattctccatgttgtctttctttctttttttactccttagtttttattttcatttgtttactttttgaacataaatctgatcgtagaggatctcattctcatggccaccactggaaacaagaacatcaatgctaaattagttctacttggggatgttggagctggaaagtctagcctggtgtcgcgctttgttaaaggacaatttgttgaatttcaggaatcaaccataggtgcagctttcttttccc

SEQ ID NO: 3568 - DNA, 390 bp, Gossypium hirsutum
  Clone ID: LIB3083-077-Q1-L1-H2
ttgaattattttaccaaatgaaagggatgccttctgggggtgatgtggagactggagatattccttcattgacggatctgggacttaacactgctgccacaatggctcaggatggcaggccatctgttagtgcttctatggctggtggcgagaatgaagcattgcaaaggcttaaaaagtttgcagctgagtgtaaagcacagccatacaaggggagcaaggatggtaaccaagaaaccatatatggtgctaacttttcttgcaaaatatcaccatggctagctatgggatgcttatctccccggttcatgtttgatgaactaaagaaaactgcaaataggaccgtttctgctacctcaaagaaaaatgatgggggcagtgactcacctg

SEQ ID NO: 3569 - DNA, 387 bp, Gossypium hirsutum
  unsure (1)..(387): unsure at all n locations; Clone ID: LIB3083-077-Q1-L1-H3
gagactttgagaaagctgctagcctttgcctttcgtttggtcttcttttgggataaaacattanctcaaatagctccggcgccgccgttaaaggtggacaacatcacttccatcctcgaaaaaggtggccaattcaccactttcatcaagctattgaaagccacacaggtggctgatcaactaaacaaccagctaagcacaccggaccctaacgacgggataacggtgtttgcaccgagtgacaacgcgttctccggactcaaacccgggacgttaaactcactttccgaccaagagaagcttcagttggttcagttccatatactcccgacgttaatgtcgacgtcgcagtttcaaaccgcgagtaaccctttgagaacccaagct

SEQ ID NO: 3570 - DNA, 379 bp, Gossypium hirsutum
  Clone ID: LIB3083-077-Q1-L1-H4
gatcattatattctatcacttcccaagtttcgtccgaacgtaagttttctggactttctgaccatcaactgtacgatgactccaacataaatgaagttgattcgaaccttgaaaactatgaaaaactctctggggtcactctcaatcattcgaaagaacttttagagaacggttgaattgatagcttatttgggacaaaacacatgtctactgctgatttcacctgtcagggtgcaatggctgctgagggctcatccattgaactggtcaatgcaatccaaccagcatgcaacaatagcccatcagctgattctgtgatgagcaataaaacggattcaattctgtgttttacgacaaagcatgcacattcaagcctctc

SEQ ID NO: 3571 - DNA, 381 bp, Gossypium hirsutum
  Clone ID: LIB3083-077-Q1-L1-H5
aaggattggtcaagggacaccaggcggtgtgagcgggcaaggtcttcccggggaccgtaaaggcgacggatcgaacaagaaggaaaagaagttcgagccagccgcaccccctgcgagggtgggtcggaagcaacgaaaacaaaagggtccggaagcggctgctcgacttcccacagtaaccccactcagcaagtgcaagctacggctgttaaagctggagcggatcaaggattatttactaatggaagaagagttcgtagccaatcaggaaaggcttaagccccaggaagagaaagccgaagaagaccgatctaaagtcgatgatttgagaagctccccgatgagtgtgggcaatttagaggaactcatcgatgagaatca

SEQ ID NO: 3572 - DNA, 388 bp, Gossypium hirsutum
  Clone ID: LIB3083-077-Q1-L1-H6
tcaggttatgggtatacctgtaggaaaacgtgctcgttacacagctcttggaggagtccgtccttctgcgtgcttgcctattactattgatgtcgggacaaacaacgagaagttgttaaacgacgagttttacatcggcctcaggcaaaggagggcaactggacaggaatatgctgaacttcttcatgagttcatgtctgcagttaagcagaattatggggagaaagtcctaatacagtttgaagattttgcaaaccacaatgcattcgagctgttggcaagatatagttctagtcatctcgttttcaacgacgacatacagggtaccgcatctgtggtgctggctgggcttcttgcagccctgaaattactcggtggaaccctcgct

SEQ ID NO: 3573 - DNA, 270 bp, Gossypium hirsutum
  Clone ID: LIB3083-077-Q1-L1-H9
taacgaatggagatgtcgggtagaagaaaaggattatcgaacttcgaatttgtttaagcagtcttgcagtaataacttactttgccttagccatgaatccaggcttctttgccacaactcatgaccatttgatgctgatattattactggtaagttagcccggcatttgcaggccaagataaaatagtcctgaaacagctaataatgttattcgtattcctctaaccatattttcatctatgtgttttgactagtgcttaagaattaact

SEQ ID NO: 3574 - DNA, 382 bp, Gossypium hirsutum
  Clone ID: LIB3083-078-Q1-L1-A1
aaaaatacaagaagctaggaacaaagcagctgcaaaccgcgacaagtacgttggcctgtcatctacttgcataacttataagtccagtgcatcctcatacagaagtggtggcttcaatggtggtggggataagtatggaggcataagtagcagaagagaaagtgacagctatagagacagttataaagaaagcgatccatatggggaagaaaagtttgatacagatacctacgtcaaatcgcatcgagggactgcatgtgagatccaagggaattcctctaaggagtctaggcatcatggcagcaaggattcaaagaaaaaattctcttcagagttgaatgattccaataaatatagccaaagcaccagcaccccttcaaat

SEQ ID NO: 3575 - DNA, 384 bp, Gossypium hirsutum
  Clone ID: LIB3083-078-Q1-L1-A10
tgtatcgatagcttactaaccgaaatggtttcaacggattggaaccgattttacgctaataagcctgaactcgccgcccgtcggaccgaagccattggatatcaggtcggccaccagctctctgaacggtacacaatggagaggccatgttttagcgatcatttagaagcaatcaaattcatctgtaaggatttttggtttgaactcttcaagaagcagatagacaatttgaagacaaatcacagaggtacctttgtattgcaagataatcgttttcgttggcttacacgcatgtcaattgatcaatcacccgaaaatggaacatccgaagagctttctatcatggctgacaacaagactatgcaaagcatgcatctctatttt

SEQ ID NO: 3576 - DNA, 375 bp, Gossypium hirsutum
  unsure (1)..(375): unsure at all n locations; Clone ID: LIB3083-078-Q1-L1-A11
taaaaggtttgtttttgagtaagtacatcatantgggctggtgctgtgcagacatcaagccgtgtggctttttcgtgtgatgagttcttgtggtattgctttgtattccttgaccaagttgttctagcccaaatggttttacctatacttaattctgctatcccactattaccggctgcatcttgtcacggaatttattacagattttttttgcattttttagtcagctttactgctttccagagaccatttgtgaataatagctattaagccatattttatatgcatagatttcaaaaaaaggagaatagcggcattcactatgccaacccatgagcatgaatcatcatctggtttggatgctttggccaatgc

SEQ ID NO: 3577 - DNA, 334 bp, Gossypium hirsutum
  Clone ID: LIB3083-078-Q1-L1-A12
ttctctttctattttttttaaccatggctcataactgggggcggtctttcttgcttgtcccacttttactcattactgtctcactagtaaatcgtttgtctcaccaactattcagcctcttgaccttctactctatacacaaacatacctcatcagatctctcacagctggcttcattaatactaaatgcaccaaagtgtttgaaactttcagaccctatatcgcgaaaggtacccgggacatgaaaggtctatgattccctgagacgattctcatttgcccttctaacttctatcagagtcctcaaagtccgcttcatcgttgttcacgaaat

SEQ ID NO: 3578 - DNA, 383 bp, Gossypium hirsutum
  Clone ID: LIB3083-078-Q1-L1-A2
cccacttcaccattggaacacttcatccaccgctctgcctttccccaattgcccttacccatatgacaaaagcctaggacaataatttcccttctttcttatcttctttctctctcaaaagccaaataaactaacataatactttatccatttcacgatctttccttttcactcctgtcccctcattattacccctttgcccccacttcttcataatgcagttcaaaacctctctctttattttttaaaaataatatcagattgatttatttactttttaaaaatatagtattatataatttacctagaagacaacaccctcctcagcgtcacatccaaacttattgccacgccatcctcattctatcttctgagttgtatca

SEQ ID NO: 3579 - DNA, 337 bp, Gossypium hirsutum
  Clone ID: LIB3083-078-Q1-L1-A4
cagccatggaaattgatgctaatattgcaaaatggttgtatccaagacttggttacggtgtttaccttcctccagctgaggaagctgctattgctgcattgaagagagcccttggcgctttgaacactcatcttgcttccaacacatttcttgttggacattttgtcacccttgctgacattatcatgacatgtaacctctacttgggtttctcccagatcatgactaagagttttacctcggagttccctcatgttgagaggtacttttggaccttggttaatcagccaaaaatcaagaagattcttggtgaagtgaagcaggcagtctctctacc

SEQ ID NO: 3580 - DNA, 387 bp, Gossypium hirsutum
  Clone ID: LIB3083-078-Q1-L1-A5
ctcttctaaatccttcatcagcagaacctcttgtctggccagcaactttaaagttcattaccgagcttaatgaagaggcaaaatcactattagaacaggccttaatggaggcaaaccgggaaagggaaaagaacatcttaaagggaacagcttactcacttccatcaccctcacattctgactcagggttagatgacagtgtttctgaggctagcgatactgaagtatgctgtatatgctttgagcagctctgcactattgaagttcaagactgtggccaccagatgtgtgcacaatgcacagttgccttgtgctgtcacaacaagccaaaccctgtgactgcaagcctaacaaccctggtatgccccttttgccggtgcaccattg

SEQ ID NO: 3581 - DNA, 371 bp, Gossypium hirsutum
  Clone ID: LIB3083-078-Q1-L1-A6
gggaaatctttcgcaaaagcagcgaatttatctcttttgattatatctaggaacgagttcaatggttcactgcctgaagaaattggtttagttgataatttagttcaactttctgctagcggcaataagttcggtgggtcattgcctaaaagcatagtgaagcttgatgggctagggattcttgatcttcatgggaatgagttggaaggggagttgcctagtgggattgagtccttgaaaaagctaaacgagttgaatttagctgataataagttttcagggaagattcctgatggaatagggagtttgtcagtgttgaactatcttgatctgtctaataatcagataactgggagagttcctttgggttt

SEQ ID NO: 3582 - DNA, 380 bp, Gossypium hirsutum
  Clone ID: LIB3083-078-Q1-L1-A7
aatttttcatcaaaaaatggcttcctcaatggaattttttttgcttgttttcgtctctgtttttgctctaatggcttctgccatggctgctgaagctccagctccaagtcctacctcaggaaccggctctatcactccctcattcgtctctgttttcgccgccgccgtggctctgctcttcggctccactctcgtgctctgagtatgatgcatcttgttacggcgtttccatgagtttacggctatggatgctctagaaagtgtttcggattttcatttttctatataattcattttaaatcggctttgaattttagttctagtagcagatctatatatatgaagtgaggtagttatgctatttgcacatcaaagattat

SEQ ID NO: 3583 - DNA, 313 bp, Gossypium hirsutum
  Clone ID: LIB3083-078-Q1-L1-A8
cataaatccatcactattacaagatccatagcaaaaatcatcactgtcgctgtttgttcatttctggggtttcttctattttttcacttcaaagctctctgtaaatggcagcttcggcatcatcatcatcaacaacaaaaacgataccggcaaggaaaaggggatggctcagtaacatctcctcaatttcatcacggatttatttcttccttatcttccttcagatcccacttttcaggatcccatgcagatccggaatgtgttcaactccaattcatgtcacatcttcccagttgatcgcaagtgacatctt

SEQ ID NO: 3584 - DNA, 382 bp, Gossypium hirsutum
  Clone ID: LIB3083-078-Q1-L1-A9
caagaacttatcttactttgttgaatggatcccgggcaatgtgaagtccactgtttgtgacatccctccaatcggcttaaagatggcatccacatttatcgggaactctacttcaatccaagagatgttcaggagggtgagtgaacaattcactgccatgttccgtaggaaagctttcttgcattggtatactggagaagggatggatgagatggagttcacagaagcggagagtaacatgaatgacttggtttctgagtaccaacaataccaggatgcaactgcagatgatgaatagtacgaggaagaggaggaatactatgcagaggcttaaaatctaatggaataatttggatgtttttcgttgtgttttggattgggc

SEQ ID NO: 3585 - DNA, 383 bp, Gossypium hirsutum
  Clone ID: LIB3083-078-Q1-L1-B1
tttaaaagcctcatattcttctgcatttaatggaattgagatacttcaaaggagggtatcattggagagaaatgagtctggtttatcattagatggaagcattgttagcgaaatcgaaggtgaaagtgtggttgatcggctgaaacgacaggttgagcatgacaggaaactattgagtgttttgtataaggaattggaagaagaaagaaatgcgtctgcagtctctacaaatcaagcgatggccatgattactcgactgcaagaagagaaggcaacgcttcaaatggaagccttgcagcatctgaaaatgatggaagaacaagcttagtacgatttggaagcactttaaaacacaaacgacctttttgctttataagagaaag

SEQ ID NO: 3586 - DNA, 382 bp, Gossypium hirsutum
  Clone ID: LIB3083-078-Q1-L1-B10
aggaagtgtatggaaccagttgagaaatgtttgagggatgctaagatggacaagagcactgtccatgatgttgttcttgttggtggttccactagaattccaaaggtccaacaacttttacaagatttcttcaatgggaaggagctttgcaagagcatcaaccctgatgaggccgttgcatacggtgctgcagtccaagctgctatattgagtggtgaaggtaatgagaaagtgcaagatctcttgctcttggatgtcaccccattgtctctcggtttggaaaccgctggtggtgttatgaccgttttgattccaaggaacaccaccattccaaccaaaaaagaacaagtcttctcaacctactccgacaaccaacctggag

SEQ ID NO: 3587 - DNA, 385 bp, Gossypium hirsutum
  Clone ID: LIB3083-078-Q1-L1-B11
gtgaccgcaagatctccgtcaagacaaactggcgaaggcccaagggtattgactcccgtgttaggaggaagttcaagggatgcactttgatgcccaacatcggttatgggtcagacaagaaaacacgccactatcttcccaatgggtttaagaaattcgtggtgcacaatgtccaagagctagagcttctcatgatgcacaacaggacatactgtgctgagatagcacatgatgtttcaacgaagaagaggaaggaaatcgttgagcgagcagcacagttggatgttgtcgttaccaacaaattggctaggttgcgcagccaggaggacgagtgaaggtcggttcttgaatgttgattttgctctttttaatatgatattttctt

SEQ ID NO: 3588 - DNA, 384 bp, Gossypium hirsutum
  Clone ID: LIB3083-078-Q1-L1-B12
ctcaatgttcaacttctacggatttccattgctttgtgggtgttctatatatcatgcaggaatacatatttgtgtatatacatagagcttattctgcaatcacttcacaatctaataagctttttgccaaggggcgtgttgtataattgtacaacttcacccagtaaaagccaaaataaatggttgcgatcttaatttacttgaaagacaagaatacggagtgacgggttggatatagagaaaatgatttgtttctttcatatgtttctgatgtgttcatcagctgcaaatgacctccacagagagtttcttcatcacattaagacacgggtctcctccaaacatttcgggtgctacagtcactgtgcagaagatctgtccaac

SEQ ID NO: 3589 - DNA, 327 bp, Gossypium hirsutum
  Clone ID: LIB3083-078-Q1-L1-B2
ctacccccttttcgggaaaaatctcaaaaaaattattttttctttttttagtcgaataaaattaaatctaagggcttcgatcttataattttaccggcccctttattcatagaaaataccaaaaactcgtacatcatccgaggtattcaaccctgaaaacacctatcccaaatcaacatgtaaattcttcaccgttgccaacggataacggttcattccttaatactcctcctcatccccttcgtctctctcaccagactcagcgcccacttctttataatttttttccagcgcagctagaactttacgtgcctcaaaaaacttttc

SEQ ID NO: 3590 - DNA, 382 bp, Gossypium hirsutum
  Clone ID: LIB3083-078-Q1-L1-B3
ctcgtgccgtgaaaattcattttctttggactttactctccgaaatccgagtcctaggaaagatgcgtgagattcttcatattcagggagggcagtgcggcaaccagatcggtgccaagttttgggaggtggtttgcgccgagcacggcatagattcaacgggacgctatcaaggagacaatgatttgcagctggagcgcgttaacgtttactacaatgaagcgagttgcgggaggttcgttccacgagccgtccttatggacttggagcctggcactatggatagtgttagatccgggccgtacgggcagattttcaggcctgacaacttcgttttcggccagtccggtgcagggaataactgggccaagggtcattacac

SEQ ID NO: 3591 - DNA, 371 bp, Gossypium hirsutum
  Clone ID: LIB3083-078-Q1-L1-B4
atttcacaaacccccaaaatggctaacctcatgatcatggcggttctcctggttgcggtgtcgacggcggcaaccgttacggacgcgcaagcaacttgtgcggcaaagctagtgtcttgttctcgttacatcctaaacaccaccatcaaacctcaagatgactgttgtaacccgatcaaggaagaggtaaccaacgatctttcctgcctttgtaacctctacaaagaccctaaagtttttgcttctttgaacatctccaccgcgcaagctctcaatgtcactcgtgaatgcggcgtcactactgatctaaaccgttgcaacagcaacagcacttctacaagctctgctacatccccaccaggaggacgatc

SEQ ID NO: 3592 - DNA, 377 bp, Gossypium hirsutum
  Clone ID: LIB3083-078-Q1-L1-B5
gttgggttattgaagctagctgctccacattttctatggcttcaaagcttcttttgattgctgtctttgttcttgatctcattgcttttggtttagctgtggcagctgagcaaagaagaagcactgccaagattgtccaagacagtgaagttaattataactattgtgtctatgactcagacatatcaacaggctatggtgttggtgcatttttgttccttatggttagccaagcccttgtaatggctgcaagcaaatgcttctgctgtggaaagggtttaaaccccagtggttcaagggcctgggcagtcatccttttcatagtctgctggttgtttttcctgattgctgaaatatgcttgctggccggatcggtg

SEQ ID NO: 3593 - DNA, 351 bp, Gossypium hirsutum
  Clone ID: LIB3083-078-Q1-L1-B6
accagtgatttctatggcgatggaaaccctagatgacgagaaaccggaggaagatgaggtgatagataaataaaatgaagagggaagtgaaaagggttgtggtactcagcttaaagatattcccaatggcactttatgtgatgaatcctaataagttcagggcatgtgagtttctcatatggttccatgaatgagagcgtggtgataagataactgtctttgctgacaatctttttgcattggttgagtatgcaataaagctacgcaagcctataatctatggtgctaccagccatcttgagaggactaaaattctccaggcattcaagactagtcgtgatgtgaacacta

SEQ ID NO: 3594 - DNA, 382 bp, Gossypium hirsutum
  Clone ID: LIB3083-078-Q1-L1-B7
atggcttactccgttaggtcgaggagaatttggagtaaggcaatgctttggaagcttcgaagccgatcttatcgtcgtcaagacccttgttcaggcagaagatctgggaagactaatcaagccatcatgaaaaaatcaagtaacgagaatactacaacaagaagggaagatggggttgggtttgttgaagaggcagatgaactaagacagcttgttccaggtggtgaaaccatgaatttatgcaacttgttggatgagactgcacattacataaagtgtcttaccacccaggtacaggtgatgaaaaaaattgcggatttctactctttctgagtaattatatataaatatattcttatcacttcaatatatataaaataaa

SEQ ID NO: 3595 - DNA, 370 bp, Gossypium hirsutum
  Clone ID: LIB3083-078-Q1-L1-B8
attttcttcttcaaaaatgtctacaaattagctaccattactcttctcttttgtttttccttgtttaaaactccaaagcttcttcacctatctcctgctgcttttcattaacaacatgtctgctaaaacaaaatctgggttatttgaaactcctaccaaggtttcacctgcaacgcctaaagtggcgagcaaagtaagcaggggactggctaaaccagaacccgattcaccctctcccttgccaagtactcgccattcagttgagcgttcaccacgaacatccctcaactcgaagcctacaattgatcgtagatcaccaaaggttgccaccacgcctgataaaccacaaacacgggtggctaaaggatca

SEQ ID NO: 3596 - DNA, 389 bp, Gossypium hirsutum
  Clone ID: LIB3083-078-Q1-L1-B9
gagtccttttttttttttccttcattttcttagcggatgtcgggcatctaaaaataaactaccacttttgttcacttctttataccaaagttttgcttccttgattttcaacaccgttttggatatgcgcttttcttttagcttcaaattgagttggatttgtagctaaaaaagaaaagaaaatggcatatgatagtaagcaaaaaaggaacgttgagcccgtaaaggttcaaacttctccatcatcagaagaaagatcatacatcaatctcccaaacttttttctttcagtaatgctaaaatatgtgaagcttggctaccattacattatctctaacgctatgtatttgaagttggagcctctcctaagcattgctttagttcatttt

SEQ ID NO: 3597 - DNA, 385 bp, Gossypium hirsutum
  Clone ID: LIB3083-078-Q1-L1-C1
aaggcatcccgccagaccagcaacgtctcatcttcgccggaaagcaactcgaggacgggcggactttagccgattacaatatccagaaggaatcgactcttcatctggttctacgtcttcgaggtgggatgcacatcttcgccaagactttgaccggtaagaccattactttagaagtggagagctcggatacgattgataacgtgaaagcgaagattcaggacaaagaaggaattccaccagatcagcaaaggttgatttttgctgggaaacagctggaagatggaaggactttggctgattacaatattcaaaaggagtccactcttcaccttgttcttcgtcttcgtggtgggttctaagccttaaggtctttcttaatgtg

SEQ ID NO: 3598 - DNA, 412 bp, Gossypium hirsutum
  Clone ID: LIB3083-078-Q1-L1-C10
agcggatccctgcgactttacgattctacaccaggtgttttttttcactacttgttctaaggctcgtgctacgtttctcattataaatgtggagaaatcttgttctactttccattccatgcaacactaacttttagattccctttccattgcactgctctttctttctatataattagtcactcctgttctagatgaaggttctctccccaattcttgcttgcctagcgcttgctgaggtggtaagccatgctgctctctcacctgagcaatattggatctataagctgtcaaatactccaatgccaaaggctgtcaaagaaattctacatccagaactgatggaggagaaaagcacctctgtaaatgtaagacgtggtggtgtaaacgtcaatacatgaaaagggaagcc

SEQ ID NO: 3599 - DNA, 384 bp, Gossypium hirsutum
  Clone ID: LIB3083-078-Q1-L1-C11
gagattactccaaaatatgtaaacttgcagataaatgtgtcatggcatcctcaggatttcaagctgacgtgagggctttacaaaagcaactggcagctaggcacttgatttatcagcatcagcacaacaagcaaatgagctgccctgcaatggctcaattgctttccaacacactttattacaagcgtttctttccttactattcttttaatgttttgggtggccttgataacgaaggaaagggttgtgtcttcacatatgatgctgttggttcctatgagaaggttggatacagttctcaaggttctggttcaacgctcatcatgccgttcttggataaccaactgaagtctcccagtcctcttctattgcctgcccaggatg

SEQ ID NO: 3600 - DNA, 385 bp, Gossypium hirsutum
  Clone ID: LIB3083-078-Q1-L1-C12
aaggacttttagacccttctctttggtgaaaagccggtcacagttttcggtatcagaaaccctgaggaaatcccatgggctgaggctggagctgagtatgttgttgagtctactggtgtttttactgacaaggacaaggctgctgctcacttgaagggtggcgcgaagaaggttatcatttctgctcccagtaaggatgctcccatgtttgttgtgggtgtcaatgagaaggaatataagcctgaccttaacattgtctccaatgctagctgcaccaccaactgtcttgctccattggctaaggtgatcaacgataaatttggcattgttgagggtcttatgaccactgttcattctattactgctacacaaaagactgttgatg

SEQ ID NO: 3601 - DNA, 373 bp, Gossypium hirsutum
  Clone ID: LIB3083-078-Q1-L1-C2
cggcactatttacactgatggtcagcttgctgtttatcaaatcgatcaagttcttcaaccattgcaaatatttgcacctaggcctccagctccagcaccggcaccggcaaagtcgaagaataagaaggctaccaccgttgctgatagccccgatgttaccccagctgataactccaaagcggccaccttgcaaaatgttggtttgtttggagttgctgctctagttattgcactttctttgtgaccatgaaaatggagaaaagaagaagacagtgattttgatggtgatcaagatggcgagtgttttttattttttcaataattatcatttaaaaaatttatgttctgtatgaagattgaattttgagtttgt

SEQ ID NO: 3602 - DNA, 380 bp, Gossypium hirsutum
  Clone ID: LIB3083-078-Q1-L1-C3
tgggggtagaaagattcccgatggtgtttccggtaataagtgctcggttccggggcacaaacgggaattggtccaaaaagcagagccgcttattgaggaagagccattgaagccatggattaccttgaaaagaaatattaacaacgtgaagtatttgccatcaatggttgatataagtttcaagaaccgatacttgtatgttgatgttggggctaggagttacggttctagtattggaagctggttcaggaaacaataccctaaacagaacaagacctttcatgtatatgccatcgaggccgacaagactttccatcagcagtatgaatcgaagaagaagacggtcacgctgttgccgtatgcagcatgggttaagaacg

SEQ ID NO: 3603 - DNA, 380 bp, Gossypium hirsutum
  Clone ID: LIB3083-078-Q1-L1-C4
gctatatccgctgcttcgaagcggtccggaagtggaaggtatgtgatatacgttaaggcaggcacatacaaggaaaacgttgagataggaagcaagctgaaaaacatcatgatggtgggcgatggtatagggaaaactataatcacagggagcaaaagcgtcggaggaggatccacaacgttcaattcagccaccgttgccgttgttggagatgggttcattgctcgtggcattacgttctacaaatgcagcttcgaagggtaccaagacactctttacgtccattccgaaaggcaattttacagagaatgtgacatctacgggaccgttgattggatattcggcaacgcagccgttgtgtttcaaaactgcaacatata

SEQ ID NO: 3604 - DNA, 364 bp, Gossypium hirsutum
  Clone ID: LIB3083-078-Q1-L1-C5
agctggagtacaaggtactgaaatgaatgatgttactattactgttgatcaagaccacggaagtttgctggctggggagatattgaagcgtaattatagttcctggctatccggcctttttaacaaagacaacaacagtgtggaagttgcacacttccatggcttacaagaagcattggacaaaactcgctatggggaaacaccagactacctcaaaggtatcgcggctctaatcgaagtggatcgtggaaaagctactaagtttggccataaaaatattgaagttttggtttgtgccgcaatcaaagagatggaagactggcgtacacctaaggattccggctataaccagttgaaaaagtgg

SEQ ID NO: 3605 - DNA, 346 bp, Gossypium hirsutum
  Clone ID: LIB3083-078-Q1-L1-C6
gtccgcgttatcgatggactcttttagtgacgccgggagcgctaactcgataattgatcaaggcgatgatccggagacggttaagattaagtcgcgtcaatgggctcaggtggtggcatgttcggtgcggcagttttcacgcggaccaaagtgatttattgtggaggttaacatttcttgagtactttttgtttagaggcgataacaatttttgatatagtaatgagtttttagttctaaactttaattttgtattctaagacatgatttacatttagggtttagaaatactagaaaattttaaagtgtgctggattggattggtgttgaattttaatatttttta

SEQ ID NO: 3606 - DNA, 379 bp, Gossypium hirsutum
  Clone ID: LIB3083-078-Q1-L1-C7
gttaaaaattcttttctttctatttggttaaccatggctcataacttttgtcatcctttcttccttttccaacttttactcattactgtctcactaataatcggtagtcacaccgtctcgtcagcggctcgacatttattccagacacaaacaacctcatcagagctgccacaattggcttcaaaatacgaaaagcacaaagagtctgaatacaaacaaccaaaatatcacgaaaagtacccaaaacatgagaagcctaaaatgcacaaggaggaaaaacaaaaaccctgcaaacatcatgaagagtaccacgagtcacgcgaatcgaaggagcacgaagagtacgataaagaaaaacccgatttccccaaatgggaaa

SEQ ID NO: 3607 - DNA, 311 bp, Gossypium hirsutum
  Clone ID: LIB3083-078-Q1-L1-C8
tagtgtatccttttctgagctttgataaaccagaaatgggtgtgaagaacaaggatttagaaagttccttgatggtatctatgttagtgagaagggaagggtcgccgaagaagaatgaatactatctccctgaatcatagttatagtgctgctttatttttttgtcgtagtaatattttgggactccgttttttgtcttgtctttcctgtttccatggattgcaactgttacagagtacaaggatgttatctttatttgtttggagaattttggatatctgtttaatctttagtactctaattattccccc

SEQ ID NO: 3608 - DNA, 389 bp, Gossypium hirsutum
  Clone ID: LIB3083-078-Q1-L1-C9
cacacaagtaaagcattagcaaccatagccatggcttcctcaccaaaactcttctctatgtctatcctcttcctttttgccctcttctccatgcaaatccatgctagagagtacttcagcaaattcccaagagttaacatcaatgagaaagagacaacaaccagagagcaaaagcacgagaccttcgttccccagaccacccaaaagccagaagaacaagagccaaggttcattcctgaaacccaaaatggttatggcctttacggccacgagtcaggctcaggctcaggctcaggctcaggctcaagccggcccagtttcaccaccaaagaaacctatgaaccctatgtcacccctgttagattccaccctgatgagccctataacag

SEQ ID NO: 3609 - DNA, 381 bp, Gossypium hirsutum
  Clone ID: LIB3083-078-Q1-L1-D1
gaacactagccactgtcacagagttcatggtgaatggctctcttagacatgtcttgcttagcaaagacaggcaacttgatcgtcgtaagcgactcattattgccatggatgcagcatttgggatggaatatttacattcaaaaaacattgtgcattttgatttaaaatgtgacaacctgcttgtcaacttgaaagatcctgtacggccaatttgcaaggttggggacttcgggttgtcaaagataaaaaggaataccttggttactggtggtgtgaggggaactcttccatggatggccccagagctgttgaatggcagtagtagcaaggtttctgaaaaggtcgatgtgttctcatttggtattgttctatgggagattc

SEQ ID NO: 3610 - DNA, 328 bp, Gossypium hirsutum
  Clone ID: LIB3083-078-Q1-L1-D10
tatttctttttcttatagagatagagctttattgtgggtgggaattatcccggcagctgaaaacccaaattttttgctcgataaatcatccttagaaaacctttccagattggcaagcacccttgctttgcttgcccaagctgttttcgaggataaaataaatggtgcttttggcctgggaaatttgaaggataatgtttttgattcctgaaccataataaaaattgggacctcctttcctgtggccaatgttaaatgcctgcctaaacttaagcaaattcgtctgaatcctctgcgttgccctctacacaaaggtcaaaaactattt

SEQ ID NO: 3611 - DNA, 349 bp, Gossypium hirsutum
  Clone ID: LIB3083-078-Q1-L1-D11
caggtactaattggttgcgtactctccaatatactgaaataaacatacatttttgcacaacatttaagaataattgattttgttgtttaaacagcgacgacgataacactctacaacaaatgctcacatccagtttggccagggattcaacccagcgccggcaagccaattttagcccgcggtggattcaaactcccaccaaacaaagcctactccatgaatctacctccgttatggtccggtcggttctggggtcgacacggttgttcctttgacgcctcgggtcacggccgttgcgcgacaggtgactgcggcggttccttattctgcaacgggctcggcggaaccc

SEQ ID NO: 3612 - DNA, 378 bp, Gossypium hirsutum
  Clone ID: LIB3083-078-Q1-L1-D12
ttttacttttcttccccaaatggcaaaatgcgatggtgcactagaaacacggaatccaatatccaaaaatacctgcaaacattgacaaacaagacgcgtataaggaacataaaaatgaagagtatcactaatcaccctaatctaaagagcacgaagaatacgagaaagaaaaacccacattccccaaacggaaaaagcctaatgagcacaaaaaacacccattcaaatatccataaatacttgtctacacagaaaagcacgataagagtaaagaacataaacattaagagttccacaagtcacactaatcgaaagatcacgaagagtacgagaaagaaaaacccaatttatacaaatggaaaaagcctaaaagagcat

SEQ ID NO: 3613 - DNA, 381 bp, Gossypium hirsutum
  Clone ID: LIB3083-078-Q1-L1-D2
gctagatattactttttcggaaagtgatctggattcgatggattacattaccatgcctacaaccacacagttggcttcttatatgtcttcatatcacagaagacaagcttttgtgatgtatttgcaagccaaccctgggggcattactatatttggatggacggttgatcgcggacttatcaacacaatatttttccttgaacttacactggtgaccttcgtacttggacaaaccgtagtcttcaattctgcatgataaaatctccgatcatcaaatcagttttttccagagatcacaccttcaaaatgaggttttttttttttcagatttacagaccgattgattgttcttagatcatagcattgttgaaatgactcgac

SEQ ID NO: 3614 - DNA, 371 bp, Gossypium hirsutum
  Clone ID: LIB3083-078-Q1-L1-D3
aaaaaccaatcaaaagcaaacttggaattgcttatctattttaatttacatcccttaaatttacacttaaacagcaaacccttttacaaaatgcaatcactcaaatcaatccactaattttaacttaaaaaatgaaaaagaaaaatcaagaaaaaaatgtactgcaaacttagattaccaagagaaatatgaaaatgtaaaaaaatctcaccaactccaattttgatggtatgcaaaacatgtcagctagcaatttacacacagacatgacatgaacatgtcacacaacctctgcaataatgttttaaaatcatgtcctatattattatgttctaaggagaaaacaatctctggaatactttacaattcat

SEQ ID NO: 3615 - DNA, 381 bp, Gossypium hirsutum
  Clone ID: LIB3083-078-Q1-L1-D4
aagaacttatacaaattgaggtatttggaacttggccaatggccttactatcagcaaacgagagacgggttatgattgaaggacctgtttgcgattcgtcacaagttataggatggcacctaaggaagatgaataaccagacagatgcagaaacagatgctgatatgaaacctcctattcatatatcaagttttgcatttaacagttcaatcctttgggaccctgagagatggggacgtctcacatcggtccaaggcacttcacagaactcactgaaatttgtgaaacaaattgtaatggaagatgagggcaagttaaaaggtatcccaccagaagagtgctcccaaataatgctatggcgtcttcatttccccattggag

SEQ ID NO: 3616 - DNA, 375 bp, Gossypium hirsutum
  Clone ID: LIB3083-078-Q1-L1-D5
cttctttcttcttcttcttattcctttattgctttggagaatttttcttaatcgaaaatgagagagtgcatttcgatccacatcggtcaggccggtatccaggtcggaaacgcttgctgggagctttactgtctcgagcatggaatccagcctgatggtcagatgccaagtgacaaaactgtcggaggaggtgatgatgcttttaacacctttttcagtgaaactggtgctgggaagcacgtccctcgtgccgtcttcgtggatcttgaacccactgttattgatgaagtgagaactggtgcttaccgccagctcttccacccagaacaactcatcagcggcaaggaagacgcagctaacaactttgcccgtggt

SEQ ID NO: 3617 - DNA, 376 bp, Gossypium hirsutum
  Clone ID: LIB3083-078-Q1-L1-D6
ggaagctgtttcagtcgtcgtcgccagcttctacggcgaatatcgtcgtggcccaagatggttcagggaattataagacgataaaagacgctctatccgctgcttcgaagcggtccggaagtggaaggtatgtgatatacgttaaggcaggcacatacaaggaaaacgttgagataggaagcaagctgaaaaacatcatgatggtgggcgatggtatagggaaaactataatcacagggagcaaaagcgtcggaggaggatccacaacgttcaattcagccaccgatgccgttgttggagatgggttcattgctcgtggcattacgttcagaaacaccgctggtcctactaaccatcaggcagtggctctacgttc

SEQ ID NO: 3618 - DNA, 372 bp, Gossypium hirsutum
  Clone ID: LIB3083-078-Q1-L1-D7
tagcgagttttttctttttccattgaagaaattggtgggtgtgtttagccattatttcttgtttgaaattggttgaacatatcgtcgtgttgcttttttgaaggcttggtgaaaatggacaaaaatttgatggataaagttagtgcctttggtgaacgcctcaaagttgaaggagctgaggtgggtagaaaggtgagtgctggcatgagttcaatgagcttcaagataaaggagctctttcaaggccctaacccaactgatcaacttgtcgaggatgccacctctgacgccctcgatgagcctgattgggccatgaattttgatatttgtgacatgataaaccatgaaagagttaatagtgtagatttaatc

SEQ ID NO: 3619 - DNA, 381 bp, Gossypium hirsutum
  Clone ID: LIB3083-078-Q1-L1-D8
aagcaggctgttgttgtttcgtctcatgaagatcccgagagtggtgacgatgaaatcatcgaggaactcaaagtggagaagacagaagaagatagtggcgatgtaaaaggttcggttccaatcaaggagatgaaaaatcaagctgtcacggagaacggacggaaacggaaaaggtcaatgcaggcgaaagaaaatgggattacgacaaagttaagcaccaatgattcgattaaacctgtggggtatcgacaaaatggtagcaggcgcaaaaacaaacctcaacgggctgccgaagctattgttgagtgcaaatgacgaggttttgaataaccgtcaccgtgtcttttaccttattttttcgtactaaaagtaatgcttgtt

SEQ ID NO: 3620 - DNA, 385 bp, Gossypium hirsutum
  Clone ID: LIB3083-078-Q1-L1-D9
aagaaaccttcccttccagtgaaacccggttcaccacccgggcttccgatttacgacgcaatggctccaggtccatcactagccccggcaccagctccaggacccggtggacctcaccatcatttcaacggaatgaggcaagtcaaagatttcattcaaacactaattcaatatggtgggtacaatgaaatggctgatatattagtgaatttaacatcattagccactgaaatgggtcggttagtttccgagggttacgttttaactgtattagcacccaacgatgaagccatggctaagttaaccaccgatcaattaagcgaacccggtgcaccggaacaaatcatttattatcacataatcccggagtaccaaaccgaagaaa

SEQ ID NO: 3621 - DNA, 379 bp, Gossypium hirsutum
  Clone ID: LIB3083-078-Q1-L1-E1
gtttgttgcatcgaccgtctcaactctgtgtcttgcctgacaaaagctggccagctggaaactccaatcgctgccaccaaattccacatttgatagttgggacacctagtctcaccgtttaagacaccccaccaagctgatcctaatataaaacagcgatgggttcccttctaagctccaacaagttaagccaggaagatacccaaatggcacttgacaaggtcaagcacatcgtttcctccacccccgttgttgtcttcagtaaaacctattgtgggtattgtaatagggttaagcagctgtttgctcagttaaaagcttcttacaaggccattgaattggatcaagaaagtgatggtggtgaaatgcaagcagctct

SEQ ID NO: 3622 - DNA, 382 bp, Gossypium hirsutum
  Clone ID: LIB3083-078-Q1-L1-E10
gaaacctgttccttatccaccgatttatacacctgcgaagagagagaaacctgaacgcaaaccacccttatatgaaccttcaaagaaagggaagcccgaaccaaagccaccggtttatacacctccaaagaaagagaaacctcgacccaaaccaccagtgtatgaacctccaaaaaaacctccaatgtacgaacctaagccaccaaaaccaccggtttatacacctccaaagaaagagaaacctgtacccaaaccaccaatgtatgaacctccaaaaaaacctccaatgtatgaacctacaccaccgaagccaccggtttatacacctccatagaaagaaaaaccagaacccttgccaccaatgtatcaacctaccaacaac

SEQ ID NO: 3623 - DNA, 385 bp, Gossypium hirsutum
  Clone ID: LIB3083-078-Q1-L1-E11
gttgcaaggcaagccagatctgatcatcggaaactagagcgacggcaatatcgtcgcctccttgctcgcacataaattaggtgtcacacagtgcaccatcgcccatgctttggagaagacaaaatatccagattcagatatctattggaagaagcttgaagacaaataccatttctcttgccaatttacagctgatctttttgcaatgaaccatacagatttcatcatcaccagtactttccaggaaattgcaggaagcaaggacactgttggtcaatacgagagccacactgctttcactcttcctggtctctaccgtgttgtacatggtatcgatgtgtttgatcccaaattcaacattgtttcccctggtgctgatatggag

SEQ ID NO: 3624 - DNA, 407 bp, Gossypium hirsutum
  Clone ID: LIB3083-078-Q1-L1-E12
tggatccctctgctgcatgaatttagctcgagcgtcttttttcttgcatattgaatccattagagaaggtgaggaacccattatttttgtcccttattctgttcttgtgaattatggcaatggttggaatttgcaaactgtttctgaaatggattttcctggcattggaaaaggcaaacatgttcggggatttccgacacatattcctaatggaaagaacgttgatcttactaattctcgcaaaatggtttcaaaaccaggaataagttttctttacattgcaaaagtttcactagcttttgttttgatatttatattgcctgtagttttcatgttggctcttgacaatcttcctaaactaattttgctctttaactcttccatgtaactatgtcagatttgaaaaa

SEQ ID NO: 3625 - DNA, 384 bp, Gossypium hirsutum
  Clone ID: LIB3083-078-Q1-L1-E2
cccaaaccaccagtgtatgaacctccaaaaaaacctgcaatgtacgaacctaagccaccaaaaccaccggtttatacacctccaaagaaagagaaacctgaacccaaaccaccaatgtatgaacctccaaaaaaacctccaatgtatgaacctaagccaccgaagccaccggtttatacacctccaaagaaagaaaaaccagaacccaagccaccaatgtatcaacctcccaacaacccaccaatatatgagccaaaaccacctaagccaccagtttatgcaccaccaaaggaagaaaagccaaaacctaaaccaccagtttatgagcctccggcacatgagccaccatacggtcactatccaggacatccacctttggggaag

SEQ ID NO: 3626 - DNA, 381 bp, Gossypium hirsutum
  Clone ID: LIB3083-078-Q1-L1-E3
gagaaacgattcggacaatcaccggttttcattgcctcaactttgatggaaaatggtggccttcctgaaggaactaattccacatcactgattaaagaggccattcacgtaattagctgtggttatgaagaaaaaactgagtggggcaaagagatcggatggatttatgggtcggtgacggaagatatattaacaggtttcaagatgcattgtagagggtggaaatcggtttattgtgtaccgaaaagaccggcattcaaagggtccgctccaatcaatctctcggatcggttgcaccaagttttgagatgggcacttggttctgtagaaattttccttagtcgtcactgtccactttggtatggttatggtggaaaactg

SEQ ID NO: 3627 - DNA, 389 bp, Gossypium hirsutum
  Clone ID: LIB3083-078-Q1-L1-E4
cgtgaatcgaaggagcacgaagaatacgagaaagaaaaacccgagttccccaaacgggaaaagcctaaagagcacgagaaacacgaagtcgaatattcggaaatacccgagtacaaggaaaaggaagataagagtaagaaacataaagatgaagagtgccaggagtcacacgaatcgaaagagcacgaagagtacgagaaagaaaaacccgatttccccaaatgggaaaagcctaaagggcacgagaaacataaagccgaatatccgaaaatacctgagtgcaaggaaaaactagatgaggataaggaacataaacatgagttcccaaagcatgaaaaagaagaggagaagaaacctgagaaaggcatattaccctgagtgggtaaaaa

SEQ ID NO: 3628 - DNA, 366 bp, Gossypium hirsutum
  Clone ID: LIB3083-078-Q1-L1-E5
tcgagtttttttttttttttttttcttttacaactgagtcatttacgtaatttatgacttggaatgttacagaaccaaaaaaaaaaaaaacaatatttcactggctgcagccttgagcagacaccgtctgtgggtgaagctggatagacaagcagatggatcatcaaacagaagaattttatattgttttaagaaaatgaaaatcttgagaaaagagaaagggttggtcctcctgatgcttcatttgctgggcttgatggaacgtcggtataggtacggtaggcttgttgacacttctgcatctctttaggactaaattgaagaagcattcctacaacaggtagtagagcttccacttcacctgtt

SEQ ID NO: 3629 - DNA, 375 bp, Gossypium hirsutum
  Clone ID: LIB3083-078-Q1-L1-E6
cagcaatccaggcaaagattagcaccaattcaggagcggcaatcgagcaactcggtttctcatttgccaatccatcaacaataccagcacaagcaccagcaccagcaggcatctggtcccgtcgtagttaccacgaaatgggaaacattcgattcatccccggcaacattgccggtcacctcgacatctacatcttcatcaaccgctaataactcagccccaccgaagttcccttgggaattcttcgattaaagacagtatgctactatgtcctctttggttttcatttcattttttatctgtgtgaatgtgatttgggtttgcttcttcttcttgtacttagaatttctcaagcaacccttttcttttcttttt

SEQ ID NO: 3630 - DNA, 279 bp, Gossypium hirsutum
  Clone ID: LIB3083-078-Q1-L1-E9
ccataaatgatggtgaagaaatcattctttctccaaaaacaatttatccatacaaacaacattctctcaaacaggggtcccctaatacaaattccactagaaaccatattccaagttaataaaaatcttcttattttatctagtatcaagataatattttctgtttataaaaaaatttctctattcccaaataccacaagaattatcattctttaattcattcattttattccgctaaaaaaaatcacatttttcactattattaacccgattaattaa

SEQ ID NO: 3631 - DNA, 378 bp, Gossypium hirsutum
  Clone ID: LIB3083-078-Q1-L1-F1
gaacaatcaatgtattattcagattaggatcctgaagttttttggtcaatttcggccaataagcctttgctcggttttatacaagttgatgatgaaggtaattgctaaccacttaaatccaatcctccaaatttcacagagaataagaaaaagggggggggggaatcaaagctagggttaggattggattttgcaaaaaatggccatgaagaaaggttattgccagattaaagggattaaagtgtaagaaggcctaactcctgaaaaccttctttatcaatggattacgtgaagaaagcttttcaaaagggtttggacaattacaattcaaagtacattcaaaccgattcgatccagcctctttaccatgtctgtttc

SEQ ID NO: 3632 - DNA, 389 bp, Gossypium hirsutum
  Clone ID: LIB3083-078-Q1-L1-F10
cccgacttttacttaacgtctgatacctgcgaacggggctggtatgatctactgggagagcgctcccagtttgattgctgatttatccaaacctaacacgatcgccgccacagaaatcaactgtcaactgttaaaacagcttccgctgtagaaacaacatcgacccacatcaacacaggcatcaactcttacattctctgcacccctcaattccttaccaacggaaccatgattcacgaccttttcaatccagaccgagttcttataggaagcaatgcaacacccgaaggtcacactgcaatcacaaacttgagagatgtgtatgctcattagcctcctgtggaccgtttaatatgctctaacactatgttctgccgagctattaatac

SEQ ID NO: 3633 - DNA, 381 bp, Gossypium hirsutum
  Clone ID: LIB3083-078-Q1-L1-F11
ctttttgtctgtgtttttgagggttcagtcaatcggggaagatgatgcacatgaccttgtactggggaaaggacgtgactctgctcatcgattcctggaagactgattcatggctgagttacctcctcactttgcttgcttgttttctcttctcttccttttaccagtacatggaagatcgacgcctccgtttcagatcccttgcttcctccaacccatccccgccttcctccgccggcgcttctgttcctctcctccccaaataccgccgctccgctaaattcgcgacggccttgctcttcgggatcaattcggctatcggttatctcctgatgttggccatcatgtctttcaacggaggcattttcttggctattgttt

SEQ ID NO: 3634 - DNA, 333 bp, Gossypium hirsutum
  Clone ID: LIB3083-078-Q1-L1-F12
cccgacttatactcaggtctgggagctgggaaaggcgctgatctgacctactgagagagtgctgcccgtatgattgctgatgtatcgaaatctaacaagatcgtggtcgagaaatcaactgtccctgttaaaacagctgaggcaattgagaaaattttgacccacaacagcaaaggcatcgactttcagattctctccaaccctgaattccttgccgagggaactgcgattcaagaccttttcaatccggaccgtgttcttattggaggcagggaaacaccagaaggtcaaaaggcaatcccacaattgagagatgtgtatgcgcattgggtc

SEQ ID NO: 3635 - DNA, 382 bp, Gossypium hirsutum
  Clone ID: LIB3083-078-Q1-L1-F2
cctgttcctacatcctcattcgtgagttatcccatcattgatcaaagtgttgtagtacctgtttcccaaccacctatacaatcttcatctgaggcatatcccatcagtgaccaaggcatttcagtccctgcggttccacaaactccaccttcatctgtgtcttatcctatcattgatttttcagaagctgctcctgttggaccctctcaagtgccacaccctgcaatcagcgtgcaagcacctagtcaaggggagagtgaaaatattgttgagcagtctctacttaaggaacttgaagatatggggttcaagcaggttgatttgaacaaggacattttgaggaggaatgaatatgatctggagaagtctgttgatgatcttt

SEQ ID NO: 3636 - DNA, 185 bp, Gossypium hirsutum
  Clone ID: LIB3083-078-Q1-L1-F3
gttgagatgaagaaacctgagatcaaatccgttgaaatctctggttaattgtgaaaaacgtgtttttgaaatctgtggtttcgtttgttatttttactttttgattgatgtctctgtcccttttgtttggaacaaggtttgattatgtaaatcattaattttaatgtctgagactcttggttttt

SEQ ID NO: 3637 - DNA, 380 bp, Gossypium hirsutum
  Clone ID: LIB3083-078-Q1-L1-F4
ctcgtgccgcatgatgacacattgaagattgtgagaagatgccaattcaaacattcaaattcatacttttaatcagagccaatatcctcgtctggtggctgaagattttactccatttccttgcaaaggccagcctggcaaggatggatggtatcctcctggtcatggtgatgtgttcccagctctaatgaacagtggcaagcttgctactttcttatcacaggacaaggagtatgcatttgttgccaactcagacaacttgggtgctattgttgacttgaaaatcttgaaccatttggtcaaaaacaagaatgaatactgtatggaggttacacccaaaaccttagctgatgtgaagggtggtactcttatttcttatg

SEQ ID NO: 3638 - DNA, 380 bp, Gossypium hirsutum
  Clone ID: LIB3083-078-Q1-L1-F5
gaaaagtctcagaattcattgaattcttcagcttcatgtaaaggcaaaaacgaagatgataataataacaagataaagggtgataatcaccatggagctggctttaaaggcaaccgaagaaataccaacagtttaaagcaacaacaattgatgaaaattcccatcaagaaacccaagttagaagagaaaatgaagcgaaaaaggatcataaagaatgcttatttagaagaaaagcttagaagaacaaagttagaagagatatcgaagaatggggtcattacaagacattttttcagaaacaaggtaagaagatataagcttttggatgaggtttcaagttaaaaacattaacacaattatgaagttgggttaaatgagtg

SEQ ID NO: 3639 - DNA, 384 bp, Gossypium hirsutum
  Clone ID: LIB3083-078-Q1-L1-F6
atcactcttacactcatcaccacagaaatgatgatgaggaaaaccaagaaagacccccaccaccacatcttcaccaccatgaatttactccgccgtaccctccaccaccaagctaccagcagccacctggctttgatggaccctatcctccgccacctccatcatcatacttgcaccaacctggctttgatggtccacccccaccatcttactttcagcaacctggatttccaccacccccaccacaccaaccaccgtcatatcagtaccaacagccaccccatgtgactcatgtccaccgccagcctgaacacagtccatcgaactactctccaccaccagcatctgtttcaaatgtttcccatgaaagtagccaaggaaggg

SEQ ID NO: 3640 - DNA, 356 bp, Gossypium hirsutum
  Clone ID: LIB3083-078-Q1-L1-F7
atacattcttcttacgagcgctgcacgatctgcacgagggaagaaatcacactgtggtcaaaatttacattcgctcaaacatttggtcgaaacatcactgttgaacgcagccatatacctaaaagacattctggaatggcttgtgatgctattgaagatgatcctcaatggcagttaaaagtacatttatacgatcttcctaccaaaaccaacaataaaatctttcaaaaagaccttaaaagtttatcacatatgtgatctaaatacatctacatgcacaggtgattattatataattctgtcaccacccaaagttcacaggaaactctatggttttatacatgtctatatgacac

SEQ ID NO: 3641 - DNA, 380 bp, Gossypium hirsutum
  unsure (1)..(380): unsure at all n locations; Clone ID: LIB3083-078-Q1-L1-F8
gggatcatttgcagttcaaagatattattgcaaaggtctagtgttgagctctattacaaggctgtccacttctacttgcaagaacatccagatctcatcaatgatatgctgaacgtgcttgcacttcgtgtggatcacactcatgttgttgacattatgagaaaggctggtcatctacgtcttgtgaagccgtacatggttgctgttcagagcaacaatgtatcggcagtaaacgaggcattgaatgagatttatgtggaggaagaagattatgatagattaagagaatctattgatttgcatgataactntgatcagattggacttgcacaaaagattgagaaacatgagctgcttgaaatgaggcgtgttgctgcata

SEQ ID NO: 3642 - DNA, 395 bp, Gossypium hirsutum
  unsure (1)..(395): unsure at all n locations; Clone ID: LIB3083-078-Q1-L1-F9
cgagcacctctttatagtttgtctanngggatcacaagaggcagatgtngtgctggtggttctgacccctgccctncttttataatttcctcaagttanctgggatgtagttttgtttgggggtgtgagcctggttatacctattgccactgggaattcatctctatcttcagttagctactcatcctaaacttgccaagcatgctggtgctttctggggcggcccagattatggtgttcttagctgggataataagcttgccggtgctcaggtgcttctgagccgattgagattgtttttgagtcctgggtatccatatgaggaaatattgagtacgtttcataatcaaaccagcataattatgtgctcattccttccagttttcactagcttt

SEQ ID NO: 3643 - DNA, 304 bp, Gossypium hirsutum
  Clone ID: LIB3083-078-Q1-L1-G10
aaaaaatttttttttaccctacaaaaatgtcagaggattggctcctttaaaacgacacagttttctccacaactgtgaaaatgtatttgaatgggatcaaaccttggaagaggtgaatatttacataaacttaccgcccaatgttcactccaaacaattttactgtaatattcaatccaaacatgtcgaagtttgcattcaaagccacccctcttatctcaatcatgattttttctccccagttaaaacggattcattttttttgacccttgaggatgatataaatcacataactttgcaaaaa

SEQ ID NO: 3644 - DNA, 364 bp, Gossypium hirsutum
  Clone ID: LIB3083-078-Q1-L1-G11
tacctcgagtcgacttaattaatcgacacgttccaagtgcaagccaacaacacggttgaaggcattacgattttcgtaccgaaagacagcgcattcaaggctcttacgaagccttcattgtcaaatctaactgatgatcagttcaaatcagtgctcctttaccatgccttgccacgatactatgcccttgcggacttcaatgacctaagtgagaaaggccctattagtacacttgctggtggccaatacactttgcaattcaacgatgagtctggtaccgtccgcctcgattccggatggagcaaaacaaaagtcactagcgcagtacatacgtccaagccagtcgcagtctatcaaatcgata

SEQ ID NO: 3645 - DNA, 331 bp, Gossypium hirsutum
  Clone ID: LIB3083-078-Q1-L1-G12
aatcgagcggcaccttgtgtttttgcctttgcactttgccgaagacgcgtacaattctctgctttacgcgaggatgaatttaaaaagctagctatatgaccagtcaccaagactgacggtgaataggttgtgtcaaaaagatacacttgtttgacatgggttgttcgaaattgattgagtgaattcaaacatagtatagcaagctaaggaactctatttattcccttttagcaattcccaccaaataagatgaggacggactgcttctataataccacaccagctatgcaaactccaatggccttctagaatgttgattctcgtgagaact

SEQ ID NO: 3646 - DNA, 388 bp, Gossypium hirsutum
  Clone ID: LIB3083-078-Q1-L1-G2
gtaacatcgatcctggaatccctgtgctcctttactgtggtgctatgtcgactcagtctttaacagaaatgagaaccaaatgcatttctggtggtagaaagcggctgcctcatgggactgacaacctcagagaccatgtgtgccggttatctagaaggatgagagccgtaacaacttatcacaccataggccttcgagacctgttatgctgataccggtacttttgtatttctataatatgttcagtttatgaattaaattcgacatatttataaactgatgatatggtagatagtaatattttatggcttactacaaatagatgatcttaaaaagtaaaaataaagagtatttgtcttcaattaactggtgacatttaaattcatat

SEQ ID NO: 3647 - DNA, 371 bp, Gossypium hirsutum
  Clone ID: LIB3083-078-Q1-L1-G3
cagagatggttaatgccctgaggaaggctagtggacaggtggatcgggcaaatgcagctgtgagacggcttgagactgagaatgcagaaatcagagctgagatggaggcgtctaaattaagtgcatcagtatcagtcacaacatgtctggaggttgcaaaaagagagaaaaagtgcctgaagaagcttttggcttgggagaaacagaaagctaagttacaggatgaaattgctgatgaaaaggataagattaaagatctgcaacgatgcttagctcgagtagagcaggatcagaaagaaacagagttaaaatggagagaggagttaaagtccaaagaacttgccttggctcaagttgaggaggaacgatgc

SEQ ID NO: 3648 - DNA, 345 bp, Gossypium hirsutum
  unsure (1)..(345): unsure at all n locations; Clone ID: LIB3083-078-Q1-L1-G4
gtttnntttttttttttttttctttattttaagctcgaatagaatataaatattttattgaacgaacaaaagataagggggagcttcatttagttcatgcaaatctttatgtacattgtcaaatcttaaatccacacaaattttgaagtagaagattcaataatacaacacggcctctcttcatgttttgcaacatgacctgcggtactcccatcaacaaaatcacttctctgctatatgccttaaagtgccatctcagcctgcaatgcagcaagttcatcttcctcagcagtacgcttttgaggaataggacgagctggttgcctaccaacaggcacctgcact

SEQ ID NO: 3649 - DNA, 373 bp, Gossypium hirsutum
  Clone ID: LIB3083-078-Q1-L1-G5
ctcgtgcctttgcagatctttcgttttcttgatttgggtgttgagtatacggccttgttagtgacttaactgagtttaattgttctgctgagttgaattaggaagtcatcggagatgctggacggaatctggggccgtggttttgccttcaaatgtaagtcattgataaaactgataaagagtcggatcgatgtaataaggaggaagaggagtgcgacgcttaagtttttgaagaaagacatagctgatctgctcgctaatggccttgatattaatgcttatggcaaggtggaaggatatataacttgaattggtccttttcttttgctacgattttgttgagaaatgctgcgagttcttgttgaaacatgtt

SEQ ID NO: 3650 - DNA, 375 bp, Gossypium hirsutum
  Clone ID: LIB3083-078-Q1-L1-G6
gtcaaagctatagatccaagacaaggaaggcatccctgcggatcaacaacgccttatcttcgccgggaagcagcttgaagacggccgcaccttagccgactacaatatccagaaggaatccactcttcacctcgtcctccgcctccgcggcggtgccaagaagaggaagaagaagacctacacgaagcccaagaagatcaagcacaagaagaagaaggtcaagctcgccgttctccagttttacaaggtggacgagtcgggtaaggttcagaggctgagaaaagagtgtcccaatgccgagtgtggtgctggaaccttcatggctaaccattttgataggcactattgcggtaagtgtaggctcacttatgttta

SEQ ID NO: 3651 - DNA, 386 bp, Gossypium hirsutum
  Clone ID: LIB3083-078-Q1-L1-G8
tgaccaagttcgctgtaaagtcctaaaacccataggagtcagatttgtcctccctgtacttcctataagtttgatattcgctggatattcactagctgcacttgaggaacgtggttctcgaaatggtgaaaagaaaagatcttcgtgcatttgcaacaaatggcgttccaaaaagcaacttgccatattcttcttgcttgcatccaatattccaatggccctgtatatgagtttgattcaccaaagaggaactgaggatgcgatgaactatctatctaaagaagctgcaaaagggaaagtgaaaagtatcgtttttctaatgccttgccatgccacaccctactatatcactttgcataacaacctgcctatgcgtttcttggatt

SEQ ID NO: 3652 - DNA, 267 bp, Gossypium hirsutum
  Clone ID: LIB3083-078-Q1-L1-G9
ttaaagcttttggatccttatggattcacactgatgagaccgacccttgtcttggatctcgactctcaccaattgcaagcttttaccgctgcttatgctgaactagaaaccactctgtctggcttgaatgttctgattgagacctactttgctgatctcactgctgaggcatacaaaaccctcactgaattgaacggtgtcactgcttatggtatggatttggttcgtggaacccagaccattgagttgatcaagagcaacttccct

SEQ ID NO: 3653 - DNA, 384 bp, Gossypium hirsutum
  Clone ID: LIB3083-078-Q1-L1-H1
agtattcctacttggagtggtgactctcaccctcccacatttggtacctatgagtcaccaaattatgggaaaccccctactcctgtattcaagcctcccaaggtgaaaccaccaccatatgaacctaagccaccagtgtatgaaccaccaaaaaaggagaagcctgaacctaagccaccggtttatgcacctccaaagaaagagaagcatggacccaaaccaccaatgtatgaacctccaaagaaggagaagcctgagccaaagccaccagtttatacacctccaaagaaagaggagcctaaacctaaaccaccagtatatgaacctccaaagaaggagaaacctgagccaaaaccaccgatttatacacctccaaagaaagag

SEQ ID NO: 3654 - DNA, 295 bp, Gossypium hirsutum
  unsure (1)..(295): unsure at all n locations; Clone ID: LIB3083-078-Q1-L1-H10
ggcaaacttttttttctgcaaaaacacccgnncggggaagggtttaaaaacccacatttacgggcattggccaataagttcaatggcgatgacaccaccaacgtaattcttactttcaaagacgtcaccgtagaagggcaccgtacgaggtgtgggactcacgaatcaacccgggtaggaacgcgtcctatcttcacaacatatgtttgtgcataaaactagaacaactaatggaccaatcaaagtgcttggccttttcatcaacctatttacggttcacaaaccctccctttgg

SEQ ID NO: 3655 - DNA, 381 bp, Gossypium hirsutum
  Clone ID: LIB3083-078-Q1-L1-H11
atcatttccgcctgaagaagatgattatctcttgggtgaagctcgccagcctctatggcgaaaagtgccaatttcgtcaagtctgataagcccttaccggatagtcatcgtcctccgattcttcatcctcgcatttttcctccggttccgtattctaacacccgcctacgacgcttacccgttatggctaatctctgtcatctgcgaagtttggttcgccttctcctggattctcgatcagttccctaaatggttccctattactcgcgaaacttacctcgatcgcctctccttgaggttcgaacgtgaaggagagcccaatcaacttggcgccgtcgacgtcttcgtcagtaccgttgaccctctcaaggaaccccccat

SEQ ID NO: 3656 - DNA, 307 bp, Gossypium hirsutum
  unsure (1)..(307): unsure at all n locations; Clone ID: LIB3083-078-Q1-L1-H12
ataattcataaactcttatttttcggagtttttacgggtaatggtatctctccagcaacgcacagtancaccaaatttccgtacgcccaaacctttgatccattatcaccttctctgatcttccctcgactaacggagatttgaagatggtgtcggacgcgagcaagatgaaggctgctcacaaaaaggctgctgccgctgcgaatagaggagggaaggctgctgcacccgctgcatctttcaaggcggcagctgcggcgaccgcggagaacggcgttgataaggtttctgataaaaatagtatgct

SEQ ID NO: 3657 - DNA, 341 bp, Gossypium hirsutum
  Clone ID: LIB3083-078-Q1-L1-H2
aagacgatcactctctagtcgccagctcctatacgatcgcatcgtgacggccaaagaccacataaggcagcatccattccaccagcagcgtatgatcttaacatcaaaacactttgaagacggtctaaccttgttcgagtacaacatgcaaaaagagtgaactctacacctagaacttcgtctgagcggtgtgaagcaaatatatctgaaaaccttgactaggaagacagtcactatcaaggtagagagctccgacactaccgacaacattgatgcgaaaatataagacaaggaacgcatggctctataccacctacgtaatatgtttgaccgaaaacaac

SEQ ID NO: 3658 - DNA, 383 bp, Gossypium hirsutum
  unsure (1)..(383): unsure at all n locations; Clone ID: LIB3083-078-Q1-L1-H3
gcgtagacaaaaaagaaattgaacatgccgcagttatgcactacaatggcaacatgaaaccctggctcgagctggcaatgaccaaatatcgatcatactggaccaaatacatcaagtatgatcatccctaccttcgcagctgcaatcnnnntgagtaaacctgattaattaaagcatttcatttttttcctttttggctttactccccccctcccccccacattgattattcttctttgtaattcattaaattcatccccttgaggactcgcccattggaacgagttaactgtgtacgaatgttaacctgtgaaagacacactatgatcctttttttcccctttttggatgtaagttcaattttagacagaatatggaaacct

SEQ ID NO: 3659 - DNA, 400 bp, Gossypium hirsutum
  Clone ID: LIB3083-078-Q1-L1-H4
aaaaactccgtttctacttcatatcaacaacgtgttgcagatgatggtagtaactctaattccaccagttttacactctccgtaccggatgatgaaatagcagggcttgaatgggtgtctcagtttgtggacgattcggtaccggagattcctttgccatgccctgtttttaagcaggaaactgataaccatgcaggaactcggtttgaagcggaaaccggcccggtttttgtgaaaacgccgtctctttcatcgtcggttccaagtaaagcgaggagcaagaggtctaaaccgacagtcccgacatggtcggttgggtcactgcctacttccgagtcatcgtcttcgacagcatcatcttcgagtacttgctcggggtcttccatgacttctacggagt

SEQ ID NO: 3660 - DNA, 377 bp, Gossypium hirsutum
  Clone ID: LIB3083-078-Q1-L1-H5
aatcattgtttaccgtggtctatattttggaatgtacgactctctgaagccagtgcttttgactggaagcatgcaggatagtttcttcgctagctttgctcttggttggctcatcacaaatggtgctggccttgcatcttacccaattgacactgttcgtagaagaatgatgatgacttctggtgaagctgtcaaatacaagagctcgctcgatgccttctctcagatcttgaaaaacgaaggtgccaagtctctattcaagggtgctggagctaacatccttcgtgccattgccggtgcgggtgtgctcgctggatacgacaagttgcagctcattgttttcggaaagaagtacggatccggtggtgcttaaattt

SEQ ID NO: 3661 - DNA, 362 bp, Gossypium hirsutum
  Clone ID: LIB3083-078-Q1-L1-H6
aagatatcttgtccccttttgctggaaagaagcaatgatatacgtacgaaactatggatttctgggaacagatcaagactccagggatgtctttaaaatgttctggtctttatcttgctcaattccggtatacctcccctgatctattagctggtggagatggaactaaaagtgcttcgattcttggtgatgtctatgtgcatccctcggccaaagtacacccgaccgcaaagatcggtcccaatgtctctatttcggcaaatgttcgtataggagctggggtgagacttataggttgcatcatcttggatgatgttgaagttcaggaaaacgcggctgttattaattttattggtggatgg

SEQ ID NO: 3662 - DNA, 395 bp, Gossypium hirsutum
  Clone ID: LIB3083-078-Q1-L1-H8
gaaaagcctaaagagcacgagaaacacgaagtcggaggttcggaaatacccgagtacaaggaaaatgaagataagagtaagaaacataaagatgaagagtgccaggagtcacacgaatcgaaagagcacgaagagtacgagaaagaaaaacccgatttccccaaatgggaaaagcctaaagggcacgagaaacataaagccgaatatccgaaaatacctgagtgcaaggaaaaactagatgaggataaggaacataaacatgagttcccaaagcatgaaaaagaagaggagaagaaacctgagaaaggcatagtaccctgagtgggttaaaatgcctgaatggccgaagtccatgtttactcagtctggctcgagcactaagccttaagccatat

SEQ ID NO: 3663 - DNA, 358 bp, Gossypium hirsutum
  Clone ID: LIB3083-078-Q1-L1-H9
tagagctgatttatactttaagatgttatcattcccccatgggcagttgcatttcctgatgaccatgaaacttgtaatgtacatttatttatatcaattgatggtggggctgcttttggtttccctgagacacctgaagatgctgccagggctgggcttgtgagtggaaaggacaatatcattgtccgaagtattcaggatgcctatattaatgctatacgacgagcaaagaattttatctatattgaaaatcattatttcctcggaagctcatttggctggagtcctgatgacatcaatcctgaggatattaatgctttgcatctgattcccaaagaactttcacttaaaattgtta

SEQ ID NO: 3664 - DNA, 255 bp, Gossypium hirsutum
  Clone ID: LIB3083-079-Q1-L1-A1
ggtgtactggtgtgaacccaaactagcattatgccatatactgataaaagagctatttacagaagagctgaaatctctccggagaagaaaccaatctccatgtatatatatgatatgatatgatcctatatcaaaggcctcagtatacaggcttcaacttattacaaagacttttcactaagaaacaaaagaagaccaaaacccagtatacaatattaaaattttctgtgtgtataatgtgtaaaagcagctacc

SEQ ID NO: 3665 - DNA, 378 bp, Gossypium hirsutum
  Clone ID: LIB3083-079-Q1-L1-A10
aagaaacattggagctgttctatttcatggtggtcggtgcattgggagcagtggttgcagcattagagctaagcaagaacagcaaagatcgaatcaacacttcccctgctttcaattcctttaagaacaattacctcgttgtttactctctcatgatggctggagactggctgcagggtccatatgtttactatctttacagtacatatggctttggaaaaggggagattggacagctttttattgctggttttggatcctccatgttgtttggcacaattgttggatctctagctgacaaacagggccgaaggagggcatgtgttacttactgcataacttacatacttagttgcatcaccaagcactctcctcaat

SEQ ID NO: 3666 - DNA, 380 bp, Gossypium hirsutum
  Clone ID: LIB3083-079-Q1-L1-A11
gaaaatatcagctagggttcctctctccctctccaaaaactaaacaacaaaacaaaagagagatggcagtaatggcggatcaccattccctggctgttgtttttggtatattaggtaacatcatctcagtcctcgtatttctggcaccagtgccaacattctgtcggatttacaaaaagaaatcgactgagagtttccagtcactgccataccaggttgcattgttcagttgcatgctatggctgtattacgcgttgattaaaaagggtgctttccttctgatcaccatcaactcttttggatgtgttgttgagactatttatatatctatgttctgggcttatgcttcaaagaatagcaggatgtcggctatgaaactt

SEQ ID NO: 3667 - DNA, 341 bp, Gossypium hirsutum
  Clone ID: LIB3083-079-Q1-L1-A12
agaagaagaagagatggtattaaagaaagaagcaagtaaaagagaaacgaactaaaaggaaaattatatttatttaaaacgatttaaacttataaactacactattttgatttgcatacagataagcatccatagtgcagttcagattaaactaaattgaacaaagttttaagaaatttcagaccctaaaaagcgaaagtaaaaagggaaaaaaaagatagatgagtacttgaaacgattcttctttgtttttttagttgatatcggagtcatcaaaatcgtcttcgaagttgttgaagaaatcggcatcggcgagcttgttgtcggaagcgatgacgcct

SEQ ID NO: 3668 - DNA, 380 bp, Gossypium hirsutum
  Clone ID: LIB3083-079-Q1-L1-A9
gataacattcgttgttggttgatgcagggattgggagccctaggatttgtacccaagacgagaccacattaaccagatcggaaatcaatcgatttgaggataaggtgggattcttcgataaaggagtgggcggcggtgaatcactggtgagaaagcggtttttggagagattcttcgtcgatttagtgagcggtgaatcgatcgccaaagagcgagctgccgttaggtttaacgatttgttgggatcgagatcactggacgtggtcgccggcgagccgactcttcttaatccacggaggttcaggcaaaccctagtttggcaagaattgaataagcattggcgaaacaattcgaaggtcaagggcttttttattgataaa

SEQ ID NO: 3669 - DNA, 377 bp, Gossypium hirsutum
  Clone ID: LIB3083-079-Q1-L1-B10
cgtttgtttcctacggagacacttctcatgggaggtgacatatcacaagcactgcccatcatgttgatcttgtcggtggttccactagaattccaaaggtccaacaacttttacaagatttcttcaatgggaaggagctttgcaagagcatcaaccctgatgaggccgttgcatacggtgctgcagtccaagctgctatattgagtggtgaaggtaatgagaaagtgcaagatctcttgctcttggatgtcaccccattgtctctcggtttggaaaccgctggtggtgttatgaccgttttgattccaaggaacaccaccattccaaccaaaaaagaacaagtcttctcaacctactccgacaaccaacctggagtg

SEQ ID NO: 3670 - DNA, 380 bp, Gossypium hirsutum
  Clone ID: LIB3083-079-Q1-L1-B11
cgccccttccttcctctctgcttttactttgctaaggccaagccttcgacaatggccgaaccctctaccatttcaccagctcccctcttgaaagatgagctcgacatagtcattccaaccattcggaacttggactttttggagatgtggaggccctttttccagccttaccatctcatcattgttcaagatggtgatccttccaagaccatcaaggttccggagggcttcgactatgagctttacaataggaacgatatcaacaggattttgggtcctaagtcttcttgtatctctttcaaggattctgcttgtcgctgctttggttacatggtttccaagaagaagtacatttataccattgatgatgattgctttgt

SEQ ID NO: 3671 - DNA, 374 bp, Gossypium hirsutum
  Clone ID: LIB3083-079-Q1-L1-B12
gtgttattcagcagtacttgttctaaggctgggactagatttctcattataaatggggagaaatcttgttctactttccattccatgcaacactaacttttagattccctttccattgcactgctctgtctttctatagaattagtcactcctgttctagatgaaggttctctccccaattcttgcttgcctagcgcttgctgaggtggtaagccatgctgctctctcacctgagcaatattggagctataagctgccaaatactccaatgccaaaagctgtcaaagaaattctacatccataactgatggaggagaaaagcacctctgtcaatgtacgaggtggtggcgtcaacgtcaatacaggaaaaggga

SEQ ID NO: 3672 - DNA, 382 bp, Gossypium hirsutum
  Clone ID: LIB3083-079-Q1-L1-B9
agcaaagccaaatttcttgggggaaaagaaaatggagttttccatgatttttatgattagcttctctgtattgattttgtgctcctcactggcatatggtcaagttgcaatgagcacaagcccgacaccgtcaccctcaccggcaccgacaccggcatacaaaaatctcaaagacttactctctgtggcaggtccatatcacaagttcctggactacctcgaatcgactaaattaatcgacacgttccaaatccaagccaacaacacggttgaaggcattacgattttcgtaccgaaagacaacgcattcaaggctcttaagaagccttcattgtcaaatctaactgatgatcagctcaaatcagtgctccttttccatgcc

SEQ ID NO: 3673 - DNA, 377 bp, Gossypium hirsutum
  Clone ID: LIB3083-079-Q1-L1-C10
cttgattcttattctcagttgtgatttaggtgttgatattcaaatggcggatattagcaatggttccaaagggtttgcagtgaaacaaggagaaccaactagggtccttcctgcagaagagacaaagaagggtctttattacctgggaaaccttgaccaaaacattgcagtcataattcgaaccatttacttctttcagtcagagtctaaagggaatgaagatgctgccgaacaagttaaaaatggtttgtcaaagattcttgttcatcattatccacttgctgggcgactaaccatcagctccgaagggaagctcatagtggactgcaccggggagggggctgtttttgtggaggctgaagctaattgtgggattg

SEQ ID NO: 3674 - DNA, 197 bp, Gossypium hirsutum
  unsure (1)..(197): unsure at all n locations; Clone ID: LIB3083-079-Q1-L1-C12
tagaattactttttttttttaccccanggngaaaagcctgtcacggttttctttatgagggaccctgaggaaatcccatgggctgaagctggagctgagtatgttgctgagtctactggtgtttttactgacaaggacaaggctgctgctcacttgaagggaggccccgaaaaaaggttttcattttattgctccca

SEQ ID NO: 3675 - DNA, 377 bp, Gossypium hirsutum
  Clone ID: LIB3083-079-Q1-L1-C9
catattcttgggaaagtcaacaatataaccattgacaaatgcactaagatgggagtggtatttaaggatgttgtggctgcttgtgaggtagtaaactgcaatggtgttgaggtgcaatgtcagggttctgctccaacaatttcagtggacaacacatctggctgtcagttgtacttaagcaaagactctttagggacatctataacatcagcaaagtcaagtgagatcaatgtgttggtgcctaccggacctgatggtgactggggggagcattcattgccgcaacagtatatccatgtatttaaggatggtcaatttgaaactaccccagtgtcgcactcaggagcataaatgaggcctatttgaattgaaaactt

SEQ ID NO: 3676 - DNA, 380 bp, Gossypium hirsutum
  Clone ID: LIB3083-079-Q1-L1-D10
caaaatactatcttcgaagactgggaatatgtgttgatataacttccagtttggagtcagcatgcacctacgtgtcaagcattttcaccacaagcgcatttgcacatttggccatgattcttattgacaaagatgtttggaatcaagaaacagttcttcagttacgatctttgctcgaacaacataggaaaaattgcaaactaaatgtttcaacaaaccttccgaaaatttttcttttgggtacctccatgagccccgtggagcgctccaagcttaagacttctggttttgtagataatgtgctgatgaaacctcttcggttgagtgtcttaattgcctgtttccaagaagcccttggaggtacaaagggcaaagtacgt

SEQ ID NO: 3677 - DNA, 379 bp, Gossypium hirsutum
  Clone ID: LIB3083-079-Q1-L1-D11
gtaaagtttctcctgtgaaggatggaacaaaaaactcaaccaagaatgatgatgaggaagtgattggatctccaaagtcagtgaagccaaacaaacaagattctcacaaggaggggacccctaagacaaattccaagagaaagcatatgccaagtaaagaaaaatcttctgattctatggagtatggtgagaatcttgtcggcttgaaggtgaaggtctggtggcccaaagaccgtgagttctatgaaggttttattcattcatttgattccgctaaaaagaagcacaatgtgcactataatgacggtgatgaagaaattttaaatcttaaaagagaaaagtgggctgtgattgaagatgagtcagggtcagatgagga

SEQ ID NO: 3678 - DNA, 387 bp, Gossypium hirsutum
  Clone ID: LIB3083-079-Q1-L1-D12
gaaaaacctgatttccccaaatgggaaaagcgctaaagagcacgagaaacacgaagtcgaatatccaaaaatacctgagtacaaggacaaacaagatgaggataaggaacataaaaatgaagagtatcacgaatcacgcgaatcgaaggagcacgaagaatacgagaaagaaaaacccaagttccccaaacgggaaaagcctaaagagcacgagaaacacgaagtcgaatatccagaaatacttgggtacaaggaaaagcaagataagagtaaggaacataaagatgaagagtgccacgagtcacacgaatcgaaagatcacgaagagtacgagaaagaaaaacccaatttctccaaatggaaaaagcctaaaagagcatgagaaac

SEQ ID NO: 3679 - DNA, 376 bp, Gossypium hirsutum
  Clone ID: LIB3083-079-Q1-L1-D9
ctaaaatcttgctctcttcactcctcctattttaaccatttcttccttgtcctcgccccttccctagcaagctacatttccatggccccccctgaattggttcaacccagtgataaaacaaacgttttcgctaaacaagtcagtttgcgtaatcgtgcatatgttacgttcttggccggaaatggggactacgtgaaaggcgttgtagggttagccaaagggttaaggaaagtgaaatcggcgtaccctttagtggttgccgttttacccgacgtgcctgaggagcataggcggatcctggagaaccagggttgtatcgtccgagagatcgaaccagtttacccgcctgagaaccagacccagttcgccatggcct

SEQ ID NO: 3680 - DNA, 376 bp, Gossypium hirsutum
  Clone ID: LIB3083-079-Q1-L1-E10
aataattttcatctttatagtcgctctggtgtggcaggttatttgaatctgctacattgggtacccaagcactaaactttctccctgggttcctctttagtaaggaatttggagttggtggtggtaaaaaatggagttttccagggtttctatgattagttgttttgcgttactcttgtgctcctccttggcatatggtgcctctagtcctccagctcctatggcaatgagtcccagcccgacaccgtcaccggcaccagcccctgcaccggaatatgtaaacctaacttatttgctctctgtggctggtccatttcacacattcctcaactaccttgaatccactaaagtcctggatactttacaaaaccaagcc

SEQ ID NO: 3681 - DNA, 379 bp, Gossypium hirsutum
  Clone ID: LIB3083-079-Q1-L1-E11
gtgaattttagtgaaatttaaggttttttagggattgttcgtggatattatgatttttttttcgagagttaatcagatgagagatctgagctaaaaaagagattttgaaaaatgacgaatacggaggtagctatgaaagggaattgtgtgaacggaagaggaggagagagcttttcttctggttatagtgagccaaatgatggtaggaataccgtggaagggcaaaatggtcattcgactcgtcaagctccggctacagaccccgaatcggcgttgtataatgaactatggcatgcatgtgctggacctttggtcactgttcctcgtgaacaagatcgtgtgttttactttcctcaaggtcacatagaacaggttgagg

SEQ ID NO: 3682 - DNA, 381 bp, Gossypium hirsutum
  Clone ID: LIB3083-079-Q1-L1-E12
ctccggttgccttgcatattgaatccattagagaaggggaggaacccattatttttggccctgatgctgttcttgtgaattatggcaatggttggaatttgcaaactgtttctgaaatggattttcctggcattggaaaaggcaaacatgttcggggatttccgacacagattcctaatggaaagaacgttgatcttactaattctcgcaaaatggtttcaaaaccaggaataagttttctttacattgcaaaagtttcgttagcttttgttttgatgtttatgttggcgggagttttcatgttggctcttgacaatcttcctaaactaattttgctctttaactcttccatgtaactatgtcagatttgaaaaaagttat

SEQ ID NO: 3683 - DNA, 377 bp, Gossypium hirsutum
  Clone ID: LIB3083-079-Q1-L1-E9
ccggactctaactcagcgatctgagtcgcgagtcagtggttatcgaacaagacgaaccattggccgttaatttcgcgttcaagctttacaggatgccggacgagagcgtctccgtcgagaatccaagagacgagctcttgcgccgcgtgaaaggattagcaccgcgcgtggtgacattagtggaacaagaaatgaacacgaatacggcgccgttcgcgttaagagtgggagaagcatgcggatattacggagctttattcgactcggttgagtcgaccgcgttgagggataacccggagcgagcgcatcttgaggaagggctgttacgcaaaatcgccaactcagttgcttgtgaaggtagggaccgcgttgaaaga

SEQ ID NO: 3684 - DNA, 362 bp, Gossypium hirsutum
  Clone ID: LIB3083-079-Q1-L1-F10
acaaactgtctagacaattgtctcatgacaggagctggtcaaattgagtgaagaattaaccgctgaaattgcccaattgattggtccacacctagggtcaaataaccacatgaatccattatacctgttgggcatttacaagttcccttaacaatttacttccaatacagacaacaaaaatatcaagttttaacccaaacacaaataatacatgaaaaagcataacatacagaccaccatttcaagtctttaacaagctatagaaaatagaagctcgcctaacacggaagcagcaggtgataaatgacatgatacgcacactcattgacaggttcttgttagtactaattattttaaccttt

SEQ ID NO: 3685 - DNA, 375 bp, Gossypium hirsutum
  Clone ID: LIB3083-079-Q1-L1-F11
tagccgtctcctttatcgccttcttcttaacgggcaagctttaccaatggctaaggttcaagctcccaccaggtccacgcccatggccggtggtcggcaacctttacaacataaagcctattaggttccggtgttatgcggaatgggcacaggtttacggctccattatatctgtttggtttggttccactctcaacgtgatcgtgtcgaattcggaactggctagggaagttttgaaagagcatgatcaacagttagctgataggcatcggagtagatcggcagccaagtttagcagagatggacaggaccttatatgggccgattatggacctcattatgttaaggtaaggaaagtatgcacgctggagcttt

SEQ ID NO: 3686 - DNA, 321 bp, Gossypium hirsutum
  Clone ID: LIB3083-079-Q1-L1-F12
atacgaatccagctcgagtttatcttttggtccgaactctgaaaaagggcgggagctgacttacagggagagtgcttcccctatgataactagatgtatccaaatctaacaagatcgtggtcgacaaatcaactgttcctcttataacatccgtgacccaaggaaaaatgttagcccacaacaacgaactcttaatccttcagattatgttccaacatctattgattgtcaagggaactgaaattcaggaccttttcaatacggaccctgttcttattggaagtccggtaactccacaaagtctaaaggcaataccaatat

SEQ ID NO: 3687 - DNA, 379 bp, Gossypium hirsutum
  Clone ID: LIB3083-079-Q1-L1-F9
caaaaacatgttctgaaggtgttgaacctcggggaggtaatcgcaggattcagccaacatcaagacttttggaagggctacaaagctcgttggccatctcgaaaattccttcggtttcattcgacaaaagtcacaaaagtcaaagcagaagtatgagaggtgaaacttaaatttcatctctctctattctcaaatcaacattgctgtcctttgagccttctttgttatgaaacgtacgatgattcatgcaattgtaactgtctggaaaataacaggttgagaggtgccctcctgcaactagcggaatccagtcttaaaagaaattcagcgaatagggatgaccaaaatacaccagtgtagctttgtgtaaattatcaga

SEQ ID NO: 3688 - DNA, 371 bp, Gossypium hirsutum
  Clone ID: LIB3083-079-Q1-L1-G10
gagaaattttatctaaagctaatgattgaagagcgggaacctatggatgtaccaatggtgttcatatgtccaatttctttagaaccaatgcatgatcctgttaccctttgtactggtcaaacttatgagagatccaatattcttaaatggttctctttaggtcattgtacttgtcctaccactatgcaagagctttgggatgattcaatgacaccaaacaagacacttcaacagttgattcatagttggttttctcaaaagtatttggctatgaagaaaaggtcagaggatgtacaaggaagggttaaagagattttggagaatctgaagaaaatcaagggtcaagctagagttcaagctttaaaagagct

SEQ ID NO: 3689 - DNA, 357 bp, Gossypium hirsutum
  Clone ID: LIB3083-079-Q1-L1-G11
ctgtatctttagatatgtgtgaggattgcttgtcctggtcgccgtcggagaatggtgatgatgaagtgatggaaaacggcgatgaggatttcaagtgttcttgttgtggtgtcatggtggagaaaaagtggaatcttccttgtttcatgattaaaccttcctgggaggatttggattatccccaggaaggaaatttaatcactgaaggtggagaaaaagttgagggttttattgcagatgagggttatgcttcatatggaatcagatcagattttgcggctggtgatcataaagatgaacagatgattgaagaaaacaagagagttggcatcatttctgatgatgaaggtattgaac

SEQ ID NO: 3690 - DNA, 391 bp, Gossypium hirsutum
  Clone ID: LIB3083-079-Q1-L1-G12
cggcactttgtgcttttgcctttacgctatgccaagagcgcattcaagtctctgtattacgtgaggatgaatatgaaaagcttgataaattacttggcaccaagtctgagggtaaattggttctctcaaaaagttacacttgtaagacatggttagttggagatggattgagtgaagtagaacaaaagaaagcaagcaaaggaactctatttattcccttctcgcaattcccaccaaagaagttgaggacggactgcttctatcataccacaccggctatgcaaactccgttggcctttgagaatgtggattcttgtgagaactggttgccgaggagggtgattagcgtatggcgtatagctgggttagtacatgcactggaaagatggga

SEQ ID NO: 3691 - DNA, 373 bp, Gossypium hirsutum
  Clone ID: LIB3083-079-Q1-L1-G9
gtatcttattttttctctctcccactttcttctatgggttcttgttcctaatgttgctgttgtttgttcaactctcgactgtcagcaaactcatcagtgattcaaaggaaacaagcattctttagtgagggtgttgtggaaattcacgagaattgaatcttttagaaccaaaaggagataagtctatacgctgtaaattataatcagatgctgaatgaaggttcaaatgagactagcaccagagctagttaccactccagtaatttacctgaacctgaccttgagaagcaaggaaacaaccaagtgttgcctcaggatgaaagactgccaggctcagttaggggttcagcctgtgagtccagtcccacattgt

SEQ ID NO: 3692 - DNA, 384 bp, Gossypium hirsutum
  Clone ID: LIB3083-079-Q1-L1-H10
ctttgatgtttggtactcatggtgataaagcccgggttattcaagtgttgctgtttatgtctggtataaatactctgcttcaaacacttattggctcaaggcttcccacagtgatgggtgcatctattgcgtacaccttaccattgttttcgatcatcaatgattataatgatgaggacttcgcatctccacacgatcggtttgttcatagtatgagaaccattcaaggatcaatgatagtttcttcctttctcaacatcatccttgggtatgggcgggcatggggggagctgacaagattctttagtcccatagttgtggtgccagtggtttgtctcgttggtcttggtctttttgccagaggcttcccattgctaggtaact

SEQ ID NO: 3693 - DNA, 390 bp, Gossypium hirsutum
  Clone ID: LIB3083-079-Q1-L1-H11
tggcagtactgtttgtatatcttggatttatggtttttggaataattggtcttcgttttctctatcgtttcatagacaacaatggcctccctcgaaactggctatttgttgggatgattcccacgttacttctcaacatccgtcgccctcatgataaagttgcccaaatcctcagacgaagcaatggtaccttcttttatagaggactttggtttactaacaccagcttcttagccacctccgatcctgagaatgtgcgtcatgtattgagctccagttctgtttatttgaaaggtcctgaatggctgaaacagtttgatatcttcggcgaagcacttttcaattccgacggtgaggcatggaaatgtcaccgcagagttttccatgctt

SEQ ID NO: 3694 - DNA, 300 bp, Gossypium hirsutum
  Clone ID: LIB3083-079-Q1-L1-H12
aggaaacagaggctgttcccgaaaaatccgaaggtgagaaagaaaatgaaaaggaagatgcaccaaccactgaaaaggaaactgcggaagctgaaagagaaaaagatacttacattgaaactcatgttcaggatggaggtaaaacagaagtggcagaccagactgggcgtgctgacaccaaaatggaggaagctggtacagatgttaaggtacgcataaactgcacaggctgtcaaaaaagaagaggctgctggtacccgagaaacaccaactgcaatggaggttcaagagaaacctgca

SEQ ID NO: 3695 - DNA, 370 bp, Gossypium hirsutum
  Clone ID: LIB3083-079-Q1-L1-H9
gaaccctgtatggtgcaacctgtcttcaccatggtgcctcctggcgagcaaaccatggctcgtggagcctaatttcatgctctgcccattccctaccttataactaaaggtaatctagtagctagctcaacaacattttgttgtgtgattgatgtctatgttgtgaaaaatatattgtgtgtggtgtttatgttgtgaaaataaagttaaaaagcagctttatgttacatttctagtatgaaagttgattgctctgttatgggcagatcatatacattttgtgtataaatatattatgttttaaatattttatttgggtcaatttgtaaggatggtttctgttttgtgtgaattcagtttgtataatttg

SEQ ID NO: 3696 - DNA, 200 bp, Gossypium hirsutum
  Clone ID: LIB3083-080-Q1-L1-A1
gacaaagtggtccatgacgaagacagagacagtgaaccggatgtagttgatggagtgggtgctgaaacagggcatgtgataagaacaaccattggtggtcgaaatggtcattcaaagcagaatgtcagttatattgctgagcatgtggttggaactggatcttttggtgttgttttccaagcaaaatgtcgtgaaactgg

SEQ ID NO: 3697 - DNA, 233 bp, Gossypium hirsutum
  Clone ID: LIB3083-080-Q1-L1-A10
gtaaaatccgacgaaattgccgtgaaggaagaatgggaaggtggagtcaattcgtggttgcggtgactattctggcggtgggcctcctttcggcatcagccaccgctagaccctgcaagacattcttcgtcgcctcctattctttctcttttgaaaaccctaacgacccttcttcctccaccggattcgtcaccgtcttcaccgagatcggtcaattgaacgtcttaccacca

SEQ ID NO: 3698 - DNA, 106 bp, Gossypium hirsutum
  Clone ID: LIB3083-080-Q1-L1-A11
acaagtttttaccaactccttataaacaagcatctgttgtgttgattgcactagctgtggggatgattactattgagatggcctataaacctttattagacaaggc

SEQ ID NO: 3699 - DNA, 212 bp, Gossypium hirsutum
  Clone ID: LIB3083-080-Q1-L1-A2
gaaaatgaggagtcggaggcttcaaatggcattgagaaagtagagatttcgaatggcactgatgaggtctccgaaaactcttcatctatgcaaaaagatgaagatggggtgacagaagttgccaaaaagaaaaagaagaaaaataaaagcaaaaaaaagaaggagcccttgaagcagactgatcctccatctattcccgtttgtgagctttt

SEQ ID NO: 3700 - DNA, 318 bp, Gossypium hirsutum
  Clone ID: LIB3083-080-Q1-L1-A3
cggactaacagggtcagctgcccaattaatcctcatccgtacataccgttactgtataagatagatctcgttgtgaaagatctattactggaaaatttatgagtagagccgaagagtgtgaactgtacaagttaccaattaaatgaaggaatgagctccggtgtatagagaggacctcaccgtttaagaagtaccatagaacgatggacccacttttatttatcatttctattaactcttattttagtaatatgcttttttgatcccaatatcaataaatttcttatttcaaggcgaaatggctataaaaaaagaaaa

SEQ ID NO: 3701 - DNA, 325 bp, Gossypium hirsutum
  Clone ID: LIB3083-080-Q1-L1-A4
ccgcaccgtctggagaatctcttaggcaactggaatttcgaatggttcaattcttgaatgggactgtccttgggcttcctgaaaaatttagatctgaattttctttacaccaaaatgagagtcaaggatttacacaccataataaccctgctttaaccaactcagttcatgacagagatgtagcttctcttcaactaccccattgggacaggcagcggcatgtgctatcaaggaagaagtctggtaagagcaggctccaatttgtgtcgaatattggtgaacatgatgctgacgatgaaatgtctcctcgggaagccagtcatca

SEQ ID NO: 3702 - DNA, 318 bp, Gossypium hirsutum
  Clone ID: LIB3083-080-Q1-L1-A5
tcgagttttttttttttttttttttacaacctttctattgtcaatttccccatctctctcgtctctgggtctcgtaagttggtgaatagtgttgtaattagtgccaatggctcggattgggacctctgcagctcacattgtgttggcaatatttgctgtggccatgtttgttgtgtccgggaccatggcacaggatattgctccttctcctgcaatggctaccggagcaggctctgctttgccggtttccgctgtcttcttatgctcttccatgttggtctctttaattgctctcttggggcattgaattcaaagctt

SEQ ID NO: 3703 - DNA, 324 bp, Gossypium hirsutum
  Clone ID: LIB3083-080-Q1-L1-A6
tggcaactattcttatgtgttgctgttggtctttgggctggcctaattattggtttcgtaactgagtactatactagcaatgcatacagccctgtacaagatgtcgctgattcctgcaggactggagctgcgactaacgttatttttggccttgcgttgggttacaagtcttgcattattcctatttttgctattgcaatcagtattttcgttagttttagctttgctgctatgtatggcattgctgtttctgcccttggaatgctgagcaccatagctaccgggttggctattgatgcttatggtcccatcagcgataatgca

SEQ ID NO: 3704 - DNA, 140 bp, Gossypium hirsutum
  Clone ID: LIB3083-080-Q1-L1-A8
catcacattttcttgtcctgtatcatgtcctataaagagcgcatcaggtcggctcagcggtcctacaggccaattgtcattgcctgcgatcagcatcggatcggtgtgaatggacacatattgtctcaccatatagctta

SEQ ID NO: 3705 - DNA, 184 bp, Gossypium hirsutum
  Clone ID: LIB3083-080-Q1-L1-A9
ccaaagcatacccactagcggatgctcagttaacaaccgcgattttagatcttgttcaacaagctgccaactacaagcagctcaaaaagggagctaatgaagctactaagaccctgaatagaggtatctcggagttcattgtgatggctgctgataccgagccccttgagattctgctccatct

SEQ ID NO: 3706 - DNA, 212 bp, Gossypium hirsutum
  Clone ID: LIB3083-080-Q1-L1-B1
atgaaaagccggaatacaaacagccaaagtatgacgaagagtacccaaaacatgagaagcctgaaattcacaaggaggaaaaacaaaaaccgtgcaagcaacatgaagagtaccacgagtcacacaaatcgtatgagcacgaagagtaccataaagaaaaacccgagttccccaaattggaaaagcctatagagcacgagaaacaacaaagt

SEQ ID NO: 3707 - DNA, 344 bp, Gossypium hirsutum
  Clone ID: LIB3083-080-Q1-L1-B10
gcacctccccgtaagcaaaccacaaaggaaagcttggagagagacccaaaaacaatgtctaaggaagttagtgaagaaggacagggtcgtaaggactatgtggaccctccaccggcacctctgattgacatggctgaactcaagtcatggtctttttacagagccctcatagctgagttcatagccactctcctcttcctctatgtcactgttgctactgtaattggtcacaagaaacaacaagatgcatgtgatggtgttggtctcttgggtattgcatgggctttcggtggcatgatctttatcctttgttactgcactgccggtatctcatgtggacacat

SEQ ID NO: 3708 - DNA, 365 bp, Gossypium hirsutum
  Clone ID: LIB3083-080-Q1-L1-B11
gttaaacatggccaccgtcttgattttctcatgttggtggttaataatattgtgtttcagcacttatatctgtgtctaaccttcggtgcgtgttttagttactacgagggctgaagtacctgcactcggcgaacatccttcatcgagacttgaaacctgggaacctccttgttaatgctaattgtgacttgaagatatgcgatttcgggctggcacgaaccattagaggcaacgagcaattcatgaccgagtatgttgtcactcgttggtaccgtgcaccggagctcctactctgttgtgataattacgggacttccattgatgtttggtcggtcggatgcattttcgctgagattcttggtcgg

SEQ ID NO: 3709 - DNA, 377 bp, Gossypium hirsutum
  Clone ID: LIB3083-080-Q1-L1-B12
gacagatgaaacctatactgcagagagtgttgctctaaggcagatttcaggaacagctgtacacaataataaaacattgcaagttgatgcggtggcaacatcattgaactcaactgactgcttcctcttgcaatctggatcctcaatttttacttggcatggaaatcaaagcacttatgaacagcagcaattagctgcaaaagttgctgagtttttgaagcctggagttgttcttaaatatgctaaagaaggaacagagagcaatgcgttctggtctgcacttggaggaaaacaaagttataccagcaaaaaagcatctacagagactgtcagggatccccacttgttcactttctcttttaataaaagaaagtttg

SEQ ID NO: 3710 - DNA, 221 bp, Gossypium hirsutum
  unsure (1)..(221): unsure at all n locations; Clone ID: LIB3083-080-Q1-L1-B2
gttgccgtcaaatatattgaaagaggaaagaagattgatgagaatgttcagagagaaatcattaaccaccgatctttacgacatccaaacataatcaggtttaaagaggttgtggtgactccaacacatttagctattgtcatggagtatgctgccggcggtgaactcttcgagagaatatgcagtgcangtcgatttagtgaagacgaaactggtttttc

SEQ ID NO: 3711 - DNA, 241 bp, Gossypium hirsutum
  Clone ID: LIB3083-080-Q1-L1-B3
caaatccaagccaacaacacggttgaaggcattacgattgtcgtaccgaaagacagcgcattcaaggctcttacgaagccttcattgtcaaatctaactgatgatcagttcaaatcagtgctcctttaccatgccttgccacgatactatgcccttgcggacttcaatgacctaagtgagaaaggccctattagtacacttgctggggggcaatacacttttgcaattcaacgatgagtct

SEQ ID NO: 3712 - DNA, 333 bp, Gossypium hirsutum
  Clone ID: LIB3083-080-Q1-L1-B5
atacacaaaatgtatatgatctgcccataacagagcaaggaactttcatactagaaaatgtaacataaagctgctttttaactttatttccacaacacattacacgcaatatatttttcacaacatagacatcacgcaacaaaatgttgttgagctagctactagattacctttagttataaggtagggaatgggcagaacatgaaattaggctccacgggccatggtttgctcgccaggagggaccatggtgaagacaggttgagcattgaaccctggatggtgcaaccttcgacgaatctcacgaccttcctgacaaacggcacaaggatg

SEQ ID NO: 3713 - DNA, 411 bp, Gossypium hirsutum
  Clone ID: LIB3083-080-Q1-L1-B6
cgagaacttccttgaacgccgcttgcaaacacttgtgttcaagactggtatggccaagtctattcaccatgcccgtgtcttgattaggcaaaggcatatcagggtcgggaggcaggttgtcaacatcccatccttcatggtaagggttgactcgcaaaaacatatcgatttctctctcactagtccgtttggaggtggccgacctggaagagtgaagagaaagaaccaaagagcagctgccaagaaggctgctggcagagatggcgatgaagaggaagatgagtaaaaccttagaggggtactaccacccttagttacccttaaatagttttggagcttgccatttccttctcccctttattaaatatggtacgtatcttgcttctagacctttatctttagcgtatcttg

SEQ ID NO: 3714 - DNA, 219 bp, Gossypium hirsutum
  Clone ID: LIB3083-080-Q1-L1-B7
ttgtatctcgtgatttaaaattccattgcttacataatttcttttataagaggctagactcaataagctttaatttcatattttattcattctctaattccatttctacaagttttggtgatttttcaaagttagacttctgctgctgtccaaaacagttttagtgcaaaatgatgatttccattttgccccaaatttcacaattcatacaattcagtc

SEQ ID NO: 3715 - DNA, 213 bp, Gossypium hirsutum
  Clone ID: LIB3083-080-Q1-L1-B8
attttatgttatagaaaatgcaaagaaaaaagtcgaagcagcgtgtcctggtgtagtctcgtgtgctgatattttggcttttgccgcaagggatgctgtcgtgctctctggaggtcctacatgggaagtgcctaagggaagaaaagatggtagaacatcaaaggctagcgaaactatacaattgccggctccgactttcaacatatctcaact

SEQ ID NO: 3716 - DNA, 230 bp, Gossypium hirsutum
  Clone ID: LIB3083-080-Q1-L1-B9
gaaagttcacacgtaaggagcgaggcttctcagagttgcggcgtatgggaattggtctttttatttcagtcctatgcatgtcagccgcagctgtggtggagaccaggagattgcaccttgctaaagagctagatttggtcgataagcaggtcgctgtacccattagtattctttggcaaatacctcaatatttcttgttgggtgccgcagaggtctgcacatttatcgga

SEQ ID NO: 3717 - DNA, 234 bp, Gossypium hirsutum
  Clone ID: LIB3083-080-Q1-L1-C1
tggttttacagggcagtgattgccgagttcattgctacacttctcttcctgtatgtcactgtgttgaccgtgattggttacaaggtccaaaccgaccctgctaagaacactgttgaccccgattgcggtggcgttggtattcttggtattgcttgggctttcggtggcatgatctttattcttggttactgcactgctggtatctctggagggcatatcaaccccgctgtgaca

SEQ ID NO: 3718 - DNA, 388 bp, Gossypium hirsutum
  Clone ID: LIB3083-080-Q1-L1-C10
ccatcatcatcttcttcctcgacgctttctcttcccttggaagccctgcaacttctttaagtgtctcttcttcttctcccaactcgccggctatgttgttgatgctcggattcgattccttcaatccccatttctcaacctttcaactgttacaaatcggatacgcaatttcatgagagcaaatcacaagattatgatcaaagaaaagattagatcaagcaaaaagaagttttcaaagaattctgcaaagatttattcgggtcatacttgcttttctacaaagtacacaatacctatttgaatacttgtattttcgactttttaagatgagatgaagagagtgcttattttgtttaagtaggaagttatttctggtcaaatttgttat

SEQ ID NO: 3719 - DNA, 378 bp, Gossypium hirsutum
  Clone ID: LIB3083-080-Q1-L1-C11
caacacatgaatgaattattcctttcattggcattgctgtttgctcacaccacttgcttctcctccttactcatctcagcatggcctcaaaacccttcatcgcattagccaccactgttctcttcttctccctcatcgccgtcaatcattttgggaaacctttccacggcaaacttggggaaatggaaattgtcccaattacggatgccgtaggacctgaaagtgtagcatttcacccacttggagacggtccctacgtcggaatatccgacggtcggattatcaagtggcaaccaaatgagcatcggtggatcagttttggcatcacttctcctaacagaaaagggtgtgaagggacagacgatcatgaaacaaggg

SEQ ID NO: 3720 - DNA, 381 bp, Gossypium hirsutum
  unsure (1)..(381): unsure at all n locations; Clone ID: LIB3083-080-Q1-L1-C12
tggctttgaattttaatgccatcgcctcgaaatctcagaagctcccttgctttgctcttccaccaaaggccacccttagatctcccaagttttccatgatctccaccattccttctggctccaaagaggttgggaatctgaaaaagcctttcacgcctccaaaggaggtgcctgttcagatcacccactccatgccgcctcacaagattgagatctttaaatctttggagggctgggctgagaacaacattctgactcacctcaaaccagttgagaaatgttggcaacccgccgactttcttncaaatcctaattctgatggatttcatgagcaagtcaaaaagcttagggaaagggcaaaagagatcccagatgattact

SEQ ID NO: 3721 - DNA, 266 bp, Gossypium hirsutum
  Clone ID: LIB3083-080-Q1-L1-C2
gttctgtattatctcgtctactacgttttccattttcgggccgatccgtagctcttatttcagcaccatgactgttcactcccagattcaagatgaaactggcagaagtgtcaagccttcttattttaactcgccacctttggacgtttcggtcgcattccctcaggcaactccagcatctacttttcctcctcttgcttccgactattatcaatttaatgatctattgaggcctgaggagcaagctctacgtaagaaagtagaga

SEQ ID NO: 3722 - DNA, 321 bp, Gossypium hirsutum
  Clone ID: LIB3083-080-Q1-L1-C3
acaaaatgtgggacgatgtagtagctgggcctcaacctgaacgtggtctcggcaggcttaggaagatcaccacccagcctttgtccatcaaagatgaaggagaaaagaaaaagtaccagaggtcgttgtcgctgccgaatagtccagtgtcaggtccgacacccgtgacaccgacgactccgacggcgcgtaaggagaacgtgtggaggagtgtgttccatccgggtagcaacctagccaccaaaagtataggttctgatgttttcgacaagccacaacccaactctcctaccgtctatgactggctttacagggggggag

SEQ ID NO: 3723 - DNA, 307 bp, Gossypium hirsutum
  Clone ID: LIB3083-080-Q1-L1-C4
ctttgatatgaagaatgaacaaggaagaagatccgagcaagaattatggctaaggctaaagaataaaccaaggattcttatcatccttgatgatatttgggaatctatcaacttaatggaggagataggaattccaattggggatgatcataaaggctgcaaagttcttttaacaacacgtcattaacaagtatgtcgagctatggattgtcaaaacgtggtacaacttggctgtttgaatgatgatgaagcttggactctatttgaaaataaagcaggtctagatgacttttctgatgattctatt

SEQ ID NO: 3724 - DNA, 405 bp, Gossypium hirsutum
  Clone ID: LIB3083-080-Q1-L1-C5
caaaaagtggcacgattccaaatggagatgcctcaaggtgcgatgggatgagacttctaccatacctcgtccagagagagtttctccttggaaaattgaacctgctttggctcctcctgcgctgaatccccttccaatgcccaggccaaaaaggccccgatctaatgcagtcccttcatctcctgattcctctgtacttactagggaaggctcatcaaaagctattgtagacccttcaccagctactgggttttcaagggtcttgcaaggtcaagaattctcgaccttgcgaggcaactttgctgagagtcaagagtctgacactgttgaaaagtcggtgatatggcgacctacggtagatgacgagaagattgatgtgggtcccacttcaagaagatttgggtc

SEQ ID NO: 3725 - DNA, 352 bp, Gossypium hirsutum
  Clone ID: LIB3083-080-Q1-L1-C6
ggggttttggaacagaggaatctcggcgtgcgctgtgtgtgatggggcagctccgatcttcagggagaagcccttggcagtgatcggtggaggtgactccgccatggaagaatccacttttctcaccaagtacggttccaaggtttacatcattcacaggagggatacgttcagggcatccaagattatgcagaacagggttatttcgaaccctaagatagaagtcatatggaactcggtggtcgtagaggcctacggcgatagggttttgggagggctcaaggtgaagaacttggtcaccgaagaaagttccgatttgaaagtcaatggtctattctttgccatcgggcac

SEQ ID NO: 3726 - DNA, 241 bp, Gossypium hirsutum
  Clone ID: LIB3083-080-Q1-L1-C7
caggcgactgtttgggtcaccaaggtggcggaggcatggaggggtgaacatggaccacaaatgttggcccctccaccaaccagcatcaaaacctctgccttggctttgtttgggctgttgggtattccacttgcggtaacatttagcattccattcgcattggcatccatctattgctctgaagaaggtggcggccaaggtctgtctttgggaatactaaacttgtctatagttatcccac

SEQ ID NO: 3727 - DNA, 255 bp, Gossypium hirsutum
  Clone ID: LIB3083-080-Q1-L1-C8
caacatctcaatcatgggttcatccaatgattacattcagatcgtaatggttccattcatggctcatggccatctcattccattcttagctttagcaaaacaaatccatcaccaaactggcttcaacatcgccattgctaatacccctcttaacatccaatacctccgttcaactctccgaggaaaccccattcccggtatccattttttgcagcttcaattcaacagttccgaccatgggttaccacccaacac

SEQ ID NO: 3728 - DNA, 202 bp, Gossypium hirsutum
  Clone ID: LIB3083-080-Q1-L1-D1
tgtatcattccacaattctttttctttcattctctatatccctgataacactagggctgaactgcacccaagtgttaaatccacaacttctcctcattaaaacaaatcttaaaacgtaaaaaaccatcccatacatatcataaaactacataaataagattaagaaaatgatgatgacaatatcaactcgatatttaaaaac

SEQ ID NO: 3729 - DNA, 379 bp, Gossypium hirsutum
  Clone ID: LIB3083-080-Q1-L1-D10
aaagaacaccataattgtggtaaaatgtaccttaattacaagcaaaccatatttgaatattagccaactttatatattacacaaaagatcaacaccaaattacaaaatgtcaataataagaaaactgaatttctaacacaaagtattcccatcttgtttgctaacagaaaatgcactggtgaaagaaatgacacttaaacaccaccgggtttgctaacaccaccgggtttgctgctgctcccacctaaacacgaccgggtttgctgctgctcccaccaaaacacaaccaaccaccctgcttcatagatatatatttttaaatccctatcaagtcctatgtaagctgaaactaaatctgcaatttggctcacaatttttt

SEQ ID NO: 3730 - DNA, 312 bp, Gossypium hirsutum
  Clone ID: LIB3083-080-Q1-L1-D11
aaccaaaaacagtaaaacaaaagaaattaagaagaaagacaaagtatgcatgcatgcatgtcaggaaatgggcaaagtatctaaaatttacactcaaaaacagaaaagcttgtagactcctgactattgaatagatcacaacgcattcccatgaaaatgaaaaccattgtgcagattgcagcggtggggtctcacttgccacccaatgaagggaagtgcccaggatcttcgattgagggagctaacacactgctagctgtattgcctccatattcacctttaggaccacggccacggcctcgaccacgccca

SEQ ID NO: 3731 - DNA, 279 bp, Gossypium hirsutum
  Clone ID: LIB3083-080-Q1-L1-D12
catgatgattcacaacacatctgatggtggcatgaacgggacgaaccaacatgtgacggtgatgcatatgaccttcttctgaggtagcgatgccatgattcttttgtccggttggccaataaccagaaccggtatgtacgttttggccctcatagtcgccttccagcttgatttcatggaggagggtatgttatgactctcggatcatgaaacccggttccaccaaacacgtgaccgccggtctggtataaactctgttgcatgctctgagggttggac

SEQ ID NO: 3732 - DNA, 243 bp, Gossypium hirsutum
  Clone ID: LIB3083-080-Q1-L1-D2
cttgctagtattcctacttggagtggtgactctcaccactcccacatttggtacctatgagtcaccaaattatgggaaaccccctactcctgtattcaagcctcccaaggtgaaaccaccaccatatgaacctaagccaccagtgtatgaaccaccaaaaaaggagaagcctgaacctaagccaccggtttatgcacctccaaagaaagagaagcatggacccaaaccaccaatgtatgaacc

SEQ ID NO: 3733 - DNA, 284 bp, Gossypium hirsutum
  Clone ID: LIB3083-080-Q1-L1-D3
tgtctaaaaccaaatgtgcaaccgttggtattcaaggcattgcttgggcttttggtggcatgatctttgctcttgtttactgtactgccggcatttcaggtggtcatattaaccctgctgtgacctttggattgtttctagcaaggaaactgtcacttacaagggcattgttctatatgatcatgcagtgcctgggtgctatctgtggagctggtgtggtgaagggattccaaggagataaccgatatgagatgttgggtggtggaactaatgttgtgaaccat

SEQ ID NO: 3734 - DNA, 347 bp, Gossypium hirsutum
  Clone ID: LIB3083-080-Q1-L1-D4
gagagtttgagagagaaagagcaaaacaaaaagaagaagaaaaaaaaaaaagcagaagatattgttgggttattgaagctagctagctccacattttctatggcttcaaagcttcttttgattgctgtctttgttcttgatctcattgcttttggtttagctgtggcagctgagcaaagaagaagcactgccaagattgtccaagacagtgaagttaattataactattgtgtctatgactcagacatatcaacaggctatggtgttggtgcatttttgttccttatggttagccaagcccttgtaatggctgcaagcaaatgcttctgctgtggaaagggtttaaa

SEQ ID NO: 3735 - DNA, 308 bp, Gossypium hirsutum
  Clone ID: LIB3083-080-Q1-L1-D5
agtacgcattcatgcagtatgcagatcagatcatgggacgtttccttagggtttttgcttgtaggagtgctaccgtacatgaggaggccatgcttgctattggagctcttgcttatgcaataggagcagattttgcaaaatacatgccggagttttataggtacttggagatgggtcttcagaattttgaggagtaccaggtctgtgctgtgacagttggtgttgtgggtgatatttccagggcattggaagaaaaaattgtgccttactgtgatgggattatgacacaacttctcaagatttgtcta

SEQ ID NO: 3736 - DNA, 338 bp, Gossypium hirsutum
  Clone ID: LIB3083-080-Q1-L1-D6
gagaaatcctccatgttcaagccggtcagtgtggtaatcaaattggtggcaagttttgggaggtagtatgtgatgaacatggcattgatgccactggtaactatgtcggcacttcgcctgttcagcttgaaaggcttaatgtttactataatgaagccagtggtggcagatatgtgcctagagctgtgttaatggatcttgagccaggaactatggacagtttacgaacaggtccttatggaaaattgtttagaccagataactttgtgtttcggcaaaatggagctggcaataactgggctaagggacattatactgaaagagctggattgattgat

SEQ ID NO: 3737 - DNA, 245 bp, Gossypium hirsutum
  Clone ID: LIB3083-080-Q1-L1-D7
gcaaattaacgcctttttcttctctttgctgagctctcgcccccaacatcaccatggcagataggatataccctaaacaagcgacaaatggcaccgccgccgcaaccaacccttcttttccagccactaaagcacaacaatacggagcctcccgccctgtctaccgtccacaacccgaacgccaccgctaccgccgctcttgctgttcttgctgcctttggaccaccatagctatcctcgttctc

SEQ ID NO: 3738 - DNA, 242 bp, Gossypium hirsutum
  Clone ID: LIB3083-080-Q1-L1-D8
catgatgatgcacaacacatcagatggcggcatgaacatgacgaaccaccataagatgatgatgcatatgaccttcttctggggtagcgatgccgagattctcttctccggttggccaggaaccagaaccggtatgtatgttttggccctcatagttgtcttccagcttgctttcatggtggaggggatttctcactctcggttcatgaaacccggttccaccaaacacgtgaccgccggtc

SEQ ID NO: 3739 - DNA, 314 bp, Gossypium hirsutum
  Clone ID: LIB3083-080-Q1-L1-D9
gcttgctgtatgaagcacgatgcctgcgttcaagctatgaacaatgactatctgagtcaaaagtgcagccaaagcttcataaagtgcatgaaggatttccagaaaggaggaggaaggagtttcaagggtaataaatgccaagtcgatcaagtcgttgatgtcatctctgttgtcatgaaggctgccctgattgctggaggagtgcttcataaaccttagtctttttacccaacccaacactgtcagacaagacattcttctgcttctgcaatccctaagattgatgatggcatgggcatcccctcaattaaaat

SEQ ID NO: 3740 - DNA, 208 bp, Gossypium hirsutum
  Clone ID: LIB3083-080-Q1-L1-E1
gaaatcccttctctccccattgaagcaactctgtttccgggtgcatccaatccatatgaagagatcacgtttataccttttgcctgacgatgtgcaatcatgcccttgcgtaaatccgcatgtgatatggcccatgttgttggaatcaaacgcatcatccatgctgcctgcctggcagtgaaacatgtcaaaggctatatatccactc

SEQ ID NO: 3741 - DNA, 294 bp, Gossypium hirsutum
  Clone ID: LIB3083-080-Q1-L1-E10
ggttattgaagctagctagctccacattttctatggctggaaagcttcttttgattgctgtctttgttcttgatctcattgcttttggtttagctgtggcagctgagcaaagaagaagcactgccaagattgtccaagacagtgaagttaattataactattgtgtctatgactcagacatatcaacaggctatggtgttggtgcatttttgttccttatggttagccaagcccttgtaatggctgcaagcaaatgcttctgctgtggaaagggtttaaaccccattggttcaa

SEQ ID NO: 3742 - DNA, 325 bp, Gossypium hirsutum
  Clone ID: LIB3083-080-Q1-L1-E11
cttgtccctcttgttgttgatatcatatctttatcaatcaaggagttgatcgagttaggggcagtgacatttttggtccccggaaactttcctattggatgctccccatctttgctgacaagttttcatggttcagaaaaggatcaatatgatcccttaactggttgtctaacatggttgaaccaattctctcaacaccacaatgaattacttcgaaaagaactcgaaaatatccgaaaccttcatccccaaatcaacattatatatgttgattattacaaagcttcaacaccgttttaccagtctccgaaaaactatggattta

SEQ ID NO: 3743 - DNA, 364 bp, Gossypium hirsutum
  Clone ID: LIB3083-080-Q1-L1-E12
cctgcctggtatggcctgaagggagcaaagttaaggtggcttgagcgatttgcatatgtcaacaccaccatttatcctttcacatccttaccattgcttgcctattgtaccctcccagcaatctgtttgcttacagataaattcatcatgccaccaataagcacgtttgcaagtctcttcttcattgccttgtttctttcaatatttgcaactggtattcttgagctaaggtggagtggagtgagcattgaggaatggtggagaaatgagcaattttgggtcataggtggtatttcagcacatctatttgctgtggttcaaggtctgctgaaagttctagcaaggatcgacactaatttcacag

SEQ ID NO: 3744 - DNA, 273 bp, Gossypium hirsutum
  Clone ID: LIB3083-080-Q1-L1-E2
atacgaaaatatgagcaaccaaaactgtttccaacaaaatgcattataaagtagaaaaatccacaatgaaccaaacccttcaaaagatttcaagtaaaaacatacttgaacatacttggtctatgggcaattatactaagcattaaacaaaacaaaggttctttcaacaaaaagagtgaataagataactatcaagacagccaactagttgaggatttagagtatcgtcagatcttaaacggcaacatggaggaatgctctttctgcttccga

SEQ ID NO: 3745 - DNA, 252 bp, Gossypium hirsutum
  Clone ID: LIB3083-080-Q1-L1-E3
caaaaacaaacacaaaaatttacattctgatagtgtcagagtttcaccagctatgacaatctcttcaacagaatatccaagtgtaagataaattgatcaactcgatgataggattatagatcataagttcataacccaacccattcccatgtatgcttttggtaccccccccccaaatcaccaaaagaacagtagatgcaaaagatttctgtaaaggatcggcaactacctgacaatgtaaagggggagagg

SEQ ID NO: 3746 - DNA, 316 bp, Gossypium hirsutum
  Clone ID: LIB3083-080-Q1-L1-E4
gttattgagactacaaggaacatctgagttcagaattaagacaagcaaaatgagtggcttgatggagcttgtaattcttgtcccatgttgtttcttcctcgtagctttaataaagttcctttatgattacctgtgggtacctctccgtatacagcatctgatgaattcacagggaatcaaaggacctccttacaaattcatccatggaaacaatgaagaagctaccaagatgagagaagaagcattaagcaaacctatggccttgaggcatgatatatttcctagagtgcagccacatatttacacctggatcaac

SEQ ID NO: 3747 - DNA, 351 bp, Gossypium hirsutum
  Clone ID: LIB3083-080-Q1-L1-E5
gaaaaacccgagttccccaaacgggaaaagcctaaagagcacgagaaacacgaagtcgaatattcggaaatacccgagtacaaggaaaaggaagataagagtaagaaacataaagatgaagagtgccaggagtcacacgaatcgaaagagcacgaagagtacgagaaagaaaaacccgatttccccaaatgggaaaagcctaaagggcacgagaaacataaagccgaatatccgaaaatacctgagtgcaaggaaaaactagatgaggataaggaacataaacatgagttcccaaagcatgaataaagaagaggagaagatacctgagaaaggcatagtacccctgagtgg

SEQ ID NO: 3748 - DNA, 276 bp, Gossypium hirsutum
  Clone ID: LIB3083-080-Q1-L1-E6
aaccagatgaatccattatacctgttgagcattcacaagttcccttaacaatttactttcaaatacacccaacaaaaatatcaagtttcaacccaaacacaaataaaacataaaacagcataacatacagtaaaccatttcaagtctttaacaagcttcaaagaatagaagcttgcataacacggaagcaacaggtaataaaagacatcgtaagcacactcaatcacacgtacttcttagtactcatcatcttcaccctcatcaccctcagctgac

SEQ ID NO: 3749 - DNA, 277 bp, Gossypium hirsutum
  Clone ID: LIB3083-080-Q1-L1-E7
ctcgagtttttttttttttttttttttagacaatttggagataataataatactgggaaaaacccggttgaatacaaccctccctcacaatactcaaaaccgcgaaaaaaaactctcaacatgcaatgtatgtaaacatgactcggtgtttgaacaaacctcaacactcacaaacactcatacctaatgacacgcaaaggacctcaaaccattccagcttataaacatactgacccatctagtttcctctgcaggagatgaatatgcaagacatggg

SEQ ID NO: 3750 - DNA, 304 bp, Gossypium hirsutum
  unsure (1)..(304): unsure at all n locations; Clone ID: LIB3083-080-Q1-L1-E8
gtagatttgaaaggcaaagcatatgagatgctgagacagaatgcaacaaggtttttgctggatgatatctacagaaatcctggacccctccagtttgatggtccaggtgctgatgctaaggctgtgacattatgtgttgaagatcaggattacatgggccgcatcaagaaactgcaggaataccttgacaaggtccgtaccattgtgaagcctgngtgttctcaggaagttctgaaagctgctttaagtgtaatggcttctgtgacagaagttctgtcagtgatgtcttcatcgtcatctggcg

SEQ ID NO: 3751 - DNA, 306 bp, Gossypium hirsutum
  Clone ID: LIB3083-080-Q1-L1-E9
ggaaagttgaggatgttgatgaggataaagagaaggagggaaagaaaaagaagaagattgaggaggtgtcgcacgagtggtctttggtgaacaaacagaagcccatctggatgaggaagcctgaggagattaccaaggaagaatatgctgctttttacaagagccttacaaatgactgggaagagcatttggccgtcaagcacttctcagttgaggggcaacttgagttcaaggctgtcctctttgtccccaaaagggctccttttgatctctttgatacaaggaagaaacccaacaacatttaac

SEQ ID NO: 3752 - DNA, 308 bp, Gossypium hirsutum
  Clone ID: LIB3083-080-Q1-L1-F1
cggaacacagttttctttgatattaacatgaaaggtctagatggtatacaaggccctgtatatgtcggcacggggtgtgttttcagaaggcaagctctttatggttatgaacctccaaagggacctaagcgcccgaaaatggtaacctgtggttgctgcccttgctttggacgccgcagaaaggacaaaaagcactctaaggatggtggaaatgcaaatggtctaagcctagaagcagccgaagatgacaaggagttattgatgtcccacatgaactttgaaaagaaatttggacaatcagccatttt

SEQ ID NO: 3753 - DNA, 364 bp, Gossypium hirsutum
  Clone ID: LIB3083-080-Q1-L1-F10
ctcaatatttcaaccagtatctactagtatccggtcatggccctgttcacactcgttctacatggttcaacaatgtaatgcaagtaatattctcatccccggcaacagtgggattcatagttgctttcttcttggattgcacccacagctacgggcatagctcagttcggagagatagtggaaggcattggtgggaaaagttcaggaatttcaatacggatacaaggagtgaagaattctattctttgcctgctaatcttaataggttcttcccttcattctaagctctaccagtaataaccatactcatcaaatactgaaaatcagtgacaacagtgatcatttaaagcatttctgttcaagg

SEQ ID NO: 3754 - DNA, 343 bp, Gossypium hirsutum
  Clone ID: LIB3083-080-Q1-L1-F11
gttaatcttgattggcgagagtctgttccacaccctgaggatcgtgtggagtatgagctatggaccaacagcaatgatgagtgtggagtaaaatgtgatatgctgatggaatttctgaaggatttcaagggtgctgcacagatacttgaaaaaggtggctatactcaattcacaccccattatataacttggtactgccctcaggctttctcgctaagcagacagtgcaaatctcagtgcatcaactacggaagatactgtgcacctgatcccgaacaagattttagctctggctatgaggggaaagatgtagttattgaaaatttgagacagctgtgtgttt

SEQ ID NO: 3755 - DNA, 368 bp, Gossypium hirsutum
  unsure (1)..(368): unsure at all n locations; Clone ID: LIB3083-080-Q1-L1-F12
ctcgtgccgattaaattaaaacgagaccataattctaaggtctaaattattttactttttatgctagacgaagtgatcttgaacttcactttatctgtgaaaaaccttcattgatccatgcagattctaaatgcaaacaacaaagttgcttgaattaagttgtctggaaaaaaaacccattctttctttgatctctgctccaaaagttgtcacctttaatctctcttcgtctcctcttcttagattgaagaatcaaggttagattttaaggcacaatgcggttggttccatcaaattcgagtgtgaaaaagaggcaaagtaatgggggaagcaatggtngcttgttgtatctcaatgtctatgatctc

SEQ ID NO: 3756 - DNA, 247 bp, Gossypium hirsutum
  Clone ID: LIB3083-080-Q1-L1-F2
tttcactgctttccttcaattatttcccacttccttttggcttcaaaatttccttgggattcctatggctaccgctgaggttgcatcagttcaaactgcacttcatgaggagaaaactgaagaatcagtgaaggatcaagaagctacaacagatgaagtagttgccgaagctccagcagcggaaccagttgccgaagagccaaaggaagcggagcctgcggcggtggtagtcgaggaacctgaaacc

SEQ ID NO: 3757 - DNA, 277 bp, Gossypium hirsutum
  Clone ID: LIB3083-080-Q1-L1-F3
aaaaagcaaaaatggagaaatctcagatctggttggcctggggagtcttggccttgctattggcatcggcaacggcggatgacgtcgttgtactaacggaagataacttcgagaaggaagtcggtcaagatcgaggagctctcgtcgagttctatgctccttggtgtggtcactgtaagaagcttgctcctgagtacgagaagcttgggtcaagttttaagaaggctaaatccgtcttgattggaaaggtggactgtgatgagcataagagtgtctg

SEQ ID NO: 3758 - DNA, 117 bp, Gossypium hirsutum
  Clone ID: LIB3083-080-Q1-L1-F4
ctttctcaacgcgacaaaacaagggttttaggagaacatctctggtagtagcttccatggctgatctcagcactgtgctcgtcactggagccgctggcagaacaggtcagaatgttt

SEQ ID NO: 3759 - DNA, 356 bp, Gossypium hirsutum
  Clone ID: LIB3083-080-Q1-L1-F5
caagattcttgaagtcattggtaagggaagctatggagtagtttgtgcagcgcttgacacacatacgggtgagaaagttgcaataaagaaaatacaagatgtatttgagcatatgtccgatgcaattaggattttacgtgaagtcaagctacttaggcttcttagacatcccgacatagttgaaattaaacgtataatgttgccaccatcaaagagggagttcaaagacttatttgttgttttcgagctcatggaatcggatcttcaccaagtcatcaaagctaatgatgacttaacacgagagcatcaccagtttttcctgtaccaaatgcttcgtgcaatgaaatatatgcata

SEQ ID NO: 3760 - DNA, 363 bp, Gossypium hirsutum
  Clone ID: LIB3083-080-Q1-L1-F6
caagatcttgaaggttatccgcaagaacttggtaaagaagtgcattgagctcttctttgaaatagcagagaacaaggaagattacaacaagttttatgaggcattctcaaagaacctcaagcttggtatccatgaggactctcagaacaggactaaaattgccgaattgctccgctaccactccaccaagagtggtgatgagctgaccagcttgaaggactatgtgaccagaatgaaggagggtcagaatgatatctactacatcactggtgagagtaaaaaggcagttgagaactctcccttccttgagaagctgaaaaagaaaggtatgaaggcccttacatgtttgatgctattgatgag

SEQ ID NO: 3761 - DNA, 344 bp, Gossypium hirsutum
  Clone ID: LIB3083-080-Q1-L1-F7
tttgtatggtggagctggttaatgactgtgatttctacatttcctttgtgaaaatatttcagttttatatggcaaaaaatatgagtagagctaatttggttcaccttgtttgatgaaaaaacttgatatagagatcagttgcaaaggattcatgtaaggtttgagcttttgagggttcatttttatttttatttttttttctttcaatacaggttttctttactgggattgattaagatgtaaaatcaagattgtgggtatacacagattatgtatcatgcatctcttggtgacattgggattcatattaagaaaagcccttttttttttcttccattaatttt

SEQ ID NO: 3762 - DNA, 273 bp, Gossypium hirsutum
  Clone ID: LIB3083-080-Q1-L1-F8
ctctttctaagaacatgatggcagtactgtttgtatatggtggatttatggtttttggaataatttctcttcgttttctctatcgtttcatagacaacaatggcctccctcgaaactggctatttgttgggatgattcccacgttacttctcaacatccgtcgccctcatgataaagttgcccaaatcctcagacgaagcaatggtaccttcttttatagaaggacttggtttactaacaccagctttttatccaccttcgatcctgagaaat

SEQ ID NO: 3763 - DNA, 243 bp, Gossypium hirsutum
  Clone ID: LIB3083-080-Q1-L1-F9
gagaaatcctccatgttcaagccggtcagtgtggtaatgaaattggtggcaagttttgggaagtagtatgtgatgaacatggcattgatgccagtggtaactatgtcggcacttcgcctgttcagcttgaaaggcttaatgtttactataatgaagccagtggtggcagatatgtgcctagagctgtgttaatggatcttgagccaggaactatggacagtttacgaacaggtccttatggaa

SEQ ID NO: 3764 - DNA, 400 bp, Gossypium hirsutum
  Clone ID: LIB3083-080-Q1-L1-G10
tttattatgggttttgggtttatggagtgtttctgggattgatttgagccgagctgagagtttcctttcgtatttagatgaagaagttacaatgtcccctggtagtaccaccactcttatagttcctctcactctcattcaaggagctgcttctaaaggagctgtttgtttggatggaacgcttcctggttatcatcttcatcgtgggttcgggtcaggtgcaaacagttgggttatccatttagagggaggtggatggtgtaataccattcgaagttgtgtattccgcataactacaaagcgtggttcatcgaaatttatggagaagtccataaatttcactggaattttgagcaacaaagctgaagaaaaatctgatttctacaattgggatagagtt

SEQ ID NO: 3765 - DNA, 186 bp, Gossypium hirsutum
  Clone ID: LIB3083-080-Q1-L1-G11
tctccactttttcatcttttcttaaacttatcctccccagacgttttttaccctttcgcatacataccaaaaactttcaattttcctctatttataccaccactcttacctttcctcttattctcattcatatatcatcatataaattaactcttctattaaatttaactcttttcttttatctat

SEQ ID NO: 3766 - DNA, 292 bp, Gossypium hirsutum
  Clone ID: LIB3083-080-Q1-L1-G12
attgagcaaatccgacgtcggtttcccatgttggagtcgtgaccatgtgacgtatgatagcaaggtaaaccaagctgagaatcttatggtcgtgggcagaggacctgaatgcacagcaattgctgaccctaaatactcaatgtgccaacttgcattgaatggtttgccaagtgaagtttatgagatgaaatgggacttgataatgttggatgcaccgaccggttacttctaggactctccggggaagatgaccgccatatacaccgtgggtatgaatgctatgaataaagag

SEQ ID NO: 3767 - DNA, 280 bp, Gossypium hirsutum
  unsure (1)..(280): unsure at all n locations; Clone ID: LIB3083-080-Q1-L1-G2
gggaacatctcaaatctcgggttgagaaaattactcaaatattcaaaagcccaaggcttctgtacattaaatggattttcagttcacacaacctctgaaagacaaaagaaccaatggaaatccatgattcatcttccaaactatctctaaaatagaaaggaagtacaaaatggggggggggggacaaaaaagatgataagcaggggaagtaaaagcattttaagcggttctctgctcaatccataaattatcaactnccatttaaataaatgagggtctc

SEQ ID NO: 3768 - DNA, 295 bp, Gossypium hirsutum
  Clone ID: LIB3083-080-Q1-L1-G3
cgtttttcaggttgaagaaatcctccttttgggttcgaggtctggcttcaccaccaatgctagagatcggacatgccccaggtaatgcccttttcggcaaatacgagatcggccggctcctcggttgcggtgctttcgccaaggtttatcatgccagaaacctccgcaccggcctcagcgtcgctgttaaggtcatcaacaaaaagaagctacccaacctcaccatgatgtccaacgtcaagcgcgagatctccatcatgagtcggttgaaccatccttatatcggcaaacttta

SEQ ID NO: 3769 - DNA, 323 bp, Gossypium hirsutum
  Clone ID: LIB3083-080-Q1-L1-G4
cgcctttataagaacctatgctatgtatttggatcaaagagttgaattgatgcttttcgacaggaaaagcagtggaggcagtggcgctgggggaagtagtcatggaagtgctgatgatagatatggtgggcgagataatttccgatcaccaccaccgaggccatacgaatatgattatggggatatcagaggtgataatggatatggaaattatgggatgacaaggagaacgaggtcttatggcgatatgagtgaggcagtggggagtgatgggagagatggaagagaggagaagaaagcagtgacccctttgagggaaatga

SEQ ID NO: 3770 - DNA, 348 bp, Gossypium hirsutum
  Clone ID: LIB3083-080-Q1-L1-G5
attcaatgagaaagcagccaaatcagcaagcaaccaatggcataaagtaaacaaaagacagaaaaaaaaagaacaggtaactccagcaaaccttgccatatactcttccttttctccatttcttcccaaaaaatagatactaacaattaaagaaaaacccagagagaaagtttttttggaacaatttactgcccactagcgttacctttggcatcccatatgaatctgctgcttagaaaaggaaactgaagttgagcaattaaagtacaaagtataaatacaaattttataataataaaaaaaggtctttgaaactgcagggaagtggtttcctttgagacagaaggc

SEQ ID NO: 3771 - DNA, 335 bp, Gossypium hirsutum
  Clone ID: LIB3083-080-Q1-L1-G6
gatcgtaatgttggggatttatcaggtggggagctccagagatttgctattgctgttgtcgccatacagaatgctgagatttatatgtttgatgagccttcaagttaccttgatgttaaacagagactgaaagcagcacaggtcattcgatctctgctcaggcctaatagctatgttattgtggttgagcatgatcttagttcctggattacttgtcggatttcatttgctgcttgtatggaaaaccgggtgcatatggagtcgtaacccttcccttctctgtaagagagggaatcaatatcttcttggctggatttgtacctactgaaaatcta

SEQ ID NO: 3772 - DNA, 254 bp, Gossypium hirsutum
  Clone ID: LIB3083-080-Q1-L1-G7
ggtactggctttatggcggagtgtactagaactgcttatgttagttctggaacagaattatatattaagaggaagaaagacagattacctgttggacaagtagtagatgtccctcctagagagtcgtctatcagactaagagttggagatttactaattatttcacgggatagtacatgtggcgaggataattcctatgggcacgcaagtggtgcttatagaataacatgttcatcgggctatctctttgatgc

SEQ ID NO: 3773 - DNA, 307 bp, Gossypium hirsutum
  Clone ID: LIB3083-080-Q1-L1-G8
agcacggcatagatccaactggaaggtacattggttcctcggatctgcagttggagcgtgttaatgtttactataacgaggcttcatgtggtcgctttgttcctcgtgctgtgctcatggacttggagcctggtacgatggacagtgtccgaactggtccttacggccagattttcaggccagacaactttgtttttggacaatccggtgctggaaacaactgggccaagggccattacactgaaggagccgagcttatcgatgccgttcttgatgttgtgaggaaagaagctgagaactgtgactg

SEQ ID NO: 3774 - DNA, 293 bp, Gossypium hirsutum
  Clone ID: LIB3083-080-Q1-L1-G9
ctgaactcaaccctcacctttcagactcgggcttggcgaggtttattccaaatgcagatgaggtactaaatcgtgacgatgtggggtctggatacagtgcacctgaggttactatgtctggacagtactctcttaagagtgatgtttacggttttggagtggttatgttggaacttctcactggacgtaagccatttgacagcacaaggcctagactggagcaatctttggttcgatgggcaacacctcaactccacgatatcgatgctctatccaaatggttgatccggcac

SEQ ID NO: 3775 - DNA, 273 bp, Gossypium hirsutum
  unsure (1)..(273): unsure at all n locations; Clone ID: LIB3083-080-Q1-L1-H1
cgtgaacgtcgttggccatggcgatgatcacaagggacggtggagatgcgttcccttcacgcatccttcaacgtttgaaacaatagctatggaatctgaccttaaaaacaaagtcaaatccgatctcgagtctttcctcaaagccaaacagtattaccataggttgggtcgtgtttggaaacgaagctatctcctttacggtccttcaggtactggaaaatcaagctttatcgcagctttggctaatttcttgagttancgatgttacgacat

SEQ ID NO: 3776 - DNA, 389 bp, Gossypium hirsutum
  Clone ID: LIB3083-080-Q1-L1-H10
atttggtgccaatcgttctttccctttataaaaaccccgaatctaatttcatctcattttccatttcattttcattttttcattttcttgttctttcttctttgacttttcttctacagagaggaaaaggggaaggaaagaaagaaaaaatatatatttatttttgcaaggatgcagaggcgtcaagatcaacggtcgagatctgttaaacccattacggttcatgggttagctcagtctggggatcttgttggtcttcaaaagttgctcaatgataaaccttttcttctcaatgagagaaaccctgttatggcacaaacaccacttcatgtatcctctggaaatgacagggctgagatagttaaatttttgctcgattggcaaggatc

SEQ ID NO: 3777 - DNA, 380 bp, Gossypium hirsutum
  unsure (1)..(380): unsure at all n locations; Clone ID: LIB3083-080-Q1-L1-H11
gaccgtcgcgtactcagcagcttaagaacccaaaattgaggatgaagctttctgtctcttatgatttggataaccctgatgtgaaggatgatgagaaagatgataatagtaggtctaacaaaagcaagaggaagcaccggtcagattcgggttctagtagtgatagtgaggcttctgttttcgagactgatagcggtggtgcctcatctgttacgggatcaggttcttcttcagcagtgagtagtacggattacagttcgtcatcggagtccgaggaagagaggaagcgtangagaaagaagaataggaagaagaagcagaagaaggtgagacgcagaaggtacagctcatcttctgagtcttccgattctgaatcaaca

SEQ ID NO: 3778 - DNA, 375 bp, Gossypium hirsutum
  Clone ID: LIB3083-080-Q1-L1-H12
gagactacaaaaagttgctaaaacaatggaccatctagaaagggcaaagagagaggaagcagcccccttgattgaagctgcttttcaacggagattggtagaagagaaggtgcttcatgagcgtgagcaacagctggaagttgagttgagcagacatcgccatgatggggacttgaaagagaagaataggctggcacgtatgctagaaaacaagatgattttccaggaaagagtaataagtcgtcggcaatctgagtttgaccagaggagagtagagagagaggagaggatcaaacaaataattcaggcccggaagcaggaaagagatatcaagagaaagaaaatattttatgtgaggtctgaggaggagaaaat

SEQ ID NO: 3779 - DNA, 268 bp, Gossypium hirsutum
  Clone ID: LIB3083-080-Q1-L1-H2
cagcattttcctttggaattctttgtctctatttaaaaaaaaagagcaatttttttgaggtggtagtatacaaaaacaaaatgaagatctgttgcattggagctggttatgttggtgggcctacaatggctgtgatcgcgcttaaatgtccggatattgaagtggctgtcgttgatatctctgtacctaggatcgctgcctggaacagtgaccagctccctatctatgagcctggtcttgatggtgttgtgaaggagtgtcgtggcaa

SEQ ID NO: 3780 - DNA, 292 bp, Gossypium hirsutum
  Clone ID: LIB3083-080-Q1-L1-H3
caatggtgcattagtcgaaccataaccgtgacagccaccgacttttgtccacctaactatgctttatctagtgacaatggcgggtggtgcaatcccccacgagaacactttgatttggccgaaccggcattcttgcggatagcagaatatcgagctggaatcgtccctgttatgttcagaagggtgtcatgtgtgaagaaaggaggcatcaggtacaccatgaatggacattcgtacttcaacatggtgttgataacgaacgtgggaggggcaggggatataacgtcagtgt

SEQ ID NO: 3781 - DNA, 389 bp, Gossypium hirsutum
  Clone ID: LIB3083-080-Q1-L1-H4
cttccctgtctttctctgtcttctcttactttttatattggtctcaattcccattaaaactttcaatctttcagccataattaagcttcttcccttcagaaaacatcgactgaagctgctccaagattaaagaagcttcaatttataatactctgccccttaaactagcaaagcctgatctgctgcataatcgtctaaagaaaaattgatggggataaataagttgctgtgttggtttgcagttttcttctttttgttgggtttctctgcttgcagttcgatttctgatggtgtttttgactctttcacttctactggaaggcacctccttcaagctaagaaagcttgccctgttaactttgagtttctgaactacacaattatcacaa

SEQ ID NO: 3782 - DNA, 374 bp, Gossypium hirsutum
  Clone ID: LIB3083-080-Q1-L1-H5
ctcaagtttgctgagagagaaagaaatggcacaacgatctgatgtacccaagtttggcaattgggagggtgaagaagatgttccttacacagcttattttgacaaggctcgtaagggccgaaccggagggaagattgtgaatccgaatgatccccaagagaatccggacttgcgtcgtgattatgtggctccaaataaagctcctccggcttcgagaacgaatccggaagcaaatgaactggtaggagatggacctgttagaaggggacatgagtgtggaaagagcagggatgaagttgacttcaaacagtatgccgactctccggtacgccatgacaatgtcaaccgtagagctttgggggacagtacaccta

SEQ ID NO: 3783 - DNA, 379 bp, Gossypium hirsutum
  Clone ID: LIB3083-080-Q1-L1-H6
caaatactttgctgcaaattctcccaaatttttcagaaaatgtaacacaagggaaaaaaatgagagagatccttcatgttcaaggtggacaatgtgggaaccaaatcggttccaagttttgggaggttgtttgcgatgagcacggcatagatccaactggaaggtacattggttcctcggatctgcagttggagcgtgttaatgtttactataacgaggcttcatgtggtcgctttgttcctcgtgctgtgctcatggacttggagcctggtacgatggacagtgtccgaactggtccttacggccagattttcaagccagacaactttgtttttggacaatccggtgctggaaacaactgggccaagggccattacac

SEQ ID NO: 3784 - DNA, 327 bp, Gossypium hirsutum
  Clone ID: LIB3083-080-Q1-L1-H7
cgcattcaacttgttcaggctttattcccccaccaagtggatgcacttgaaactctaatcgtaaattatggttaatgtggtattgaaaattttttaacttcataatttgattgatattttgccatataatttaaaatttttaacaaataaactatccgtgttaaaaattgtcatgccaaacaattacttatgctaatattatcatttataaaagaaatgaaaaagttacaaaaaaaatgtagcattggatttttattattaataagattgctacggtataacttttgttcataaacacttaagttaggcgtatttttttttttgaat

SEQ ID NO: 3785 - DNA, 311 bp, Gossypium hirsutum
  Clone ID: LIB3083-080-Q1-L1-H8
gattcttcgaaaacttcatcatgcaaggtctccatgttgaccaaatcgaaaagggtcgagtcctttgctccatgaaagtccctcctcgtttgctgaacgctggtaatttcttgcacggtggagctactgcatcactggtggatttggttggatcagcggttatttacacctacggagttagcaccagtggagtttctgtcgaaatcagtatcacttacttggatgctgcttatgttggcgaggaaatcgagatagaggctaaagcattgcgttgtgggaagaactgtgccgttgtcacggttgaatttcgg

SEQ ID NO: 3786 - DNA, 297 bp, Gossypium hirsutum
  Clone ID: LIB3083-080-Q1-L1-H9
cagaattcggtgaactttatctcttcaaatggacaactggcttaatccctcccacaactctgataatactgaacatggtcggagtcgtggccggagtttcagacgcaatcaacaacggctatggttcatggggtccattgttcggcaaactgttcttcgcattctgggtcattcttcatctttacccattcctcaaaggtttgatggggagacaaaacaggacgcccaccattgttgtgctttggtccatacttttggcatcgattttctcactgggttgggtacggatcgatccct

SEQ ID NO: 3787 - DNA, 404 bp, Gossypium hirsutum
  Clone ID: LIB3083-081-Q1-L1-A1
aagatgttcagggagagtaccattaccaagcttgcagatgtacctctatcacatatttctgatgatgtttataagacttcagctgattggatcagccaacaatcccttgaggcacttggtttttttgtcttatggtctttggacatcattcttggggatttggtggcccaacaagcaaatgctaagggctccaaaaaaagcgtgcaacaaccatcctcgaagtctaaggttggtatatttgtggcattagcaatggtattgcggcgtaaacccgatgccctaattagtgtattgccaaagctgagagaaggatcgatatatcaaggacaagataagctccctgttattatatggatgataattcatgcatgctctggagatcttgctgtggggctgtacatgtg

SEQ ID NO: 3788 - DNA, 398 bp, Gossypium hirsutum
  Clone ID: LIB3083-081-Q1-L1-A10
gataacttcaaggagatatttttctccagtattccatcatccaagaacaacttcagggaaaaggtgcccagggaacctgtgctaccaacacgaccaggtggttttatgagtccaaatatggggaaggctgtggacgacataaaaatgggtaggaagacagtgtggggtgatattggtgctggcactgatcattgtgaagggcaactcataagtgaccgtgtaaatgttaaggagggtgaattaggagatttatctccagatattagaagtacagtagatgacataggtgaccgttctggtatacatcccaggcggtctagctggggtagaaaaagtggtcgatgggaaatgtcacctgaagtacttgctttggcagctagagtgggggaaccaaaccg

SEQ ID NO: 3789 - DNA, 366 bp, Gossypium hirsutum
  Clone ID: LIB3083-081-Q1-L1-A11
gaccaaaaaatacgagacacacttcataatatattatataatactttaatattacacaattttctttttcaggtacaaattttcactataacatttaattataataagttcacttgtgtttcaagatcaaaatctcatcatcttgaagtttcaattctctctccaacctcgagttcccgaactcactcctctggttcagccaaccaatagtatctgcagacacaatctcgatgttttccggtaattcaccatacaacaggccatgccacatcccaggatacaacttgaaactcttgtccgaacttgctgcatcattgtacaattgctggctcactgctttgtctgttactttatcttccccttcat

SEQ ID NO: 3790 - DNA, 375 bp, Gossypium hirsutum
  Clone ID: LIB3083-081-Q1-L1-A12
atcctttcacatcccttccactcattgcctattgttcactaccagcaatctgtcttctcacaggaaaatttatcataccaacgctctcaaacctggcaagtgttctctttcttggccttttcctttccattatcgtgaccgctgttctcgagctccgatggagtggtgtcagcatcgaggacttatggcgtaacgagcagttttgggtcatcggtggcgtttcagcgcatctctttgccgtcttccaaggtttccttaagatgcttgcaggcattgacaccaactttactgtcactgccaaagcagctgatgatgcagattttggtgagctctacattgtgaaatggactacacttttaatccctccaacaacac

SEQ ID NO: 3791 - DNA, 381 bp, Gossypium hirsutum
  Clone ID: LIB3083-081-Q1-L1-A2
cattgagcaaacaaaaagaaaataaggacagaaattttacacacaaaatggttaagcatttggaagacacttgtaatttgttctctcaaggaaaccaacgaagtgagggaacagtgaagctcctgaaaattgtgtattgtacacaaactccacaaggaaaaagaaacacaactgtcatcttagaaatctgaacctatcactccatcgtccatgcaaatcttcttcagaagccaaccaaataagatttacatgaaacccagaaatataatcacataatggagcatcggctcctttcttctgctggttggggggccaccggctgatacctgtttgacttcgaggggttgtaggtgaactccgatgtatccagcccatactttt

SEQ ID NO: 3792 - DNA, 391 bp, Gossypium hirsutum
  Clone ID: LIB3083-081-Q1-L1-A3
cttgaatttagcatggaagttgctgtgccccaaaggattaatgtatcttctgttgctgcaaatcaaaggccatcgtacccatcctccaaaccaaaaagggttgattgggataaaatcgaagctcaagtaaagaaggaggagaaagatgaaaagctagatggtgatgcagctttgaataaatttttccgtgacatttatcaggatgctgatgaggatgcaagaagggccatgcagaaatcctttgtggaatcaaacgggactgttctttcgacgaactggaaagaagttggtgtaaagaaggtggaaggaagtcctccggatggtatggaactgaagaagtgggagtactgagctcttttttctcaattgtatgctgttttggactccatta

SEQ ID NO: 3793 - DNA, 395 bp, Gossypium hirsutum
  Clone ID: LIB3083-081-Q1-L1-A4
acatttttgtgaatctcatggtttgtataagcctttgctctggtgctgtacaggaggatagaaaggtttacattgcatacttgggatcacttcctgatggagactacattgcttcatctcaccattgcaatatgctttcagcactttctaaacacagctctctggaaaatcacttaatccgaagttacaaaaggagcttcaatggatttgcagctaagctaactaatgaagaggcaaagaaactttcaagctttaaaggagtggtttcggtttttccaagtaaagtttaccacctgcatacaacaagatcatgggatttcttgggactcaatcaaactgttaaacgtaatgccacagagagcgatgtcattgtcggtgtctttgataccggaatc

SEQ ID NO: 3794 - DNA, 368 bp, Gossypium hirsutum
  Clone ID: LIB3083-081-Q1-L1-A5
ccaagccccagaaggccccattctttgtatcaacaactgtggcttcttcggcagtgcagctaccatgaatatgtgctccaagtgtcacaaagcgatgatcctgaagcaggaacaggcgcaacttgcagcatcatcaatcggaagcatcgtgaatggcagctcaactgggaacggtaaggaaccagccgtggctactgctttggatgtacaatctggaaacgccgacaccaaaatggtctcaacagagctacccattgacccatccggaacgacttcatgtgggatgaaaatgaaagagggtcctaacaggtgtaccaaatgctgtaaacgtgttggtttgacaggatttaactgcaggtgtggaaacc

SEQ ID NO: 3795 - DNA, 361 bp, Gossypium hirsutum
  Clone ID: LIB3083-081-Q1-L1-A6
gttttctccgcagcggcagctgctatatctacatctgctcgtgttgcgtgtagaacgatagatcacagttcatttcaattttaaggaaccatggcggactcttcagggacgacgcttatggatctgataacggctgatcctgcgcctgttccagcggcagcatccacagtgtcttcttcatctgcatcatcgacgacagcggcagcgtctcctgctgccacgcagcaacagtatgtgtcgaccaagaccgcgctgggggagaaaaagtccaagagagcggctctgatgcagatccaaaatgataccatttctgtggctaaggcagctctcaaccccgtccgtactaacattatttctcatc

SEQ ID NO: 3796 - DNA, 257 bp, Gossypium hirsutum
  Clone ID: LIB3083-081-Q1-L1-A7
tgggaagttgaacaaaacattgacatgttctggctcaagtggagtcgacgatatgcttgttggatgtcgttggcataacgaccatcttgtcactgtatctctaaggggcacaatgagtatattttctgctagcaatctttgaaaatccccaattccattatctggacacatgaaaaatttccatttaatagctggcccaaaaaggggcccaaaatgtggactggctaatagttattatgcgcctaatagttaaatgg

SEQ ID NO: 3797 - DNA, 321 bp, Gossypium hirsutum
  Clone ID: LIB3083-081-Q1-L1-A8
ttcctacttggagtggtgactctcaccactcccacatttggtacctatgagtcaccaaattatgggaaaccccctactcctgtattcaagcctaccaaggtgaaaccaccaccatatgaacctaagccaccagtgtatgaaccaccaaaaaaggagaagcctgaacctaagccaccggtttatgcacctacaaagaaagagaagcatggacccaaaccaccaatgtatgaacctccaaagaaggagaagcctgagccaaagccaccagtttatacaccttcaaagaaagaggagcctaatcctaaaccaccagtatatgaa

SEQ ID NO: 3798 - DNA, 350 bp, Gossypium hirsutum
  Clone ID: LIB3083-081-Q1-L1-A9
ctaggttgtctgtcgacaacaatgtctcacctgctgaagctctatctctttgcttacaactctctccaggcttttggctggacaatttctttggtcagaattttgtcctgtttcatagccaccaaatctgtcattggcgcctatgcttctgctggagacttaatctgtttgttacaaacttgtgcgttcttggaagttgtacatggagcaatagggattgttccaagtggagtgttgtttcctctgatgcaatggggtggaagaacacatttcttattagcaatcgtccgccggattcacgaggtacaggaattatctgcagttttcataacattttttgcttggagcct

SEQ ID NO: 3799 - DNA, 396 bp, Gossypium hirsutum
  Clone ID: LIB3083-081-Q1-L1-B1
gttttacccagatgatgtggcgactaaactttttcgttgcattttgctgcattgttctcaacaatgattatatgctttactacatctgcccgatgcacacgcttttcaccctgatggtgtatggagctcttgggattttcaacaagtataatgagaagccatcggtgatggctgtgaaatttcttgcatgctttctcgtagttatctttatttgggaaattcccggagtttttgaaatattctggagtccattggctttccttttagggtacacggatcctgcaaaacctgatctgcctcggttgcatgaatggcaatttagatccggtcttgaccgctatatatggataatcggaatgatatatgcttactatcatccctatatcgagaaatgga

SEQ ID NO: 3800 - DNA, 359 bp, Gossypium hirsutum
  Clone ID: LIB3083-081-Q1-L1-B10
gaaaaaactgtccctatttcttcatcaaggttgaagaagaagaagaagccatggaaaaacaaaacaggtcgggaactgcaggaaaagttataagatgcaaagctgcagtttgcagaaatccaggggaaccacttgtgatagaggaaattatggttgacccacctaaagcttgggagattaggataaaaattctctgtacttctctttgtcattctgacgttaccttctggaaaatatccattggaccatttgcactttttcccagaatttttgggcatgaagctgttggtgttgttgagagtgtaagggagcatgtggaggaatttcaagaaagagatatggtggtacctgtgtttcgt

SEQ ID NO: 3801 - DNA, 354 bp, Gossypium hirsutum
  unsure (1)..(354): unsure at all n locations; Clone ID: LIB3083-081-Q1-L1-B11
ctcaatcccagctgaaaaggatgcagcaccaaattccaactcatcaaagtcatcaaatttcccattttacagtccaagtccattgcccagcctcttcaagacatcccctgctgtacccagtgtgaattctactcctcttcgcttcttcaaacggccattccctcccccctctcctgcaaagcatatcaagtcattgctggcaagaaagcatggctcaattaagcctaacgaggcctcaatccctgaaagaaatgagtgtgaggttggtttgaataaaagatttgggttttcgaagcattttacgtctcattatgagcttggngaggaagtggggcgtggacattttggatatac

SEQ ID NO: 3802 - DNA, 385 bp, Gossypium hirsutum
  Clone ID: LIB3083-081-Q1-L1-B12
cccaatcgtttttctgaacgatgggccgaatggggggatttgtctaggatatttccagagtacgtgtgtccatcatatccctcaatcccacctttggattttgcaatggatgtatcaaggatgaggaatgttgcttgttatattagccatagttccagtccgaatgtgctggtgcagtgtgtgttgtatgatcacaacaacttgatgttccctcaccttatgctttttgcaatggagaatatccctcctatgagagagcttagcatagattatggtgtagccgacgaatggactgggaagctttctatctgtaactaaatatcttaagaggaatattttggattttgatgtggtgcagccgggcagtgagacatgataaactgag

SEQ ID NO: 3803 - DNA, 393 bp, Gossypium hirsutum
  Clone ID: LIB3083-081-Q1-L1-B2
cccggatctcagtcttacagtttcatccaaagtagtgagaatcaagggaagcgagagaaagatgagtggaacggggaaggtggtatgtgtaacaggagcatcaggttacattgcttcatggctcgttaagtttttactccaacgtggttacactgtcaaagccactgttcgtgacccaagtgatcgaaaaaaatcggaacacttacttgcgcttgatggagcaaaggaaaggctccgtttgttcaaggcacagctgctggatgagggagcttttgattctgtagttgatggatgcgtaggagttttccacacagcatctcctttttatcacaatatcaaggatcctcaggctgaaatgcttgacccagctgtgaagggaacacttaatgttct

SEQ ID NO: 3804 - DNA, 394 bp, Gossypium hirsutum
  Clone ID: LIB3083-081-Q1-L1-B3
ttctcttctcgtctcggtttgcataaatctcttcggtttaggaactgccggggttccattttgtcatcaagatcggccaaattaaaatttcaggcgatcggagaagatggactctcatgatgaaactgggtgccaagctccagaaggtcccatcctgtgcgtcaacaactgcggcttctttggaagtgcggctaccatgaatatgtgctccaagtgtcacaaggcaatgattctgaagcaggaacaggtgcaacttgcagcagcatccattggaagcattgttaatggctgctctagtggtagcagtaaggaaccagctgtggctgctgctttggatgtacaacctgtaaatattgagtcaaagattgtgtcagcagagccatccattgatcct

SEQ ID NO: 3805 - DNA, 309 bp, Gossypium hirsutum
  unsure (1)..(309): unsure at all n locations; Clone ID: LIB3083-081-Q1-L1-B4
ttgaggcaaaagagaacttgcaaaaggatctgggtagagatcctacagaagatgaattagctgaggcaacaaattcgagtgcagctcaagtgagaagacagttagaggttggtcgagctgctagaaataagctcattaagcacaacctccggctcgttttgtttgtgataaaaaaatattttcaagattttgcaaatggtccaagatttcaagacctttgtcaggctggagttaaaggacttattacagccatcgaccgctttgaaccaagaaggagattccgtctttctacatacggncttttttgga

SEQ ID NO: 3806 - DNA, 362 bp, Gossypium hirsutum
  Clone ID: LIB3083-081-Q1-L1-B5
ggagttttggtgtcttttagtgcttacatatgttcttataaatatgatgtcagttttttgctataggacctgggtgttgaataaacaacctgtaaattagtgtgttttggaccagaagtttgtgcagtctctaatatgattttgtagggtgtatgggcactgattaggtaggtggaaactacagggattagaagcctgcctagttggaaagtcgggtaaatgtaggggtctacactttttagagtaaaatggaagatctgtcatctatgagccctataagtttgatttcttccatcataaagtggtatgttatgtctagaagtgcgactccataaaatttaaaatatcaccattattttttt

SEQ ID NO: 3807 - DNA, 159 bp, Gossypium hirsutum
  Clone ID: LIB3083-081-Q1-L1-B6
agaaagtgctcaaattctcgagattgaaactttcatccgaatgttgcttcaaaggcaggaggatggttatgcacgacttaaacgctgcatattgattggtgatcatcaccagccgccttcttgtgcgaaaaatattgcttttcaaaaggttagccatat

SEQ ID NO: 3808 - DNA, 393 bp, Gossypium hirsutum
  Clone ID: LIB3083-081-Q1-L1-B7
ggagttttggtgtcttttagtgcttacatatgttcttataaatatgatgtcagttttttgctataggacctgtgtgttgaataaacaacctgtaaattagtgtgttttggaccagaagtttgtgcagtctctaatatgattttgtagggtgtattggtactgattaggtaggtggaaactacagggatttgaagcctgcctagttggtaagttgggtaaatgtagtggtctacactttttagagctaaatggaagatctgtcatctatgagtcctataagtttgatttcttccatcataaaggggtatgttattttttatggcgcgactccgtaaaatttaagaaattacctatgttatctttaaaaaaaatatagaaaaatagctcgagggg

SEQ ID NO: 3809 - DNA, 389 bp, Gossypium hirsutum
  Clone ID: LIB3083-081-Q1-L1-B8
gtttcacaggccaaggaccttgaagaaagataggaacccgaagtatccacgcattagtgccccaccaaggaacaagcttgaccattaccagattctcaagtttcccctcacaactgagtcagccatgaagaagatcgaggacaataacactttagtatttattgttgacatccgtgcagacaagaagaagatcaaagatgctgtgaagaagatgtatgatattcaggccaagaaagtgaacaccttgatcaggcccgatggcacaaagaaggcatatgttaggttgacgccggattacgatgccttggatgttgcaaacaaaatcggaattatctaagcagttggcgactaccttgttttgaatgctttattttttgtgttttgttgca

SEQ ID NO: 3810 - DNA, 390 bp, Gossypium hirsutum
  Clone ID: LIB3083-081-Q1-L1-B9
catgatcttaaccttttaacctacttgaattttcttttgtcctaacaaatttaaaagcattccataagtgtttccccttccttattttttgtgcatcgaggagcacataaagaattaactcctccatgtctatttctcatacatgagagatcaacaaaatacaatcagacaacacatacaacactattcatcatgaatcaagaaacgcaaaggagaggataaaaataaataatcctaccaaacaaagaattaaccatttcatccattttacaaaattaagggtgatcacaaatcacccatctttgctaacatccattccagcattgtagtatagaacatacaatctaataaaaagtagttcaaaatcaaatatacataaaatcaaacaga

SEQ ID NO: 3811 - DNA, 400 bp, Gossypium hirsutum
  Clone ID: LIB3083-081-Q1-L1-C1
gaaggctagtggacaggtggatcgggcaaatgcagctgtgagacggcttgagactgagaatgcagaaatcagagctgagatggaggcgtctaaattaagtgcatcagaatcggtcacaacatgtctggaggttgcaaaaagagagaaaaagtgcctgaagaagcttttggcttgggagaaacagaaagctaagttacaggatgagattgctgatgaaaaggataagattaaagatctgcaacgatgcttagctcgagtagagcaggatcagaaagaaacagagttaaaatggagagaggagttaaagtccaaagaacttgccttggctcaaattgaggaggaacgatgctccaaggaagcagctgaggcaagcaataaaaggaagcttgaagcattgcgc

SEQ ID NO: 3812 - DNA, 289 bp, Gossypium hirsutum
  Clone ID: LIB3083-081-Q1-L1-C10
atcacaataatttttaagagtcttacaggagtgccgaaagaattaaaaatgatcttacaagagcaacaactcaccgagaacacgaacaggtttgggcctttttaatggatgatgatgtttggctccatagaaaacaagggtaactatacttaaagactacctataggattaactctggaattcttgtttgaaattcttttacgaggcaatgacagatcatttagacagcttgaatttttcccttacgagtctgtatgaaattgggcaaccctttttttcaacctttttt

SEQ ID NO: 3813 - DNA, 369 bp, Gossypium hirsutum
  Clone ID: LIB3083-081-Q1-L1-C11
gtcctattgtgaaaatgccctgaggatctttgcaaaacccgtgcctggaaccacagcagaagagatagctggtgggttaaccgaaatttcagccatatatgaatctgttgatgagcctgaggaggctttgaagctcttgcagaaagcaatgaagttgttggaagacaaacccggtcagcaaagcacaattgcaggaattgaagctcgaataggggtgatgttttacattcttgggaggtatgatgagtcaaggaactcttttgagagtgcagtaacaaagcttagagcaagtggggagaggaagtcagccttctttggggttgtcttgaaccagatgggcttggcttgtgtccaattattcaagattga

SEQ ID NO: 3814 - DNA, 387 bp, Gossypium hirsutum
  Clone ID: LIB3083-081-Q1-L1-C12
gaaaagagtttaaagagcttctactttttctagattccacagtacattgcgcagttcactttgcgatcattcgtctggtttttttcttctttatggaggatatagaggcttttactctaaaaataccttgatattaacacccaaaggtgggaatgatatccacaaacgtgggggcacctttcttctcacttcacgagggggtcatgatactcaaaagattggtgataacatccagaatcaccattctatttggaaggcaaaggtggactctttgagtttattgaagagagattaaaagagaatggacatatagttattgttgttgctgaaagagctggtcaagaatatcttgctcaaagtatgcaaggaattgatgagaaagatgca

SEQ ID NO: 3815 - DNA, 388 bp, Gossypium hirsutum
  Clone ID: LIB3083-081-Q1-L1-C2
gcaattaagaatcatccggataaaggtggagaccccgagaagtttaaggaactggctcatgcttatgaagtacttagtgacccagagaagagagaaatatatgatcaatatggtgaagatgctcttaaagagggaatgggaggaggcggttcttctcacaacccatttgacatatttgagtcatttttcggtgggggagccttcggaggcggtggtagctcgagaggaagaaggcagaagcgaggtgaagatgtagtgcatgctcttaaagtttctctggaagaattgtacaatgggacgacaaaaaagctctctctttccaggaacgcaatatgcagtaaatgtaaagggaaaggttcaaagagtggagcctcctctagatgctatg

SEQ ID NO: 3816 - DNA, 385 bp, Gossypium hirsutum
  Clone ID: LIB3083-081-Q1-L1-C3
ccttatcttgcaagagtgcaagctgtactgcataactgattttttctgagctctggctttttattcctctccttcatgcagatttccatcttgattttgcctcgcatgcgagattaaacgttgtccaaactccaagcctttaccaattcaaaggcaagtcggtttcatggactccaatttacagacttcgcctaatagttctgatgcaaaaacagcatttcgtaagccttctaccgactcatctaaccgacaatataggcgtcgttctccagtcagcgggttattttcatctgaaggaagttctccccagcgtgaccgtagcattagtcccatagtttcaagggatgatctggaaaaaagtgctgatactcgaccggggagagat

SEQ ID NO: 3817 - DNA, 404 bp, Gossypium hirsutum
  Clone ID: LIB3083-081-Q1-L1-C4
ttaaagatggtggagtcaaggatgcgcgagaggcatatgaatgcaatctttgatgaacttctcaaactcatgttacagctcgacttgatggtagacttttctgtattctcgtgcttctatgattttgttttcttcgtatgccgagaaaatggtcaaaagaatattactgtaagcagggcagttgctgcttggagattagtcttagcaggcaggttccgtttgcttaaccaatggtgtgactttgttgagaaaaatcagcggcacaatatttctgaggatacatggcagcaagttttagcttttagtcggtgtgtgcatgaaaccctagaagggtatgatcctgaaggtgcttggcccgttttaattgatgactttgttgagcatatgtacagaatttcagggtc

SEQ ID NO: 3818 - DNA, 306 bp, Gossypium hirsutum
  Clone ID: LIB3083-081-Q1-L1-C5
tgatgatatcctacttttgtggaagataacgagattatttgaaaatggggtggagtgccgtgaggtcctagatgctattattgatagatgttcagcactgcagaacatacggcaagcagttctgcactataggaaggtgttcaaccaacagcatattgagccaagggtgaggagagtagctctgaaccgtggagccgagtacttggagcggtactttcgcttaattgcttttgctgcatatcttggcagtgaagcatttgacagtttttgcggacaaggagaatgtaagatgtcatttaagaattg

SEQ ID NO: 3819 - DNA, 397 bp, Gossypium hirsutum
  Clone ID: LIB3083-081-Q1-L1-C6
ctttagaaactcaaacaaaccttttacttctcaactctctcaaattcaccatggctgacaagtgcggcaactgcgactgctctgacaagagccagtgtgtgaagaaaggaaacgccttggtcattgagactgagaaaagctacatcagcactgtagtggtcgaggctgtggcagagaacgatggcaagtgcaagtgtggaactagctgcagctgcacaaactgcacatgtggcaatcattaagcagacatatatagaactgcacgatgttttagtccataattaaattaagttgaataattggtggcgtgttgcatgtttgtctccgcctcattgtataccatgatagaatggccatgtctatggactttgtctgattaatgaatgattattagcac

SEQ ID NO: 3820 - DNA, 393 bp, Gossypium hirsutum
  Clone ID: LIB3083-081-Q1-L1-C7
aattttcaatacaaacaatttgtgggtcaacctgaatgctatcaagaggcttgtggaagctgatgaactcaagatggagatcattccaaacccaaaggaggtcaatggaatcaaggttcttcaactggaaactgcagctggtgcagcaattaggttctttgatcatgctattggtatcaacgtacctcgatcgcgattccttccagtgaaggcaacttcagatttgcttcttgttcagtctgacctttacaccttagttgatggatttgttatccggaataaagatagagcgaatcctacaaacccatccatagaattggggcctgaattcaagaaagttggtaacttcttaagtcgattcaagtcaatcccgagcatcattgagcttgatag

SEQ ID NO: 3821 - DNA, 405 bp, Gossypium hirsutum
  Clone ID: LIB3083-081-Q1-L1-C8
caaaatccttggtacttgaaacaggattcatcggaagtggaccaacagcctttttctccattatcatctccatcagactcatcagtcatgaaaaaggttgaatgtttggagagtgttactgatataccagagcgatcaagccccgtatctgttcttgagccaatatttgcagatgatcttatcagccctgcaagcatcagatcttattccggtgaaacatccattcaaccgctaagaattcgattcgaagaacatgactctttggccacaaatcagagcaatcgaattaaaacttgtatgaatgataaggaatcaatatttgagcacataaaggcagtgctgcaagcctcgagtttcagctgggacgaagtctacatccggtcactttcttcagacctgcttatc

SEQ ID NO: 3822 - DNA, 390 bp, Gossypium hirsutum
  Clone ID: LIB3083-081-Q1-L1-C9
atttatttcactccaatttcaaggaaaccctcagtaaataagacctccaattcggccggagagagttgcggtagcggccatgtgagaaagccgacggagcacattcgtaagtccaacgaaaactaagagaagaaaatgttgcagcagcagacgaacaacaattccagtagtagcaatattccggtgagcgagaggtattggactttagttgataaagctgataagaaattttcgaagatcagagacttgccttactatgagcacaacaggtacgaaacatacttttacaaggtattcatacgctcagttgtgggagtttctgccggaaaatcggcagaagctagttgaagcagggcttatgagatgggagatgggtgagattgcatcgcg

SEQ ID NO: 3823 - DNA, 370 bp, Gossypium hirsutum
  Clone ID: LIB3083-081-Q1-L1-D1
cgacaagttacatgctgcaagcatgggctagactctgcaagtgtttgggacaagacttcctcccttacatgagtgttgtcatgcctccccttcttcagtctgctcagcttaagccggatgtaactattacatctgcagattcagataatgacatagaggactccgatgatgaaagtatggaaaccattacgcttggggacaaaagaattgggatcaagacaagcgttctggaggagaaggctacagcatgtaacatgctatgttgctatgccgatgagttgaaagaagggttttttccatggattgaacaggttgctccaactttagttcctcttcttaaattttatttccatgaagaagttagaaaagc

SEQ ID NO: 3824 - DNA, 377 bp, Gossypium hirsutum
  Clone ID: LIB3083-081-Q1-L1-D10
gaagatattattgggttattgtagctagctagctccacattgtctatggcttcaaagcttcttttgattgctgtctttgttcttgatctcattgcttttggtttagctgtggcagctgagcaaagaagaagcactgccaagattgtccaagacagtgaagttaattataactattgtgtctatgactcagacatatcaacaggctatggtgttggtgcatttttgttccttatggttagccaagcccttataatggctgcaagcaaatgcttctgctgtggaaagggtttaaaccccagtggttcaagggcctgggcagtcatccttttcatagtctgctggttgtttttcctgattgctgagatatgcttgctggc

SEQ ID NO: 3825 - DNA, 398 bp, Gossypium hirsutum
  Clone ID: LIB3083-081-Q1-L1-D11
caaataaccacatgaatccattatacctgttgggcatttacaagttcccttaacaatttacttccaatacagacaacaaaaatatcaagtttcaacccaaacacaaataaaacatgaaaaagcataacatacagtaaaccatttcaagtctttaacaagcttcaaagaatagaagcttgcataacacggaagcaacaggtaataaaagacatcatacgcacactcaatcacaggtacttcttagtactcatcatcttcaccctcatcaccctcagccgactcagcaccaacttcttcataatccttctccaatgcagcaagatcctcacgagcctctgagaattctccttcttccataccctcaccaacataccagtgaatgaaggcacgtttggcat

SEQ ID NO: 3826 - DNA, 371 bp, Gossypium hirsutum
  Clone ID: LIB3083-081-Q1-L1-D12
gatggacttgaagaatgtatgaattacttagtagcacattttcgtggttgctttaatggccataaaatcgaatctacacgatccatataatgttctcgaaaattgggattcgaattcggttgatccatgtagttggaggatggttacttgcactgcagatggatatgtttctgccttgggacttcctagtcagagcttatccgggtccttatcaacatcgatagggaaccttagctacttgcaatcagtgttgcttcagaataatgctatttcaggttccattccagctaccatcgggaagttagagaagctcgtaactctcgatctctccaacaatactttcagtggtgaaatacctgccttcttggggg

SEQ ID NO: 3827 - DNA, 362 bp, Gossypium hirsutum
  Clone ID: LIB3083-081-Q1-L1-D2
ggtcgacactattatactcgatatgacatatgctaatgcagatgctggtggagcaaagagaaatagacgtgcaaatatggttaaaaggatgccatccctcgatgaagttaataccatcgggaagggggcccgatcagatgtgtcaaaagttgccaacgctcattagtttgaatacaaggatcccgttgatggttcagtttcaaagcatcaaggtattcggtttttgctcgaggacggatcacgattggtcttccgtctctctggaactggttcagaacgtgcaactatccgtctgtacatccagcaatacgaaaaggatccataaaatacagggaaaaattcccaagaagctcttgctcctc

SEQ ID NO: 3828 - DNA, 390 bp, Gossypium hirsutum
  unsure (1)..(390): unsure at all n locations; Clone ID: LIB3083-081-Q1-L1-D3
tctctctctctctttcccatagtttcacccatcttttaatccatcgctcacaaaattatgggtttgaaggaggaattcgaggagcatgccgagaaagttaagaccctcccggccgccccttcgaatgatgacatgctcattctctatggactgtacaagcaagctactgttggaccagtgaataccagccgtcctggaatgttcaacatgagggaaaagtacaagtgggatgcatggaaggctgttgaagggaaatcaaaggaggaagcaatgggggattatatcaccaaagtaaaacaactgtttgaggctgctggaagttcttgatgtgtgtgtgtatgaccaatgaaactggtgtaatttcaagcccttgtcngntacttggggttt

SEQ ID NO: 3829 - DNA, 408 bp, Gossypium hirsutum
  Clone ID: LIB3083-081-Q1-L1-D4
ccacaatgaggcaacaatatgtcttcactactctcacgttgctcatcctgttttccctcagttgttcaacaacattagcccaagctccggcactggctccagcaccttctggtccgacaaacgtcaccaagatcctcgaaaaagccggtcaattcaccctcttcattcgtcttctaaagtccactcaagtggccaaccagctgctcggtcagctcaacaattccaacaatggtatgaccgtttttgcaccaacggacaatgctttctccagccttaaatcgggcacattgaattcactcaccgatgaacaaaaagtggagctggtgcaattccacatcgtcccaacatacctcacctcgtctcagttccaaaccattagcaatcctttgagaacccaagctggtgata

SEQ ID NO: 3830 - DNA, 384 bp, Gossypium hirsutum
  Clone ID: LIB3083-081-Q1-L1-D5
cccaattaaacctttcgaaacctattacaattcacacattggtgagccatccatggcattggcacgtcttcaaatcctcgtagcactttccttggtgcctttttttctttttccggttgctttaggatatagggctaatgatgtgagatcatggtgcaggaaaactcctaacccacagccgtgcgagtattttttgagccatgatcccaaaaacaccccaatcaaagatgagttccaatttttcaaaatctccatgcacctcgctctaaagcgtgccgcacgagcagaaagtaacacgcattcattgggccctaagtgccggaatggacgtgaaatggctgcatggtccgattgcgtaaacctgtatgagataaccatccttcg

SEQ ID NO: 3831 - DNA, 338 bp, Gossypium hirsutum
  Clone ID: LIB3083-081-Q1-L1-D6
gacttcttgcaaattggcagagggagtataccatggaggatttactgacacagctgaaaaaggagatggcagcaccacataaccgaaagctggttcaacctcccgagggtacctacttctagctctcaagattatcggacatcctggatctaagtgcatttctggtatgcaatatatagtttgtaatgcttgttgatctttaaagaaaatagtggggaatgccccaaaaagcttctccaattactttcccctggtttcatcttcattatccttttcttatcaaactctgtttaaggaatgctgtttaattaatgggactttatccgtatgtcgattat

SEQ ID NO: 3832 - DNA, 395 bp, Gossypium hirsutum
  Clone ID: LIB3083-081-Q1-L1-D7
agggagtgccccttctccacaagcttctccagaggcttggataaacatgatcaatgactttcagaagggtagtttagcaacccgaatgcagatccccatgatttacgggattgatgctgttcatggcaacaacaatgtttacaaggcaacaatttttcctcacaacattggtctaggtgctaccagggaccctaaactggttaagaaaattggggctgcaacagcacttgaatctagagcaactggcattccatatgttttcgcaccttgtatagcggtttgccgagatccgagatggggccgatgttacgaaagttacagcgaagatccccatcttgttgacgcaatgacagagattgtaccaagattacaaggagacatacctgctaaatctt

SEQ ID NO: 3833 - DNA, 389 bp, Gossypium hirsutum
  Clone ID: LIB3083-081-Q1-L1-D8
cggctgagggaactggttaacttggttgtagtaggtggagataggagaaaggaatccaaggacttagaagaaaaggctgaaatgaagaagatgtatgaacttatcgaaaaatacaagttgaatggacaattcagatggatatcgtcccagatgaaccgagtgagaaatggtgaactctatcgttatatttgcgacaccaagggagcattcgttcagcctcctatatacgaggcttttggcttgactgttgttgaggcaatgacctgtggactaccaacatttgcaacatgttacgggggccctgctgagattatagttcacggaaaatcggggttcaacatcgatccttataacggtgatttggctgccgagacccttgccaatttctt

SEQ ID NO: 3834 - DNA, 400 bp, Gossypium hirsutum
  Clone ID: LIB3083-081-Q1-L1-D9
ttacattccaccattcttttgcttttaatctctatatccaaaaaaacaaagcagaaaacaaaacccaaatgtcaagttcaaagcttgtcgtcgttaaagatgatgatgaagctgaaaggaccagctcattggagtttcaaaacgacaagaagaagaagaagaagaagatgatgatgatatcatcgggagaattgaaggcaaatgatgatgaagatgaagacgaagacgaagacgaagacgaaaggaactcattggagtttcaagacaggaagaagaagattatatcattgggagaattgaaagcaaatgatgatggtgatgatgatgggtttaagactccaacatcattggatcataaaatcccagtgatgaaacaatgtccaccagcaccaaggaaacc

SEQ ID NO: 3835 - DNA, 390 bp, Gossypium hirsutum
  Clone ID: LIB3083-081-Q1-L1-E1
ctccctctcatcagatgacagcttctgcccctcaacagtgttatgaagctccattataatgacgggcaccaattgcaacaccaatggagctgtctcatctgtagaacatctcaccacttcattcaatgtctcatacgcagctgtcctcaaccgagattccctagcatcttctcggtgagtgacagtgagaagagactgcacaatttcctggaagaaaggagttaaaggagatgatggacccacctcctcataaccttgagcaagaaaatagagagcaccacaggccttctcagcaacattaggagtgtccttcatactctgtagcagaactacgactatctgttggcaatttgcctgagtgatgatgggtgaatcaacagctgagccatg

SEQ ID NO: 3836 - DNA, 345 bp, Gossypium hirsutum
  Clone ID: LIB3083-081-Q1-L1-E10
cccccttctgccttgtgggctgagaactacattttgttccactccatttgtttgtaatttctactgtacattatgtatgctatcataagctgcataaaagaaaagtatgctatcataatcagcaagggaactactacaagaacaacgtatttggaccatatgaattggaattggagaaaacggttttgctaaagaaagtcaaatcaagcaaagatattttaattattatgtctgcattcgattgattgtacttttctaagattattgaggagaaagcttgtttttgttttatttatgagattaaaatagcacgattttgtttcatgtaaatttatttatgagatt

SEQ ID NO: 3837 - DNA, 353 bp, Gossypium hirsutum
  Clone ID: LIB3083-081-Q1-L1-E11
atccaaaataaacatagattaaaaactctatccaacgggaatttgaaaaaaaaaatgttcctatcggtctcccacatggaaacataacagaaatgctactgttcaccttatttaaacatgtattaaaaaaattgtctctcgtaatgtaaaaaaaaaaaaaaattttaaaaaaagagtcaaaatttaagcatgttatggttgagatttttctttcggggagctcttgtaactcttcaaacgagaatgatccacacctataacttagaactctttagatgtttaaccccaaaaagtgattgataaaaaaattacaatacctaacgccgacctccggttttcttagccgcaactgg

SEQ ID NO: 3838 - DNA, 359 bp, Gossypium hirsutum
  Clone ID: LIB3083-081-Q1-L1-E12
aaaattcccatggggaagataaactctagcaggaaaagacttcatgtcttgtaaagcaaaagcaaggaagtaaaaagagaacatgggtttaaaagagtaaaagtaataaactaggagacctaagagagttagcaaggtaaggagaacaagaacaagaatcagaggtcttttgggttgggggtataacatgaagtaaagtaagcaaatcacacccttgttagccacatgagtgagtgcccaaatcattgcatgcttagaatgtgagctctcatccactgcaggcactctcttccttaacaccaacccattatcaaccccgttgccatacatgttaggcccttccatctgagttaaaactt

SEQ ID NO: 3839 - DNA, 252 bp, Gossypium hirsutum
  Clone ID: LIB3083-081-Q1-L1-E2
gcatgatgcaccacatggagcacaccacatctaaaatgcccttcttgcattacctcaaacatgcgtagagatatgccgcaatgcagatagtggggtctgtctgctctagaaatggctcttggtacgggcgttcccattgcctagctattgtacaacagcaggctgcctggcgacaaaatatgtatgaccatgaccacaggcttgccactcgcactggctggacgatctcgtgacccagcacaccaaggaata

SEQ ID NO: 3840 - DNA, 399 bp, Gossypium hirsutum
  Clone ID: LIB3083-081-Q1-L1-E3
tcgagttttttttttttttttttttcaaataaccacatgaatccattatacctgttgggcatttacaagttcccttaacaatttacttccaatacagacaacaaaaatatcaagtttcaacccaaacacaaataaaacatgaaaaagcataacatacagtaaaccatttcaagtctttaacaagcttcaaagaatagaagcttgcataacacggaagcaacaggtaataaaagacatcatacgcacactcaatcacaggtacttcttagtactcatcatcttcaccctcatcaccctcagccgactcagcaccaacttcttcataatccttctccaatgcagcaagatcctcacgagcctctgagaattctccttcttccataccctcaccaacatacc

SEQ ID NO: 3841 - DNA, 322 bp, Gossypium hirsutum
  Clone ID: LIB3083-081-Q1-L1-E4
attacatgacctatatgttcaagtacgacagtgttcacggtcaatggaagcaccacgagcttaaagtgaaggactcaaagactcttctctttggtgaaaagcctgtcactgtttttggcatcaaaaaccctgaggaaattccatggggtgaggctggtgctgaatatgttgttgagtctaccggtgtcttcactgacaaggacaaagctgctgctcacttgaagggtggtgcaaagaaagtgattatttctgctcccagtaaggacgcccccatgtttgttgttggtgtaaatgagaaagaatacaagcctgatcttgacat

SEQ ID NO: 3842 - DNA, 302 bp, Gossypium hirsutum
  Clone ID: LIB3083-081-Q1-L1-E5
cttgcgccgcgcgtttacatttctactctgcgatcagtcataagcggtcaccgtcttcggcttgttctttgggttctacgtttcgtctcatactctcgccggatcaagattctgcccttggttgttgtaccaaataattaaagttgagctaaaccttaaaggttagtggctgcaacaatagtataaaggtgaattacgcacgtcttggatcagttaatgctagacatacatggatccggtggactgggacgaaatttggtagtgctattgacaatgcctgcttggtcatcgtctcatattta

SEQ ID NO: 3843 - DNA, 384 bp, Gossypium hirsutum
  Clone ID: LIB3083-081-Q1-L1-E6
ggtttttccgtcgcccaaagtgtctgatacggtggttgagccctataatgcgactctatcagtgcaccagcttgtggaaaatggtgatgaatgcatggtgcttgataatgaagctctctatgatatctgttttagaactctcaagctcactaatcccagctttggtgatttgaatcatttgatttcaacaactatgagtggagctacatgctgccttcgtttcccgggccaactcaactccgatctccgaaaactagccgtaaacttgatcccattcccacgcctgcattttttcatggttggttttgcacccttgacattccgtagctcgcaacagtaccgagccttaacgatccccgagctaactcaacaaatgtgggatgc

SEQ ID NO: 3844 - DNA, 383 bp, Gossypium hirsutum
  Clone ID: LIB3083-081-Q1-L1-E7
acagaatcattttgcgattgggtttctgatttacctgcaatgccaataacacaagtaattgaaacgatacgccgtaaattgatggaattcatctatacacgcaagatggattcggatcaatggtcatcaaaccttactccatctgcagaggaaaacctccaaagaagtcttgtcaattcacgttctcttgaagtagtactttcacacagtagttgtttcaaggttcgggatactttagacatgataaacgttgttaaccttgaaaattgggattgtagttgcagggaatggcagatcaacggattgccatgtttacatgcagtggcagcaattgagcacgttggcaagaatgtgtatgattactgctacagatattttactac

SEQ ID NO: 3845 - DNA, 373 bp, Gossypium hirsutum
  Clone ID: LIB3083-081-Q1-L1-E8
aagcgatcaaaaggtactttattatcaacgctttacaaacaaatccccaggagggtaaacccttaaatggaacattatcagtgtatgaagaaaattgtttaatcaaaaggggaaaccccaacaaaagaacgtgggcaaggggaagggtgatgccatgcatttttctattactcaagttaatgccacttatcgttacgacacagctgccatataattcatcttctacatctttcagtcacatcagacacaaggttataaacagataaaacccagtggcagtaatcatgcaaagctacaaactcaaaaaggcttgagaatatgtatgtgtacattcaattcgagaaataactacctgattgtgcctctaccagtg

SEQ ID NO: 3846 - DNA, 390 bp, Gossypium hirsutum
  unsure (1)..(390): unsure at all n locations; Clone ID: LIB3083-081-Q1-L1-E9
aaaaatgtctgttttgattcaaaagcaaagaaatttcttattggtgctgagccctctgaagatgtcacattcagcacttctacctcactggcaacaaatggtgtggggcatgaaaccccttctgagaagtcagttaatattggaaatgtgcagccaatcccgcaacctanaatggttgaggaagaggatgatgatgatgaagtgattgttttccagccagctgtgagcgagaagagaactgaagtggttggtccaaactggcccccctctgaggctttgaagcatgatcgaagtagcgctccaggtgatgtcaaattttatggcagtaccatgtctggtcctcctgctagtcttcatcagcataatacatttgatgttagttctccactg

SEQ ID NO: 3847 - DNA, 379 bp, Gossypium hirsutum
  Clone ID: LIB3083-081-Q1-L1-F1
ttgcacactgcccttacgccaaactatgtcctaaaaagtctcatagctttgtggtgcgagagcaatggtgttgagctgcctaagaaacaggggacttgtagaagcagaaaagcaggtagcagtgcttcggactgtgatcgtactgctatcatcactttgttggaaaaactggcaaatggaaattcagaacaacaaagagcagctgctggtgaactccggctattggcaaaaagaaatgcggataatagggtgtgtattgctgaggcaggagccataccacttcttgtcgagttattgtcttccacagatcctcgaacccaggagcatgctgtgacagctcttctcaacctttccattaatgacagtaacaagggaacca

SEQ ID NO: 3848 - DNA, 331 bp, Gossypium hirsutum
  Clone ID: LIB3083-081-Q1-L1-F10
aagaatttggggagtgtagtatagaacgccgtttataccagagaactgctgaagtatttgaattccaatccctacaaataaagcatgcttgactccgggttcaaagatatcagtccaacttggtccctttgccgtttcagctggatgaaccatagctggtccaaccggatgttgcttcacaagctctgaggaataaagagccgaatgactcaccaaagcggctgcttggacatactcagtgtcagcagggacatcaccaccaggcagagaaactactgacccacgcctagattcaggtacagtctcttgatgcaaatagattcttttaaat

SEQ ID NO: 3849 - DNA, 351 bp, Gossypium hirsutum
  Clone ID: LIB3083-081-Q1-L1-F11
ctagtctcgagttttttttttttttttttttttttttttttttgggtttaacaataaattcatcacttttgattccaaaacaaaaataagaaaaatccctaaataatatctataaaaaaaactattcaactaaatcgggccagaacacacaattccattgttcgacatagctcatatttcaaaagcaaaccaaaacattttttggcaaaatcataataaatccctctcattcccagccagtagcagcaggggctgacacatcgacaggagcaccagggatttgtgctggggcagctgcagcatcccacacattagaagtaacggcaactgcaacttgatcaccccaattac

SEQ ID NO: 3850 - DNA, 380 bp, Gossypium hirsutum
  Clone ID: LIB3083-081-Q1-L1-F12
gaaccaacgatggtggttggcgcagacagcaatgctgctgctgctggcggtgctgatggatcacctctccctccaccgacgtcttcaccgccgcaagcattagtcgagaggctcaaggactacggccaggaacacgttttcgccctttgggacgagctttctcctgatgaacgcctccacctcgtcaaggatatccagagtttggatctttcgagaatagatcggatcattcgctgctctcttcgatctcaaggactgccggtggcagcaatagagccagttcccgagagttgcgtgtcctctgcagaggagagaacgatggaggaaagggaaaggtggtggaaaatgggattgaaggttatatcggaaggcaaattggc

SEQ ID NO: 3851 - DNA, 396 bp, Gossypium hirsutum
  Clone ID: LIB3083-081-Q1-L1-F2
atccaaaataaacatagattaaaagactctatctcaacgggaatttgaaaaaaaaaatgttcctatcgctctcccacatggaaacataattaaactactactgttcaccttatttaaacatgtattaaaagaagtgtgtctcgtactgtaaaaaaaaaaaaaaattttaaaaaaagagtcaaaatttaagcatgttatggtggagatttttatttcggggagcttttgtaactcgttaaacgagaatgatccacacctataacttataactctttagatgctgaaccccaaaaagtgattgataaaaaaattacaatacctaacgccgacctgcggttttcttagccgcaactggcggaagtaaatcctcatcatccgactccacatctccatact

SEQ ID NO: 3852 - DNA, 338 bp, Gossypium hirsutum
  Clone ID: LIB3083-081-Q1-L1-F3
gtagattcgggtaacgggttgaaatattctagccttttggaagctcaaatcgacgccgtttttgcagctatgtcggctattaaatacgacgacgtaaagatggttgtgaccgaaacgggttggccatcaatgggcgatgaagatgaaataggtgctagtgaatccaatgcggcgtcgtataatggtaatttagtacggaaagttttgaccggtaatgggacccctttaagacctcaagacccacttaacgtttatttatttgctttatttaatgagaataaaaaacccggtccaacttccgaaaggaattacgggttattttaccctaatgaacaaaa

SEQ ID NO: 3853 - DNA, 386 bp, Gossypium hirsutum
  Clone ID: LIB3083-081-Q1-L1-F4
caaagttggaccgggtcggcctatgcccaagatgcgtcctttcgcgtttaatttgactgatttcggtggggtcggggatggggtcgccgatgaaacggcagcgtttgagagggctatcttggcgatttccaagtttgggaagagaggtggtgcgcagctcaatgtgccgcctgggaagtggcttacggcaccgtttaatcttactagtcatatgactttgtttctagctgaagatgctgagattcttggaatccaggaggagaagcggtgggctttaatgcctccattgccttcatatgggtacggaagagagcataatggatctcggtatgggagtttaatccacggccaaaacctcagagatgttgttataactgggcataatg

SEQ ID NO: 3854 - DNA, 340 bp, Gossypium hirsutum
  Clone ID: LIB3083-081-Q1-L1-F5
agtcaatgcacttgccaaggcattggctggtcagaaggatgaggccttcttcactgccaacgcatctgctcaggcttcaaggaagtcctccccgagagtgaccaatgaggctgttcaaaaggctgctgctgctttgaagggctctgaccaccgtcgtgctacaaatgttactgctagactcgatgcccagcagaaaaagcttaacctgccagtcctccccaccacaaccattggatccttccctcaaactttggagctcaggagagttcgtcgtgaattcaaggctaacaagatctcagaggatgattatgttaaagccattaaagaggaaattaagaaa

SEQ ID NO: 3855 - DNA, 413 bp, Gossypium hirsutum
  Clone ID: LIB3083-081-Q1-L1-F6
gaactagtctcgagttttttttttttttgattaatcgatatggctagctcaatgtcccttaagcttgcatgtgtggcggtgttgtgcatggtggtgggtgcacccctggctcaaggggccgttacctgtggtcaagtcacaagctccctcgcaccctgcattggttacttgacagggaatggtgctggtggcgttcccccaggttgctgcggcggcataaaatctctcaactccgccgcccaaacaacaccagaccggcaagcagcttgcaaatgcatcaaaagtgcggccgccggcatttctggcatcaactatggtattgcaagcggactcccaggcaagtgcggtgtcaacatcccttacaagatcagccctagcactgactgcaacagcggtaagtgaagttttggcat

SEQ ID NO: 3856 - DNA, 389 bp, Gossypium hirsutum
  Clone ID: LIB3083-081-Q1-L1-F7
gaagaaatggtttacaagaccttcctgtttgatccagataagcttggacaactcaaggaacaagcccttgaagatggggttttatccaaatgcacaacattcgaagtccttgcagggtttgtgtggagagctcgatgcaaagcattaaacttggttcctcagcaaaaaactaagctcctctttgctgctgatgggagaaaaagattcataccaccattacctgaaggttttgcaggtaatgggattgttttaacatattcaatctccactgccggtgagttagctgagaagccattatcatttgctgtgggattgatccaacaggcggtcaaattggcgaccgacagttttatgcgatcagccattgattattttgaagtgacaagagc

SEQ ID NO: 3857 - DNA, 404 bp, Gossypium hirsutum
  Clone ID: LIB3083-081-Q1-L1-F8
tccgactccatcgactctgaaaccgactgcaactatttggtgcgtaccaaaggccggtatttccgatgctcaattgcagtcgagtctagactatgcatgtggccagggcatcaattgcagtccgatccaaccgggaggtgcctgtttcgaaccgaacaccgtagcgtcccacgctgcttatgccatgaacctttactaccagaattccgccaagaatccgtggaactgtgatttctcgcagacggcaactctaacatcccaaaatcctagttataataattgcatctaccctggtgggagcacttaaaaaaagtcagataaaatgtgaagtgaaattggaaaaagaagaaagatggttaaatataagctgtgagtactttatatttgtgggtcttattttaaaa

SEQ ID NO: 3858 - DNA, 388 bp, Gossypium hirsutum
  Clone ID: LIB3083-081-Q1-L1-F9
cttgaatgcaaagcctcaaagctttactttgtctcaaagttcaagcaataattaccaagctttaagtcttgcatctagcacaaatgatgaaaattttgagggctctattcgtaatctgaaatttgaggaagcagaggaaacagttgtagcttctctagccaaagcttcagaaaatttagaagtagatctgtcattaactactgctgctgctcccaagaacgattgtatcgagtggaacgaaagtagtacagtaattgatactttaacctctgagctattagaggacaattcagcagcaccacttcctcccaatgaagattgtgtttcatatgaaaatggagatagcttgcctagtgatgccaggattacctcaagtgttgaagcatta

SEQ ID NO: 3859 - DNA, 341 bp, Gossypium hirsutum
  Clone ID: LIB3083-081-Q1-L1-G10
attgaaattttctttctcgattttctctttagccaaaaaagatgcagatcttcgtcaagactctaaccggcaagacgatcactctcgaggtcgagagctccgacacgatcgacaacgtgaagaccaaaatccaagataaggaaggcatccctccagaccagcagcgtctgatcttcgccggaaaacagcttgaggacggccggaccttggccgattacaacatccaaaaggagtcaactctccacctcgtcctccgtttgcgcggtgggatgcaaatcttcgtgaaaaccttgaccggcaagacaatcactctcgaggtcgagagctccgacacgatcgac

SEQ ID NO: 3860 - DNA, 244 bp, Gossypium hirsutum
  Clone ID: LIB3083-081-Q1-L1-G11
gcttggcagttgcagttgtgttaaatagcatacccaagggaactacacaagtagtccttagaggcaagctgactaaagttgcttgtgctcttgcctttacgctatgccaaaagcgcattcaagtctctgtattacgtgaggatgaatatgaaaagcttgataaattacttggcaccaagtctgagggtaaattggttctctcaaaaagttacacttgtaagacatggttagttggagatggatt

SEQ ID NO: 3861 - DNA, 394 bp, Gossypium hirsutum
  Clone ID: LIB3083-081-Q1-L1-G12
atcttaagacccaaagccaaaagagacaggcatagggtgactttttcaactggttttctggctggttgcatggcctctcttcttctagcccttataatgatcgttcggctccgtacaatcatggatagtagagggaggactatatatatggaaaccatgtttcccctttatagtttgttcggattcattgttctacacatgctgatgtatgcaattgacattttctactggagaaagtaccgagtgaattacgccttcatattcggtttcaagccgggaaccgaattaggctaccgagaagttcttcttctgagcttcggccttggaatattagcattagctgctgtgctctgcaaccttgacatggagatggatcccaaaacaaaagactata

SEQ ID NO: 3862 - DNA, 149 bp, Gossypium hirsutum
  Clone ID: LIB3083-081-Q1-L1-G2
cccccctggcccccttcccatcccggttttcggcaactggctccaagtcggcgatgacttgaaccaccgcaacctcacagacttatccaagaagatcggtgacatcttcttgctcctgatgggacaacgtatcctcgtgggtgtttttt

SEQ ID NO: 3863 - DNA, 387 bp, Gossypium hirsutum
  Clone ID: LIB3083-081-Q1-L1-G3
ctcgtgccgtttttttttttttttttttttaacaaaacaaaaattaacatgcttttatcagcatagatatagtaatagtatcaatgttgtataaatattacatttaacaatacaaacaatattacaggaaaaacaatgatatgaaactttgcaaccttctttcagtgaaaatcaattttgggttcaatgccatgtcgacattcgtctgcaagagcaatatttaacatttcagtgcaaaacggatcatccggtttcagccataaagccttatgatagtatgtaattgcagaagtaaaattatcctgcaaatggtacgtgtatgcaagaccagcataagtgctcaagctttttgttgataacggtagtgccttctcatagaatgagatt

SEQ ID NO: 3864 - DNA, 380 bp, Gossypium hirsutum
  Clone ID: LIB3083-081-Q1-L1-G4
aaaagaaagaggcagcaaaagccagcctccatcaaatctctaaattcaagagttcttttaatgctcagtttaaacacattattacatgatgtttttttcactaaaatttttcattatcttgttaactcacattgtggtatgagtcaatgatggcgtcagctagatattcacacttagccaaagataatcctgcaagtgatatccttccatccttgatcatataaacatgccacttgtttgtcatattatcgcactgagctttgtttaagcctgtgaacgaaaacatcccgatctgcttaagaacgaaagaccaatccttcccacttttatctttggaagaaagactatcaaataatttatgtctcacattcttgattctc

SEQ ID NO: 3865 - DNA, 371 bp, Gossypium hirsutum
  Clone ID: LIB3083-081-Q1-L1-G5
tgaaggttggtgaagctgagaaggccacaggtgctgtagaatttaacttctgcgcccaactgatagaagatgctgatggtttagagaagattgaaaatctacagactcatgataatagtgagatatatgagaaggcagtcaagattctcgagacttactggctggaggaggatgaagagacgctacctcctgctgacggtactcagcaaagttttcagtttggggagaatgggcttcaagttccatccggtggattcaacttcagttgaagggtttatagaataaacagttcgtaatgcgggttacgactgatacttggggtcgaagtttggtcagggcaccatgatgtgtctggttacataaaagtctgt

SEQ ID NO: 3866 - DNA, 399 bp, Gossypium hirsutum
  Clone ID: LIB3083-081-Q1-L1-G6
taatttcggctctcatttttatgttcatcccttttaatgatataaaccctttgctcacttcatgaccttcaaccaagttttggctttctctcaatcacttcaaaccattttcttctgaaaaatggcttccaagattaaagcatcaagtgctctatttttctccttcaaccttctcttctttactttagtcaactcttataatatcgatgatgattcaaaagattctaaaaaccctgtttttattcgtcctggagctgtgtactcaaacaatcaagaccagttagcctcgtttcgtgtctggggggttgggtgctggcggatgttaatctcgaaaacgcacctacaacaccatgttgcagcttgcttgcaagaatggggaatcttgaagctgaagtttgg

SEQ ID NO: 3867 - DNA, 389 bp, Gossypium hirsutum
  Clone ID: LIB3083-081-Q1-L1-G7
gtatttctggcaccagtgccaacattctgtcggatttacaaaaagaaatcgactgagagtttccagtcactgccataccaggttgcattgttcagttgcatgctatggctgtattacgcgttgattaaaaagggtgctttccttctgatcaccatcaactcttttggatgtgttgttgagactatttatatatctatgttctgggcttatgcttcaaagaatagcaggatgtcggctatgaaactttttatatcaatgaacctggggctcttctctttcattctcatcctcacacactttctgctgaaaagctcgattcgcatccaagttcttggctggatttgtgttgccatctctgtatccgtctttgcagcacccttaaacattat

SEQ ID NO: 3868 - DNA, 392 bp, Gossypium hirsutum
  Clone ID: LIB3083-081-Q1-L1-G8
gcgagtttgttttttttgttttcattttgttgggttttggttttttttttgtttgtttctctataaaaaacatcgccggccgcggattttactcttttcacaaacaaaaaaaagggggggttttgatctttgatcaggtgagtggagtaccatgaagttttgtaggagcttaagcatattgatcgaaaaagcgttgcctgatgggagagataagttttttccttacaaggatttgaaaaacccgttgaatttgatttaccccaaagatgcgagcgagaagcatcctaacaaacggcccaaattagattcattggacggcggggatggggaggagagcgaggtttccaaggaggtgatggatttcgttttgttgttggaaaatgaagtggaga

SEQ ID NO: 3869 - DNA, 368 bp, Gossypium hirsutum
  unsure (1)..(368): unsure at all n locations; Clone ID: LIB3083-081-Q1-L1-H10
gctgagggagtccgaagaaaggcttgggttcgtaagtgaagaaagggatcaattgatcaagcagagagactctgccatgcaggaggcacatatgtggcgtaatgagcttgcaaaggctcgagagcgtgttgtaatattagaagcagcagttctgagagcagaggagaaggtcagagttgcagaaacagatgctgaagcaagaataaaagaagcagagcagaaagaggcagccgctgtgaaggaaaagcaagaccttcttgcatatgtgaatgcgttacaagcacatctccaaagacaacagagtgacacgaagcanattttcgaggaaaagatggagtcgtcaaatactagcaacagtccacctgata

SEQ ID NO: 3870 - DNA, 359 bp, Gossypium hirsutum
  Clone ID: LIB3083-081-Q1-L1-H12
gtcattttcccaaactgggaaattcacaagccacccccaggatcgattcagaaaacccaccacaacataagcccataagtacaacaatggcaatacagatctgtgcttattatgagacaggccgggacacctgaacaaaaactttgaaatgctaaaacccaacgcgcgatcattgtcttacacagagaacactaataaccgccttagatccacaaaatcgcacttgtcttatgctgatctggatcgagattgtgaggggaaaagaaattgcaaaacaaaatggggagattgggagcgctgacgaaccatccagatgatgagaagacatggatgaaatcgctaatggcgcgcagaaatgc

SEQ ID NO: 3871 - DNA, 339 bp, Gossypium hirsutum
  unsure (1)..(339): unsure at all n locations; Clone ID: LIB3083-081-Q1-L1-H2
ccataatgtactatgcaagaaagtatctaccaggtctgggccgatggcagagcacgcagggtggcaaagccagaacatttgcaagttttagcctgactcctgccactgttgatcagaaagttttattggaaagcattgaaacacttcttccaaaaaagaagggcaagtccttctgccggttnttacttggacttcttcgtgttgcatcgatattaggtgtcaatcaaacatgccaggattctttggagaggagaattggaatgcagctggaactggctagcctcgatggtcttttgattccttcatactcagattctgataccctatataaatactgat

SEQ ID NO: 3872 - DNA, 378 bp, Gossypium hirsutum
  unsure (1)..(378): unsure at all n locations; Clone ID: LIB3083-081-Q1-L1-H3
aaatggttctgctagagaaactttgggatgatgtagtggccggtcctcaaccggaacgtggccttggccggctgaggaagatcaccaccaccccacccttgtccaccaaagatgaggcttcatcaatggcgatgccgacgagtccgacgacacctgggacaccatcgacgccggtgtcggctcgtagggacaacgtgtggaggagcgtgttcaatccaggtagcaaccttgcaaccaaaggtattggcgctgaagttttcgacaagcctcaacctaactctcctactgtttatgactggctttacagcggngagacccggagcaagcatcaccgttgattangcggtggctgacggcggcggatggtagcaaaaccac

SEQ ID NO: 3873 - DNA, 352 bp, Gossypium hirsutum
  Clone ID: LIB3083-081-Q1-L1-H4
ctgctttggaatcggcggctaccatatcaaattgaaaaaaaaaaaaagtgacaggttcatttaaagtttttttttttggcaatataataattgcttatccctttttgtgttgttgaagtcattgatgagatttagtttagtgtaataatggtttggtgtttatgaatgtgatgaacatttagttagtgttaaaactttttttacttttgaatcatgtggaaatgtttcaaagctgcccggaattaacttttctttggggacattatggtatttttactcaattgagtagagaggcctaattatgaacttcatcatctactttacggaaattgagaaaaaaaaaaaaaaaata

SEQ ID NO: 3874 - DNA, 390 bp, Gossypium hirsutum
  unsure (1)..(390): unsure at all n locations; Clone ID: LIB3083-081-Q1-L1-H5
atattattttatgccccgagtgataccaacacctccaatattttgactcagctgaagaaatctctttcagaaaccctaaacatcttatatcccttttctgggagaatctttagtaacatgttcatccatgatttcgacgctggtgttccgtttttatcggctcgaatcggttgtcgattatccgagtttcttaggcatcatcaaattgagaccttgaacaacttgctcccttgcactcctttatccaaggaatcaaatcatcagggtcctctcttggtttgtcaagtcaccatgtttgcatgtggaggaatagctntaggcatctgcgcctcacataaaatcactgactccgaaacagcagtcattntaggctttgtttggagcacaatc

SEQ ID NO: 3875 - DNA, 388 bp, Gossypium hirsutum
  Clone ID: LIB3083-081-Q1-L1-H7
gttggttcaaatcagtatgttttgtggagctcatgtataacttctgttgatgcattattttcatcttgaagctgtgggtttagtaccaaactatgctgtgaggcccatccaccttaaaacctctggtggatttagttgatctgctacgcatttcttttctataatgttctatagtttgatttaatacaagcaatcttctactgaagataaatgtcacatgggtattgttggttctcatacctctcttgaataaagaaagagctactctttgttctgctaggcaatggagaggtacaaattaattaaggaagttggtgatggaacatttggtactgtttggcgagctattaataggctctctggtgaagttgttgcaattaagaaaatg

SEQ ID NO: 3876 - DNA, 396 bp, Gossypium hirsutum
  Clone ID: LIB3083-081-Q1-L1-H8
aaaaaaatgaagctcttgtttctaactttgctgctttgttctcttcttctatgttcttcagtttttgcaccaacaatggctcagcctcgttcacctttttgtgaagggaaatgcaaagggaggtgcaataaagcggcggtttgggatcggtgcttcaaatattgcggcatatgttgcgaggagtgtcaatgcgttccgtccggtacttacgggaacaaacacgagtgtccttgctacagagataaggtgaacaacaagggcaaacccaaatgcccttgaaaatgaaatatattcgagttcgggatttaatcaagcttaaagatcgaagacgaagaggccatatatatatatatatgcatgttgatgatgatgttattataaaaataaacttggttt

SEQ ID NO: 3877 - DNA, 388 bp, Gossypium hirsutum
  unsure (1)..(388): unsure at all n locations; Clone ID: LIB3083-081-Q1-L1-H9
atactttgctgcaaattctcccaaatttttcagaaaatctaacacaagttgttatcaattagggaaaaaaatgagagagacccttcatgttcaaggggcaatgtgggaaccaaatcggttccaagttttgggaggtntgtttgcgatgagcacggatagatccaactggaaggtacattggttcctcggatctngcagtgggcgtgttaatgtttactataacgaggcttatgtggtcgctttgttcctcgtgctgtgctcatggacttggagcctggtacgatggacagtgtccgaactggtccttacggccagattttcaggccagacaactttgtttttggacaatccggtgctggaaacaactgggccaagggccattacactg

SEQ ID NO: 3878 - DNA, 318 bp, Gossypium hirsutum
  unsure (1)..(318): unsure at all n locations; Clone ID: LIB3083-082-Q1-L1-A1
gacattattattgtagtttcatattcatgacttacaactttaatgtcttttcttgatcatcgngatgatatggaagaaaagacagatctaagaaacgattgcaaaggacgacaggcagtgacagagaaacatgaaatggacaacaaacccaaaagcatttacatggtgaaagaagaaaagacacatttctaaattaaaaattttacaacataaggagaccactgttaattgtctctctgaatatttttttttctgttgcanaaaagatgctgttgctgttttggttggtagcaaggcagattggttcttcaactttta

SEQ ID NO: 3879 - DNA, 398 bp, Gossypium hirsutum
  Clone ID: LIB3083-082-Q1-L1-A10
atccctcaatgggaagcttataaacttcttgcgggagagggctcaggttgaacaacttattcaatatattgtggtagaacctccagagaatgctgataagaagcaaatttacaagtttccttctattgcatgtgagatttttacgtgtgaggttgatatcatactaaaaacactagtagaagatgagggattaatgaatttgttattttccttcttgaattcgaatcactctcatggcacacaactgacagggtacttcaacaggattgtcatatgtctgctgttgcggaagacatcagcgttcatgcagtatattaagggacatcaagaaattgttgagatgctaattgacctgattggcataacttccattatggaggttttaatacgtctaattg

SEQ ID NO: 3880 - DNA, 401 bp, Gossypium hirsutum
  Clone ID: LIB3083-082-Q1-L1-A11
atttcatccgattcccttcttgagccacaattcacttcggagctttgcgcccctgcttgctgccacaactgccccaacattgtcgaccttttcttcaatttggccgcgggtgaaggagtatttttaccagatttgtgtgaggctcaacgcatcaacccaagacgttcaatggtggagttgatgtctagctctggggcagcccttggccctatttctagtgaagcttcagctttagctccaagcccaactcctcctattactagtgaagttcctgattcaaatgaaggtttagcttcaatcctaagcccatcttctatttctagtgaagcttcaactccaggcccaggcctagcacctatttctagtgaagcttcatcttcaacttcgtctccaggcccaac

SEQ ID NO: 3881 - DNA, 392 bp, Gossypium hirsutum
  Clone ID: LIB3083-082-Q1-L1-A12
tgatgaacttgctgcagttgacttcttcgtgagtacagtggatccattgaaagagcctgcattgattactgccaatactgtgctttccatccttgccttggactacccggtggataaggtctcttgttatatatctgatgatggtgcggccatgctgacatttgaatctctagtagaaacagccgactttgcaagaaagtgggttccattctgcaaaaaattttccattgaaccccgggcacctgagttttacttctcacagaagattgattacttgaaagataaagtgcagccctcttttgtaaaagaacgtagagctatgaaaagagattatgaagagtacaaaattcgaatcaatgctttagttgcaaaggctcagaaaacacctgatg

SEQ ID NO: 3882 - DNA, 384 bp, Gossypium hirsutum
  unsure (1)..(384): unsure at all n locations; Clone ID: LIB3083-082-Q1-L1-A2
gaagcatggacccaaaccaccaatgtatgaacctccaaagaaggagaagcctgagccaaagccaccagtttatacacctccaaagaaagaggagcctaaacctaaaccaccagtatatgaacctccaaagaaggagaaacctgagccaaaaccaccgatttatacacctccaaagaaagagaaacctgaacccaaaccacccgtatatgaacctccaaagaaggagaagcccgagccaaagccaccggtttatacacctccaaagaaagagaaacctgaacccaaaccaccagtgtatgaaccttcaaaaaaacctccgatgtacgaacctaagccaccaaaaccaccggtttatacacctncaaagaaagagaaacctgaacc

SEQ ID NO: 3883 - DNA, 394 bp, Gossypium hirsutum
  Clone ID: LIB3083-082-Q1-L1-A3
agggtgtcttaataaacgccttcgatttactttcggttgccatttacttctttatttctacgtttttgaatttttagtaagcgaaaatgagagagtgcatttcagttcacatcggtcaggctggtatccaagtcggaaatgcctgctgggagctttactgccttgaacatggaatccagcctgatggccagatgccaagtgacaagactgtcggaggaggtgatgatgcttttaacacctttttcagtgaaactggtgctggaaagcacgtccctcgtgctgtctttgtggatcttgagcctactgttattgatgaagtgaggactggtacttaccgtcagcttttccaccctgagcaactcatcagcggcaaggaagacgctgccaacaactt

SEQ ID NO: 3884 - DNA, 403 bp, Gossypium hirsutum
  Clone ID: LIB3083-082-Q1-L1-A5
atgacatgaaatatgctataagcaagcttgatgactctgagtttcggaatgcttttagccgggcttacatacgggtgaagaaatatgattcaagatatgattctaggcgcagctactctagaagtcgtagcccgtatagtcgaagccccagtcgtagccgcagttatagtagtaggagcaggagcaggagcaggagcaggagcaagtctcctcgggcccgatacaccagtcagtctccatctgtatctagatcggtttcaccatgttcccattcagtgtcaccagcccgctcctattcaagatctggcaatttgcggcaatctggggattggatgttaggaacttgatgggatgtggtgcttgaatgcctgcaattcttttcttgttgagatctcgctccata

SEQ ID NO: 3885 - DNA, 364 bp, Gossypium hirsutum
  Clone ID: LIB3083-082-Q1-L1-A6
gccaacgctgcccaagaatcacaaggccatcattgctgcagctgtgatgggccttgtgattcttgttgccaacgctgcccaagaatcacaaggcattgcagcttaagtggcagctcagcatcaacaatgagaagactggtagggtgctcgattccataaatcgtcttaaagaagtcatcgttggtggccaccgtcgaggttcttttgtgaggggcaccttccctagcgacagctaaaacttgtgatgatgatgataaaaaaaagcatagtaagagagaagtgagatggagattgtttgggtgttaatgtgttggtttgatgtttgattaacttatttggcttaatctctcatgataagctacat

SEQ ID NO: 3886 - DNA, 394 bp, Gossypium hirsutum
  Clone ID: LIB3083-082-Q1-L1-A7
ggggggggggccaaactcgaagaccccaatttgtttcaaaaagagagagggttgaaaaatggatcaagggttactggatgatattataaaccggcttttggaagttaggggtcgaccagggaaacaagttcagttatctgaatcagagatccggcagctttgtttggtttctaaagagattttcttacaacaacctaatttgttggaacttgaagcccccatcaagatttgtggtgatattcatggtcaatattctgatcttttaaggctttttgagtacggtggattgccgccagatgccaactacttatttttgggggactatgttgatcgaggcaagcaaagtctggagaccatatgtcttcttcttgcttacaagataaacaccctgaaa

SEQ ID NO: 3887 - DNA, 362 bp, Gossypium hirsutum
  Clone ID: LIB3083-082-Q1-L1-A8
ctatggaggccaaatggctgctattttttacaatggcagcactaatggcagtggcaaacggccaggaatcagtgaagccattggtgaagatagttaaaggcaagaaactttgtgataaagggtgggaatgtaaagggtggtcacagttttgttgtaaccaaaccatttctgattacttccaaacttatcaatttgagaaccttttcgctaaacgtaatacaccggtggcacatgcggttgggttctgggattaccattctttcattacggcggcggctcagtatcagcctcatggttttggtaccaccggcggtaagctgcagagcatgaaggaagtggcagcttttcttggacatgtcggc

SEQ ID NO: 3888 - DNA, 356 bp, Gossypium hirsutum
  Clone ID: LIB3083-082-Q1-L1-A9
ctgggggctgatagttaataccgcatttgaaaccagctgttgtccctggaggtgatcttgctaaggtgcagcgagctgtttgtatgataagcaataacacagcagtggcagaggtgtttgcacgcattgaccacaagtttgatctgatgtactcgaagagagcttttgtgcattggtatgttggagagggcatggaagaaggtgaattctcggaagcccgtgaggatctggctgctcttgagaaggattatgaagaagttggtgctgaaagtggagatgatgaagaagaaggtgaagaatattgatgctactatcgcaatatcatttattctgaaaatgatgggttcaccctgtga

SEQ ID NO: 3889 - DNA, 345 bp, Gossypium hirsutum
  Clone ID: LIB3083-082-Q1-L1-B1
atcaatcagttccggcgaatcagatggcaaaagaagttgttaatcccgatgaactggttgttgttggagaggaattagaccatgtaagaatcatcactttgaacaggcctcgacatttgaatgtcatctcatccaaagtggtctccctgctagctaaatacttagaaaaatgggaaagagatgagcaagctcagcttatactgatcaagggagccgggcgtgcattttctgctggtggagatttaaaaatgttctatgagggaaggaaatcaaaggattcctgccttgaagtggtctatagaatgtattggctttgctatcacattcatacctataagaaaactc

SEQ ID NO: 3890 - DNA, 404 bp, Gossypium hirsutum
  Clone ID: LIB3083-082-Q1-L1-B10
ccaacctctgtttttcttcacaaattcccaatctaatcggttcctccccttctttttccacatctcatagaagagttggcagtttgctctgctgtgtccacagtttgtcaaagtggagggcattaattttgaatcgtcttttatgtctgaacgggcctctctctttttatcatcaattggtttgctcggtgaatactgtcccacttctagaaaaaaggaaggtatctgcatgcatattgaggtcagtaatacagaaaaatttggttgccattttatgcgacctattccaagtgcaagaaagcagtctggtaaaggatttgttatcacaattggaatcactagtatctgatccctcctttgtgattaagagtttgttccacaagttcgatcgagatggctttgca

SEQ ID NO: 3891 - DNA, 383 bp, Gossypium hirsutum
  Clone ID: LIB3083-082-Q1-L1-B11
caacaactaaggttgaaagagaggctgaaatcccacctgagcaacaaatggaagataaaccggcaccggatgcttcccagcccctctcgactataattccaatcccgaaaagcagacttgcaccataccgaaccgtgatcattatgcgattgatcattcttggtcttttcttccattatcgagtaacaaaccccgttgacagtgcttttggactgtggctcacttcagtcatatgtgaaatctggtttgcattttcctgggtgttggatcagttccctaagtggtatcctgttaacagggaaacatacattgacagactatctgcaagatatgaaagagaaggtgaacctgatgaacttgctgcagttgacttcttcgtgagt

SEQ ID NO: 3892 - DNA, 357 bp, Gossypium hirsutum
  Clone ID: LIB3083-082-Q1-L1-B12
ggcaagaaaaaagaggtttggtgggcaattatggtgatgcaggacatgatcaagctgaacaagaagaagaagaagattacctcatggcagaagctcgacaacccctctggcgaaaagttccgatttcctcgagcctgataaacccttaccggatagtcattgtcctacggctctttgtcctcatctttttcctccggttccgtattataacaccggcctacgatgcttttcccttatggcttatctctgttatatgtgaagtatggtttgctttctcctggatactcgaccagttccccaaatggttccccattactcgtgaaacttacctggatcgcctctccttgagggttgagc

SEQ ID NO: 3893 - DNA, 315 bp, Gossypium hirsutum
  Clone ID: LIB3083-082-Q1-L1-B2
gggggcgaatacagaaaccattattaaataccaccacccaagaaataacattcacacaaccacacaaaccagcagcatccacgacatatatacattaatacgcctgtcaaatcgcattggagcaagcagcaaaattataaaagagggcaacagcaagaccaaattatcggactaattctctacaaagggatttatctaagccattcaactttaaatcaaaaagtccatatggaagcggattatcccatctacaactattaatttcagaaggtcaaaaggaaccaacaggattcagaggtacatttctcccttaga

SEQ ID NO: 3894 - DNA, 429 bp, Gossypium hirsutum
  Clone ID: LIB3083-082-Q1-L1-B3
ggggggggcggttataaactagggggacccccgggccggcggaattcgggcccgagctcaaaggaggaacccacacacttccacggaaaatcaccgaacttggtccaagactcctaaaccggatttaaccgcctccgcggaacgctcaacccgccctaacaagccgtgggatgggatcagaaaagtggtgtttggaggtcaagtgaccgatgaagaatttgaaagcttaaacaaaaggaaaccttgttctggatataaaatgaaggagatgactggtagtggtatttttgcagccgatggagaaaatgacgaatcagaacctggtagcgcaaaccctactccaaacaacaaaacagcaatacgaatgtaccagcaatctctagctggaatcagtcacatctcgtttgccgaggaagagagtattacacc

SEQ ID NO: 3895 - DNA, 400 bp, Gossypium hirsutum
  unsure (1)..(400): unsure at all n locations; Clone ID: LIB3083-082-Q1-L1-B5
ctagtctcgagtaatttttttttttttttatgcaagggggaaataaccacatgaatccattatacctgttgggcatttacaagttcccttaacaatttacttccaatacagacaacaaaaatatcaagtttcaacccaaacacaaataaaacatgaaaaagcataacatacagtaaaccatttcaagtctttaacaagcttcaaagaatagaagcttgcataacacggaagcaacaggtaataaaagacatcatacgcacactcaatcacaggtacttcttagtactcatcatcttcaccctcatcaccctcagccgactcagcaccaacttcttcataatccttctgcaatgcagcaagatcctcacgagcctctgagaattctncttcttccataccc

SEQ ID NO: 3896 - DNA, 369 bp, Gossypium hirsutum
  Clone ID: LIB3083-082-Q1-L1-B6
tcaaaatgcaaggcaagaagcattgcagagaaagaaagcagagaagaaaaagatgttagaagaggcagaggcaaagctcagtgcagaagcggctcgcaagagagaagcaaaagatcgtgctcggcagatgaagaaggcaatgccaagaatgaagatgacccgcgcacattagatggctgtggacattagtagtatgaatgcttactcatctgcagattgcaggttattagttccctggtttctgtatgtcactgggaatgtatttttagttgtcaactaccgattcggaatgttcctgaagatactgctccaggaaccttgataaagttttcttccatgggatgacattttaaaacgcaattcccaagt

SEQ ID NO: 3897 - DNA, 391 bp, Gossypium hirsutum
  Clone ID: LIB3083-082-Q1-L1-B7
taacactcctccagttcaggaccaccttgaggaggctgagggattgcttaaaaccaccaattccacaggtcaatcgaaagaggcaagactggctcgggtttgtgctggactttcatctcgtcttcaagaatacaaatctgagaatgcacagcttgaggagcttctaattgctgagagagagctgagtaaatcttatgaggctcacataaaacaactacagaaagatttatttttatgtaagagtgaagtaacaaaggtagaggcaaatatggttgaggctttggcagcaaagaactctgagattgaggtgcttggcaactctatggatgcgcttaagaaacaagctgctttatctgaagggaatctggcatcacttcaagcaagcatggag

SEQ ID NO: 3898 - DNA, 388 bp, Gossypium hirsutum
  Clone ID: LIB3083-082-Q1-L1-B8
tgcgaaggcaaggcaaagtagctgcccaagaacaagcggatcaggggacaacaatctagcacccctagacgtggcaaccccaaattcttttgacttaaaatacttcaataacctcttaaacaaaaagggtttgctccactcggaccaaatactcttcaatggcggatccaccgattcattggttaaaacatacagcagcaacaccaagaagttctattcagacttcgttactgcaatgataaagatgggagatattaccccactcaccggatcaaatggtgaaatcaggaagaattgcaggaagcctaattaatggctcttcctccattgctttgccccaatatctgaggacctgtctagtctacacagtttgctttcttatttatat

SEQ ID NO: 3899 - DNA, 360 bp, Gossypium hirsutum
  Clone ID: LIB3083-082-Q1-L1-B9
ggtatgaagcctaacaaataaatagcagcaacatattattgtaaaactgtcaaaagtactacaaaactctgattgagagaaatgattcaattcttctcatctacaacaccaaattgccctttttttaagttcccttctctgtgatcatcattcggggaaaaaaaaacaaactgaaaatcttccattctgcaaaactgaaagttctgatgcagggttaccccagatttggtctactctctctctcaaccatggtttcaatgaagttagagcttcaaagaccgagtttttaagcagtaaccggttgcttttgcacgaaagcaattcccttttcgatgctggcccttaattcaggcttaagcg

SEQ ID NO: 3900 - DNA, 366 bp, Gossypium hirsutum
  Clone ID: LIB3083-082-Q1-L1-C1
aaattccagcacccaaaataatggccctctgcaagccgtgtgctaggttggtcctagcactggccatggcattggtggcagctacggtgcctgtttatgggcagagaactatcaacactccatgcaccccatcggcacttaacatcttcactccttgtatgaacttgcttaccaatagcagtgccaatggtacttcgcccactgcagattgttgcaactcgcttaaaacgctcacatcgagcggcatggactgtttgtgcctcattgtcaccgggagtgtcccgttccgtttacctatcaatagaactctagctatttctcttccccgagcttgtagcatgcctggtgtccccctccaatgcaaag

SEQ ID NO: 3901 - DNA, 375 bp, Gossypium hirsutum
  Clone ID: LIB3083-082-Q1-L1-C10
cggaattcaagtgtgacggctgatgttccattctttttggttagtattggttctgattcacatgctgccgtcaggcatcttaaggatttggaagcttgtcaacgtgatggtcaaaagttgctatttgcattttatgacccatgccatcttccaaacaatcctggctggcctctccgcaacttcttagcacttatttctgccagatggaatctgaaaactgttcgctttttgtgctatagagagaatcgaggttttgctgatttgaatttgtcacttgttggtgaagccttgattacagttcaacaaggatggagagaacagcagtgtgtgcccaatgctgtaggatgggaacttaacaaggggagaaaagtaccg

SEQ ID NO: 3902 - DNA, 369 bp, Gossypium hirsutum
  unsure (1)..(369): unsure at all n locations; Clone ID: LIB3083-082-Q1-L1-C11
gagtntttttttttttttttttttttttttttatcaaggagtacgtctgtcattatttgcatcaaaaccacccgttagtctaacaagctgcaatatatgttctgtttccagagtttcttctgttcaagcaaagcatatcactcaaaataaacacttcatatcaacacattttgtaaccaaaaatgaaaaaaaaaaaacacattaatgaataaattaaggccacttgcatcatttgaatcaggttcctccgttgagattttgggcagacatgaggctctttgtcaaccaaattgctgtttctctagatgaggcaacttcatccccaaacggtcgtagaataccagcaagctcatctattttgtcttgctt

SEQ ID NO: 3903 - DNA, 351 bp, Gossypium hirsutum
  Clone ID: LIB3083-082-Q1-L1-C12
cttacatacatgagggtaaatggcctcctgggtcagttgatattcacatcatcgaaaagagtcttcgaaaggctgtctttgcagctattctccttatacccattgcctgcattttcctatctctcaaggaaatttcagccactcttattttgtggagacttcagctaagtggactccttgtcatattattattttttttttggaaccctgttcacaaagagtctgtcatcataatgccagcctttggagttcagcttgaaacacactatacgagtggaagaatcatccgcagattcattcccgccggtgagattttgaaacctgttttattaaaatgtgttacccccgtaa

SEQ ID NO: 3904 - DNA, 356 bp, Gossypium hirsutum
  Clone ID: LIB3083-082-Q1-L1-C2
ctcctgcaatggctaccggagcaggctctgctttgccgggttgcgctgtcttcttatgctcttccatgttggtctctttaattgctctcttggtgcattgaattcaaagcttttcaagactttatgacattggctacccttaatttcactctcactggtgatgaggggagtagcctctaatcttctccgagataatattcgggtgttatcaattatcaatttctctaaagtcttagatatctctatatatatcatgtgacattagtgacataaatttgattttgtaatgtaattggcgtgattttcttatatatcatacatatataagggtattgatcctatttcttttggattca

SEQ ID NO: 3905 - DNA, 351 bp, Gossypium hirsutum
  Clone ID: LIB3083-082-Q1-L1-C3
ctagtctcgagttttttttttttttttttagtgttaggggtttttccccctattttaagaaaaccctaattctatgtaatgtgcaggatcttgatgacatgaaaaaaaggttaaaagagatggaggaagaagccgctgctcttcgtgagatgcaagctaaggtcgagaaagagatgggttccgtacaagatcctgctgctgctgcagctacatctcaggcaaatcgagaggaagtggattctcgatcagtctttgtgggcaatgtggattattcatgtactcctgaagaagttcaacagcatttccagacttgtgggactgtaaatagggttactattcgtacagacaagt

SEQ ID NO: 3906 - DNA, 389 bp, Gossypium hirsutum
  Clone ID: LIB3083-082-Q1-L1-C4
cccatatccaacaagtatccatggcagacccaaaacaggaagcgatagaagtcatccattcttggtctgctccgagatcactcagtactagtctcatgtattcgttttctcagagggatgacacagaagtgctggatgaacctctgtatggaacttttcttcgtgttactggtgttgaaaggccctaccgtgaagatgttctctctaagatggaatgcgatggtaataaagttgttgacaacattatttacggtcctggaaaaaacagataccggtattgtaagcatattgcaaagcaacgggtgcctggtttgccaaatgacttgctgcagaaaggaaagcactttatactgatacaaaatcctctcaatatactgtcatcctttgag

SEQ ID NO: 3907 - DNA, 387 bp, Gossypium hirsutum
  Clone ID: LIB3083-082-Q1-L1-C5
gcacaccgtcggttgcggagatagttttgttgcagctatggcattcggttttatacacaatattcctttggttacaacattggcatttgcaaatgctgtgggggctgctactgccatgggttgtggtgccggtaggaatgtagcagcactgaagcaagtagtagaactaatggaagcacccaacctcaacgaggatgatggattttggaatgagctactgggtgaacatttggactcccaagaggttacttttctgtcgaaaatgattttaaatggaagcaatggcaggatgaatcgtgttacatttcaaaaggcagtttctgaattgctgcctaagcttaaatcaagtcaactagagggcacactgtcatgttgatggattggagc

SEQ ID NO: 3908 - DNA, 399 bp, Gossypium hirsutum
  Clone ID: LIB3083-082-Q1-L1-C6
gttgggtttcgaatcatcgtcttcgcctaactttttctgcgtcaatttttcagatgtgggctgcttcatgccttgcatcgtgctgtgcggcgtgcgcctgcgatgcgtgccgcacggtggtttcggggataagccggaggtctgcaaggatggcctattgtggactatttgccctttctctgtttgtttcgtggatcctccgtgaggttgccgcccctctcatggagcagctgccttggatcaatcattttcacaaaacacccaacagggaatggtttgaaacagatgcggtgctgagggtcagcttgggaaattttctctttttcactatcctatcatttttaatgattggtgttaaaaatcagagggatcctcgtgatgggttgcaccatggtagat

SEQ ID NO: 3909 - DNA, 375 bp, Gossypium hirsutum
  Clone ID: LIB3083-082-Q1-L1-C7
aaatttctctggaaacaaagcaactatcaactacgtttacctcagatctaaaacacctcgtctcagatccactaaattcaccatgtctactactttcagcggcgatgaaacggctcccttcttcggcttcctcggcgccgccgccgctctcgtcttctcctgtatgggagctgcatacgggacggctaagagcggtgtgggtgtggcttcaatgggtgtgatgaggcctgagttggtgatgaaatccattgttccagttgttatggctggtgttttgggtatttatgggttgattattgctgttattattagtactggcatcaatccaaaggccaaatcgtattatctttttgatggttatgcccatctttcctc

SEQ ID NO: 3910 - DNA, 416 bp, Gossypium hirsutum
  Clone ID: LIB3083-082-Q1-L1-C9
tggctttgccgtagtggcggcggacacatcggcggttcacagtatcctcgtgcacaaatccaacgaagacaagatcatggtcctcgattctcacaaactcatcgccgccagcggtgaatccggtgacagagtgcaattcacggagtatatacagaaaaacgtggctttgtatcagtttcgcaatggtattcctttgacaactgccgccgctgccaatttcactcgcggtgagcttgccactgcattaaggaagaacccgtacttcgtgaacattcttcttgctggctacgacaaagagacaggcccctcactttactacatcgactacatcgctacacttcacaaagttgataagggagcattcgggtacggatcctatttttctctctctatgatggacaggcactaccacagcg

SEQ ID NO: 3911 - DNA, 403 bp, Gossypium hirsutum
  Clone ID: LIB3083-082-Q1-L1-D1
ccttctttgagtaatggtgagctgattgttcatggttctccccggccggttcgaaacatgttaaaccaggggatgccattgtccaatggcttggctagacctagagctcattcaaatgttggggcttttagtaatgaggatagtttcattattcaaggagatggtttaaattatgtaatgatcaataaggggcttgattgttcgagagggctaaacaaggcaaaggatattggtgcgagtaagcatcgagaaggaaggttgcaactcgataattggtctcaatttgcaccagcttgtggaaattctaagaatgctgctaagttatgtacctcgttttctttgccgcctaagtataactcgttggctgaagctcgtggatatatatacttgatagcgaaagatc

SEQ ID NO: 3912 - DNA, 193 bp, Gossypium hirsutum
  unsure (1)..(193): unsure at all n locations; Clone ID: LIB3083-082-Q1-L1-D10
cccagaccaacagaggctgatttttgctggtaagcaacgtggaggatggncgtaccctggctgactataccatcaaaaaggagtccaccttcaattggtggcttctttttcgggggggattgcaaattttggggaaaacattaacgggaaaaacaataaccttgaaggtgaaaagctttacaccattcatata

SEQ ID NO: 3913 - DNA, 356 bp, Gossypium hirsutum
  Clone ID: LIB3083-082-Q1-L1-D11
agctagctccacattgtctatggcttcaaagcttctttggattgctgtctttgttcttgatctcattgcttttggtttagctgtggcagctgagcaaagaagaagcactgccaagattgtccaagacagtgaagttaattataactattgtgtctatgactcagacatatcaacaggctatggtgttggtgcatttttgttccttatggttagccaagcccttataatggctgcaagcaaatgcttctgctgtggaaagggtttaaaccccagtggttcaagggcctgggcagtcatccttttcatagtctgctggttggttttcctgattgctgagatatgcttgctggcttgat

SEQ ID NO: 3914 - DNA, 376 bp, Gossypium hirsutum
  unsure (1)..(376): unsure at all n locations; Clone ID: LIB3083-082-Q1-L1-D12
ggtgtacccaagtctgatattcccatcattctaggtaagaggcctcaactgtgtggaattagtctctccgaaaatcttatacccaccatgactttcttagaagatttgggtgttgataagaaacaatgggcaaaagttatatacaggtttcctgcacttctcacttacagcaagcaaaagtttaagactactggggatttcctttatgaaatgggcctttcatcaaaaaatgttggtaaggttttaacgcggtgtccgaccataattagttatagtgttgaagacaagctacgccctacagctaagtatttcaggtcattgggtgctgatgtttctcttcttctattanccgtgccacagacttttggtcttagca

SEQ ID NO: 3915 - DNA, 88 bp, Gossypium hirsutum
  Clone ID: LIB3083-082-Q1-L1-D2
gggaatgcccattctccccaagggcagttcatcaagaaaagctaaagaagccgctgcagctgcagctcaggcagcagcagctgctact

SEQ ID NO: 3916 - DNA, 399 bp, Gossypium hirsutum
  Clone ID: LIB3083-082-Q1-L1-D3
aaaaaacaaaaaggaaaatcttcctcttgttttgcttgaatggagatttgagccctgaaagtactgcatttgtgaggtatttgcagtttctcctgaacttcgcgaaatgggaaaatcaccgggaaaatggattaaggctgtgctttttggaaagaagtcttgcaaatctggttatcataaaggaagggagaatgttgccaatgtaaacgaggtgttggtttcagccagggcatcagaagctgaagtccctgtggctcctcccttcccttcacagcttaatcaatatgctaatgagagaaatgagagagatgaagggaaattagaactggaaaacaaggaggctgcaaatatctataacgatgacaggatatcactaccagtgagtcaaggcataggttc

SEQ ID NO: 3917 - DNA, 366 bp, Gossypium hirsutum
  Clone ID: LIB3083-082-Q1-L1-D4
gagaaagatatcaactttgcacctgcattttattcacaacccacacacaaaaaaaaagccttcccgtccccccagcattttgcatatatcaaatattcaggaaaaaaaatacctacaacactgtcggaccacaggtgaaagggggtgcaggaagtacacatataatgaagtgtgtcctcacaaggtttcagatttaacaaaacagatgttaaaaatgatgatacaacgacacagattaaactagttttgatcgtgtgaggtttttgaagaactctgcaaagaatgtggcggagaaacaacctgttcggacgaatcatctgaactcttggtctccaagttttgatgtttcttgctcgcagggtcggt

SEQ ID NO: 3918 - DNA, 410 bp, Gossypium hirsutum
  Clone ID: LIB3083-082-Q1-L1-D5
agaaaaaaataagcttatcccttcgattgattcaaacttatcaaaggtagacattatctcataagtataacgatagagtttgatgcagaaacaatccatgaaaaaagatttcagtttcatttacaaatttcaatctcttaagcatataatttcccctataatcagcaaattaaccatctatatccttcttaaatcataatttaaaaaaaaaaaagaaattaacgaggattcttacaagcacagatcaacaaagaaaactcatgacctcttcctttgtcactatgttccaaacacccacttttttcttctaaccaaagcctgctatcaaacccactccttgtcctaaacatgaacacagctctcccatttgtttgcttaaacacccaatcatgcaaatcccacatcatatc

SEQ ID NO: 3919 - DNA, 387 bp, Gossypium hirsutum
  Clone ID: LIB3083-082-Q1-L1-D6
aaaccttctgcttagcttaaaaaatcttgaatctgcactgtcctacttccctcgttatcgtcaatggcttcggacaagaagattaagatcgggattaacggatttggaagaatcggacgtttagttgccagagttgctcttcagaggaacgatgttgaactcgtcgccgttaacgatcccttcatttccaccgattacatgacatacatgttcaaatacgacagcgttcacggtcaatggaagcaccatgatcttaaggtcaaagactctaaaaccctcctcttcggcgaaaaacccgtcactgttttcggaatcaggaaccctgaggagattccatgggctgaagccggggctgagttcgttggtgagtcaactggagtgttcact

SEQ ID NO: 3920 - DNA, 401 bp, Gossypium hirsutum
  Clone ID: LIB3083-082-Q1-L1-D7
gtgagcgcagagcactggcaaaattattcaggcatcggttgttgtcatctcctccacctccgtgaccagtcagattatgctagttttctgggagcataaatgcagtctttgcattgatatccacagcgaaagtgaaacactgggttctctatgaagtaaaaccacgatttttttttcttccgggaatctttttttcatggatttttcaagcttgacaggaattagaagcaaaccagtttcttgggatttctacaagtgcttaaattacagttggcagagtaaagttctgctgaagaaatggagctcttcatccataaaaacctattcaattcctacatgccaggtggaatgatgcttaagtttatagaaggtagtcataacccatgggttgctgaatgatt

SEQ ID NO: 3921 - DNA, 354 bp, Gossypium hirsutum
  Clone ID: LIB3083-082-Q1-L1-D8
gttaatgccactttaaattggatcacttttgctttggatgccccttctgcacgagctgtggtgtttggagttcacataggcgggcatttatttgtggaagttcttcttttggtggtcattctttttctgctttcccagaaaagttacaagcctcctaagcggccattgacaaagaaggaaatagatgagctctgtgatgaatgggtcccagaatcccttattcctcctatcacgcaagagatgctgagtgaacccccagtgttggaaagtgctgctgggctccatactataatcgatgggaaagaagttgtgaactttgcttctgcaaattatcttggatttgtagggcatgat

SEQ ID NO: 3922 - DNA, 374 bp, Gossypium hirsutum
  Clone ID: LIB3083-082-Q1-L1-D9
gcgttgatgaggttgaaaggaaaagtccattttacttcttgatcagggtcccaagatatgatgatgaaaatttaaaagaaaaaatcaggcttgctcaaattagagttgatgaaaaaactcaaagtcgggatgccattccgattgaaatacaaaagatgagggctggttgcaagaaatatggcgatcacattgatgctgccatatcccaagaaaggagccgtccagatttgcataagtccaaacgtcaagaaatagactctattcaatctatgatgaacattgaggatattgatgctcagatacgaaacatggagcacatgatacaacatgaaaccatgcctcttaaggatgaaaaacagtttattcatcaaatc

SEQ ID NO: 3923 - DNA, 394 bp, Gossypium hirsutum
  Clone ID: LIB3083-082-Q1-L1-E1
atcaaatatacatgttgctgattatactcctcatacttagtcaagactcttcattcaatgctagcattcacaagatgatactgcctggtgttccatggtataaagagcatctccttcatcagacatcacttggttccctgatggtcataattttgataaggactgtccagtataacttgtcaaagttgcgggatgtctatcttcatactacttgtctagcaactttggcaaatatggcacctcatgtccatcgtttgagtgcatatgcttcccagagacttgtcagcctcttctatatgctttcacgcaagtacaacaaattggtagagctaagggacgataaactgcaaaccaaagccatctcaacaggggatggccttgtagaagatatgtc

SEQ ID NO: 3924 - DNA, 403 bp, Gossypium hirsutum
  Clone ID: LIB3083-082-Q1-L1-E10
gagagagagagagagagagagagagagagagagagagagagagagagagagagagagagagaataaaacagagtttagacttaaggaatcagagctcgatccaacctccactcctacctaaatttccgatacagacatcatcatcatcagtagtgcctcagggaggttggttggtggaagaagacatcaatgaatcgcatctaaatgatcgaccatcaggcactacacaagaatctgatgtaataaaatctgataaattgcgaggttatcagaatccgtttcctcatacagcacctggttctgtttccactggtttaccatcgtatgcatcccaagtgaagattgaagaggcacgtactggacttgatacaccgaagcagaatgttctgcctactgctcattt

SEQ ID NO: 3925 - DNA, 399 bp, Gossypium hirsutum
  unsure (1)..(399): unsure at all n locations; Clone ID: LIB3083-082-Q1-L1-E11
ggaacatctagcagccaaccaaaaatggttctccaaaacgatatcgatttgttgaatcctccagcagagcttgagaagaagaagcacaaactcaaacgtcttgtccagtctccaaattctttcttcatggatgtcaaatgccaaggctgtttcaacataacaacagtgtttagccactctcaaacagtggtggtatgtgggaattgtcagactgttctttgtcaaccaacaggaggaagagctagactcactgaaagatgctctttcaggaagaagggtgattgatctcatattttgctattttatgattcacaaaaacaaaagaaagtaatctttggatcaaatatgggaatcatatgagtaatctttttcatgtgtttcangtatgacatatgtttg

SEQ ID NO: 3926 - DNA, 395 bp, Gossypium hirsutum
  Clone ID: LIB3083-082-Q1-L1-E12
atcaaatatacatgttgctgattatactcctcatacttagtcaagactcttcattcaatgctagcattcacaagatgatactgcctggtgttccatggtataaagagcatctccttcatcagacatcacttggttccctgatggtcataattttgataaggactgtccagtataacttgtcaaagttgcgggatgtctatcttcatactacttgtctagcaactttggcaaatatggcacctcatgtccatcgtttgagtgcatatgcttcccagagacttgtcagcctcttctatatgctttcacgcaagtacaacaaattggtagagctaagggacgataaactgcaaaccaaagccatctcaacaggggatggccttgtagaagatatgtca

SEQ ID NO: 3927 - DNA, 399 bp, Gossypium hirsutum
  Clone ID: LIB3083-082-Q1-L1-E2
ggtgatggtggctcgtctagttatccttgctttctttcttcgctatcggattttgaacccggtacatgatgcaattgggctttggctaacttccgtgatctgtgaaatctggtttgccttttcatggatccttgatcagttccctaaatggttccctattgaccgcgagacgtatctcgatcgcctttccctcaggtatgagagggaaggtgagcccaacatgcttgcttctgttgatatttttgtcagtacagtggatccattgaaggaacctcctctagtaacagcgaatacagttctatcgatcttggccatggactatccagtggataaaatctcttgttacatttctgacgatggtgcttccatgctcacctttgaatcattgtctcaaacagc

SEQ ID NO: 3928 - DNA, 361 bp, Gossypium hirsutum
  Clone ID: LIB3083-082-Q1-L1-E3
aatagctaagcaaatccaaaccttcacaccgtttcttgagtcacaagtcacaaaaaccttttctactacatacatacatacatatatgtttaattattatcatcattcatgataatcacacaaaagacgaggaaaagaggggaaaaaaaagggttttaattagttagaaattgggttttagttacgtatatgcatctgggctactgctttgatgtcgtcccatgcaatgcattattgttgcctggatatgtctaaatgtcaattcataatcatctacaaatcagggagtgagtggaccggtggcctttggatggctaacaaggcgcaagggaggtgcctgtggcatgtgatgaggtggtcg

SEQ ID NO: 3929 - DNA, 398 bp, Gossypium hirsutum
  Clone ID: LIB3083-082-Q1-L1-E4
gctgcatggtccgattgcgtaaacctgtatgagttaaccatccttcgtctcaacaaaactgttgattccggcaccaatctcaataaggatgatgctcaaacatggctcagcacggctttaaccaatctcgaaacatgccagaccgggtttatggaactcggggtcccggattatcttcttcccatgatgtctaacaacgtttcccagttaattagtaacaccctggctctcaacaaggcaccttacaaggaaccaacctacaaagatgggttcccgacatgggtgaaacccggtgacaggaagctgttgcagtcgtcgtcgccagcttctacggcgaatatcgtcgtggcccaagatggttcagggaattataagacgataaaagacgctatatccgc

SEQ ID NO: 3930 - DNA, 399 bp, Gossypium hirsutum
  Clone ID: LIB3083-082-Q1-L1-E5
ccaccatgcaggattgtccgaccaaaataatgagttcttgtacccagggagaatgtgaagaaaacagtacaaagctgtaactgcattgtgataaaactgacaatagcccttaggaaaccttgctccaagatgaagcccaaaaccattggcacagctgaaaagataccaatttgaaacagaaactgagtatttagagcagcttcaagagcagcgttatccattatccgagctcgctcttgcattgtttcaccaactccagaaagtgccaaataagcccttccataaaggaaaatatatatagtcagcacggttaacatggtacaaaaatagaatcccacagtggtgaagtagaatgacatcattctgaagaagtcaaagagctgcccaagcctgtataca

SEQ ID NO: 3931 - DNA, 338 bp, Gossypium hirsutum
  Clone ID: LIB3083-082-Q1-L1-E6
aaaaggctagcgggcaaaaaaaaagagagccattttctataaatttaagacataaatacataatatttgcaggcattttaacagatcaaaacatataagtttgaaaaacggcaattcaacttcactgctccagagagttttaagagtcaagagttgctgttgatgtacattgcctcagacgaaatgccttacccgtggaaacacacttttctcgtggcggcggagggaaaaacaggcggtacagaaactctacaaatccattccaacaataaagtaccttacacagtcctctttggatcacgagctgctgcaagatggtccaaaataaaatcaaacgc

SEQ ID NO: 3932 - DNA, 391 bp, Gossypium hirsutum
  Clone ID: LIB3083-082-Q1-L1-E7
cattctcgctgtcagggaagcaacgatagagtgaatcattgctcagctattgaaatacaactccagttaactgcgtttaagactttcctagatcttgctggcaaccaacttacaggaaaggattttacagaagcatttgatgcagcttgctttcctcttactctcttctctagctcatttgatgctggttgggcttctgggatctcagctacagtgatccaaggtttgttggatatgttggtggaggggggtgcagacaatgtcaaccagtgtttccttgaagcctctcgattcggcagtacagaacttgttcgcattttattgcagattgcccaacggaatagcttggatgttgatgttgatcttgccttgggttttgcctcgcattact

SEQ ID NO: 3933 - DNA, 397 bp, Gossypium hirsutum
  Clone ID: LIB3083-082-Q1-L1-E8
tcgggatcaagatcctatactacgttatggtggtatgtatgcactagcattggcctataggggaactgctaacaacaaggccattcgtcagctgttgcacttcgctgtatcagatgtgagtgatgatgttaggagaactgctgttttagctctggggtttgtcctttactcggagccagagcagactcctcgaattgtctccttactatctgaatcatacaacccacatgttagatacggtgcggcacttgcagtgggcatttcatgtgctggcacaggattgagtgaggccatatcattgctagaacccttaacatcagatgttgttgattttgttcgccaaggtgccctcattgcaatggctatggtcatggtccagaccaatgaagccagtgat

SEQ ID NO: 3934 - DNA, 334 bp, Gossypium hirsutum
  Clone ID: LIB3083-082-Q1-L1-E9
tctgtctcacttggatttttcaaacttgccttagaagctggatgtgagccccttcagaaaatgagtgatgagcttaaatcctatattcgtcgccataatcttggtgaaaatggggaagctataaatgagctactcgaaagctacaatgttccagacaatcccgagcaaccacaggtgtctgaaacctgttcacaggtgcctgatgagggaactcggtcatcggatgatgaggttcacagggtttcttctgtagcagcagcagctcggagattgaaacccaagtccttgaatactgatgctgctcgggtatcatcagtggccaaatcagcaaaag

SEQ ID NO: 3935 - DNA, 377 bp, Gossypium hirsutum
  Clone ID: LIB3083-082-Q1-L1-F1
cccatcaaaaacaaatttatttcaataaaaataaaatacaacaaaaacaaacatgaaaactaaaacccattgttccatccatcacaagagacagtcacaagtaaaaacataaaacaggtccagattattatattcacaagtcatagcccacataaacaggattcaaagcagatcaactctcagaaaccaacggctccatttcagtcgtctgctcaccaaacaccttagcgatcttctctgtaggaaccaaaggcaaataggaggcaaccttgtaccctttctctgcactgctagccactgtctcgttatacttatcgctgcaataagcagctgttgggacaacgaccgaggcaacttgaaggaagagcgggagcatg

SEQ ID NO: 3936 - DNA, 401 bp, Gossypium hirsutum
  Clone ID: LIB3083-082-Q1-L1-F10
aaaacttctaaaaacatgaaactcacctcaggttcaagcgttatcatcaaccttttggcattacaatacttgcctgttctttgtctctcacaagattttgatttcttctactttgttctacagtggcctggatcatactgcgacacgaaacaaagatgttgttacccgaagacgggaaagccttccgcggattttgggatccatggactttggcctaattacaacgatggtggctacccttccaactgtgaccccaacagtcgtttcgacaaatctgagatttcaagcctgattgggagtctggaaaaggaatggcccactctttcatgtcctagcaacgatggagttaagttctggactcatgaatggctaaaacatgggacttgctcagaatctgaact

SEQ ID NO: 3937 - DNA, 400 bp, Gossypium hirsutum
  Clone ID: LIB3083-082-Q1-L1-F11
cggcacgaggaaaagtacccaaaacatgagaagcctaggatgcacaaggaggaaaaacaaaaaccctgcaaacatcatgaagagtaccacgagtcacgcgaatcgaaggagcacgaagagtacgataaagaaaaacccgatttccccaaaatacgaaaagcctaaagagcacaagaaacacgaagttgaatatccgaaaatacccgagtacaaggacaaacaagatgaggataaggaacataaaaatgaagagtaccatgaatcacgcgaatcgaaggagcacgaagaatacgagaaagaaaaacccgagttccccaaatgggaaaagcctaaagagcacgagaaacacgaagtcgaatatccgaaaatacccgagtacaaggaaaagcaagataagagt

SEQ ID NO: 3938 - DNA, 305 bp, Gossypium hirsutum
  Clone ID: LIB3083-082-Q1-L1-F12
ggattttagtcggacatgttcccaaacttgaaaatttatctttatctcacacagcaatcgatgatgttgccttgtcatatatcggcttgatgccttcacttaaggttatcgacttaagcaacacaaacattaaaggtttttttctccagctaggcactgagtcgcatgtggatagcacactaacagcacttcaaaatcttagttatctggagagcttaaacttggagcatacacaagttagggatccggatttgctccctttattgagttgcaaaaacctgagccatttgtctctcaaatgtgcg

SEQ ID NO: 3939 - DNA, 396 bp, Gossypium hirsutum
  Clone ID: LIB3083-082-Q1-L1-F2
gtggacgcgacggaaggtcccctgtttgctgcacgaaatttgctcagtgggaaccttcaccggccacatatgctctaactgagaaagctggtgataagttcttggataaatcatctgaattatttgaaactctgcgttctgagtcttctgacagcaaagatgaggcttcaattactaaagctgaagatcgtacagatacaaccaatcaaccagttgcacagcttcagtttcttaaatggccattgtggctgcttggcccttctgttctcctcggcacgggcatggtacccactctatggttaccgatatccaccatattcattggcccaaatgtggtgagccttctttccttgattggacttgattgcatcttcaatctgggttgcaccctttttc

SEQ ID NO: 3940 - DNA, 401 bp, Gossypium hirsutum
  Clone ID: LIB3083-082-Q1-L1-F3
ggcacccatatcgtttttctttgtcttcattttcattggtaagtgatttcattgaaaaagtgaaagattttttcaatttcgctgtctctgccatcattggaaacattttctctgcgatcttaactttcttctttgcattagttggtacattgttaggagccatgactggggctttgataggacaagaaaccgagagtggtttcgttcgaggggctgcggtcggggctatatccggagccgttttctccatcgaagtcttcgaatcatctcttcttctttggcaatctgacgaatccgggatcttatgtttgctttacttgattgatgtcattgcaagccttttaagtggaaggcttgttcgagaacgtatcggtccagcaatgctgagtgccgttcaaagt

SEQ ID NO: 3941 - DNA, 373 bp, Gossypium hirsutum
  Clone ID: LIB3083-082-Q1-L1-F4
ccttatttttttttttttaccaaaaaagcatcaattcatttaactgggagaacttaatgatccataataataatcactggacgtaaattaaataaacgggaaactagcgaacacccttcacaaaggacccctaaggttaccgcacctgaccactatgtatctgtatctaattagatccatgtatccgacatggacaagacaaaaccaggctcaagacactgcatatatgaacggccactgaattcctgtgcactgctacagaaacagctgcaggaacaactgcaccgaactgggactgagcctggagaacgataccatctatgggtgatcttggctcaggcatagtcagagttctgaaatagggggggctggt

SEQ ID NO: 3942 - DNA, 397 bp, Gossypium hirsutum
  Clone ID: LIB3083-082-Q1-L1-F5
gttcagaagacagtgaagagtattggatagtgaagaattgatggggaacaagttgggggatagatggatatttctatctaaaaagagacactgatttaccatatggtgtttgtgctgtcaatgccatggcttcttatccaactaaacaatcctcttcaccatccccttatccatcgccaagtgttcctccaccgccacctccttcaactccaccaccaccaccacctccatctccttcaccaagtgattgtggagacttttcctattgttcaagtgatgagacatgctgttgcctttttgaattctatgattattgcctaatatacggctgctgtgaatatgaaaatgctgtttgctgtactggaactgaatactgctgccctagtgattaccccat

SEQ ID NO: 3943 - DNA, 401 bp, Gossypium hirsutum
  Clone ID: LIB3083-082-Q1-L1-F6
aaaaagagcttgaatctgtcagaaaacatcgaaagcaatatagaaaccgccggttttctgttcccgttcctgtagtatctttggttgggtacacaaatgctggcaagagtacacttttaaatcaattgactggagctaatgttctttcagaggaccgactgtttgctacccttgatccaacaacaagaagggttcagatgaaaaatggaagtgaatttcttcttactgacactgttggtttcatccaaaagttgccaacaaccctggttgctgcattcagagctacattagaggagatatctgagtcttctcttttagtgcatgtggtggacatcagccatcccctagcagagcagcagatagatgctgtggaaaaagttctagcagagctagatgtgtca

SEQ ID NO: 3944 - DNA, 370 bp, Gossypium hirsutum
  Clone ID: LIB3083-082-Q1-L1-F7
tggatgtctactactgtgaaacttgatcaagtttcaggactgcttgttattttttaacaattttcattcatggtaagtgatgaattggtactcaattgcaagtccagggagtagcattgccggcaagaactcaaaattacatataataccttttttgtttttgcttgtccaataatctggcatggcaggctcagcttgttgctaagcgctgggcagcttctgaggggaataggaatttagcattgtcaatgagttgttttccttttgggcgtataattttagaattatgtactgatcttatgttttttaagtgcttggtatttttgggtctcatttgctcatagtagcattttccattgtattttgttct

SEQ ID NO: 3945 - DNA, 380 bp, Gossypium hirsutum
  Clone ID: LIB3083-082-Q1-L1-F8
gtgaaataggtggcggtcaagggcccgcattgttccctgctaacatgggagatcaggttggttcaagaatgtcctccctttataccacttcaatgcaacatgaaaacatctctccacatatgtcggccactgcattgcttcaaaaagctgctcaaataggttcaactacaagcaacaacactacttccactttgctaaggggattaagaagctcattatcaggtgcgactaaatccgacagacctgttttctcccctaacttcggcagtaatttcgagggtggcaatggaagtgaaaccctacgatcaaatatggaggatgatagcaatctgcagggataatgaactcacttgcagcaaatggtaactcttccattttcg

SEQ ID NO: 3946 - DNA, 388 bp, Gossypium hirsutum
  Clone ID: LIB3083-082-Q1-L1-F9
tttaaaagtaaagttggggaaaatggggacatcaacgagcgtatctctttctaactctttgagttctaacagtgcctcttagatagcccttcgaaacctcatgaaaacacacttattcttatgctgcacactgtattaataaataccgcccatcaccctaccattactagactcccccacactacttctactgtttatatatgctacaccgacactaaacatgagatgctacttagtccaatatacttgctcaccaacttatgtttacaagtattagtctgcatcaccttcaacagcataaccatccatgcatacttacaagtacatagctacttcaactgcaccatcatcacaattcaagcatacgtacacgttctaattttcaaca

SEQ ID NO: 3947 - DNA, 414 bp, Gossypium hirsutum
  Clone ID: LIB3083-082-Q1-L1-G1
ttcgttctcataattacgattgaataatttacacttcaactatgttacgacgcttatgtttgatatatatatagacatttgtatgagactacagatcttcaaaatttatgaaaaagctttaaaaagaatgaatgtacctgcatcaaacatatacttcagctttccgagttgttccatgcgcaacccgtgcggatcatgtccaggtacagacaaccccattcttatcagcataggctaatggttttccaattgcactccatgtacaacacaggatgggagcagtatgttccttcagagtgctaaccatgtcagctttggaaattgaccaaatgtagatggacccatgcgcagagcctgcagcaatattattgtcatcaggactgataaacgagcgactctagtttgatgccactt

SEQ ID NO: 3948 - DNA, 375 bp, Gossypium hirsutum
  Clone ID: LIB3083-082-Q1-L1-G10
cttaatagaccaaaggatcaaggaacatcttggtcaagctgcggctttccagcaggttggagctgctttcaatcaacatttaatggcccagaggcctcgacttcctgttatgtcgattcctggggctccattacctgtaaaccaaccgatggtcccaggcatgaggccccgtgttctgccaagaccaattccaggtgccccaggttatattcccgttccaggcatgccaccaatgatggcaccacctggtgctcctttgcctggacaagtaaatggccttccacgacctcctacattggctcccccaacaacagtttctggaactgcaacgacacccagttcttctaacggagcacccactacatctgcaccata

SEQ ID NO: 3949 - DNA, 188 bp, Gossypium hirsutum
  Clone ID: LIB3083-082-Q1-L1-G11
aaactgggaaagacaattatcagattatcacaatcggaggcgaatctgagtttgttcaactgcattggagcaaatgtttgaataaaaatatccaaccatttaccaccctgcagtatgtgaaaattccaaacaaatttaaactagcataatcttattgtgaagattgttcaaattatctcttggctagt

SEQ ID NO: 3950 - DNA, 314 bp, Gossypium hirsutum
  Clone ID: LIB3083-082-Q1-L1-G12
tttggctgctgctgttttctctccaacccataagtctgccgttctgaatcaatttcagcaacagcaaagtatgctatcacctattaatacaaattactctcctaaaagtattgagcatcctctcttgcaggcttctctatccggtaggatgtctcctcgaaatgttgagcctatctcaccgatgagctcgcgagtttcaatgttagctcaatgggagaagcagcaagaatttcgcagcctaagctctagggagcttggctctggcttggctgccattgttggttccccggtcaattcatggtcgaaatggggat

SEQ ID NO: 3951 - DNA, 401 bp, Gossypium hirsutum
  Clone ID: LIB3083-082-Q1-L1-G2
ctttattgctcggaggtcactacctccccttaatgaagttggactcacgtgtttccgggaactggtttaccaagagctaaatgcaaaagtgagagatgctgtaatttctctgattgatcaagaacgtgaaggcgagcagattgatcgcgctttgttgaagaacgttttatatatatttgttgaaattggaatggggcaaatggattactatgagaatgactttgaggctactatgctcaaagatactgctgcctactactcaaggaaagctgcaaattggatcgtagatgattcttgtccggattacatgttgaaatctgaggaatgtttaaaatgtgagaaggatagggtctcccattacttgcattctagtagtgagccaaaactgctcgagaaagttc

SEQ ID NO: 3952 - DNA, 366 bp, Gossypium hirsutum
  Clone ID: LIB3083-082-Q1-L1-G3
caaatccaaaagtggcacgaatggcttcacttgaccatatgctgggcatatcatctaattcacttgtagcaatggcttcacaactttcagaggcagaagagcgggagcgtgcgttcactaaccgtggacgttggaatcagttgcgctccatgggagatgcaaagaacttgcttcaatatatgttcaattctctcggagactcaaggtaccagttatgggaaaaaggcatagaaatcagggaaatgaaagaacaacttaaggaacttgtaggtctgttgcggcagagtgagttacaaaggaaagaagtggagaatgagctaaaattaagagaacaggctgtagccattgcactggctacatcagcta

SEQ ID NO: 3953 - DNA, 391 bp, Gossypium hirsutum
  Clone ID: LIB3083-082-Q1-L1-G4
tacaggcaaaagcgcaaggtaacagcagatgaacagattggggagattaaacgcttgaaagaggaaattcaacggttcaacgttgagaatggaatgttgaaagcacaacttggattgctactctttaatgcgcaattccaagcagcagctcaacagagacaggatggttacattacccagtcaaccggcaagcagcttcaccctcaaactgttaccgtccatggaacaaactctgaagctgttgacaagatgaatgagatacaaaatctgcagggaacagttcctgtaaatgtagttgatggtaatgacggtatagcaaaaaatcagacgagttctgaagttgaaacatgcagtaataatgaagcagccattactgacattcttatgaaac

SEQ ID NO: 3954 - DNA, 357 bp, Gossypium hirsutum
  Clone ID: LIB3083-082-Q1-L1-G5
aaaagaaatttaaaattaaaagatagaattaaaatccaacagagtatgcatacataaaaagaaatttcaaagagggtgtaaaccaaatataccattattttttttgctctttacaaatatgccaaatctttctcacaaactagctactacttcacacatcaagaaacaatggtatgctgatatgattttacaaggtccaatcctccattccatctctctactagtgtattatgttgtaaggacatccggaagctgaatggagtgagctccaattactttaccaccaacatcaggaaaattctcatgttcagggaagcggtttacttttccatccatatctacttgcaaatggataca

SEQ ID NO: 3955 - DNA, 314 bp, Gossypium hirsutum
  Clone ID: LIB3083-082-Q1-L1-G6
attaaaaaaactgctttccatttttcctttttgtgtgtgtgtttgagggttcattcaatcgaagaagatgatgcacatgaccttgtactggggaaaggacgtgactctgctcatcgatttctggaagactgattcatggctgagttacctcctcactttgctcgcttgttttctcttctcttccttttaccagtacatggaagatcgacgcctccgtttcagatctcttgcttcctccaacccatccccgccttcctctgccggcgcttccgttcctctcctccccaaataccgccgctccgctaaattcgcga

SEQ ID NO: 3956 - DNA, 369 bp, Gossypium hirsutum
  Clone ID: LIB3083-082-Q1-L1-G7
gaagggcttaggtaatgttgacaagatagaagacatagaattgacagatgaggagatggacatgttcctggatttacacccttttaccaatgcttcaccgtacacagttgtggagacgatgtcactagctaaggctctcatacttttccgtgaagttggtctgcgacacctacttgtcatacccaagatctctagcagagcaccagtggtgggcatattgacaaggcatgatttcatgccggaacacatattaagtttgcatccatcgttggtaaggagcaagtggaaaagattgaggtttcaattcccccttttactgaaaatattctaagtgggggatctcattcagttgttgcaaacggggcttac

SEQ ID NO: 3957 - DNA, 398 bp, Gossypium hirsutum
  Clone ID: LIB3083-082-Q1-L1-G8
aacttagggtctccattataacaaggctattggatacatgctatcagatccgagctgcacgggtttgctcctgtgccctttggatcattggagagtattgcctatctctatctgaagttgagagtgggatggcaaccataaagcagtgcctcggagagctacctttctactccgtttctgaggaaggggaagctactgatgcttctaagaaaactccacaggcaaactccattactgtctcctcaaggagaccagctgttcttgctgacggtacttacgcaacccagagtgctgcctctgaaactgctttctctgctcctaccgttgttcagggatcattggcttccgggaatctcagatctcttctcctcacaggcgactttttccttggggcagtt

SEQ ID NO: 3958 - DNA, 359 bp, Gossypium hirsutum
  Clone ID: LIB3083-082-Q1-L1-G9
gagctgctgtttgcatgcatttgtttttgtgttggtgcactagtgggagcgtgttatgtcgtttgagatgggactgcatatctgactaccatttgtatgcttttgagctataaaagctgttagtattccaggagttatctggtccaatattgaactccttacggagatgatgggacaatagtttttttttttttttggggggggggtccagaggacgcatctaatctttgggttgtgtccacaatctggtatggtccaaagtacagtgtgaatggtagcgggctggcttggggttaacaatacagccaggtttatattatgcattacggggtaatggagacataatttagcttggacag

SEQ ID NO: 3959 - DNA, 394 bp, Gossypium hirsutum
  Clone ID: LIB3083-082-Q1-L1-H1
tcggaccagggtcggaacaaacaacgagaagttgttaaacgacgagttttacatcggcctcaggcaaaggagggcaactggacaggaatatgctgaacttcttcatgagttcatgtctgcagttaagcagaattatggggagaaagtcctaatacagtttgaagattttgcaaaccacaatgcattcgagctgttggcaagatatagttctagtcatctcgttttcaacgacgacatacagggtaccgcatctgtggtgctggctgggcttcttgcagccctgaaattactcggtggaaccctcgctgaccataagtttttgttccttggtgccggagaggctggaaccggtatagctgagctcattgctcttgagatgtcaaagcagactgga

SEQ ID NO: 3960 - DNA, 341 bp, Gossypium hirsutum
  Clone ID: LIB3083-082-Q1-L1-H10
cgcaagtctactcgctctcgttctttggctactgaggatgtgagaagcttcatcgccgaattttacagagttcattgaaacaaattagctagtttcatgggtttgtcgtctattggcactgctactgaaggcatgcaactctgcatatttgatttgagaagaggccaacatgaagggcatgaacttgataaaattttgtacttctttcctactgatttgcccttttcgactcaactctctgtggttgggctcagcgaagggcttattacattcacgcgaattttctctccggaggctgcttgcgacgttatagaggcagagaggcactctcatgtctttta

SEQ ID NO: 3961 - DNA, 402 bp, Gossypium hirsutum
  Clone ID: LIB3083-082-Q1-L1-H11
ggtttatggcttcttttttctccttttctgatcttaggggttactgtcaacactcagaccaaagtaaccgataaccctgcggatgaattggtggctgcgcttaatgccaataggacagctcacaagtcatcgggtctcaccgacaacccaagactggcctgcattgctttgcgatatataaaagcataccaaggtgactgtaaagctgtaggagaagccaagaagcccgctgactctgaatttgctgaaacttttgcccccgactgtggtgtggaagcctcaaccctctctccaatcactggtcgattacttggatgccaatcgaaatacgtcaagccttctgaagctttctcgatgttgatgaaaaacgagaagagtttggaaatcctttacaataagaac

SEQ ID NO: 3962 - DNA, 388 bp, Gossypium hirsutum
  Clone ID: LIB3083-082-Q1-L1-H12
ctctctctctttctctctccctgcatattcttcgcatgatctgatcgcatcttctaagcagtaagcactgctgctttgcggaaggattttctgattgaatttaatttctcttccgcatccgatatataaatctggacgagacttagagaaggggtagaattacggatctggtagcgccatttaaagctcttctggttctggaggacaggccttattagaggaaccttggccaacaataacgctcacacattaattagttattaaagatttggggcaaaccaatgaaaaacgggacgatagaatgcagtgtctgccattcgaagttggtttccccaactacccgaggtgtgtctagggcttaccaccgccataaaagcagggtatcatc

SEQ ID NO: 3963 - DNA, 387 bp, Gossypium hirsutum
  Clone ID: LIB3083-082-Q1-L1-H2
aatagggaacaatggtactaaagaaagctccgaattcaatactatcaatttagagaatccgcaaaaagataatcctgttttaacatcgccaaaaagaagtatctttttttaacaaatgttcaatgacccttttttactgtagaaatatgtaactgcaaatacaacaatgtcatctcttgaaatcgatactacccctagatacagagaacacaacaaaaatgaaggcggctatctttaaaatgcaggcaaagtacctgcatttttagatcagtaataattttttgcatttcaaaggagattgagacaggcagcagctgacaaaagcgaaaaccagaatgactaccagtattggttaaacaaatgatgtcaacatcccacagatcaact

SEQ ID NO: 3964 - DNA, 411 bp, Gossypium hirsutum
  unsure (1)..(411): unsure at all n locations; Clone ID: LIB3083-082-Q1-L1-H3
cccggcttgaggattccgcccaggggaatccccgatccaaaaaaaccaggttggggtacggaactaacttgagttcccaagcatgaaaagaagagagaaaaacctgagaaaaggcagagtaccttgagtgggctaaatgcctgaatggtcgaagtccatgtttactcagcctggctcggccactaagccttgaatcatatgacactggtgcatgtgccatcatcatgcagtaatttcatggtatatcgtaatatatagttaataaaaaagatggtgattgggaaatgtgtgtgtgcattcctccatgcactaatggtgaatctctttgcatacatagaaattctaaatgggtatagnttatgttatagtgtatgttgtagtgaaattaattttaaatgttgtttctaatgt

SEQ ID NO: 3965 - DNA, 276 bp, Gossypium hirsutum
  Clone ID: LIB3083-082-Q1-L1-H4
gctgctcaaagatctagaaggcttgatgccattgaagctcagctcaaggctgaacagcaaatgggagaaagtttactcgcgggaagaggagtagtgttttataaaatcttagaagctgtaccttttcagggtagtggagataagatcaaattgccaccatcctgtttcacagaattgtctgatcaaggtgcatttgacaagggaccgatgtactttcagttgtcgctggttcatcaagaaggttcttctgctactaaagatgatgaaaagggaaat

SEQ ID NO: 3966 - DNA, 403 bp, Gossypium hirsutum
  Clone ID: LIB3083-082-Q1-L1-H5
gaaactaggtgtgaaacaatggcgtcctcggatcttattggcaagctcgagactgatgtcgagatcgatatttctcccgaaaagttccaccatatgtggtgccacaggccgcaccatgtccaccacactagctctgaaaaagtacaaggatgcgatttacatgaaggtgaatttggaactcccggcgtcgttatctgctggagatatgtgcatgatggaaaggctaaaactgcaaagcaggtagttgaagttatggaccatgagaaaaagtcaataactttcaaaatgcttgaaggagatctgatggaggaatacaaaagcttcgtgattacaatccaaacttcccccaagagcgaacggtaaggcagtatagtgcactgggactctgattatgaaaagctgc

SEQ ID NO: 3967 - DNA, 398 bp, Gossypium hirsutum
  Clone ID: LIB3083-082-Q1-L1-H6
cctcttttcttctttttcatttaaagaacaaaaatgaaggctccactttcttcatcaacatcatcatcctctggtattcttagaaggtctcgtctctcaacttacttatacactttattagctttcattgttttcgttgctgtcatccatggagaatactccatcgccaattttggccgagttgacccaataatccccagcccagttttctccaccacaccagtgaagaaaagggagaaggtggtggcgcagctgccgtcatttgcggtggaggaaagtgaagaaggatgtgatatattcagtgggaagtgggtcaaggacgagttgactcggcctcactatgatgaatcggagtgtccatacatccagccacaattaacgtgtagagcacatgggag

SEQ ID NO: 3968 - DNA, 201 bp, Gossypium hirsutum
  Clone ID: LIB3083-082-Q1-L1-H7
ctcgaaccgcgttattcatagggatcagacaagctcagagatattcgttacaaaggacgcagacatgcggctaggcgactttggacgagacaaattacttaacacggatgacctaacttactctgatgctggcacacccaactatatgtggacccagctgctggcggatctaccttatggatataaatctgatgtatgggc

SEQ ID NO: 3969 - DNA, 393 bp, Gossypium hirsutum
  Clone ID: LIB3083-082-Q1-L1-H8
gttttcagttcttaatactttgtttcatttcatcaaaaagaatcccatcatgagagaaatcctccacgttcaagccggtcagtgtggaaaccaaatcggaggcaaattctgggaagttgttagcgacgaacatggaattgatcccaaagggaactacgtcggtacttctcgtgttcagcttgagagggttaatgtttactacaacgaagctagtggtggtcgttacgtacccagagctgttttaatggaccttgaaccaggaaccatggatagcttgcgtactggtccgcacggacaactttttagacctgataacttcatttttggtcaaaatggagcaaggaataactgggctaagggtcattacactgaaggagctgaattgattgattc

SEQ ID NO: 3970 - DNA, 404 bp, Gossypium hirsutum
  Clone ID: LIB3083-082-Q1-L1-H9
cttaaagtcagcaaagacctaatggaaatcggcggcgacgccctcaaaaccaacatcacagcattgggtccgctcgtcctcccattctccgaacaactcttcttcttcgccaccctaatttggcgccatttctttggcggcgataaatccaaaacctccctatcaccgtcgtcgaagccatacatccccgactacaagctcgccttcgaacacttctgcgtccacgccgcaagcaagacggtgctagacgagctgcaaaagaacttggaactcagcgaaaacaacatggaagcatcgaggatgaccttacaccggttcggcaacacatcgagcagcagcatatggtacgaattggcttatttggaagctaaagaaagggttaaaagaggggataggatctggca

SEQ ID NO: 3971 - DNA, 370 bp, Gossypium hirsutum
  unsure (1)..(370): unsure at all n locations; Clone ID: LIB3083-083-Q1-L1-A1
cgagcccgagagnntgagttggtaaccntgggagtcaaannatcttcccaaatcgtgctgggccctnnctccaaagggagaccgctctcttctcttagaaaccccaccgtcgagccatgtgctctaatcanncccgaaccaccgccaatnncgcctccctcaacctcctctccctacagcgtgcgcctcgctattcacacacaccgcccttctctctcctcttctgccaccccaaccacatacgctcgcccttctccgccgtccacctccggcactccctccagtctgtctaagcctgctgagtacgtgatctccaaggtcgatgacctcttgaactgggcccgtcgtgggtccatatggcccatgactt

SEQ ID NO: 3972 - DNA, 387 bp, Gossypium hirsutum
  Clone ID: LIB3083-083-Q1-L1-A10
tagacaagggaatcgaccaaaaagctttgcatgatacgtgttctgcatttggaaacattctctcttgcaagctagccacagattcttccggccagtcaaaaggttacgggtttgtacaatttgacaacgaagaatctgcccaaaaagcaattgagaagttgaattgtatgctattgaatgataagcaagtctatgtgggcccttttgttcgcaagcaagaaagagatacttctactagcaagacaaaatttaacaatgtctacgtaaagaatctctcggaatcaactaccgatgaagacttgaatcaaacttttggtgaatttggtcagatcactagtgctgtggtaatgagggatgctgatgggaaatccaagggctttgggttta

SEQ ID NO: 3973 - DNA, 384 bp, Gossypium hirsutum
  Clone ID: LIB3083-083-Q1-L1-A11
tacattctgcttctttcttcttgtttttcttcaagtgttgctgtcgtaattaagggtaagagaaatcggaacatctctgcgaaccttaatgaaataggagtataggaaagggaaaggcctagcaggtattggaggaagcaatggcagcaaggtactggtgttatcagtgttctcaagtggttactcccatcatggaagctgagattaaatgcccattttgtcgaggtgggtttattgaagaaatgggcaatggtacaagagacagtgctccaggcatggattcccatatccaatctgatcgagcactctcactatgggctcccatcttgttaggtatgctgggtaatcctcgtcgccgcagaagacttagacgtatcgagtttg

SEQ ID NO: 3974 - DNA, 354 bp, Gossypium hirsutum
  Clone ID: LIB3083-083-Q1-L1-A12
aaaatcattaaaagtgaattgttataattataattataattactatgttttacaatgagttgtgcgaatttgaaaaaaaatcacgatcgcgatacccgcagtgaccgcaatagcgtccgttatgtccgcgaccgcaatttaaatccctgtttgtgattacatatttctattttcattaacttcaccaggtttttcaaataagtattcgtatatcttgtctcattcttcacatgaagaatccattctataaatagcatatctgtaaaaagataaaatgggtcgagctttgatcgataccccttacttaccagcgccactttccagctcacagaaaggcatccttctcgagggggg

SEQ ID NO: 3975 - DNA, 364 bp, Gossypium hirsutum
  Clone ID: LIB3083-083-Q1-L1-A2
ctcgtgccgctcagttagtcttttctttaagcttacagcttctctccagagttttataatgggtaaggagaaggttcacatcaaccttgttgtcattggccatgtcgactctggcaagtcgaccactaccggtcatttgatctacaagcttggtggtattgacaagcgtgtgattgagaggttcgagaaggaggctgctgaaatgaacaaaaggtcattcaagtatgcttgggtgcttgacaagcttaaagctgagcgtgaacgtggtatcaccattgatattgccctgtggaagtttgagaccaccaaatactattgcaccgttattgatgcacctggacaccgcgactttatcaagaacatg

SEQ ID NO: 3976 - DNA, 347 bp, Gossypium hirsutum
  Clone ID: LIB3083-083-Q1-L1-A3
cgagttactgcctgtcgtctataccccaactgttggagaggcgggccatacatattggagcatactcaggcccccttactatctttttatcacattaaaacatactgggaacagctattaatttctgagaaagtgtccttatacgtatatttcagtcattgtttacactgatggtgaaagtatatttggtgtacattacctctgctgctaagggatggcaatttttatatgaaacctctctctatatcctgaacttcaaggagttcatgcttctccacacttgcctgcaaccatctatgttactacctacaatgagccatcgtatggatgaaaattctatatctggc

SEQ ID NO: 3977 - DNA, 391 bp, Gossypium hirsutum
  Clone ID: LIB3083-083-Q1-L1-A4
tacaacagaggatccacaatattactagacaaagagaggagctattgcagatggaggttgaactccgagcacaggcaattgcaagatcaagggtcctggaaattcagagcagctgtgatgcaaaaataacagcccatgtcaatgctgttgccaagcttgaggagcaactcgatgaaagagaacagaccatacatgaattcgaaaggaaaatggaagagaaagacagagagttgcattccatcaaagttgataaagaagaggtctgggcaaaggaagatcttctcagagagcaaaacaaggaactggctactttcagaagagaacgtgatcattcagaggctgagagagctcaacacataaaacagatacatgatcttcaagagcatgttca

SEQ ID NO: 3978 - DNA, 353 bp, Gossypium hirsutum
  unsure (1)..(353): unsure at all n locations; Clone ID: LIB3083-083-Q1-L1-A5
taaaggcaaggagaaagtttgtgctcgtaacagcaatttggggaagaattcggtaagctatggttgtaggggttgataaatcgagtttagtagctaaaatattatgttcttcttactaagntcggttgttagtagtgaagtaaaaatttgacaattaaatgcttagatgactgctggaaactacagcttgaaagctcattattccagtatgtaaatactgatttgaatgtgctgtaatatgtggagcaattggtctgctgcatgtatgaaataaaataaaagaaaacaatagttgttaaatattagtttttggtgctgatcggaaaggttaaattcgttgttaaaggggatgt

SEQ ID NO: 3979 - DNA, 297 bp, Gossypium hirsutum
  Clone ID: LIB3083-083-Q1-L1-A7
gcccgagcttaagtgtttctatagggttttaattcgctcgtcacgtcccctctcttaaaccctctcttttttgcgcgcgctctttgtttttcgagaactgcgcggcgtcttcttttcaattagcttcttggaagctttattttcttaaaaacacgaaaccgctgtagagatggcgccacccattgagactcctaccacgtgctctgggtctcaccacgcttcacatcctcctttgaaggaaaggaggcttttttcgatgagcagcaggtgtgttgctgctcacccacggcgggatct

SEQ ID NO: 3980 - DNA, 349 bp, Gossypium hirsutum
  unsure (1)..(349): unsure at all n locations; Clone ID: LIB3083-083-Q1-L1-A8
acaaataaagaacatttaaaaaaatgatcaaaagcgtctattttcttgttccaaaagttacatttatccatacaacaaaaggaagcaacatttgatgtctcttcttttaaaaaaagggaatgttgatggcatcgttaaactcccccattttaggcattgaagagacagaacaaacctttcatacataaaactaaatttaaaaaaaaacaaaacaaaacaaaacaaaaaagaaagaaacattgngcatccctagcccatggcatacttctgggtccaactccttgcagttgtctcgtacttgttcctgtctgtcttggacatgtgtgcaatctccggcaccaaaagatca

SEQ ID NO: 3981 - DNA, 354 bp, Gossypium hirsutum
  Clone ID: LIB3083-083-Q1-L1-A9
gctaaaccaatatactttattgaatatatatataagctacatctggaaaatgagaaatttggccaaatataatattatagatcaagaaacaaaaagacagacaacataaacaagaaacaaaaaattattaaaaagtaatccgatgatggttggatacccaggtaaactggtcaccttatcaaatcatccaatgtagcaagcaagtcaatcaaaacatatgagaaaacaatccacaaccatgctctgtaatgtatcacacaattggatcccacccttaaacacgattaagttgggattccataacacaccaatttgaaattccacccaaatccgaacccgatttcaagctagatc

SEQ ID NO: 3982 - DNA, 371 bp, Gossypium hirsutum
  unsure (1)..(371): unsure at all n locations; Clone ID: LIB3083-083-Q1-L1-B1
tcgagnnnttttttttttttttttttttatactcttaccatatttataaaaagttttaggggcgcggataaagtatagactaaagaaagaagaccccctctatacaaaaatccaacggccagggataaagtggccaaacacttcattttagaagtattgagaagacattatttatcaacaaatgaagactctgcaagatcgatggcacgggcaagagcggcggctttattctcacactctctctgctcatcagcagggacactgtctgcaactatgccagccccggcttgcaggtgagcaacccattctcgacgcttgttcgcgtctttgtatgaatacatagtgtcataacgagtcgatgtcggaaaaac

SEQ ID NO: 3983 - DNA, 387 bp, Gossypium hirsutum
  Clone ID: LIB3083-083-Q1-L1-B10
cggcacgagcttcattacattgttcaagaacaaacagagaaaaaaagaagcaaaaaaacatggccaaagttctgttgttcattgctctatgtgtgcttccagctttggttagtgctacacgcattctgaataaccaattggtggttgaaggctatgtgtactgggatacttgccgtgctggttttgaaacccctaatactagaaggctagctgatgccatggttaagctggtatgctccgacaggaagaccggcggagttgttttcgagaaggagggatataccgacaaaaccggaaaataccagattcgtgtatccgaggatcacttggatcagatctgtgatgcagttcttgtgaagagcccccagcttggatgtgccacaatgt

SEQ ID NO: 3984 - DNA, 366 bp, Gossypium hirsutum
  Clone ID: LIB3083-083-Q1-L1-B11
agaaccccttgattttctctaatcttttcaataagagagagttccgtgtacaggctgagtcttaccataccacatataaggcctctggtcagcattctcgtttaatggcttctgcagcaattgagacaagaagtaatttttcgacacagtctctttctaccaatgatccggttgtttctgttgattggcttcatgctaatttaagggagcctgatttgaaggtattggatgcatcatggtacatgccagatgagcagaggaatccaattcaagagtaccaggttgctcacattcctggtgctcttttctttgatgttgatggaatatctgatcgaactacaaagttgccgcatatgctgccatccg

SEQ ID NO: 3985 - DNA, 343 bp, Gossypium hirsutum
  unsure (1)..(343): unsure at all n locations; Clone ID: LIB3083-083-Q1-L1-B12
gatacatcagcatggaaccctaagcatttggcttttcaagtcctaaaagttgaaccaggaaccattcctgtctgccatttccttcctcgggatcacattgtttgggtccctaagtaaaaatcctgaagagtagattcatacactataagtttcatcatagtgtgcattaaaacagcttaaagcaatatccagtttgttctataataatatacccacgagtttagttatgtgaaatctatccatgaatcatgttcttggtaatggataaaatgatattactttctgtatcacaatggtttggtgataaatgtattagtatttgaagaaaaaaaacnaacaacaa

SEQ ID NO: 3986 - DNA, 366 bp, Gossypium hirsutum
  Clone ID: LIB3083-083-Q1-L1-B2
tctctctatgttgttctctctttaattttacctcccattacccttttctacttaatctctcattgcttacttatattgtaagtgtgaccaaataaaccaagtacagaggctcaattcccaagatggaggccagcagcagcacctcccatgacccagcattgttccatgctcccttgctacaccaccctcggaggaggagcagcagacccttaaagggtttcgcagtgatatttgggtccgtcgttttcctactctcactggtcatattaatcgttaaccaaagcccggagccattagcaagtaaccccagtagtgtaacggaggcagggtcgtattcaatggcggcgcaaccaaaagggatagctg

SEQ ID NO: 3987 - DNA, 90 bp, Gossypium hirsutum
  Clone ID: LIB3083-083-Q1-L1-B3
tggagaatggaaagtactactatgacgtcaagagtgagaacagctattattcaaaccagctcgacaactcaagaggagttgctttcaaga

SEQ ID NO: 3988 - DNA, 391 bp, Gossypium hirsutum
  unsure (1)..(391): unsure at all n locations; Clone ID: LIB3083-083-Q1-L1-B4
gccacttgctgagaagaaagctacacgtaaaaaaccaactgggcttggtgctcctccccctggccctccatcaactggtgatgcttacgagaagctgctttcatcaattcctcagctcgcaagctttggcccgctcttcacgtcctctgcacctgtggagttgacagaagcacaaacggaatatgcaggtaatgccgacaaacatatntttgatggtcatgtggtgtttcagtacaactgcactaatactattccagagcaattattggagaacgtaactgttattgtggatgcttcacaggctggagaatatgctgatgtagctttaaagcctttaagacaactttcatatgattcacccggacagacctttgtggcatttgaaaagccc

SEQ ID NO: 3989 - DNA, 376 bp, Gossypium hirsutum
  Clone ID: LIB3083-083-Q1-L1-B5
atataatgacatttaatatatataaatataggatccatgcaacatataataggatggatttctcccaccctgtatatatacatatatatttgtcaacttatcttgattcaatgcataattgatcaatgactacaatttgagaagcagtatagcaagacgtgtacctcattgggccctgataacatgtgcatgggcatgcatgtacagaaacaggatgaaacacttgacagcaaggcctagcgaagcttaaagtgatacacaaacagaacccccacgaagttcatcctctcgacccattgatcgatgtgaccggagttgaatgtgctttgttgattgtttcgttctcttgttaaacaagaaacattgcgatgttcat

SEQ ID NO: 3990 - DNA, 198 bp, Gossypium hirsutum
  Clone ID: LIB3083-083-Q1-L1-B7
gtcagaagaaagcaataacatgtgcgaactgcttaggatcaactgcgaccgaggtgttatgcttgctgatgggaaaacccaatttttcaatcaccggcagccttatctacaatttggtggaaccctgaaccttaacccatataactgccgccattgtgggccaggtggccaaaacaagcccacccccccttttgataa

SEQ ID NO: 3991 - DNA, 192 bp, Gossypium hirsutum
  Clone ID: LIB3083-083-Q1-L1-B8
cattttattagcctgcttcatttccttgggtttttcaagcatggaggttagcctagcaacccgaaatcttcagcaagtgccaccttcatttccaccaataccattgccaccttcattggcgccaataccatttgcaccagtaccattgctacctccattggcgccaataccattgccacctccatttttacc

SEQ ID NO: 3992 - DNA, 273 bp, Gossypium hirsutum
  Clone ID: LIB3083-083-Q1-L1-B9
aaagttctgttgttcattgctctatgtgtgcttccagctttggttagtgctacacgcattctgaataaccaattggtggttgaaggctatgtgtactgtgatacttgccgtgctggttttgaaacccctaagactagaaggctagctgatgccatggttaagctggtatgctccgacaggaagaccggcggagttgttttcgagaaggagggatataccgacaaaaccggaaaataccagattcgtgtatccgaggatcacttggatcagatc

SEQ ID NO: 3993 - DNA, 390 bp, Gossypium hirsutum
  Clone ID: LIB3083-083-Q1-L1-C1
gggatgggagttttaggcaaagtggtggatgggattctattgctaacattcgtgtccatgtcggtggtgccagcgtgcttggacgcccaggtacttttgcctaaagcgcttttccccgatgtgctgggtcgtgtatattcatggtatacgaccacataccaagattatttgctgttggatgagcctcattttttcatggcacttatgaaattggagcttgttttagtattgccgcttgctatacttaacacttatggcttgttgacctccaagccctggttcaacaccacctgcctcatcttcggttctgctcttgttacctccacgacagctatggtgggagacatgctgggatccgacaaaccatcagcaggtaaactggcgtcgatg

SEQ ID NO: 3994 - DNA, 269 bp, Gossypium hirsutum
  Clone ID: LIB3083-083-Q1-L1-C10
gcagcattaacttgcatgatctaaaccaggcagagatagaaacagctggttcggggaatgcaagcagatcgtgtgcagaatcacccatggagtcatcatttaacaccccatgcagcccttcagatactgaagcaaaccttttgagatcaccaatcaactcgaacaactcaaatcacaggtctaccatgtcaagctccgagttttcctcgtttacaccgacaccggagaaacaatctcgaggctttagtagattcttttcctccaaagcg

SEQ ID NO: 3995 - DNA, 380 bp, Gossypium hirsutum
  Clone ID: LIB3083-083-Q1-L1-C11
gagtcattttttttttttttttaatcttgaaaatttgaagctcgtcattccaaattcattatataaatttacactccaattttattaaatcacaattcacatttgatatatatatacaaattcacaattcacattactaaaaatcccaacacaaatgaaaaaacatggcctccttatttaaaaccatcaaaatgaacaccacatttgattttttttctctaggccattactataaaaagtcgaaaaggatcccgtcaattttcctcaacttcatcttcatacccttcaccatcttcatcaaccacagcatcttgatattgttgatattcagaaaccaaatcattcatattactttcagcctcagtaaactccatttcatc

SEQ ID NO: 3996 - DNA, 376 bp, Gossypium hirsutum
  Clone ID: LIB3083-083-Q1-L1-C12
ctcaattgacaatgacattgcctgatggtcgtgaagaatctgtcatgaagcgcacaacacttgtggctaacacttctaacatgcctggggcagctcgtgaagcctcgatttacacggggatcactatagctgaatacttcaaagatatgggctacaatggtagtatgatggcagactcaacatcttgatgggccgaagcattgcgtgaaatttctggacggctggcagaaatgcctgctgatagtggatatcccgcgtatctggctgctagattagcctcattttatgaacgtgctggtaaagttaaatgccttggtgggccagaacgtacaggtagtgtgacaattgttggtgctgtttctcctcctggaggaga

SEQ ID NO: 3997 - DNA, 368 bp, Gossypium hirsutum
  Clone ID: LIB3083-083-Q1-L1-C2
acaattaaactgtgacagttatgcttgtgaaaagttctctggtaatctcatctaggagtccattaagcacatacttctccacatctttgataacatcatctttctcaagaaacccaaacatggcgttattccaacccaagtcccacatacaattcagatctggttccttgttgttgacatcagcctcaagcattttgggttggtagtcttcaaagggagaatcttctctgccgtcctttccatataacttcaacttatcaaagtccttgcacatttgtttgaccaactcatccaaggattttgctttgtttgaagtgatgggtacctttagaaatgggtgaacacttagttcctgccttcttcctttc

SEQ ID NO: 3998 - DNA, 386 bp, Gossypium hirsutum
  Clone ID: LIB3083-083-Q1-L1-C3
tggaagaatcccattggtcgccaatgttgtaatcatgactccgcatggatactttgcccaagacaatgttttgggataccctgacacaggtggtcaggttgtttatatcttagatcaagttcgtgccttggaggaagagttgcttcatcgtttcaagctgcaaggactcgacattaccccacgtatcctagtcattactcggctcctccctgatgctgtaggaacaacttgcggtcagcgtcttgagaaagtgtatggaaccaagtattctgatattcttcgggtacccttcagaactgagaagggaattgtacgtccatggatctcacgattcaaagtctggccttacctggagacttacactaaagatgttgcagctgagatca

SEQ ID NO: 3999 - DNA, 373 bp, Gossypium hirsutum
  Clone ID: LIB3083-083-Q1-L1-C5
cacaaattgctttgcttcttgcccttcacaaactgaaggtgtcagatgagcaacgcaagtctgcaatcgatacatacgaaccacttgtaacttttgcactcagttctgggatgtactcatcacctgcggtgagaatttacactgctaagaatgttagggaagagcttgaagaagcacaacgcgattttatacgagcttcggttggggttagcagcaaagggaagctattagttccgaagttactgcactgcttcgctaagggctttgtggatgattccaatttggcagtatggatatctcattacctgccaccaaatcaagctgcctttgtggagcaatgcatatcacaaaggaggcaaagccttcttggatc

SEQ ID NO: 4000 - DNA, 388 bp, Gossypium hirsutum
  Clone ID: LIB3083-083-Q1-L1-C6
cttggatttttcctccatagcccatttccatcatctgagagatataggacacttcctgtaagagaggaacttttaagagcactactcaactctgacctcattggctttcatacttttgattatgccaggcacttcctcacgtgttgcagcagaatgctcggtctttcttatcagtcaaagcgtggctacatagggcttgaatattatggtcggacggtgagtattaagattcttccagttgggattcatataggacagcttcagtctgtgctgaatcttcctgagactgaatctaaggtggctgagttacgcaataaatttaggggtcaaactgctatgcttggggttgatgacatggacatatttaaggggatcagcctgaagcttt

SEQ ID NO: 4001 - DNA, 217 bp, Gossypium hirsutum
  Clone ID: LIB3083-083-Q1-L1-C7
aagaccgatgcaccgcacccaacgtctcaaagagtatcgttccctctcactaagcgctctaagtgaggtttctgcttttgtaagatgtttcaataatccatttaggtagggtaatatatatgcttgaagattttatcatattcatcagaatgaagggttgatttttcttatgattggatgtaatgaatcgttgtcatagaatcaagtttctgcttct

SEQ ID NO: 4002 - DNA, 368 bp, Gossypium hirsutum
  Clone ID: LIB3083-083-Q1-L1-C8
gaaaaacaaaagtcaccatatttaactggaattgacgggcgcacaaccccatgttcaaacaatgccggcgaaaaaaggaaaaggaaaagacaagatgaaatacaaaggagcttctccaattgaaattaaaaaacagaatattattctccaagaaaaaccggcccaatgttatttaacagcttcaatttactcctctgccaatggaactgattcagccagcttacggtacttaagagcataaaacatctcaaggtaacgacgactctcacggcgttcaaggttggaaacatgcttccagaatccatacactcctgtcagggtcaatagtctctccgagtaaatcttccatgtatacttctcctctattc

SEQ ID NO: 4003 - DNA, 392 bp, Gossypium hirsutum
  Clone ID: LIB3083-083-Q1-L1-C9
acgacacaagaagaaaagcatgtttggcattatgttgaatgatagtaacgagaaatttatgacacacacacatacgtacacacagaatcctcaagtcctctgcacaaatctctaagtgacagtttttacattattactggtatcagtttaataacaatgatctgatttgatttctagctttctcaaacaaaatgactgaggccttcttccacaggggtgtatttcacttcaaggtagaagctaaaagcttcgtatccgaatgatggatcgatctcgaagttggtgcagtcaccattgacaaagattgagtgactgatggccaacacaatattgattgggattggagactcttggatctgtttgagaagttggtcctcaagaacatatgtttt

SEQ ID NO: 4004 - DNA, 264 bp, Gossypium hirsutum
  Clone ID: LIB3083-083-Q1-L1-D10
aggagtaatataaagagctttaatctttcaggaatggggtgcagtgcggggcttatctccattgatttagctcgagatcttctccaagtacaccctaattctaatgcagttgttgtcagcactgagatcatcactccaaactactaccaaggaaaagaaagagccatgctccttcccaactgtcttttccgcatgggtggcgccgcaatcctcttgtcgaaccgtcgttccgagaggtggcgtgccaagtatcgtcttgtgcat

SEQ ID NO: 4005 - DNA, 384 bp, Gossypium hirsutum
  Clone ID: LIB3083-083-Q1-L1-D11
gacgatcagatctctgaattcaaggaggcctttagcctgttcgacaaggatggagatggttgcattactaccaaggagttgggaactgtgatgcgatcacttgggcagaaccccactgaggcagaactgcaagatatgattaatgaagtcgatgctgatggaaatgggaccattgattttcctgaattccttaacctgatggcaagaaaaatgaaagatacagactctgaggaggagcttaaagaggcattcagggtgtttgacaaggatcagaatgggttcatttctgcagccgagctgcgccatgtcatgacaaaccttggtgaaaagcttacagatgaggaagtcgacgagatgatccgcgaagccgatgttgatggtgat

SEQ ID NO: 4006 - DNA, 382 bp, Gossypium hirsutum
  Clone ID: LIB3083-083-Q1-L1-D12
caaagttcctggatgaaaagctccgtgctggtaataagggtacttcggaagaggaattagagggtacactggataaagctttggttttatttaggttcatccagggcaaggatgtctttgaagcattttataagaaagatcttgcaaaaaggctgcttctaggaaagagtgcttctattgacgcagagaaatctatgattactaagctgaagactgagtgtggcagtcaatttacaaacaaacttgaaggaatgttcaaggatattgaactatcaaaggaaataaatgaatcattcaagcagtcatcccaagccagaacaaagcttccatctggaattgagatgagcgttcatgtcttgacaactgggtactggccgacata

SEQ ID NO: 4007 - DNA, 366 bp, Gossypium hirsutum
  unsure (1)..(366): unsure at all n locations; Clone ID: LIB3083-083-Q1-L1-D2
gtcagatctaacagtttttttgtcaaaatttcccgcaaaagatatggctctagaatgggtagtgctaggctacaccgccggcgctgaagccatcatgttgctcctcctcacagttccaggccttgacggactccgcaagggcttgatcgccgtcacacgtaacctcctcaagcccttcatgtcggtggttcctttctgcctcttcctcctcatggatatatactggaaatacgagacgcgtcctacctgtgacgccgattcctgtaccccttccgaatatctccgtcaccagaaatccatcatgaagagccagcgcaacgcgcttntcatcgctgcagctcttattttgtactggcttctttactc

SEQ ID NO: 4008 - DNA, 381 bp, Gossypium hirsutum
  Clone ID: LIB3083-083-Q1-L1-D3
gaagcaattcatgtcttcggctgtggctatgaggagaagactgcttgggggaaagagattggatggatatatggttcagtcactgaggatatcttaaccgccttcaaaatgcactgccgaggatggagatcgatttactgcatgcccttaaggccagcattcaaaggatctgcacccatcaatctgtctgatcggttgcaccaagttcttcgatgggctcttggatctgttgaaattttcctaagcaggcattgccctctatggtatggctttggaggtggtcgtcttaaatggcttcaaagactagcatatataaacaccattgtctatcctttcacatcccttccactcattgcctattgttcactaccagcgatctgt

SEQ ID NO: 4009 - DNA, 401 bp, Gossypium hirsutum
  Clone ID: LIB3083-083-Q1-L1-D4
gaagcccatctggatgaggaagcctgaggagattaccaaggaagaatatgctgctttttacaagagccttacaaatgactgggaagagcatttggccgtcaagcacttctcagttgaggggcaacttgagttcaaggctgtcctctttgtccccaagagggctccttttgatctctttgatacaaggaagaagcccaacaacattaagctctatgtgagacgtgtctttatcatggacaactgcgaggagtttattcctgaattcctcagctttgttaagggtattgtcgactcagaggaccttcctttgaacatctcaagagaaatgttgcagcaaaacaagatcttgaaggttatccgcaagaacttggtaaagaagtgcattgagctcttctttgaaa

SEQ ID NO: 4010 - DNA, 386 bp, Gossypium hirsutum
  Clone ID: LIB3083-083-Q1-L1-D5
ggcaggtgtgttattggcaaaacatgaatgcattattcctttcattggaattgctttttgctcacaccacttgcttctcctccttactcatctcagcatggcctcaaaacccttcatcgcattagccaccactgttttcttcttctccctcatcgccgtcaatcattttgggaaacctttccagggaaaacttggggaaatggaagttgtcccaattacggatgccgtaggacctgaaagtgtagcatttcacccacttggagacggtccctacgtcggaatatccgacggtcggattatcaagtggcaaccaaatgagcatcggtggatcagttttggcatcacttctcctaacagagaaggatgtgaagggaaacacgatcatg

SEQ ID NO: 4011 - DNA, 364 bp, Gossypium hirsutum
  Clone ID: LIB3083-083-Q1-L1-D6
agaaaaaagaaacagacgaatatatagaaaaaacaaagtatagttccgcaagatcagacacaaaacttgactaagatgccttggcaaaccaaagcatctcaaactttaaaaatcctacataaaacaggcaaaaacttcaaaccacatataaccaaagataaaaacactcaatctgcttcaccgctaaaaccttttggcctcttcacttcttcttagcagcagacttggtgaccttggcaccggttgggtccttcttctcgacactcttgataacaccaacagccacggtctgacgcatgtccctcacagcaaaacgacccaggggtgggtactcagagaaggtctccacaaccatgggcttggt

SEQ ID NO: 4012 - DNA, 375 bp, Gossypium hirsutum
  Clone ID: LIB3083-083-Q1-L1-D7
tgacggtggtgttggtggtggccccattcattcacatgataatggtctttatggaagccccaactctgacatgaaaccccaagatgatgaccatggcattgacaatggggaacagttaaaggacttgtctactgaaagggaaatgaatatgcaattagcaactgaacttggtgataaaaaccctaatctatgctttgataactcagggtcagacactgaggaagaacaagcagcttttgtgaaggaggttgaagccttttacaaggagaagaacctggaattcaagcaccctaagttttacaaggaggatctaaatttacttaagttatggagagctgtcattaaattaggtggctatgaacaggtgacctcatg

SEQ ID NO: 4013 - DNA, 375 bp, Gossypium hirsutum
  Clone ID: LIB3083-083-Q1-L1-D8
aaaataatggccctctgcaagccgtattctaggttggtcctagcactggccatggcattggtggcagctacggtgcctgtttatgggcagagaactatcaacactccatgcaccccatcggcacttaacatcttcactccttgtatgaacttgcttaccaatagcagtgccaatggtacttcgcccactgcagattgttgcaactcgcttaaaacgctcacatcgagcggcatggactgtttgtgcctcattgtcaccgggagtgtcccgttccgtttacctatcaatagaactctagctatttctcttccccgagcttgtagcatgcctggtgtccccctccaatgcaaagcctctgttggtgcacctgttcct

SEQ ID NO: 4014 - DNA, 384 bp, Gossypium hirsutum
  Clone ID: LIB3083-083-Q1-L1-D9
ctcgtgccgaaagaaatgcatttagtagattgtgtaaaaaaatcggatgaagaaaaaacatatctggaaaaggaaattaataggctggtaaatttgctgaaacaatccgaggaagaagcttctgtatctgaggaagaagctcagttgaaggagaacctaaaggaagttgaatcgaacgtgatttatctgcaagaagcagtaaaggaagtcaagattgagagcatgaaaatgaaggagagtatgttggttaaagaaaccgagttgcagagtgtcattcaagaaaatgaggaacttcgtgctagggaagttgcgtcgcttaagaaagttgaggagttgtctaagttgttagaagaagctatgataaaaaagcaaagcgaggaaaat

SEQ ID NO: 4015 - DNA, 318 bp, Gossypium hirsutum
  Clone ID: LIB3083-083-Q1-L1-E1
agaaaacaccatcctccgacagtcactttacccaaagcaaatgttggtactacagtcaatgaaacagcaaaacacttggaaatagtttaaaaccagaacaagaagaactaccaactctggtttctctaacgattacttttggcttttttggtggtttctttttttcattttgaatcattttccatactccttttctgctttccaatggcttttcttcttcgggttctctgctaactcccaccatattcgcattcagtggaagatcccaatcttggatttcatcccactattacacagaagattcaataatggatgatc

SEQ ID NO: 4016 - DNA, 96 bp, Gossypium hirsutum
  Clone ID: LIB3083-083-Q1-L1-E10
aattggggcgggcactttattcatagaaaataccaaaaactagtacattatccgaggtattcaaccctgaaaacacacatccaaaatcaacaagaa

SEQ ID NO: 4017 - DNA, 385 bp, Gossypium hirsutum
  Clone ID: LIB3083-083-Q1-L1-E11
catgctaatagacctaaatcttctgatggaaaatcttcaagtaaagatcagtcatcaatctctaaagttccatccatctcagaattggagaatagaggggcgactatacttctgaaggaggatcaagtgagtaaagtgtttcaagagtatccatacatgtttgctcatgccggtgatttgacagtaaaagacgttgaagagctgctaaataactatacacaactggtgttcaagtatgtttgccttttgaaaggatcagatggtgcttctgcatcttttcctttgtctaagtcacaagctcaagcccagcaacatgttgaaacatttaaggaatctcaagatcatagggcaatagcacaaaatattgggctgcaaaacgacactg

SEQ ID NO: 4018 - DNA, 332 bp, Gossypium hirsutum
  Clone ID: LIB3083-083-Q1-L1-E12
ggaagaggaatcgaaactcatagtaaaccaaaaattaagataattgataacaatatcacataatttctagcaaacaaaatggcggttcaatccaatccttgaaaccaatatcataaaaacattttcaaaagaaaacaaagacttaaaatccatcaaagctttcaacaagggtttttgccttcttcacctacatagatctcttacttttcaaatgagttaggccccctttttttgccaaatccaaccactgctgtgacaaaccgtcggttgtattgcatccgcttgtaagcgcggccaccgggcttctttttcttggcttgcttggccacttt

SEQ ID NO: 4019 - DNA, 380 bp, Gossypium hirsutum
  Clone ID: LIB3083-083-Q1-L1-E2
aatatttttggcggcaaacttgcatgggggcctgaagctattgtttgtgatgatccaaatttccagggccatgggaatccttcaagtggtgatatcttccatgcggcaccaaatattgatcattcgcagcactttgtgcgaaaagatgtaaaggaatggttatactggctccgtaatgatattggttatgatgggtggcggcttgactttgtgagaggcttctctggaacatttgtgaaagaatatatagaagcttcaaatcctgcatttgctataggagaatattgggacagtatggcttatgaacatggtaacttatgttacaatcaagatgctcaccggcaacggatagtaaactggatcaatgccactggtggtac

SEQ ID NO: 4020 - DNA, 372 bp, Gossypium hirsutum
  Clone ID: LIB3083-083-Q1-L1-E3
tggactccataaagttttatcaacttttcatttcagaaggtctgtccattctgacgatagcgttttcccttgaaaaatctttacttgctatctgtttttgaatcatttcctctcaaatgcatcttcaatctgcgcttcttgaccatctcctttcctaatcgaatgcatggcggttcaactattctctcgtcagagatgagacaatgtgaagggtcatctttgaagccaaaagttcacccatcaactctgaaccaccaaacctgatgctgatttggagtttcttttgtcgaacattgcatgaaattgaatcgtcatccttggtagtcctcctgatgcttgtggtttttgttcatatttaaggttgagccatgt

SEQ ID NO: 4021 - DNA, 387 bp, Gossypium hirsutum
  Clone ID: LIB3083-083-Q1-L1-E4
tgggcaggtttggttgataggtacgaggagatgatggagaaatatcatccaggtttgggagatgagaggtggccgtttgtgactcatttcgttggttgcaagccctgtgggagttacggagattaccctgtcgagaggtgtttgcgaagcatgcaaagggcattcaactttgccgataaccaggtgcttaagctgtacgggtttagacatagaggattgttaggccccaatattaagaggatcaggaacgagacggtgactcctttggaaatcgttgatgagcttgatattcgacgatcaacgcacgagaaagccgaaacacggagctagtgatggaaaagatatataatgtgccataatgtgtaggtaatggtcattccttttgat

SEQ ID NO: 4022 - DNA, 392 bp, Gossypium hirsutum
  Clone ID: LIB3083-083-Q1-L1-E5
cgagggcacgagtggtcttttttgcatgctaggggcactcatgttaatctgccgtgtcctcatcttgtgtttgctggcactcgggcatttttggatattcggctgtatgttactcgtgctctttaggctgttcccatttgaagaaatggggtttttctttctcgcactcttcatgatctttcgattcgagtgactcgcggcactcttcatctttatgacccttactcttatcttgcttttccttgaactcgggaattttcggatattcaacttcgtgtttctcgtgctctttaggcttttcccattaggggaactcgaggttttctttctcgtattcttgcggctccttcgattcgcgtgattcatggtgctcttcatttgtatgttcctta

SEQ ID NO: 4023 - DNA, 389 bp, Gossypium hirsutum
  Clone ID: LIB3083-083-Q1-L1-E6
ggcacgagcctctcacaaacctcaaacaatggaagtggtgaagaacttggacatccaaagatacatgggaaagtggtacgagatagcttccttcccatctttctttcaacctaagaagggggagaacaccagcgctttttacactctgaaggaagatgggacggtgcatgtgcttaatgagacttttgttaatggcaagaaagattccatagaaggcaccgcctacaaggctgatcccaagagtgacgaagccaagctcaaagtcaaattctacgttcctcctttcttgcctatcattcctgttactggggattactgggttttatacattgatgaggattatcaatatgttcttgttggtggtcctaccaagaagtacctttggatat

SEQ ID NO: 4024 - DNA, 381 bp, Gossypium hirsutum
  Clone ID: LIB3083-083-Q1-L1-E7
cccacatccaaacagctacattgattgaattggaaactcaaaagaaaaacaaaatgagtgtaatcgatatattgacaagagtagatgtgatctgcaagaggtacgataaatacgacgtcgaaaagcagcgtgaccaaaatgtctccggcggtgatgcttttgctcgcgcttacgccgcagtcgaagccgacattgaatccgctcttgagaaagtggaacttgcttccaaggagaaaagtaaggcatctgctgttgcagtcaatgctgagattcgtcgaaccaaggctcgattgcttgaggaggtccctacgctgcaaaaattggctgttaagaaagttaaagggatttcaactgaagagatggctactcgtaatgatctgg

SEQ ID NO: 4025 - DNA, 387 bp, Gossypium hirsutum
  unsure (1)..(387): unsure at all n locations; Clone ID: LIB3083-083-Q1-L1-E8
aaaagaaggatgaggtagaagaagatgaagaattagaagagggaaagaaagaaaagaagagagacaaagaggcaaaggagaagaagaaagaaatgaagaaggatgaggtagaaggtgaagagaaagaagagaagaaggagaagaagaaagacgaagaggataaagatactaagtacaaggatgaagagaaagaaatcgacgaggaggaaaagaagaaagtcaaagtggaaaagaatgttgtgaagggtgacagtggcataacctccagggaaattgtaatagaagatactgggaaagaaccagaaggtgaaggagaccaagagaagcaaaagggtnaagcaaaagaagagaaagatgattacaattaatgtgagaagaagagaaaat

SEQ ID NO: 4026 - DNA, 384 bp, Gossypium hirsutum
  unsure (1)..(384): unsure at all n locations; Clone ID: LIB3083-083-Q1-L1-F1
gttaaacaagaatgatctcagaaattaaaagaaaaaatatcaattttattttattactaaagcgtgaagattcaagcttgcaatcgaattcctcatttgaaattctgtattagaactgtaatagagaggataaaaaaagatcattgttgaggatggcttgtaaaggatgcctagaatgcttgttgaagctgttgaacttcttgatgactcttgttggtttggcaatggttggatatgggatctacttgtttgttgagtacaaaagagctgctgatgttgccatgcttttgtcacctgtgggcactgaccaaatacagctcggtcggcccatgctcatggccgngtctctttcgtctagtattttcgataatcttccaaaagcat

SEQ ID NO: 4027 - DNA, 382 bp, Gossypium hirsutum
  Clone ID: LIB3083-083-Q1-L1-F10
gaagaaaagcatgtttggcattatgttgaatgatagtaacgagaaatttatgacacacacacatacgtacacacagaatcctcaagtcctctgcacaaatctctcagtgacagtttttacattattactggtatcagtttaataacaatgatctgatttgatttctagctttctcaaacaaaatgactgaggccttcttccacagtggtgtatttcacttcagggtagagctcagaagcttcgtatccgaatgatggatcgatctcgaagttggtgcagtcaccattgacaaagattgagtgactgatggccaacacaatattgattgggattggagactcttggatctgtttgagaagttggtcctcaggaacatatgttt

SEQ ID NO: 4028 - DNA, 350 bp, Gossypium hirsutum
  Clone ID: LIB3083-083-Q1-L1-F11
ttccgccccaggcatttttgccttactctaaacctttcaacagatatggagtttcaagggggagtatgatgaatccggtccacacattgtccacaagaagtgcttctaaaattttgaattgcttttgatggtggtctacattttgcatttaattggctttttttggtgtgccgtgttaagtgaactcaaaagactggtttatgtctgtgaagttagggatcattgtactatgggctacttgatattaatgtactattattttagcctttcaccgtatcgccaccattaagaagactggccctatattgctggcggtgggcggacaataggtgcttaattacctacttgct

SEQ ID NO: 4029 - DNA, 256 bp, Gossypium hirsutum
  Clone ID: LIB3083-083-Q1-L1-F12
gtatttttgctttttttattttcttttaacatatgtggagtttcatggttgtgtatgttgaatttttttcattttttttctctggtagagctaaaaaaaaaaaaagccccccccgaattttgtttttattttgtgggaacctgctacggtccggtttgttgtaaaaaaaaaagggtgttttttgctttaaaattgggaggtgaagtttcaaattatttggggggacacaaaatgattcaactgttttccctttttt

SEQ ID NO: 4030 - DNA, 369 bp, Gossypium hirsutum
  unsure (1)..(369): unsure at all n locations; Clone ID: LIB3083-083-Q1-L1-F2
cctcggactctgctgctcttaatgtaaaaaatgcatcgttgagaattaaagcaatgggagctggtgtccttcaagataatggtagtcacaatctttcggttaattctggtccctcttcttctgcagcattttgcttagataatgataatcatacttcaccagtaaacattccacctgaattaccacctaccaaaaacccacattcacccgcattatcaaccgctgatacggagctttccctctcattgcccaccaaaagcaattcaactatagtgcctactgtttctcattccgaggctagtagttcaagctatcctggggtgctgtatgggcattgggcccctcangataagaaggatgagatgattc

SEQ ID NO: 4031 - DNA, 386 bp, Gossypium hirsutum
  Clone ID: LIB3083-083-Q1-L1-F3
ttgtcttcaagccaaagtttatcttcaacgtgagctattcgggcgctatgaatatcatgctgaagggcgaccacgatttggagtaagcttgggcctctttgtcgactgtttgaactcattttctgcacctggacgttcaagtatgatcgagattcaatacccaggacctgatatgcagcttcttataaagtctgttgattcacttgatgcttgtatttatgcggaaatcaggacaagaatttcagatacaatttcatgggactacaactttgaacctgccggaagcacaccacttacttttactgtcaagtccgcagcattaaaggaagcaattgatgatctagaatggccagggtcgagcatccatatcaatctacagccagacc

SEQ ID NO: 4032 - DNA, 368 bp, Gossypium hirsutum
  unsure (1)..(368): unsure at all n locations; Clone ID: LIB3083-083-Q1-L1-F4
gagnnnntttttttttttttttttttttttttttttttggaaagagagcacatttatattggactttacttaaatttggagcaatatattacagattcttacatccaaatacaaaaggcatgcaaacaaaaaaaaatggaaaaacaaactgaaagggtgcatgagtggaactttcactttcttgaaatcatatgatcatgaccattgatgtagatcattttgatttgaaaggaatggctctgatcacaacaacgtggtaaagtgctgctagtgctgcaccaatgaatggacccacccagaaaatccaatggtcatcccagcccttgtccttgttgaaaatgatggccgcaccaaggctacgagctggg

SEQ ID NO: 4033 - DNA, 200 bp, Gossypium hirsutum
  Clone ID: LIB3083-083-Q1-L1-F5
taagctctatcaccactcatcgaatacacggatctccaacacaccaaatgactcatagtatcgaaaatatcccaaaaacgtagcatatagctagcactctccaacacaccaaacatgtcccgtggaatagagcttagcttacattcccttatctccaaaaattatctcgggccttaacgccccaaaaatacaacaaatgg

SEQ ID NO: 4034 - DNA, 229 bp, Gossypium hirsutum
  Clone ID: LIB3083-083-Q1-L1-F6
ctctcattgaatcaattatgggaggattggaaggtctaattaacatccttgattctgaaagtggatttggggctttggagatgcagcttcttccagagcaagcagcattttatttgaataatgcatctagagtctcaattccttcagcaaaatcaccaaaaggagcagttgcttatcctttgccaggccatgagagttatccagagaataacaattcaatcaaaatgtt

SEQ ID NO: 4035 - DNA, 385 bp, Gossypium hirsutum
  Clone ID: LIB3083-083-Q1-L1-F7
cgacgcagcctcgttcagattcaactatagaagcgaaatggctggttccagggttgctcatgctaccttgaaaggaccaagtgttgttaaggagatagttatcggaataacacttggcctttgtgctggtgggctttggaagatgcatcactggaatgagcagaggaaagtgagagcattctacgacatgctcgagaaaggtgaaatcagtgtcattgcagaagaataaatgttcttttagtcttgtgaaagtgtggacagcttcagctgtgtttcgttatatgcattctcttcatttggctcttagatagaagatgagcaaaacacaatttggagcttctaagaataatgtcatcattttgggatcttgatttcatatttgcat

SEQ ID NO: 4036 - DNA, 386 bp, Gossypium hirsutum
  Clone ID: LIB3083-083-Q1-L1-F8
cgaagacaaaaccactggacaaaagaacaaaatcaccatgacaaacgacaagggccgactctccaaagaagaaattgaaaagatggttcaagaagcagagaaatacaaatccgaagatgaagaacataaaaagaaggtcgaggcaaagaatgcattggaaaactatgcatacaatatgaggaacacagttaaggacgaaaagattggtgccaaactcccagcaactgataaaaagaagatcgaagatgctattgaacaagccattcaatggctagacagcaaccaactcgccgaatccgatgaatttgaagacaagatgaaggagttggagagtatttgcaaccccatcattgctaagatgtaccagggtgccggcggtgacatgg

SEQ ID NO: 4037 - DNA, 108 bp, Gossypium hirsutum
  Clone ID: LIB3083-083-Q1-L1-F9
attcttatgaagtgcttcctttctggaatgcctgatctgaaattgggcttgaatgataaaattgggcttgagaaagaatcacaacttaaatcccgtcctcctaaaagt

SEQ ID NO: 4038 - DNA, 381 bp, Gossypium hirsutum
  Clone ID: LIB3083-083-Q1-L1-G1
tcactgctttccttcaattatttcccacttccttttgccttcaaaatttccttgggattcctatggctactgctgaggttgcatcagttcaaactgcacttcatgaggagaaaactgaagaatcagtgaaggatcaagaagctacaacagatgaagtagttgccgaagctcctgcagcggaagcagctgccgaagagccaaaggaagcggagcctgcggcggtggcagtcgaggaacctgaagcctcggttgaagttgaaaccaaggaggtggtagaagaaccaaaggctgttactgaagagccagtagtagaggagactcctaaggaaacagtgccagaaccagttgccgaggagatcaaggaaaccactgaacaaaccg

SEQ ID NO: 4039 - DNA, 382 bp, Gossypium hirsutum
  Clone ID: LIB3083-083-Q1-L1-G10
ctcgtgccgatgaagaaagctctccctgctaacgctaagatcgctaaagatgctaaggagaccgtacaagagtgcgtttcggagttcatcagcttcatcactagcgaagccagcgacaagtgccagaaggagaagaggaagacaattaacggggacgatcttctctgggctatggcaactttagggtttgaagattacatcgatccgcttaagatttaccttaccaaatatagagagatggagggtgatacaaagggttcggttaaaggtggagatacatttgctaagaaagatgtccaaccaggtccaaatgcccagcttgttcatcaaggttcgttctcgcaaggtgtttattatgggaattctcaatctcagtcacaag

SEQ ID NO: 4040 - DNA, 386 bp, Gossypium hirsutum
  Clone ID: LIB3083-083-Q1-L1-G2
gaaacatcttctgtctgtgatttggcaaagaaaaaaaaagatgccacactaatgccaatctcgggtctacttctcttgtccctctccacacattcaacaaaccaaagggctcttatgaaattcccttcttccattcgcttggcactagaaaaaaggatccatcacagcacacataataaaaccttaaaccatgggtccaataaagattgcattcggggatatgttgattactttcatgcgggttttctgttcatcaatgtttggtttatttacctcttggatagccaccgccattcgggtccaaaccatttcttgagctcctattggtatcatcaccttcattattttcgctttcgttctcatctttaatattattggcggatttc

SEQ ID NO: 4041 - DNA, 334 bp, Gossypium hirsutum
  Clone ID: LIB3083-083-Q1-L1-G3
aggtaaatatgcaaattccattcaaagagaaaccatagatagatgcaaccggtaaacaaagactagaaattatttaaaaggccatcaaagggcacaatccttcacgtaaaaccagaaaacccacattaaggaagaccttaaggcttagaacccaccacgaagacgaagaacaaggtgaagagtggactccttttgaatattgtaatcagccaaagtccttccatcttccagctgtttcccagcaaaaatcaacctttgctgatctggtggaattccttctttgtcctgaatcttcgctttcacgttatcaatcgtatccgagctctccactttt

SEQ ID NO: 4042 - DNA, 320 bp, Gossypium hirsutum
  unsure (1)..(320): unsure at all n locations; Clone ID: LIB3083-083-Q1-L1-G4
gtcaatctgcacaaccaaatgctaatccgtatagtcaaccagcacaaacaaatgctaatccatacagccaacctgtacaggtacatgctaatccatatggccaacctgctcagccaagtgctaatccatacaaccaacctgctcagccgaatgctaatccatacagccagcctacacagcctaatgctaatccatatggccaacctgttcagccaagtgctaatccatatgcccaacccacacagtctgtgtctgcagnccctcaaattccaggatctgctgctcagagcagcaatgggagcttaatgataggttctaat

SEQ ID NO: 4043 - DNA, 236 bp, Gossypium hirsutum
  Clone ID: LIB3083-083-Q1-L1-G6
gtgctgcagcttgtgtacgacattcagcaagacgtagaccgcggatgagccagatagtccgtgctttagaaggagatgcatcattgtcatcttaacgaaggaatgagacccggccagagcggtgtctacagctcttatggaagctcagactacgacaccagccaatacaatgaagatatgaaaaagttcaggaagatggcattgggtacgcaagaattcggcgctagtagcgagta

SEQ ID NO: 4044 - DNA, 387 bp, Gossypium hirsutum
  Clone ID: LIB3083-083-Q1-L1-G7
gggaagtatacagagtggtttaatgatgtgcattcaactgatatctctgacgtctgtgaagatgttctcaaccttctgtcaaaaagccatggatgtaagacaatagagatagtaataccagaactacatgagatgcgtatagctcatcttgtttcaattggatctgaatcactatgctcgctaaatcctgatatagaagatgggaaaggtgtgaaattgaattgtgatactcgcacttgtatggcactttttcgaacattcactgcatcagactatgttgctgcccagtgtcttaagcgaaggataatgcaccatcacatggagatcttcaagaaagttgatgtcatagtgaccccgacaactggcatgacagcaccaaaaatacca

SEQ ID NO: 4045 - DNA, 384 bp, Gossypium hirsutum
  Clone ID: LIB3083-083-Q1-L1-G8
tgcatggttacttcagtgcttcaataaagttacctgctgattatactgctggagttgtggttgctttctatatgtcaaatggtgatatgttcgagaagaaccacgatgaaatagattttgagttcttgggtaacatcagaggcaaagattggaggattcagaccaatatttacggcaatggaagcaccagtgttggcagagaagaaagatacaatctttggttcgaccctgctgatgatttccatcagtacactattctctggactgattctcaaatcatattttatatagacaacatccccattagagagtttaaaagaacagctgcaatgggtggggactttccctctaagccgatgtcgttgtatgctacaatatgggatg

SEQ ID NO: 4046 - DNA, 378 bp, Gossypium hirsutum
  Clone ID: LIB3083-083-Q1-L1-G9
ccctcttctcttagcttcaaccctttttcatcttcattcgcttctttctcaacgcgacaaaacaagggttttaggagaacatctctggtagtagcttccatggctgatctcagcactgtgctcgtcactggagccgctggcagaacaggtcagatagtttacaagaagctgaaagagaggtcggatcagtttgtcgtgagaggactcgttagaactccagaaagcaaggagacaatcggtggagcagatgatgtgtttgttggggatatcagggataccacctctctggttcctgccatgcaaggaattgatgcactcataattcttactagtgctgttcctagaatgaaacctgggtttgatccgacgaaaggcgga

SEQ ID NO: 4047 - DNA, 375 bp, Gossypium hirsutum
  unsure (1)..(375): unsure at all n locations; Clone ID: LIB3083-083-Q1-L1-H1
gccgattatgagaagatggaagaatggaagatcgatatgttggtgaaggaatatggattcagctttaaatggggcaccgtcgatgagaaaagggcttttgccatgggagcttttctttggcctgaccaactttaagttacatatatacatgtatgtatatcatgtttgattgggagattgtgtgattaggaagtgcttgcaaaagggatgcttttatttatgctttggtgatattgagttgtagtaattaaccatgccttagcatgatttgtaaggaaattatgtgtgtaattagctgatcttaatatagntatatatatatatatatatatattcttagaaaatctaatcttggacctgtacggtatttttttt

SEQ ID NO: 4048 - DNA, 390 bp, Gossypium hirsutum
  Clone ID: LIB3083-083-Q1-L1-H10
ctcaaaccaaaaagttccaccctttagtccaagcgttctagcgaaagcatccagctttttagcagtttcaagtctcccagctgtagtcatcacaggtatacagaaaggatgggatcgttccaagcgcctcctggaatgagaagctctgcattgttagaaacttcatgtggatatttacttcaagagttgcagatgatatggaatgaagttggagaagatcagtcagaaagagagaaggttctactagaattagaacaggaatgtctggaggtctaccggagaaaagttgaccgagcaaatatgtcaagagctcgcctgcatcaggaactcgccgaatctgaagctgaattcactcaccttcttttgtcccttggtgaacgttcccttccc

SEQ ID NO: 4049 - DNA, 333 bp, Gossypium hirsutum
  unsure (1)..(333): unsure at all n locations; Clone ID: LIB3083-083-Q1-L1-H11
ggaaggcgcagtagagttgatggttccagggaattttcccatcggttgctcagctgtttacttgacattgtttgaaagccctaaaaaggatgattatgaccgtcatggttgcttgaaggcatttaatggttttgcgaagtatcataataatcagcttaaacaagccctggataccttgagacaaaagtatccccatgtcaggattttttacgctgattactacggngccgccatgcgttacgttcatgccccactacatcacgggttttatggtgggactctaaaagcatgctgtggagggggtggtccatataatttcaacatctcaccaag

SEQ ID NO: 4050 - DNA, 340 bp, Gossypium hirsutum
  Clone ID: LIB3083-083-Q1-L1-H12
ctatactaaggtctaacgaacttaatcaacacgctgcagaaggattggagtagggattatagaaatgaggctttgaagccactgagaatgggctctttgaattgccatcggcaacgccgccaattctttcgcaagatgggcacatggtgagagtggccgccggcatgtgcatgtaaaaaggttgagccgccagtttcagtgccttgagttcttgtagttccttttgcagtctcctgttctcatctgtcagtgtctcacaacacttcttcaagaactcacaatccacctcagtttgcttaagctttgtccttgctctcctgttctggaaccatactttaac

SEQ ID NO: 4051 - DNA, 312 bp, Gossypium hirsutum
  Clone ID: LIB3083-083-Q1-L1-H2
gaagcatcaaaataattctttatgattgcattgcatatccttccactatcaagattacaaacattaattgctgcatggagtttctccggttccaaaaaagttcaaatgtgaacccggatcacgcgtcaaacgcatccaaagaagtgttccaaggatggacaactgaagacattaggcgcagtcctttcaggcctggtaggagaaacgtgaagttgatatttgatgaacctagctaactgagaaactatttcaggatttgtgtcaatatgccaatctggttctagttgccgaacaaaagatgtacgcccattt

SEQ ID NO: 4052 - DNA, 293 bp, Gossypium hirsutum
  Clone ID: LIB3083-083-Q1-L1-H4
ggttttgagaaaatcaattcaaaacgactggtttcactctttttttcctgccttgctgatctttttgggggtcttccacaaaaagaaacaaaaaattttgggtgatctgtgttgaaaaagaaataaaatatggcgacattccaaggaactcaacaaaaatgcaatgcatgcaacaagactgtttatctggtggataagttgacggctgataataaggtttttcataaggcttgcttccgttgccaccattgcaagggtaccctcaagcttagcaactacaactcatttgaggg

SEQ ID NO: 4053 - DNA, 324 bp, Gossypium hirsutum
  Clone ID: LIB3083-083-Q1-L1-H6
ctcccattacttggtttggccactttgatgggaaaaaggaaaaaagaggcagaaatttagagaagttgattcaaacagaaagggtgatggaactgagcattcagaaaatagaagccttgattaggctaaatacgatagtgatgttggttttaacagcttgtttaattgggttggattctcaaacaaaggtcatcttctacgttcaaaagaaagcttctttcaaggatttgcgtgctcttgttggattgctgtatatcacttcattggctgctgcttataatctacttcaactatgctgttcttcattctcagcttcttacaaag

SEQ ID NO: 4054 - DNA, 380 bp, Gossypium hirsutum
  Clone ID: LIB3083-083-Q1-L1-H7
ccacaattagttgcaaaatacgaaaagcaggacgaggctgagtatgaaacgccggagtacaaacatccaaagtgtgaccaagagtacccaaaacatgagaagcctgaaattcacacggaggaaaaacaaaaaccgtgctagcaacatgaacagtaccaccagtcacacaaatcgaaagatcacgaagagtaccagaaagaaaaacccgagctccccaaattggaaatgcctacagagcccgagaaacacacagtcgaatatgcgaatatacccgcgtgcaaggcaaaccaagatgagggtaaggaacatatacatgaaggagaccacgaatcacgcgaatctgaagagcacgaaaagtacgagtaagaacaacccgagtt

SEQ ID NO: 4055 - DNA, 107 bp, Gossypium hirsutum
  unsure (1)..(107): unsure at all n locations; Clone ID: LIB3083-083-Q1-L1-H9
ctttcttccttttccaacttttactcattantgtctcagtaatgatcggtagccacaccgtctacacaggggttagacttttattcgagacacacacacccttatgg

SEQ ID NO: 4056 - DNA, 292 bp, Gossypium hirsutum
  Clone ID: LIB3083-086-Q1-L1-A12
tgtccttggtagaagccaatgaagtaaagatccagaggcccacaataattggacaaacagtattgtcaatggaagtagacaggcaacgaaacatgctccgcgctgctgaggctatggctgaggctagatctgctgctgaacatggtgatctaactgctgctgtctcactactagaaagttgccgcaaggctttatccgaaaccatttttgcacaagctggtgacaggttatgcattgcactatgtgctgaactaaaggagatgcacgacaggatggccaaccgtccagttta

SEQ ID NO: 4057 - DNA, 337 bp, Gossypium hirsutum
  Clone ID: LIB3083-086-Q1-L1-A9
aaaaatatgttttactaaagcctggatatatatataaactatttaaataaaatacatatacatttttatcaaagttggaatcccatacccaagcaggaaatcaacattccacattcaatcaatggagttcctggcatttcacaaaagctaaaccctcttaaaactttaagaaatgaagacatttgagttttcaaccgagttgcttccgggtttacctgaagaacttggtcttgagtgcttatctcggctaccctacacagctcacagactcgccttccgagtttgtcatcgatggcgggaattgctccaaagcctagatttttattaccaccgaaaa

SEQ ID NO: 4058 - DNA, 202 bp, Gossypium hirsutum
  Clone ID: LIB3083-086-Q1-L1-B11
cggtaatgcagcatatacaggtatgtgattcgagctttgtgtttggatttgtatgtaatgagtaatgaaagtgtcttttccctatttttccctttcacgactttgctttttttggtttctatttgagagagtaatgtataatatattcgaaaatagtaatgtaatacctatggctatgtttgtattaatttggtttttgtgt

SEQ ID NO: 4059 - DNA, 242 bp, Gossypium hirsutum
  Clone ID: LIB3083-086-Q1-L1-B9
gaagaattgaaatggcatataggagaaggcatggaataagcagatcggcgacgttcaaggaagagattgaccactcatcacctgcagcagcagctgtagctggtgacaacgacttcaaaaccaaaacattaacttcctcctattctttctctaaaacgtctaagggcttcaatacctttgaagattcaagaaatgattccaaagggttctggggtgttcttgctcgaaaagccaaagcaatt

SEQ ID NO: 4060 - DNA, 300 bp, Gossypium hirsutum
  Clone ID: LIB3083-086-Q1-L1-C11
ggctgagaattcgacgagctcgtgccgttttttttttttttttgaacaaaagatgtttattgctataggccataacaccaaattatcacaaatagcaatgcatgcccacaataatgaaagcttataatatacgaggccattttatcacgaataataaagtgaaaaaccaatattaaatgaaaaacactacttcttttatgccactaaataaataagagcatgtgtaatggaaccaagaagggagtacatgtggcctgaatataaaattgattctcatgaatgctaaccctattcatggac

SEQ ID NO: 4061 - DNA, 381 bp, Gossypium hirsutum
  unsure (1)..(381): unsure at all n locations; Clone ID: LIB3083-086-Q1-L1-C9
tctcattgctctcttttgatcgtcgncgtcgttattattaattaaaatccctttttttaagaccatacgaatttgcctagatttaggccctgcaattgactcttttttttttctctcttgttgtttgttttttgattgtttcaatcaaaagtaagatacggttttacgaactttccgtgctgcatccaccgatgccagataatcggcaaattcagaacaatgttgtttcgaatcaatccgctgatagcattgaagaagcaattttgcgtttgaaaattaatgataataatcaagaggtgggtgtttctaaatcagtctcgtatcctgatcgtcctggtgaaccggattgttcttattatttaaggaccggttcatgtggtt

SEQ ID NO: 4062 - DNA, 261 bp, Gossypium hirsutum
  Clone ID: LIB3083-086-Q1-L1-D10
gctgatttgttcatcagcttgattgaatctgacgcctattatcgtcgccggcaccgatctgttgctttaaaaagaaatggagaatttaatttctcttgtgaacaagattcaaagagcttgcaccgctcttggtgaccatggagaagcaagtgcattgccgactctttgggactcattacctgcgattgccgtcgtcggcggtcagagttcaaggaaatcttcggtgctcgaaagcattgtcggcaaagattttttaccccg

SEQ ID NO: 4063 - DNA, 285 bp, Gossypium hirsutum
  Clone ID: LIB3083-086-Q1-L1-D11
caccgggtggaatcattcttcatgggaagagagctacggaagaggccctgaagatgatgaaactcctcaaattcctgttataactggtgtccgatctagaccggtgagtggggaattcccaatagcaggtgctcttgcttatggcgagcatatgccaaatgcttctcttcataaacgagtgcacccatatcccatgtctgaaactgaaggagctgaaagatgggatgataagaaagagggaggatggaaagaaaggatggatgattgtaaaatgcacaaagggaa

SEQ ID NO: 4064 - DNA, 267 bp, Gossypium hirsutum
  Clone ID: LIB3083-086-Q1-L1-D12
caacaatggctcccctaatgtctactctaatggttgttgggggcgctgtatgcgctctcatgggttccgccattgccgccgacgctccggctccgagccccacctctggtgccagctctatctcgccgccatttgtctctgtttccgtcgccgctgccgctatggctctgcttttcggatctagacttcggatctgaatgatgctatctctggtgttcaaatgatgctctgtttttctttaatatattggatttttttttccttttt

SEQ ID NO: 4065 - DNA, 310 bp, Gossypium hirsutum
  unsure (1)..(310): unsure at all n locations; Clone ID: LIB3083-086-Q1-L1-D9
ggtntttttttttttttttttttttttttttaaagtaaagtgcacaacataaacttcattaaaacataaatcaagccaagtgatgttaacattagatacaacattcaaaattaatttcactagaacaaacgatataacataaactataaccattcagaatctctatgcatgcaaagagattcagcattgctacatggatgaatgcacacacacatttcccactcaccatcttttttattaacaatataattacgatatcccatgaaattactgcatgatgatggcacatgcaccaatgtcatatggctta

SEQ ID NO: 4066 - DNA, 220 bp, Gossypium hirsutum
  unsure (1)..(220): unsure at all n locations; Clone ID: LIB3083-086-Q1-L1-E10
cgagtnntttttgttttcttttttttttaaacataaaatatcactccgctgatagcataaaagggcattagacaaatcttacaacatgaaaaacagaacaatggctcggaaggctattcatgttcttatggagcatcataagtaaaagacaagcatttctaacaaaaaaaaaatgacaagctaacacgactctaaatttattccataggcataatttgag

SEQ ID NO: 4067 - DNA, 164 bp, Gossypium hirsutum
  Clone ID: LIB3083-086-Q1-L1-E12
gttagcggccgaaaaatgtaatataacgtcactgcgactctgatcctgatcatccttgcaaagattacaacgtccccgacgccgaccacttcacaggcgacttggatttcgctgtccaggattttaaattatcccctcctaccagtgctatcattaccgacgac

SEQ ID NO: 4068 - DNA, 156 bp, Gossypium hirsutum
  Clone ID: LIB3083-086-Q1-L1-F11
ctccgaaaggtttctgattttttaacagcaaatattatttgaggcttggtgaattattatttgggtcaacatttacatgtgactgccaataatggtgtaatacaagattatgtacatggaaaagcttctgttgtagcatcttaatttttctctcta

SEQ ID NO: 4069 - DNA, 309 bp, Gossypium hirsutum
  Clone ID: LIB3083-086-Q1-L1-F12
cgtttctttattttttcagtggatatgaagcagtgacgaaatcaagatcgtgtgatgcttataaccttacatatcctattacaaatggtcaagtttataactgggatgctatggaacggtatttggcagcaatgtatattcaattattttacggtgtgatcctgaggatcattactttttgttgactgagagtcctcttactgctcctgagaatcgagaatatacaggtgaaattatgtttgagacgactaatgttccggggctttatattgctgtgaattccgtgcttgctttagcagctgtgtacac

SEQ ID NO: 4070 - DNA, 368 bp, Gossypium hirsutum
  Clone ID: LIB3083-087-Q1-L1-A1
gtgaaaagggtaatggtgttgctcctgctacaaggtctccaatggctttaatggggtcatctagaaatgaaaaccaagaagtgaataccagcatgagaactgtcgagaccatgctgcgggtggtgcctatggctttaggggttgctgcacttgttgtcatgctcaaaaactcacagtccaatgactttggctccgattcatactcagatcttggtgctttcaggtacttggtgcatgctaatggtatttgtgcacgctatttccttctttcagctattatagcaagtgcgcctcgcacttctactatgcctagagcatggactttctttctcctcgatcagattctaacatacataatcttgtgagct

SEQ ID NO: 4071 - DNA, 375 bp, Gossypium hirsutum
  Clone ID: LIB3083-087-Q1-L1-A11
tagcaaccatagccatggcttcctcaccaaaactcttctctatgtctatcctcttcctttttgccctcttctccatgcaaatccatgctagagagtacttcagcaaattcccaagagttaacatcaatgagaaagagacaacaaccagagagcaaaagcacgagaccttcgttccccagaccacccaaaagccagaagaacaagagccaaggttcattcctgaaacccaaaatggttatggcctttacggccacgagtcaggctcaggctcaggctcaggctcaggctcaagccggcccagtttcaccaccaaagaaacctatgaaccctatgtcacccctgttagattccaccctgatgagccctataacagca

SEQ ID NO: 4072 - DNA, 399 bp, Gossypium hirsutum
  Clone ID: LIB3083-087-Q1-L1-A2
tagattccaaagctttagtgaaatcggaaaactcaccggaaattcaccatgtgtacgttggagaaacgcggcaacctctttattttaacgtttaccggcgaagaccagcaccggtttaatcccaatgtcatcggctcccttctcagccttctctctcaggtcaaggctgaagccactcgtggctcagctcttattacccaagcccaaggtaagttcttctccaacggcttcgatctcgactgggctcaagccgccggatctgaacaaggagccgcggaacggttacaccacatggtggatttgtttaggcccgtcatcgcggctcttctgtccctcccgatgcccaccgtcgccgccatcaccggtcacgccgctgccggtggatttgccctcgcgttg

SEQ ID NO: 4073 - DNA, 412 bp, Gossypium hirsutum
  unsure (1)..(412): unsure at all n locations; Clone ID: LIB3083-087-Q1-L1-A3
aaccacatgaatccattatacctgttgagcattcacaagttcccttaacaatttactttcaaatacacccaacaaaaatatcaagtttcaacccaaacacaaataaaacataaaacagcataacatacagtaaaccatttcaagtctttaacaagcttcaaagaatagaagcttgcataacacggaagcaacaggtaataaaagacatcgtaagcacactcaatcacacgtacttcttagtactcatcatcttcaccctcatcaccctcagctgactcagcaccaacttcttcataatccttctccaatgcagcaagatcctcacgagcctctgagaattctncttcttccataccctcaccaacataccagtgaacgaaggcacgtttggcgtacataagatcaaacttat

SEQ ID NO: 4074 - DNA, 284 bp, Gossypium hirsutum
  Clone ID: LIB3083-087-Q1-L1-A4
gccaaacttgcaaaagattttcaagcagttttgaaagagtttcagaaggctcaacggcttgcagctgaaagagaaacttcatattccccttttgttccccagtcagctcttcctgcaagctacacggcaggggagatggatgcaagttctgataaaagtgctgaacagcgagcccttcttgttgaaagaagacaagaagttgtgctgctggataatgagattgcatttaatgaggctatcatttgacaaagagaacaagggattcaagaaattcaaccgccaat

SEQ ID NO: 4075 - DNA, 346 bp, Gossypium hirsutum
  Clone ID: LIB3083-087-Q1-L1-A5
gagacattttaagcactgagaagcctagattggttaattctacttattaatgtccctggctgattttagcaaatccccacctaaacaattatattggttgcctgcgattcgttctattccaacgacatatgttatgtaatagacacccaaaataaagcctgttattcatctgtattgaacgctaccatagaaaatgtaagattattaactccagccacaccaaaacccttggtcatcgtaacaccattgcacacttctgatattaaagcaacatttcgttgttcaagatcaaatggactgaatctttcaataccgagtggtgataatgattttgaaggcccttcac

SEQ ID NO: 4076 - DNA, 393 bp, Gossypium hirsutum
  Clone ID: LIB3083-087-Q1-L1-A6
gcagtgcacctactgccaaggctcaggttgttggttggcctccaataagatcatttaggactaaaacactgaccacttcttcaaagaacaatgatgaagttgatggaaaaccgggacctggtactctttttgtcaaggtcagtatggatggagctccttatctgaggaaggtagatttgagaatgtattcaacttaccaggaactgtcttctgctcttgagaagatgttcagctgtttcacccttggtcaatgtggggctcatggtactcctgggaaggaaatcttgagtgagagcaagttgaaggatcttttgcatggatcggaatatgtgcttacatatgaagataaagatggtgactggatgctggttggggatgttccatgggagatgt

SEQ ID NO: 4077 - DNA, 358 bp, Gossypium hirsutum
  Clone ID: LIB3083-087-Q1-L1-A9
ccttaaccatagctatccgctaacgaaccaaaaggagagagatcgataatcactgttccttgttagccagtttatacaggcagattcatgctggctagtgctacactacacccgcaccagtgatcatcatggatgaagagacaacatccacttagtacaagcccctgatctttgtttcccataccacccaaatgctacaagaacaagagccatggttcttttattgaacccaaaaaagatctggactcttctgacactattcatgttttagctcttgcttatgctcatgcgtaaactgatctatttttatcaccaatgaaacctatgaaccctatgttagcccttttagatttcaccc

SEQ ID NO: 4078 - DNA, 111 bp, Gossypium hirsutum
  Clone ID: LIB3083-087-Q1-L1-B1
ctcctttgtgttctcgaagagccaagtttatggcacatactctcgcttccgccaatcttggtcttactcagcccgccaacatcgaaagccccaagatcgcatttgctgcaa

SEQ ID NO: 4079 - DNA, 383 bp, Gossypium hirsutum
  Clone ID: LIB3083-087-Q1-L1-B10
gggtactgattatcttctgaagaccttcaacaatactggggataccattgacaggattgcagcgcaggtagggataggagatacatctggaggagtttcagccccaaatgatcattattgctggatgcgccctgaggacattgattacccccgtcctgtatatgaatgtcatagttgctccgatcttgctgctgaaatggctgctgctttggcttcggcttccatcgttttcaaagacaacaaagcatactctcaaaagcttgttcatggtgcccgaacactctttaagtttgctagggatcaaaaaggcagatatagtgctggtggttctgaccctgccctcttttataattcctcaagttactgggatgagtttgtttggg

SEQ ID NO: 4080 - DNA, 341 bp, Gossypium hirsutum
  unsure (1)..(341): unsure at all n locations; Clone ID: LIB3083-087-Q1-L1-B11
ggcaccaacttttcggggccnganggaccgngggagggggaggnnnnnnaaacagcaagggacnangngaaanngangaagncaannnnngacnncgagcccanccgcaagcngcnnnaaacnccgaagnnaacaancngcnangangcacnncanggnggngcnggagcnnangcaaancgcancnnngnggaagagcnnggggcacaacaaagcncacnnnngaacngcacacccaaggaggacnnnggcggaggacaaccggancccaancngacnaaagccaaggagnnggnngagcgcangggaaagggaaaaacgaacncnggnngggaaccacc

SEQ ID NO: 4081 - DNA, 371 bp, Gossypium hirsutum
  Clone ID: LIB3083-087-Q1-L1-B12
aactagtctttagttttttttttttttttttaaggccagaaatatctaaggcaaagtttagaacaaacaaactgaattaatcaatttatcacaacgattattttttttcgtgcatgttttaaagttcaaaatctattgatttacactcaaatttactcacaaacacttagaaacaatgaattttttaatgcacttaacccgctcacacattctatttaacccgtttcttattttcaaagcaagttctatttatttactccactaaacatattaatctttaacctaatagtgcccacaaacttccttcaatcttaataataatccccttcttcccctctacctagtaatcgccctttgcattttattttctc

SEQ ID NO: 4082 - DNA, 392 bp, Gossypium hirsutum
  Clone ID: LIB3083-087-Q1-L1-B3
caaacatcctaaatctcgtcttcgtcgccgacgccgaaacgccgctctctgcagccgcttgcccgggaacgcacccaatttcaaaaaacggcttccgtttctcatcccttggcctaaccaaactcctcgattccccgttctcgtctctccttcactgattccatcctcgaaaatggctttcatttgcttttagggtttgtaaaatcaaacccattagtttccgaacccaatctgtaccatttattgttctactttatccaattcatcaatatggctatccgtttcaccgtcagtttctcgggctacgtcgcccaaaacttagcctccaccgccggttcccgtctcggttcttgcccttcccggtcagtccacgaatgctggctccggtctcg

SEQ ID NO: 4083 - DNA, 400 bp, Gossypium hirsutum
  Clone ID: LIB3083-087-Q1-L1-B4
ccctaaagagacaatgagaaagctgctagcctttgcctttcttttcttcttcttttgggataaaacattagctcaaatagctccggcgccgccgttaaaggtggacaacatcacttccatcctcgaaaaaggtggccaattcaccactttcatcaagctattgaaagccacacaggtggctgatcaactaaacaaccagctaagcacaccggaccctaacgacgggataacggtgtttgcaccgagtgacaacgcgttctccggactcaaacccgggacgttaaactcactttccgaccaagagaagcttcagttggttcagttccatatactcccgacgttaatgtcgacgtcgcagtttcaaaccgcgagtaaccctttgagaacccaagctggggat

SEQ ID NO: 4084 - DNA, 393 bp, Gossypium hirsutum
  Clone ID: LIB3083-087-Q1-L1-B5
aagaccatcaacagggagaatgtctcgacatgaatgaggtatccaacttcataacatcccctccaacgccaaattcagccttggatgatcctccttacaagatcaacaaccagggaattcaacgacccattaataacaaaacagttcctgcaactgctctgcattttggtaacctgacagaatacgatgttcataacctgtatggtttactggaatgcaaagcaactcatgcggcattgaccaatctgaccggcaaacgcccatttatacttagcagatcaacgtttgtaagctctgggaaatatacagcacactggactggtgacaatgcagccacctgggaggatttggcttatacaattccatccattttgaacttcggactctttggaa

SEQ ID NO: 4085 - DNA, 391 bp, Gossypium hirsutum
  Clone ID: LIB3083-087-Q1-L1-B6
gtgttatctgggcttacgttaactctgccaccaaagattttgttccttttctcatcactctccgccggcttcccttcactttcctcccttcaactccttgtatctttttctttcgctatatcttcatttcattgttctaaagaaactatatttactgcggcggccagaacaagcggaagcaacattaattgtttctttgatatggcaactaagcttcttctaacattcgctatttgcagattgattgttactgtgggattgaccttggaccccacggagcttctcctcctgggagttgacgctcaactcagtgtcgaccccaccgacgttaaagccgcttctctcgatttcggcttgctcacaggagctcagccgccgcttgctgtcatgc

SEQ ID NO: 4086 - DNA, 393 bp, Gossypium hirsutum
  Clone ID: LIB3083-087-Q1-L1-B8
gtcgactgcgggacggccataacacggttgcaagcggaggcttacaacgcactccgcgacgcgttcgtgaaattatcgccggacttgccgaccaccggtggggttgcgttgttcgacacgtgctacgacttgtcttcaagaaccagtgttagggttccgtcggtggcgtttcatttcagcggcggaatgtcactggacttgccggcgaaaaattatttgataccggtggactcatcgggaacgtattgcttggcgtttgcccccacgacgtcgtctttgtctataattgggaacgtacaacagcaagggacacgtgtgagcttcgatttggctaataataaggtcgggttctctcctcataaatgttaagacagtaaataaatagcttattgg

SEQ ID NO: 4087 - DNA, 391 bp, Gossypium hirsutum
  Clone ID: LIB3083-087-Q1-L1-B9
tcgagtttttttttttttttttttttttttttcaaataaccacatgaatccattatacctgttgggcatttacaagttcccttaacaatttacttccaatacagacaacaaaaatatcaagtttcaacccaaacacaaataaaacatgaaaaagcataacatacagtaaaccatttcaagtctttaacaagcttcaaagaatagaagcttgcataacacggaagcaacaggtaataaaagacatcatacgcacactcaatcacaggtactttttagtacttattatcttcaccctaataacccttaggccgattaagcacaaactttttaataatcctttttccaatgcagcaaagaatcctcacgagccctttgaaaaattttctttttt

SEQ ID NO: 4088 - DNA, 350 bp, Gossypium hirsutum
  Clone ID: LIB3083-087-Q1-L1-C1
ggtctggagtgtgtgtacgaggtgcacccaaggtgcatcagagctgtcacccctcaaagcttaattgaagacaggtgactgtcacctcaccttacctcacctcaactggcctttatgctaattgaattctgatcaatccatcatgccatcagctcttactatctataattctatctctatatcactagatatgtgggttttctactgagaatactatgttattgtagctaaagccgtcaacactatgtgagtgtaacaaataaaatgtgtgttccaaccttttttttttaaaatttatcaggccacctttttaccaaatggtcttactttaattcttctcctgggggggc

SEQ ID NO: 4089 - DNA, 392 bp, Gossypium hirsutum
  Clone ID: LIB3083-087-Q1-L1-C2
ccgaaatgaagaaaatgtttgagctgatcgagaagtacaacttgaacggccaattcagatggatatcatctcaaatgaacagaatccgaaatggtgaactttaccgatacatttgcgacacgaaaggtgcctttgtacagcctgcattgtatgaagcctttggattgacagttgtggaggcaatgacttgcggtttgccaacattcgcaacctgcaacggtggaccagccgagattattgtccatgggaaatctggtttcaacattgatccttaccatggtgatcaagctgctgacatactggtcgatttctttgaaaagtgtaagaaagatccatctcactgggataagatctcccaaggaggcttgaaacgtatcgaggagaagtataca

SEQ ID NO: 4090 - DNA, 399 bp, Gossypium hirsutum
  Clone ID: LIB3083-087-Q1-L1-C3
caaaagcttttttctgaaatctaccctcttttgatcaaagcaaaaacaaccagaattcaatggggaagaaagctgtgttgattggaatcaactatccaggcacaaaggctgaactgaaaggctgcataaacgatgtgaagagaatgtacaaatgccttatagaacgctatggattctctgaagaagacatcacggtattgatagacaccgataattcttatgatcagcccacagggaagaacatcagaagggctttgaatgatcttgtgagatcggctgagcctggggattttctgtttgtgcactacagtggccatgggactaggcttcctgctgagactggggacgatgatgatactggctacgatgagtgcattgtcccctgcgatatgaatctca

SEQ ID NO: 4091 - DNA, 387 bp, Gossypium hirsutum
  Clone ID: LIB3083-087-Q1-L1-C4
cacacacttttttgtgacatctaccctgcttcgatcaaaggacagtcaaccataattcattggggatgaaagctgagttgataggaatcaactacccacgcacaaaggctgcactgtaaggctgcatctacgaagtggagagcatgtacacatgctttataaaacgcttggggtcctacgaggaagacatcacagtatcgatcgacaccgctcattctgacgatcacgaccagatggcagaacatcggaccggtgactaatgatcttgcgagatcaaacgagcctcgggaaattcagtttgcgcactacagaagccataggactaggatttctatttacactcgagacaatgtgatactggcttctataaacgcatagtaccctgtg

SEQ ID NO: 4092 - DNA, 333 bp, Gossypium hirsutum
  Clone ID: LIB3083-087-Q1-L1-C7
atcttatattgctctttatgtgccgttgctcagcaacctgttagtgtgggaattgatgggtccaacattgattttcaactttacactgttggaatttatgatgggagctgctcggatgatccacatgacattgatcatgctgttttaatagatggttatggttcaaatggcagaaaaaagtattggatagtgaataattcatggggaacatgttgagcgatcgatggatattttctatctaaagagagacacagatttaccatatagcgtttgtgctggcaatgccatggctttttattcaactaaagaatgctcttcaccatcctcttatac

SEQ ID NO: 4093 - DNA, 379 bp, Gossypium hirsutum
  Clone ID: LIB3083-087-Q1-L1-C9
ccgccatgttgagaagacctgcaaggtgttatggtcagataaaaaacaaaccttacccaaagtcacgttattgtcgtggtgttcctgatcccaagattaggatttatgatgtgggaatgaaaaagaagggtgtggatgagttccctttctgtgttcacttggactcttgggagaaggaaaatgtctctagtgaagctctggaagctgctcgtattgcttgcaacaagtatatggccaagtatgctgggaaggatgccttccacctgcgagtccgtgttcacccattccatgtcttgcgtatcaacaaaatgcttttatttgctggagctgataagctccaaactggtatgcgaggtgcttttggcaagcctcatggaac

SEQ ID NO: 4094 - DNA, 403 bp, Gossypium hirsutum
  Clone ID: LIB3083-087-Q1-L1-D1
agaaacttggtgtgaaacaatggcgtcctcggatcttattggcaagcttgagactgatgtcgagatcgatatttctcccgaaaagctccaccatatgtggtgccacaggccgtaccatgttcaccacactagctccgaaaaagtacaaggatgcgatttacatgaaggtgaatttggaactcccggcgtcgttatctgctggagatatgtgcatgatggaaaggctaaaactgcaaagcatgtagttgaagttatggaccatgagaaaaagtcaataactttcaaaatgcttgaaggagatctgatggaggaatacaaaagcttcgtgattacaatccaaacttcccccaagagcgactgtaaaggcagtatagtgcactggactctggattatgaaaagctg

SEQ ID NO: 4095 - DNA, 384 bp, Gossypium hirsutum
  Clone ID: LIB3083-087-Q1-L1-D10
gaaagctttttcggaattgtgtaatcagaaatgtatacagtctatgcagaaatgggtgctttttgctgctgctcatgtggtgatgactgtgaagaatatgcttatcctagcaattcaatatataggcactgcatctgcctaaggttcttcttctatcagctattcactgggtatggtgctctgtttcacagattggatgggcgacctgcatcccatatccaaggagcttctttgtcatcaaccacaactgttactgcaatatcagataattcagccattgaaactcatgttacaatgtccagaccggtcccttactatgctgagcaaaggtactctcgtttgcagcgtgatggcttggtctctatgcgtgataagtttgtgact

SEQ ID NO: 4096 - DNA, 375 bp, Gossypium hirsutum
  Clone ID: LIB3083-087-Q1-L1-D2
gctttccttcaattatttcccacttccttttgccttcaaaatttccttgggattcctatggctaccgctgaggttgcatcagttcaaactgcacttcatgaggagaaaactgaagaatcagtgaaggatcaagaagctacaacagatgaagtagttgccgaagctccagcagcggaaccagttgccgaagagccaaaggaagcggagcctgcggcggtggtagtcgaggaacctgaagcctcagttgaagttgaaaccaaggaggtggtagaagaaccaaaagctgttactgaggagccagtagtagaggaggctcctaaagaaacaatgcccgaaccagttgccgaggagatcaaagaaaccactgaacaaacc

SEQ ID NO: 4097 - DNA, 380 bp, Gossypium hirsutum
  Clone ID: LIB3083-087-Q1-L1-D3
atttggtttaccatggctcataactttcgtcatcctttgttccttttccaacttttactcattactgtctcactaatgatcggtagccacaccgtctcgtcagcggctcgacatttattccacacacaaacaacctcatcagagctgccacaattggcttcaaaatacgaaaagcacgaagagtctgaatacaaacagccaaaatatcatgaagagtacccaaaacatgagaagcctgaaatgtacaaggaggaaaaacaaaaaccctgcaaacatcatgaagagtaccacgagtcacgcgaatcgaaggagcacgaagagttcgataaagaaaaacccgatttccccatatgggaaaagcctaaagagcacgagaaaca

SEQ ID NO: 4098 - DNA, 250 bp, Gossypium hirsutum
  unsure (1)..(250): unsure at all n locations; Clone ID: LIB3083-087-Q1-L1-D4
caacgaaattataaacaaaaacangggaaagcaccccaaaagggggaccaaangggcaaagacaccggcggggaaagcagccaagagagcccaccccgaagcggaagggaacaggggggaggacacggacgccagggaaacagacanggaagaaaaggcacccaaagaaagggacaaaaaccacaacaagggcggacaggggaggcccaaaacgaacaaagagaagaaaaancggaccagacnaaaagcg

SEQ ID NO: 4099 - DNA, 85 bp, Gossypium hirsutum
  Clone ID: LIB3083-087-Q1-L1-D6
tacgggctaggcttttttttatactacttattttttcagaaagctaacatcagggaaaaaatgagagatatccttcattgttcaa

SEQ ID NO: 4100 - DNA, 340 bp, Gossypium hirsutum
  Clone ID: LIB3083-087-Q1-L1-E1
gttttccttgtaggatctgaaaaagaatgtcggctaatgggactgacaactcaacttctaagaagcctccaagtccttttcctttgagattttccaagttttttcagtccaacatgagaattcttgttactggtggagctggattcattggctcccatttagtggataaattgatggagaatgaaaagaatgaggttattgtcgtcgacaactactttaccggcacaaaagacaatctcaagaaatggattggacatcccagattcgagcttattcgtcacgatgtcaccgagccgttgctcattgaggttgatcaaatctaccattttgcttgcccggc

SEQ ID NO: 4101 - DNA, 390 bp, Gossypium hirsutum
  Clone ID: LIB3083-087-Q1-L1-E10
agacctgatacgcttttttacaactgcttgatccatgcgctggggcgagcaggccaagttgaagatgctattaaggtttttgaggtagagatgccgaagacaggtgtttcccccaatacatcgacgtataattgcatgattgccatgctttgtcatcatgctcaacaacagaaggccctatctcttcttcaggacatggggaatttgaaaatttgcaagcctgaagttcagacatattaccccttgctgaagtcatgctttaaaactgggaagatagataacctgttgagcaaactattgaatgatatggttaataagcatcatctaagtcttgatagttctgcctactcactattgattcatggactttgtagagcaagtagaagtgag

SEQ ID NO: 4102 - DNA, 392 bp, Gossypium hirsutum
  Clone ID: LIB3083-087-Q1-L1-E12
ttttctttctatttggttaaccatggctcataactttcggcatcctttctttcttttccaacttttactcattactgtctcactaatgatcggtagtcacaccgtctcgtcagcggcttgacatttattccagacacaaacaacctcatcagagctgtcacaattggcttcaaaatacgaaaagcacgaagagtctgaatacaaacagtcaaaatatcacgaagagtacccaaaacatgagaagcctgaaatgcacaaggaggaaaaacaaaaaccctgcaaacatcatgaagagtaccacgagtcacgcgaatcgaaggagcacgaagagtacgataaagaaaaacccgatttccccaaatgggaaaagcctaaagagcacgagaaacacg

SEQ ID NO: 4103 - DNA, 305 bp, Gossypium hirsutum
  Clone ID: LIB3083-087-Q1-L1-E3
aggtaaatatgcaaattccattcaaagagaaaccatacatagatgcaaccggtaaacaaagactagaaattatttaaaaggccatcaaagggcacaatccttcacgtaaaaccagaaaacccacattaaggaagaccttaaggcttagaacccaccacgaagactaataacaaggtgaagagtggtcttcttttgaatattgtaataaaccaaagtcctttcatctttcagctgtttcccagcaaaaaacaacctttgctgatctggtggaattacttttttgtcctgaatcttcgctttcacgt

SEQ ID NO: 4104 - DNA, 396 bp, Gossypium hirsutum
  Clone ID: LIB3083-087-Q1-L1-E4
caaagatcaacttagccaaaggccggtagctcatttatcaactgagcgaatacttatttgtaagggctcaactaattcaaagcacatacgaaacatacctcaatgttgggatgtttcaagcgtattaactgaaatttttacagcaagatcattcccaaatcacgtaccttcggaatttaactggatatagctactcgttcaaatgccttcgggacatatcccggttatagtgactctcacaaatgccttctggacttaacccggttatatgtaactcgcacaaatgccttctggacttaacccggatttagtaactcgcaccaatgccttcgggcttagcccggaattagtaactcacacaaatgccttcggatattagtccggatatggtcactt

SEQ ID NO: 4105 - DNA, 358 bp, Gossypium hirsutum
  Clone ID: LIB3083-087-Q1-L1-E5
ggaaaggtgaaaagggcatatcataaaatcagccacaaactcagagagcaaccatatcagccatctaaacgaatcaagtcatactagattcaacatgtagccaatttacaatggcaaagcatcacattgcctctctgctaacacactcagaaaccaaacacctaatctgaatctgattcagatttatgatcatccgcatttgctttcttttttccttcagcttccttaacagccttcccaaaggcattaacgggaatcgatggttgatacccaaccacaggataacctttttccactcttttcctttaaccaactgttgtatttctcacacaaattagctgctttgggaacaaccttt

SEQ ID NO: 4106 - DNA, 198 bp, Gossypium hirsutum
  Clone ID: LIB3083-087-Q1-L1-E7
gttttcatttctctgggctagcacaaaagttctgatttgctcaaaatccatcctcttggtcgaagcccggcctttcatgacgaaagcacctccctgtttgagtcacgggcgatttgtacggttgtatgttaaaagtctgtatagatggggaacatgggattgtttgggttcaaccattcggcgaaagcttctatttat

SEQ ID NO: 4107 - DNA, 396 bp, Gossypium hirsutum
  Clone ID: LIB3083-087-Q1-L1-E8
caactagccattacgagtgcacaaacaccagctgcctcagcttccactacgccaaccaccaccaccactcctccaccttcaacttcaccaccacctacaacttccgcaccgcctccttcaacaacccctccacctacaacttcagcaccatctccttcaacagcaacgccttcaccttccaccacgcccaccgcgccagctcaaccacctgcaacaactccccctcccactgttgcaccagctacaagcccaactgtcccaccgtcacaaactccaccacctcaaccacctcaaactcctccaaccacagctccagctcaaccgccagcagtgccaccaccatcaccaccaccagtatcttctgcaccagcaccagcccagaaaccaccagcttct

SEQ ID NO: 4108 - DNA, 371 bp, Gossypium hirsutum
  Clone ID: LIB3083-087-Q1-L1-E9
ttttccttttttattattacagatcatttatgggcataggtcacaagcttggagtaaatcatgaccctatttatctttgcagggagaatagagaaagaatatcccatggaaggctacaagaatgcttttaatcacatagcagtgttggctttcccttttctcacccaatgctgtctctcttctcaacattatccgtaactatcagacgcttgccccgacaccatgtttttcttccttagcacccaacaatcaaacaacttaacttttcccaaaaaccttgattaaattaagccttttaatgtatgggatggattacctgaggggtttagctttagggggaaatctcatgagcccgtctattatcttcttaa

SEQ ID NO: 4109 - DNA, 406 bp, Gossypium hirsutum
  Clone ID: LIB3083-087-Q1-L1-F10
caattgcaaaggaatgagacctgttctgtatgttcttcagcagccaagaatgacctcaagaacaagcaggagaaagaattagcagagaaactagcggaatgtcaagaaaccatattccttcttggcaagcaattaaaagctttccgtcctcaaacagatataacgggatcacccttcaacgagaggagccataagggtgacgatggacccactaccagtggcatcaacttgcaggatttatatcaagcaaagatggacagtatcgctgctgctgctgcttctggcattggaagcagaggtggtgcagagtctgccctggagtcagttaacacaccaagcagcccatatgatagtgaagcaaactctttgagaacacccatcaaatcaaaacacaggtttacaacat

SEQ ID NO: 4110 - DNA, 333 bp, Gossypium hirsutum
  Clone ID: LIB3083-087-Q1-L1-F3
acagtataaatcttcagaggagtttcatttcctatgacaataccaacaatatgacatccacaagatagtaaaagaccatggggttccttattacctttcacaaatacatatcgcaagccaataccaatgaaaaacacaagactttaaaacagaatttaaagatataaaccaaacccttttttcaaaatttttgtcgcttccttcttgactgacctatatgggctgggaagttttgatctggggcttgatgttgtcagtcggaagttgcgtgggtgcatttggcaagactactgcagtcatggtttggtactgaggaggcatgttgggggccat

SEQ ID NO: 4111 - DNA, 383 bp, Gossypium hirsutum
  Clone ID: LIB3083-087-Q1-L1-F4
ctacatgctactcttgtgattcttgttggtcaattgagtaaagaaactggtgtgctcgctctaaacagaacccttgccaagccttgtttatcagatattgagcaagtcttggctggccagggtgctggtgacggtctcaatcaagtttgttcgattcattcatcaaaccttactgaagcatcttgtcccgtaaaagatgttgatgaatttgagaacatggtaaactcttctgagcttcttgcttcatgtgaaaagattgatcctgttaaagaatgttgtgaccaagtttgtcaaggtgcaatatctgatgctgcaacaagacttgcattgaaagcttctgatcctctaagcatggatggacctcatgttttacctcagcacac

SEQ ID NO: 4112 - DNA, 387 bp, Gossypium hirsutum
  Clone ID: LIB3083-087-Q1-L1-F6
tctgcatctgcttttatttctttacagctcaaaattaataattataaatcaaatcaaatcaaatctctttcttccttatcctttcgatctgctaatcaagtcatttcaagatttttttttctgaacaagaaaaatagtaggacaatgccgtccttggaggatgagctgtttccgtcgacgccagggaagttcaaggtcgacagagcacacaatatgaaccgtcaattccatcgttgcttcgcttcaaccagcaccatgtttttatgggctcttttcttgatcgcattgacggcgtcgtatttgagcttccagagtttcgttgattctggtagccgatatttcagtgcttcatggggtggtatccaatgggaaaaacaagtccgtaac

SEQ ID NO: 4113 - DNA, 293 bp, Gossypium hirsutum
  Clone ID: LIB3083-087-Q1-L1-F7
cactttggcttttttcagtcgataagaagatcaacgtgaggggaggattaactcgcaacctctcctggttggcagtgtgaggagaatgatcagcacgagcaagagatggttgccacagtgtgcatgatatgccacatgttggtgatgctttgcaagtcatcacctgcatgccctaactgcaaattcatgcaccccccagaccaaggcccttcgaaactatttaagcacgggcttatcctgttgtgctagtaaggacaatcaagttttttatgtttaggataacaaattcaccc

SEQ ID NO: 4114 - DNA, 384 bp, Gossypium hirsutum
  Clone ID: LIB3083-087-Q1-L1-F8
ccccatctctctcgtctctgggtctcgtaagttggtgaatagtgttgtaattagtgccaatggctcggattgggacctctgcagctcacattgtgttggcaatatttgctgtggccatgtttgttgtgtccgggaccatggcacaggatattgctccttctcctgcaatggctaccggagcaggctctgctttgccggtttccgctgtcttcttatgctcttccatgttggtctctttaattgctctcttggtgcattgaattcaaagcttttcaagactttatgacattggctacccttaatttcactctcactggtgatgaggggagtagcctctaatcttctccgagataatatttgggtgttatcaattttcaatttctc

SEQ ID NO: 4115 - DNA, 385 bp, Gossypium hirsutum
  Clone ID: LIB3083-087-Q1-L1-F9
ggcgttttatggatgtgcagactaggcttatcactccagtctgccctcactatgcggagtttgtttggagagagcttctgaagaaggatggctttgtgataaaagctggctggccatcagctggttctccagatcttaaactcaagagtgccaataagtatctgcaggattccattgtgttgatgagaaagctgctgaataagcagattttgggctcaaagaaatctaataagaaaggggctccagttacatcactatctgaggacaagttaaaaggcctaatctatgtgaatgagaaattcgaaggatggcaagcagagtgtttgcagattctccaaagcaagtttgacagtaatgcccgaacttttgcatcagatggggagat

SEQ ID NO: 4116 - DNA, 160 bp, Gossypium hirsutum
  Clone ID: LIB3083-087-Q1-L1-G11
tttgtttttgtaagggagtccaccgtctccgaccctgttgagggaaaacttgtcgacaacttcaaaaacttaagggtccatttgttgttaggggatatgttccaccattagagtttggtcaaaacaaaaaaacaagatgatgtggtgattttcgttgtgg

SEQ ID NO: 4117 - DNA, 197 bp, Gossypium hirsutum
  unsure (1)..(197): unsure at all n locations; Clone ID: LIB3083-087-Q1-L1-G12
cagcannncgnccggcagacaancggacaaagggcnaggaggggaacagcaagcagcaacngcggccgcnnanccaaaaaangcccccgnncncagcnagacacggaggaaggggcganaggaccaaaagggaggcanaagnngcngcgaacaagaaaancncacaaagggnnancgagggganaaacccagaagac

SEQ ID NO: 4118 - DNA, 378 bp, Gossypium hirsutum
  Clone ID: LIB3083-087-Q1-L1-G2
cgaagctgctgctcctagaattttgcatagagatgtaaaatcgacgaatattcttcttgataagaactgtagagcaaaaattactgatcttggtatggccaaacgtttaagagctgatggacttcccagctgttcgagttctccagcgagaatgcagggaacctttggctattttgccccagaatatgcaattgttggaaaagcctcacctatgtctgatgtttttagttttggtgtagttcttctggaactgatcactggtcggcaacccatccacaaatcaaacaataaagaagaaagtcttgtcatttgggctacccctcgtttacaagatagtaagcgagtgacctcggagttacctgacacacgtttgaaaag

SEQ ID NO: 4119 - DNA, 235 bp, Gossypium hirsutum
  Clone ID: LIB3083-087-Q1-L1-G3
gaagatcttttttcttttttcttaagaaaacagttaacatcgtgggataatatctatcagacaaaatggctttcaaatccaatccttgaaaccaatatcattaaaacaatatcaaaagaaaacaaagacttaaaatccattaaagctttcaacaaggcttcttgccttctttacctacatagatcttttacttctcagaagaatcaggtcccctttttttgtcaaaactaacctc

SEQ ID NO: 4120 - DNA, 393 bp, Gossypium hirsutum
  Clone ID: LIB3083-087-Q1-L1-G6
gatttggacgagatttgggttaccatgggtcataactttcgtcatcctttcttccttttccaacttttactcattactgtctcactaatgatcggtagccacaccgtctcgtcagcggctcgacatttattccacacacaaacaacctcatcagagctgccacaattggcttcaaaatacgaaaagcacgaagagtctgaatacaaacagccaaaatatcatgaagagtacccaaaacatgagaagcctgaaatgtacaaggaggaaaaacaaaaaccctgcaaacatcatgaagagtaccacgagtcacgcgaatcgaaggagcacgaagagtacgataaagaaaaacccgatttccccaaatgggaaaagcctaaagagcacgagaaacac

SEQ ID NO: 4121 - DNA, 400 bp, Gossypium hirsutum
  Clone ID: LIB3083-087-Q1-L1-H1
gttcttttctttctatttgattaaccatggctcatagcattcgtcaccctttcttccttttccaacttttactcataagtgtctcactagtgaccggtagccacactgtttcggcagcggctcgacgtttattcgagacacaagcaacctcatcagagctcccacaattggcttcaaaatacgaaaagcacgaagagtctgaatacgaaaagccagaatacaaacagccaaagtatcacgaagagtactcaaaacttgagaagcctgaaatgcaaaaggaggaaaaacaaaaaccctgcaaacagcatgaagagtaccacgagtcacacgaatcaaaggagcaaaaagagtacgagaaagaaaatctcgagttccccaaatgggaaaagcctaaagagca

SEQ ID NO: 4122 - DNA, 119 bp, Gossypium hirsutum
  Clone ID: LIB3083-087-Q1-L1-H11
aaaagcagaagatattgttgggttattgaagctagctgctccacattttgttggcttaaagcttcttttgatgctgctttgtcttgattcattgctttgggttaactgtggggctgagc

SEQ ID NO: 4123 - DNA, 352 bp, Gossypium hirsutum
  Clone ID: LIB3083-087-Q1-L1-H12
agtaaatcccacgtatattaaatgagacgcaacatttatatctaaattactgacgcttggcgggcccagcctcataataaaattgctaaaggaagacaaagctatttaacaaaattaagatcttaccatagtttgtatgagctggggtcttctctataactgatggtctcaacttttttttcacattgatttgcattgaatttaaaagtaatcctagtggcaatagagcttgattgatgaatcagcaccacagtgaataaccagggctgccttggatggaactacagccattactcctttccatataactagatccctctcagaatttcaacggtacaatagcggattctgg

SEQ ID NO: 4124 - DNA, 350 bp, Gossypium hirsutum
  Clone ID: LIB3083-087-Q1-L1-H2
tttcagttcacatcggtcaggccggtattcaggtcggaaatgcttgctgggaactttactgtctcgagcatggcattcagcctgatggccaaatgccaagtgataagactgttggtggaggagacgatgctttcaacacctttttcagcgaaactggtgccgggaagcacgtccctcgcgccatctttgttgatctggagcctactgttatcgatgaagtgaggactggtacgtaccgccagttattccaccctgagcaactcatcagtggcaaagaagatgctgccaacaatttcgctcgtggccattatacaattggcaaaagagatgttgatctctgcttggatcgt

SEQ ID NO: 4125 - DNA, 402 bp, Gossypium hirsutum
  Clone ID: LIB3083-087-Q1-L1-H3
cttcctacttaaactcttattatgtctatcctcttactttttggcctcttcttcatgcagaatccatgctagagagtacttcatcaaattcccaagagttaacaccaatgagaaagagacaacaaccagagagcaagagcacgagaccttttgtttcccataccacccaaaagcctgaagagcaaaagccaaggttcattcctgaaacccaaaatggttatgggctttacggacactagtcaggctcatgctcaagcttaggctcaagccgggccagttttaccaccaatgaaacctttgtacccgatgttacccctgttagatttcaccctgttgaatcctttaacaacattcctcgattcttcaatgatgaattcactttctactacaacaagaatgcct

SEQ ID NO: 4126 - DNA, 390 bp, Gossypium hirsutum
  Clone ID: LIB3083-087-Q1-L1-H4
ctcaaattttaagaaaggtttgctatgtccaattccctcaacgtttcgatggtattgatagacatgatcgatatgccaatcggaacacagttttctttgatattaacatgaaaggtctagatggtatacaaggccctgtatatgtcggcacggggtgtgttttcagaaggcaagctctttatggttatgaacctccaaagggacctaagcgcccgaaaatggtaacctgtggttgctgcccttgctttggacgccgcagaaaggacaaaaagcactcttaggatggtggaaatgcaaatggtctaagcctataaacaggcgaagatgacaaggagttattgttgtcccacatgaaacttgaaaagaaatttgtacaatcagcccattttt

SEQ ID NO: 4127 - DNA, 393 bp, Gossypium hirsutum
  Clone ID: LIB3083-087-Q1-L1-H5
ggcgagcggaggaaaagtgtcatttaaagtcactcttacctctgatcctaagctccctttcaaagtgtttagcgtgcctgaagcagccccttttacagccgtcttgaaattcgcagccgaggaattcaaagtccctcctcaaaccagtgctatcatcaccaatgatggtgtgggaatcaatcctcagcaaagtgcaggaaatgtgttcctcaaacatggatcggaacttcgcctgattccccgtgacagggtgggagccttttgaaataacaaaaacttcatttgttatctctgagtgagaagactggttatgactttgtttggttatggatcctttgttttggtatgtatgtttaaacttttacttgagtgtagaacatgacggatagcaaa

SEQ ID NO: 4128 - DNA, 390 bp, Gossypium hirsutum
  Clone ID: LIB3083-087-Q1-L1-H6
gttctcttttaaaatttccgtttgtttcctgagcaaatctcgggaaggaataccctttttttccccctgttgttaactcgttgtgattgtgaagctttctttaagagaatcctagttaactcgacgcgtttacccggaaagaggtgaagatgtcaactcctgcaaggaagagattgatgagggattttaagaggttgcagcaagatcctcctgcaggaattagtggtgcacctcaagataacaacattatgctttggaatgctgttatatttggacctgatgacaccccatgggatggaggtacgtttaagctgactcttcagtgtacggaggattatccaaataaaccaccaactgttcgtttagtatcccgaaatgtccatccaaata

SEQ ID NO: 4129 - DNA, 388 bp, Gossypium hirsutum
  Clone ID: LIB3083-087-Q1-L1-H7
attttccactcattccaaaaccccttcaacaatggcgatgacgaagcaacatttgatcccgcttttcgctatctcatttctcttgtttttccagctccattgctcaacaacttcagcccaggctcccgctcagtctcccgcaccacctgtgtcaccagacgtcaccaaaattctgcaaaaagccggccaatactccgtcttcgttcgtcttctcaaatacacccaagtcttcgaccgtctcattggcgagctcaaagacacagatgatgggaagaccatttttgcccccactgataaggctttctccgccctcaaatctggtgccttgaattcactcaacgatgaacaaagggttcaactggtgctatttcacgtcatccccagttat

SEQ ID NO: 4130 - DNA, 344 bp, Gossypium hirsutum
  Clone ID: LIB3083-087-Q1-L1-H8
gttaaattaacaatacatgcaatatcattaaagtaaaatacacaacataaacttcattaaaacataaatcaagccaagtgatgttaacattacatacaacattcaaaattaatttcactagaacaaacgatttaacataaactataaccattcagaatctctatgcatgcaaagagattcagcattgctacatggatgaatgcacacacacattttccactcaccatcttttttattaacaatataattacaatatcccatgaaattactgcatgatgatggcacatgcaccagtgtcatatggcttaaggcttaatgctcgagccagactgagtaaacatgga

SEQ ID NO: 4131 - DNA, 276 bp, Gossypium hirsutum
  unsure (1)..(276): unsure at all n locations; Clone ID: LIB3083-088-Q1-L1-A10
gntnnnntttttttttttttttttttttcataaaaaacaggttattgtatttagattgtatttctatttgcagaaccgacgagaaaacgagtctaatacaacccacatcaccttggagccaaagaacagtaatatcttagctaaatcataaaattcccagaaaatgtcaataaatcgttaaaaattaccacatccatactctacctaatgaggcaaatccagaacccataattgcccacttaccaaaatcatattattgcaaataagggtcattca

SEQ ID NO: 4132 - DNA, 310 bp, Gossypium hirsutum
  Clone ID: LIB3083-088-Q1-L1-A11
ttcttgttaagtacactgtaaaagatggccgatactgaggagattcaaccccttgtctgtgataatggaactggaatggtgaaggctggttttgctggtgatgatgctcccagggcagtttttcccagtattgttggccgaccccgacacactggtgttatggttgggatgggtcagaaggatgcatatgtaggagatgaggcacaatctaaaagaggtatccttactttgaaatatcccattgagcacggtattgtcagcaactgggatgatatggaaaagatctggcatcatacattctacaatgagc

SEQ ID NO: 4133 - DNA, 296 bp, Gossypium hirsutum
  Clone ID: LIB3083-088-Q1-L1-A12
atttgacccataacttacgcgaaatcttgaagcacaactgtgggaaacagttaatcagattggggatttgcagaagcagatggaaaatgcaaaggcttctgatttggagtctgtacgaattgttactttggaactggatggagctaaagaatcactacaaaaagttgctgaagaagagaactcgttgagaagtatggtggagtctctgcagttggaactcgagaatgtgaagaaagagcattcaaaactgaaggagaagaacgtagaaacggagtccattgcttggaatctgcacg

SEQ ID NO: 4134 - DNA, 270 bp, Gossypium hirsutum
  unsure (1)..(270): unsure at all n locations; Clone ID: LIB3083-088-Q1-L1-A2
gttttctgtgtgtgtcngttcgtattttttattcatcgggttgatatcgtcggaggctttctcgggcgtcggatcagaagttgatccgttgatcaggcaagtaacggacggtcaagatgatggagtggagacacagcctttgaccgctgagcatcacttctcgctgttcaaggctcggttcaagaaatcgtacggctcggaggaggagcatgattaccggttcaaggttttccgggcgaacttgagacgagcggcgcgtcatcagaagct

SEQ ID NO: 4135 - DNA, 389 bp, Gossypium hirsutum
  Clone ID: LIB3083-088-Q1-L1-A4
cagggatgctattggagaaatcttggatggggactggcaagaaaatcttgccaatgaatcgtcccttgaaactttgccgaatgaagctggagaacattctaacctacaagaagctgatgaaacatcttatgaacattctccccaaaatgacagagaaaatttggaaggcaatccagctgtacagattgatgggcaagaatctgcttctctagttgaactatggcaggaagaggatcaagaaactgcagaagcagactggcaggaagctggcgttgagtataatgagtccatggatggtaatgaagaagcctctgagaggcaccatgaagatggaggcttgcgcgggactgcacaggattggatggaaaggtcttacaatcaagaacctg

SEQ ID NO: 4136 - DNA, 399 bp, Gossypium hirsutum
  Clone ID: LIB3083-088-Q1-L1-A6
ctttgcttctttactaactaaaaaggaaaaacattctttgtttaacgcttaagattcctttaacaacaatggctgcctcaatgtctactctaatggttgttctcgtcgctgtatgcgctctcatgggttccgccattgccgccgacgctccggctccgagccccacctctggtgccggctctatctctccttcatttgtctctgtttccgtcgccgccgccgatgtggctctgcttttcggatctagacttcggatctgaatgatgctatctctggtgttcagatgatgctctgtttttcttttatatatgtattcctttctttttgatttgatttcgaatctggcttggaattttagtagctgtggtagtggatctagggagtgattatattatatat

SEQ ID NO: 4137 - DNA, 352 bp, Gossypium hirsutum
  Clone ID: LIB3083-088-Q1-L1-A8
ggctattgctttaatcattaaagagaacatgctgggacagtcttgctaatgaatggtgggttgaaactttaactaatgaaactggtaaacattttaacgtacaagacgctgtttcaacatcttatggtcattcttcccaaagtgacagataaaattcggatggctatccaacctgacagatcgatgggcaataatctgcctctatattttaactatggctgggagaggatcaagtaactgcataatcccactgccaagactctggctgttagtataatgagtccatggatggttatgaagaagcctctgagaggcactctgatgatggaggcttgagcaggactgcacatga

SEQ ID NO: 4138 - DNA, 338 bp, Gossypium hirsutum
  Clone ID: LIB3083-088-Q1-L1-A9
aaaaatatgttttactaaagcctgatatatatatataaactatttagataaaatacatatacatttttatcaaagttggaatcccatacccaagcaggaaatcaacattccacattcaatcaatggagttcctggcatttcacaaaagctaaaccctcttaaaactttaagaaatgaagacatttgagttttcaaccgagttgcttccgggtttacctgaagaacttggtcttgagtgcttatctcggctaccctacacagctcacagactcgccttccgagtttgtcatcgatggcgggaattgcttcaaagcctagatttttattaccaccgaaaa

SEQ ID NO: 4139 - DNA, 251 bp, Gossypium hirsutum
  Clone ID: LIB3083-088-Q1-L1-B12
ctaccatcttctatgctagggttggaagcggtgacaggagcgttagatgattttggctttgaggattatctgaatgatcctcgagattcggagactgttcggccattggacttgcaccacagcatggaagttcgtctcggcctctccaagggaccagtctgtcctagttttatgtgagattttcattgactacttcagtgttgtcccatgaaggaagtcacttgctgactttttattttcccttaatgaat

SEQ ID NO: 4140 - DNA, 329 bp, Gossypium hirsutum
  unsure (1)..(329): unsure at all n locations; Clone ID: LIB3083-088-Q1-L1-B2
attgtttcaacatgaaggtttgtaataaaaatttgtttctgtcagggttgctttgcattgctgttgcaggagttttgggtcaagctcctacttatcctgctacgtgtacgccggcgccacccacaccaccgggttctactcctcctccgacgactcaagcaccgtctacaccaaccgccactccggcactggtttatactcctcctgccacttgatgaccgcccccagagacagcttgtgcacccccagtttcaactcctgcacccagttctactcctcctgcaactccaccacctgcttntgctactcctgcaactccacctgcagct

SEQ ID NO: 4141 - DNA, 372 bp, Gossypium hirsutum
  Clone ID: LIB3083-088-Q1-L1-B4
gaaaaacaccatctttcttgtcaattctgcaacctttggagtcacttaagaagaaatgggggaaaagagtttaatcgccaacgatgtcaccgcattgatcggttacacgccactggtatatctcaacaatgttgtacatggatgtgtggctaatattgctgccaagaaacacgcaatggaaccctgctccactgtcaaggacaggatcggatatagtatgattgcagatgcagatgagaaggctctcatcgtaccatgcgagagtgtgctgatccagccaactagtggcaataccactatagggtatgcattcatggcagctgctgatgctacagactcataattactgtgccttcttcaatgagtttagaa

SEQ ID NO: 4142 - DNA, 385 bp, Gossypium hirsutum
  Clone ID: LIB3083-088-Q1-L1-B6
cggaaagcggaggagaaagcagcagtgatcagagctatggtggatatcagatcaggggtagtagatgggttacaaaggactaaaccttaaatgaaaaattgtggttacatgaacacaagacaatgctggctggtgtgattgctttggcagatatgctgctgaacattatctctgcatgaggcggctgaagatttgtttcaagtttcttgctgtcaatattctcatcaatggggtagttgtttattcagggcatggccattgcataaaatgaatcaagtattgctttttttgtttgggagagatgtccacgtggcaagtttttttccggcctaaggtattccggcggaatcaaagcttgactaatgtctataaatagcattttgta

SEQ ID NO: 4143 - DNA, 208 bp, Gossypium hirsutum
  Clone ID: LIB3083-088-Q1-L1-B8
cttacaaaatcacaaacaccttggcggagggggatattaaaacgggggaaagagattaattcccaacgatttcaccttattgatcgaattcacgccacttgtacactctaacaatctttttcattgaactgtctattaaattatctccatgaacaacacaatggcactctgccacagtaaataagacaggattccatttaattatgat

SEQ ID NO: 4144 - DNA, 350 bp, Gossypium hirsutum
  Clone ID: LIB3083-088-Q1-L1-B9
caaaaactctctgcatctggaccttctgaggatggaaatgttaggaaaaatgtgcagcgtcaacttgctacttcccttcagaacctatcaatggagctcccgaagaagcaatcaacttatttgaagcgcctcaggcagcaaacagagggccaggatggagttgatctacagatgaatataaatggaaataggtcttatgcagaaaatgatgacttggatgatatgatatttagtgagcatcagatggcaaagttaaaacaaaatgacgcactcacagttgagagggaaagggagattcaacatgttgcggagtcccgaaatgagcttgctcagattatgaaagatttgtc

SEQ ID NO: 4145 - DNA, 370 bp, Gossypium hirsutum
  unsure (1)..(370): unsure at all n locations; Clone ID: LIB3083-088-Q1-L1-C11
tacagtgcttatacgaggctgccggcgagctaggcatgttaaagagatcatcaaatggggtactgattatcttctgaagaccttcaacaatactgctgataccattgacaggattgcagcgcaggtagggataggagatacatctggaggagtttcagccccaaatgatcattattgctggatgcgccctgaggacattgattacccccgtcctgtatatgaatgtcatagttgctccgatcttgctgctgaaatggctgctgctttggcttcggcttccatcgttttcaaagacaacaaagcatactctcaaaagcttgtccatggtgcccgaacactctntaagtttgctagggatcaaaagagcaga

SEQ ID NO: 4146 - DNA, 300 bp, Gossypium hirsutum
  Clone ID: LIB3083-088-Q1-L1-C12
ctccatggttcatctactcttttttgggtgtgggcattgtgctgtgctgcattagtctcattggttgcattgcagctgaatctattaatggctgttgcctttgtttttatacactcatcaaaattgttctcattttaatagaagcttctttggtggcatttattgcaattgatcgtcattgggagaaggacattccgtttgacccaactggagaacttgacagtcttcgctccttcatagaagacaatatcgttatatgtaaatggggttggccctcaatgtggtcataaatacaaggta

SEQ ID NO: 4147 - DNA, 401 bp, Gossypium hirsutum
  Clone ID: LIB3083-088-Q1-L1-C2
ctttgcttctttactaactaaaaaggaaaaacattctttgtttaacgcttaagattcctttaacaacaatggctgcctcaatgtctactctaatggttgttctcgtcgctgtatgcgctctcatgggttccgccattgccgccgacgctccggctccgagccccacctctggtgccggctctatctctccttcatttgtctctgtttccgtcgccgccgccgctgtggctctgcttttcggatctagacttcggatctgaatgatgctatctctggtgttcagatgatgctctgtttttcttttatatatgtatttttttctttttgatttgattttgaatttggtttgggattttagtagctcgtgtagtggatctagggagtgattatattatatatat

SEQ ID NO: 4148 - DNA, 365 bp, Gossypium hirsutum
  Clone ID: LIB3083-088-Q1-L1-C4
ctgacccgaggcacggtcgttacctcacagcatcagccatgttccgaggcaagatgagcaccaaagaagtggatgaacaaatgatcaatgtccaaaacaagaactcttcctacttcgtcgaatggatcccaaacaacgtgaaatccagtgtctgcgacatcccacctagagggctatcaatggcatcaaccttcgtaggaaactcgacctccatccaggaaatgttcaggcgagttagcgaacaatttaccgctatgttcaggaggaaagctttcttgcattggtacaccggtgaaggtatggacgagatggagttcaccgaggctgagagcaacatgaacgatctcgtgtccgagtatcaacaa

SEQ ID NO: 4149 - DNA, 399 bp, Gossypium hirsutum
  Clone ID: LIB3083-088-Q1-L1-C6
ggtcgaagagctgaaagccggatttaaaaattatggttcacagcttgcagagcctgaagtgcagatgctcattgaagctgttgatgctaatgggaagggaacattggactatggggaatttcttgctgtttctctccatctgcaaagaatggccaatgatgagcatcttcggaaggccttttcttactttgataaagatggcaatggttttattgagcccgatgagcttcgggatgcattgatggaggatggagcagatgattgtacaaatgttgcaaatgacatcttccaagaagtggacactgacaaggatgggcgcatcagctatgatgaatttgcagccatgatgaaaactggtacggattggagaaaggcatctcgacattactcgagagggag

SEQ ID NO: 4150 - DNA, 382 bp, Gossypium hirsutum
  Clone ID: LIB3083-088-Q1-L1-C8
ctggaacagacacgagcggagcaaatcaaatgtggaccgtgcaaaagatgatgggaagcttagccatgggatgggctctgctcaatctgatggtttaaaacaaccgtgtgcctcacatttgatgccatagctctgtaatgtttcattcaattgcttatttcggccttgtttttctcgtattttatgggctgatgtctcatatgggacttttctactatacgtatatgagagcctacattactttaccattatattgtattctttgagacattattattatttttttaccttttgaggacactcttttttgtattagaaggaattcattgtttattttgtttggaatatgttggttgatttattcgattcatatatattatat

SEQ ID NO: 4151 - DNA, 230 bp, Gossypium hirsutum
  Clone ID: LIB3083-088-Q1-L1-D10
agttgttgttcattctcagcaattgcagcagtggaaggcgtaaacaaaatcgtgtccggtgaactaatctctctatcggaacaagaactagtcgattgtgaccgatcctacgatgccggttgcaatggtggcctaatggactatgccttccaattcattatcgacaatggtggcattgacactgaaaaggattatccttaccttggcttcaataaccaatgtgatccaac

SEQ ID NO: 4152 - DNA, 369 bp, Gossypium hirsutum
  Clone ID: LIB3083-088-Q1-L1-D11
gaaagatcaatgttgatctctcaaacaagctttgagaaaacttttggcttatcttcagtcttcattgaatctacactaatggagaatggaggagtggctgaatctgccaacccttccacactaatcaaggaagcaattcatgtcatcggctgtggctatgaggagaagactgcatgggggaaagagattggatggatatatggttcagtcactgaggatatcttaaccggcttcaaaatgcactgccgaggatggagatcgatttactgcatgcccttaaggccagcattcaaaggatctgcacccatcaatctgtctgatcgttgcaccaggttcttcgatgggctcttggatctgttgaaatttcct

SEQ ID NO: 4153 - DNA, 369 bp, Gossypium hirsutum
  Clone ID: LIB3083-088-Q1-L1-D12
ccggttccttttccagtaaactgtgccacaaacagtagagactggtgtgagggcactgcttatcaagcccttaatgccatggaagctaaaagatatatgtgggttcgtatgaaccacgtgatatacgattactgcaccgacaagttccgttacccggttaccccaccggagtgcatgtccattatctgaaaatccaaacccaagtgacgtttcttgtcctattttacgtacatatgtacctccctttatacaaataatatagcccatgcaaaaattggggttttaatctgtaaaggggaaaaattaagtgtgcatttgcattataaatttgtgaaagtaaaaaagtcaaattccctattttggtcttgt

SEQ ID NO: 4154 - DNA, 322 bp, Gossypium hirsutum
  Clone ID: LIB3083-088-Q1-L1-D2
attgttttggccttgacggtggttttcgccgcgacggtggttacggcggctgacgagagtgggttagcgaatgagtgcagcaaagatttccagagcgtgatgacttgcttaagctttgctcaaggaaaagcagcgtcgccgtcgaaggagtgttgtaattcagtggcggggattaaagagaataaacccaaatgtttgtgttatattttgcaacaaacacaaacttccggtgctcaaaatctcaaaagcttaggtgttcaagaagataagctgtttcagttaccgtcggcttgtcaattgaagaacgctagcgtcagtgatt

SEQ ID NO: 4155 - DNA, 316 bp, Gossypium hirsutum
  Clone ID: LIB3083-088-Q1-L1-D4
tcaacattgatctttcatacaagctttgagaaaacttttggcttatcttcagtcttcattgaatctacactaatggagaatggaggagtggctgaatctgccaacccttccacactaatcaaggaagcaattcatgtcatcggctgtggctatgaggagaagactgcatgggggaaagagattggatggatatatggttcagtcactgaggatatcttaaccggcttcaaaatgcactgccgaggatggagatcgatttactgcatgcccttaaggccagcattcaaaggatctgcacccatcaatctgtctgatc

SEQ ID NO: 4156 - DNA, 387 bp, Gossypium hirsutum
  Clone ID: LIB3083-088-Q1-L1-D6
tcgagttttttttttttttttttaatctaaacctactgatttcggcctctaatcccaatattttggatttctttttaaagaagaaggatacaaattgaaaatagtaggaagaggcgacagatgttgggaattctctcatgccgctcctctcactaaatctgtctcctaatttgcagatttcttcaaccaatcagctgccttttcgacctccttgttccaattggttgtggcagtgagaacaacaagagttgctgtttgtaggaggacaccaataatcataccccaccaaattcccggtactcctaaactagttttgaagccaagaacacatccaaatgggagaccaatattgtagtatgttgccaggtttacataagccacaattgc

SEQ ID NO: 4157 - DNA, 271 bp, Gossypium hirsutum
  Clone ID: LIB3083-088-Q1-L1-D8
ccaggccgcggttaaaaccacctgtacattctccaagaagctcaagcgagggaactcacaacacctagcattgcatcaaactataacagagggattcacaactcaaactccgagcagtaatgaaaaatttcaacgagcctgattctgaaacaaaatctatgctctagaaattgaaaacataccgatatcatatcacagtgtatcaagaacaaattgctcaaacatctacacagtctgcgtattcaacataagaaatgtgatcacagcttac

SEQ ID NO: 4158 - DNA, 359 bp, Gossypium hirsutum
  Clone ID: LIB3083-088-Q1-L1-D9
gattatttttttaagaaagcagagaaaaagctaaggcgggggggcttgtttagttctaaatacaaagacgccgccgatttatttgataaagctgctaattgcttcaagcttgccaaatcatgggacaaagctggatcaacttatgtaaagttggcgaattgccatttgaaatcagacagcaagcatgaaacagctcaagcttatgttgatgctgctcattgttataagaaaacagctacaaaggaggctatatcttgcttgcagcaagcagtgaacttgttttgtgatattggaaggctaagcatggctgcaaggcattataaggaaattgctgaattataccagtctgaacagaacat

SEQ ID NO: 4159 - DNA, 264 bp, Gossypium hirsutum
  unsure (1)..(264): unsure at all n locations; Clone ID: LIB3083-088-Q1-L1-E10
caacaatggctccctcaatgtctactctaatggttgttctcgtcgctgtatgcgctctcatgggttccgccattgccgccgacgctccggctccgagccccacctctggtgccagctctatctcgccgccatttgtctctgtttccgtcgccgctgccgctatggctctgcttttcggatctagacttcggatctgaatgatgctatctctggtgttcagatgatgnctctgtttttctttatatatgnattttttttcttttt

SEQ ID NO: 4160 - DNA, 320 bp, Gossypium hirsutum
  Clone ID: LIB3083-088-Q1-L1-E2
gcaactagaggaacacgttagagtattagaggaagctaaggcgagaaactcagagctccagtcattgcatgaaactttaacaagggattcagaacttaaactccgagaagtaatggaaaatttcaacagcaaggattctgaaacaaaatctctgttcgagaaattgaaaacatttgaagatcagataaaggtgtatgaagaacaagttgctcaagcagctggacagtctgcgtcttcaaaagaagaaatggatcagagcttacagaaattggcttctctagaaagcacaaatgaacaactcaaaagcaagatatcggagt

SEQ ID NO: 4161 - DNA, 399 bp, Gossypium hirsutum
  Clone ID: LIB3083-088-Q1-L1-E4
gtcagtagtttctctgcctggtggtgatgtccctgctgacactgagtatgtccaagcagccgctttggtgagtcattcggctctttattcctcagagcttgtgaagcaacatccggttggaccagctatggttcatccagctgaaacggcaaagggaccaagttggactgatatctttgaacccggagtcaagcatgctttatttgtagggattggaattcaaatacttcagcagttctctggtataaacggcgttctatactacactccccaaattcttgagcaggcaggagtcggggttcttctttctaacttgggcctcagttcatcttctgcatcgctgcttatcagtggcattacaaccttgttgatgcttccaagtatagctgtcgccatgcg

SEQ ID NO: 4162 - DNA, 341 bp, Gossypium hirsutum
  Clone ID: LIB3083-088-Q1-L1-E6
caggcaactagattaactcgttagagtattagaggaagctaaggcgagagactcacagctccagtcattgcatgaaactttaacaagggattcagaacttaaactccgagaagtaatggaaaatttcaacagcaaggattctgaaacaaaatctctgttcgagaaattgaaaacatttgaagatcacataaaggtgtatgaagaacaagttgctcaagcagctggacagtctgcgtcttcaaaagaagaaatggatcagagcttacataaattggcttctctataaagcacaaatgaacaactcaaaagcaagatatcggagttcgaaaataaaactcttc

SEQ ID NO: 4163 - DNA, 326 bp, Gossypium hirsutum
  Clone ID: LIB3083-088-Q1-L1-E8
gtatctttgaagaagtttgtgattttattgatcacgttgggcaaacaggtggaagagtcttagttcattgctttgaagggaaaagtcggagtgccacagtagtgatcgcatacctgatgctacgaaagaacttaactttattagaagcatggaactccctcaagcgagctcatcgtcgggcccaaccaaatgatgggtttgcaaggatactattggatcttgatcggaaactgcatggaaaggtttcaatggaatggcatcagcgaaaaccaatgatgaaagtatgtccaatttgcgggaagaatgctggtttgagcagcagctca

SEQ ID NO: 4164 - DNA, 367 bp, Gossypium hirsutum
  Clone ID: LIB3083-088-Q1-L1-E9
ttgttttggctggagctgaatatggaagtggtagctcccgagattgggctgcgaaaggtccaatgctattgggagtaaaagcagtaattgccaaaagttttgagagaatccatcgaagtaatttggtaggaatgggcatcattccactttgttttaagtctggggaggacgccgacacactaggtttaaccggtcatgagcgttataccatagatctcccaagcaaaataaccgatataagacccggtcaagatgtgactgtcacgacggataatgggaagtctttcacctgcactgtccgcttcgacactgaggttgaattggcctacttcaacaatggcggcatacttccatatgttattagaaa

SEQ ID NO: 4165 - DNA, 275 bp, Gossypium hirsutum
  Clone ID: LIB3083-088-Q1-L1-F10
gtagaaggtggcgaaccggaagaggaagacgacgatgacgacgacgaggatgaggatgatgaaggcgaagatgacgacgacgacgacgacgacgacgacgaaggagaggaggatgacgatgtgcaggttcttcactcatccggtcctcctgtcctgatagctgatgacgacgagggcgaggatgttaaagacgatgatgacgacgatgaaggcgaaggcgacggcgacggcgatgacgatgacgacgacgacgacgatgatgacagtgatgacga

SEQ ID NO: 4166 - DNA, 373 bp, Gossypium hirsutum
  Clone ID: LIB3083-088-Q1-L1-F11
cttctcttcatattggttttttcccttagcactccacgagagagatccgaggagttggggaaaaccctcacacaaattctctctctaaatcttaaccgagaaggtctccaaaaaagactaccctttttgcccatttactctccttattcaacaaattcggcatcacatcccccaaaatagtcgcttttttatctcttgctctcttcatctgcttcaagtcatggctggtgtagcacccgaaggatcccaattcgatgctcgtcaatttgatcagaaaatgagtgatttgctccaaacggatggagatgatgttttcacttcttatgatgaagtttatgacagttttgatgcaatgggacttaaaagaaccttt

SEQ ID NO: 4167 - DNA, 334 bp, Gossypium hirsutum
  Clone ID: LIB3083-088-Q1-L1-F12
aaccacgcctaataaccgctcggatttttctcagacgtgagaaaaatggggctgtctttcaccaagctattcagccggctatttgccaaaaaggagatgcgcatactgatggttgggcttgatgctgctggtaaaaccaccattctttacaagctgaagttgggagagattgtcactactattcccaccatcggtttcaatgttgagaccgttgaatacaagaacatcagcttcactgtttgggatgttggcggccaggacaagatccgaccattgtggagacactatttccaaaacacgcaaggacttattttcgtggttgatagcaatgatc

SEQ ID NO: 4168 - DNA, 303 bp, Gossypium hirsutum
  Clone ID: LIB3083-088-Q1-L1-F2
caaatgccccgtctccttttcctaaaaatcttgtggcaaccgggcagccaatccagctaatcctcctcaatggaaaaattttgaagggccaactgcctttaaagttccttttcattcctttctttaacctcatcaagccttaaaaatatttcccagccaccagcccggccgcagcaaaaccaccccgggattttttttaccagttattcttacttaacaccaagtccacaggcttcttataacaccccattcccctcttcttcgatggtgggtggcttttccaccaccttcattttcaaaaat

SEQ ID NO: 4169 - DNA, 325 bp, Gossypium hirsutum
  Clone ID: LIB3083-088-Q1-L1-F4
aaacagcagagaaataaacggggggactccctcaagaaaaccacaacagatttcagatcctccttccaagctctgcagaaagtactgtgagcagaaagtggaaagcaacgatggggctgacatttacaaagctctttagccggctttttgccaagaaagagatgcgtattttaatggtgggtcttgatgcagctggtaaaaccaccattttgtacaagctcaagctcggcgaaatcgtcaccacaatccccaccattggattcaatgttgagactgtggaatacaagaacatcagcttcactgtttgggatgttggtggtcaaga

SEQ ID NO: 4170 - DNA, 366 bp, Gossypium hirsutum
  Clone ID: LIB3083-088-Q1-L1-F8
ggcagcaaaacttcatgtggttatggagtggcaactgggggaccattggcttggggtctatgctacaacaaggaaatgagtcctagcaaattgtattgtgatgattactacaaatacacctacccttgcactcctggagtttcttaccatggccgtggtgccttgcctatctattggaactacaactatggagaaacaggcgacgcattgaaggtggacttattgaaccaccctgaatacatagaaaacaatgcaaccttagctttccaggcagcactctggagatggatgacaccggtgaagaaacaccaaccgtcggcccacgacgtgtttgtcggcagcttgaaaccgaccaagaacgacacg

SEQ ID NO: 4171 - DNA, 363 bp, Gossypium hirsutum
  Clone ID: LIB3083-088-Q1-L1-F9
caaaggtcgggataagggttgtttgtgaagggattaaagcgtccggcccgaaggcaaaatcagcaaccacagcttcaacttctaatgcaaaatgtaaggttgatttgagactcaagatctggaaatggactttctgatcgacgagaatattttgagaaagagaaacaatggagaagaaaaaggtttgttgtttattttattttattacttttgttatggttgtttttttttttaaagttgtgtcgttatttttttagggaggtaatatgtttgcaaattgggtgatttgattgtatagggtatagaaaaatgtaatgtatacgttattttcttttctttttcaatatatattttggatttttc

SEQ ID NO: 4172 - DNA, 373 bp, Gossypium hirsutum
  Clone ID: LIB3083-088-Q1-L1-G11
gcacgggtttttttttttttttttttttttttttttaccaaaaaaattagcattatacgtattaataaaaaattttagtacatcaagctctttttcttttatttatttatttttcagcccccttcattaatattcaagtttttgtaagactccatgggcttgctaattagcagtaggcacaatggcagccttattgaacctacggttaatgaatgaagcaagtatataacatgagcaaatgaatgaataataaaagctatacctgagcctggccatcatgttattcaactatcactattggcttcaaatacatatgatcaaataatgtaatagccatgggaaatcattttttatctaaaaattcccccccccc

SEQ ID NO: 4173 - DNA, 366 bp, Gossypium hirsutum
  Clone ID: LIB3083-088-Q1-L1-G2
aaatgtcacatattacaaatatttcaacaccattataaaacgtcgagtcgccattgtagtctgcaacaatctttcctaaagcattctaacccaaattaaactttgcacagagtagttctgcatcatcgatatacatatatatactatgcaatgcacctaaaacccgaaaacaaaaaaagaacttgcaaaagttcacaaacgttcctaaatgcagcaacaaaaccggcataccacacatttgctatccaccgataatatatttattttacagaccagctcagtgcaaccaactcaactcttcttatttcttgcatctgctttccaatctcttcggccgagcttaggtttcctagtttcgtagttctg

SEQ ID NO: 4174 - DNA, 388 bp, Gossypium hirsutum
  Clone ID: LIB3083-088-Q1-L1-G4
aaaaaaggcaataacagtcttaagcatgtatctataaatttaagcaaccaaaacaaacatccaaaaattcagaaactcagtcacagctaatttaaatccatataataaaaccttaattcaaaacaagcataaccatatcatttcactaagaacaacatcaaaacgaaccatgacagttcttcaacggtaactcttctggaaccttgccctggcacctcttccaccaaacttcttaggctcgcacctcctgggatcagcgaccagcaaagtcctatcgtacccgaccaaaatatccttaatctccttcttgctctgctcatcaacgtacttctgggtaaaagcgacaagggctttagcgatgctttgacggatagcgtagatctgagaa

SEQ ID NO: 4175 - DNA, 399 bp, Gossypium hirsutum
  unsure (1)..(399): unsure at all n locations; Clone ID: LIB3083-088-Q1-L1-G6
tcttgagcaaagttacagtcgtcctcatcgaacaactatggcagccatcaaagtccacggaagccctctgtccactgctacacaaagggttcttgcatgcctttacgagaaaggcactgattttcagtttgttcccataaacatggctgctggtgaacataaatccgaaaactacctttccctcaatccattcggtcaagttccagcttttgaagacggggacttgaagctcttcgagtcaagagcagtcacccattacattgctcatgaatacagcgacaaggggacccaactcttaattcctggctctaacaaggatatggctgtcttacaattatggaaggaagtggaagcccaccagttcgattctccatgttcaaaaatagcctgngaggcgtt

SEQ ID NO: 4176 - DNA, 401 bp, Gossypium hirsutum
  Clone ID: LIB3083-088-Q1-L1-G7
aggacataattcccctcttggagaagactactcagttaagagctccattgcttataattgctgaggatgttaccggagaggctcttgctacacttgtagtgaacaaactccgaggtatccttaatgttgcagccattaaagctccgagtttcggcgaaagaagaaaagctgtccttcaagatattgccattcttactggtgccgagttccaagcaaatgatctgggtttgttaatcgagaacacctctgttgagcagcttggtatagccaggaaagttatcatcaccaaggattcaacccaaataattgctgatgccgcttcgaaggatgaaatacaagctagggtgcaacaattaaagaaagaactagccgagacagattctgtttacgacacagaaaaa

SEQ ID NO: 4177 - DNA, 235 bp, Gossypium hirsutum
  Clone ID: LIB3083-088-Q1-L1-G8
actttatcttttatacattggcgatcactccacaggtatgttttctattaatggtcagaaaccaactttccacactgcagcacactacttccttctaaaccaaaaccatatcatcactccctattttaattcacacttaaccctctcattttattttaatcaacaccacaactaaccattccatttctcttactgtaacttttctcgaacctatcccatgcacgttttccatcaa

SEQ ID NO: 4178 - DNA, 356 bp, Gossypium hirsutum
  Clone ID: LIB3083-088-Q1-L1-G9
ctccggaaggggctgattggttaagagcaaatagaggttcactctcggttaatttggatatgggggaacatttagatgtgactgccaatgatggtgtagtacaagataatggagatggaattcctcctgttgtggctggtcaaattggagctccaggcattgcttcaagcagcaccgctcgttcaacatcctttaagctttcagggcttttgggtgggaggagtttcatggcttgcactttgaggaggttggcaagtagtaacggcagttcccggagttaacttggatggacgacatgaagttgcaatgaaaatagtgggaaaaaacactctgggtcttgaactggttacattata

SEQ ID NO: 4179 - DNA, 402 bp, Gossypium hirsutum
  Clone ID: LIB3083-088-Q1-L1-H1
cttccattgttcttagatcgcgaacaatttcaaataatttcagttcaaagagtatttctcaaaggggtttatgttcaggagtggtttcttcttcttcggatccttctaaaggaacaataccttcttcacaatccattctctccgatcagtcgacacctcctcctccggcgccgaaagttgccccacaggtttcgggagggaaaatttggagctttgtcaagtacggactcattgcaggtgttactggaactactggctatgctggttatctctcttataagtgttcatgtgaggaagtagatcataaagcaaaggcattgcgggcggcagcgagttatgctcctagtgaagatgcttctgcaattgataaatatggaggcttgctttactctgctgcaatga

SEQ ID NO: 4180 - DNA, 266 bp, Gossypium hirsutum
  Clone ID: LIB3083-088-Q1-L1-H10
tgttatgccaataccccatgccttagctacacaccgttttacaggaaccaagtggcttcaaacccagttttcaaagagttctactacgtaactctacgtaaaattctggtgggcgataagcacgtcaaagttccgtacagttatttggtcccaggatcagacggtaacggtggcaccatagtggactcgggatcaacattcacttttatggagagaccaatgttcgaggtagtctcgaaagagttcgagaaacaaatgggaaatta

SEQ ID NO: 4181 - DNA, 363 bp, Gossypium hirsutum
  Clone ID: LIB3083-088-Q1-L1-H11
gattcagtagactggagagatcatggagctgttagtccggtcaaggatcaaggatcttgtggaagttgttgggcattctcaacaattgcaacagtggaaggcataaacaaaatcgtgtccggtgaactagtctctctatcggaacaagaactagtcgactgtgaccgatcctatgatgccggttgcaatggtggcctaatggactatgccttccaattcattatggacaatggtggcattgacactgaaaaggattatccttaccttggcttcaataaccaatgtgatccaacaaaaaaaaacgctaaggttgttagcattgatgggtatgaagatgttccaaataacgagaatgctttaaaa

SEQ ID NO: 4182 - DNA, 279 bp, Gossypium hirsutum
  Clone ID: LIB3083-088-Q1-L1-H12
gagctcagacctttcttcagcattctatggattctacctgcgggggtgttgggatcatccaagctgaacccaaaggtcaatacatcagtctcgaacagcaacagtacgagatccttaacggacttatcattcttatcggcttcagctctcttccttagctgttgcattattccattatcgggattaatctccattgttttgttgctggacatgtaagaactcatgctattatctctcagagcttgcgctttcatgatcctttccatgttagcagtccat

SEQ ID NO: 4183 - DNA, 403 bp, Gossypium hirsutum
  Clone ID: LIB3083-088-Q1-L1-H2
attacaagaacaagtaaattctatagcagccctaactttcaacacatttgggacactgcaacgagatgctccacccgttaggctctcccctaattacccagaacccccttccaatcccaccgaggactctgccaatttcgccgatcaacctaagctcatgagtgctgctcttgttaaggctgctaaacagttcgatgcattggttgctgcacttccaccttcagaaggcggtgaagaagctcaacttagaaggattgctgaactccaagctgaaaatgatgctgtaggccaagaacttcagaaacaactggaggctgctgagaaggaactgaaacaggttcaggagttattcagtcaagcagcagataattgtctcaacctgaagaaaccagattgaattcat

SEQ ID NO: 4184 - DNA, 372 bp, Gossypium hirsutum
  Clone ID: LIB3083-088-Q1-L1-H3
ttcagttccatatactcccgacgttaatgtcgacgtcgcagtttcaaaccgcgagtaaccctttgagaacccaagctggggatgttaaaggtgggaagtttccgcttaatgtgacggcggaggggaaccaagtgaatgtgacgaccggagtggtgaatgcgacggtggagaatagtgtgttttctgaccgaaggatcgcggtttatcaggtggataaggtgcttttgccgttggagatttttgggacagcgccggagccggctccggcgccggttgttccggagaatggtggtttggtttcgagtcctaaaacagcggttaagggtgctgatgcagctggtgcggtgagcttgaaatttcatgctttggcaa

SEQ ID NO: 4185 - DNA, 375 bp, Gossypium hirsutum
  Clone ID: LIB3083-088-Q1-L1-H4
aaacaagagtccacatcacatgttacgatcaaatgatggaatagtggaggacaaagaaatgagtccttcaactcagacagtgcatatagatgcccccgcaaaatgtaaaacattgaatatgcacaacactccatgaaggccagagctaaaacaagcacatcatgattatcaccagcactatgattagaccaccacaaacgccaaaattgaatgctgtgcatatattgtgtcgagctaaaatcgcaatcagaggttgcagatgtgaccctaaataattgtttaccttcttactacactttctggaggctactactatttaaaacgttgtatatgcagagcggacacgcagcattgatgtgtaaccacttatctaca

SEQ ID NO: 4186 - DNA, 358 bp, Gossypium hirsutum
  Clone ID: LIB3083-088-Q1-L1-H5
tcaagaaaggttgtcatccgtaatattaattacaggtcttcgaagaggaatggggataagggcagtgattccgaagataattctgatgaggatgagttcattgatggagattctctcaaacagcaagtagaggaggctgttggatcactagggaaacggcacaagtctacctcacaccatcataagaaacacaatggaagcaagcatcgaaacagtgtgtcctacgatgaagatgaactggtaactaaaaatccggagggagaaaaacgaagcaatccctgggatactttccaaaaccttctcttgcaagacaaggatttggattcttctgaagtagataaacagcctgcaagattgc

SEQ ID NO: 4187 - DNA, 402 bp, Gossypium hirsutum
  Clone ID: LIB3083-088-Q1-L1-H6
caacacacttgctagtattcctacttggagtggtgactcggaccactcccacatttggtacctatgagtcaccaaattatgggaaaccccctactcctgtattcaagcctcccaaggtgaaaccaccaccatatgaacctaagccaccagtgtatgaaccaccaaaaaaggagaagcctgaacctaagccaccggtttatgcacctccaaagaaagagaagcatggacccaaaccaccaatgtatgaacctccaaagaaggagaagcctgagccaaagccaccagtttatacacctccaaagaaagaggagcctaaacctaaaccaccagtatatgaacctccaaagaaggagaaacctgagccaaaaccaccgatttatacacctccaaagaaagagaaac

SEQ ID NO: 4188 - DNA, 393 bp, Gossypium hirsutum
  unsure (1)..(393): unsure at all n locations; Clone ID: LIB3083-088-Q1-L1-H7
caaaacatgaatgcattattcctttcattggaattgcttgttgctcacaccacttgcttctcctccttactcatctcagcatggcctcaaaacccttcatcgcattagccaccactgttttcttcttctccctcatcgccgtcaatcattttgggaaacctttccagggaaaacttggggaaatggaagttgtcccaattacggatgccgtaggacctgaaagtgtagcatttcacccacttggagacggtccctacgtcggaatatccgacggtcggattatcaagtggcaaccaaatgagcatcggtggatcagttttggcatcacttctcctaacagagaaggatgtgaagggaaacacgatcatgagacangggaacacatatgtggac

SEQ ID NO: 4189 - DNA, 165 bp, Gossypium hirsutum
  Clone ID: LIB3083-088-Q1-L1-H8
tagctaatacattttttcattattcctttcacattacttgttttgttgctattactagtatggtgtactcctaactcatctcttcttcaactcaaaaccttccattatattccccaccactgttttatacttttaatttatccacgacactaattttggcaaacc

SEQ ID NO: 4190 - DNA, 309 bp, Gossypium hirsutum
  Clone ID: LIB3083-088-Q1-L1-H9
catcgaaccatcattaaaacgacaactgcttatctccaccgttctcatgactgctgggattgctgtcgttagcttctttgcattgccatcagaattcactctcttcaattttggaactgaaaaggaagtgaagaattggcacttattcttctgtgttgctatcggattgtgggctggactcattatcggttatactacagaatattatactagcaatgcttacagtccggtgcaggatgtaacagatgcttgcaggacaggagctgcaacaaatgtgattttcgggttgctctgggataccaaatcgtc

SEQ ID NO: 4191 - DNA, 306 bp, Gossypium hirsutum
  Clone ID: LIB3083-089-Q1-L1-A10
aaacggagccaaaacaaaccgttgggggtgttttttatttatttaatttccactacaagggggaaagtgtttcaggccccccccttaactccaaaattttaaccgccggttaaaacaaaccttctaaccccacaaaatccccggtttttttactatggaaactgtttttggtttctgagtcaaccccgattccaaattcaaaccgttcgtaaatcggaatttgaaactttttccccattatttccccaaattcaacgccacctgacccttcacctttatccacataaaaggcggtcttaaattttt

SEQ ID NO: 4192 - DNA, 373 bp, Gossypium hirsutum
  Clone ID: LIB3083-089-Q1-L1-A11
gcggctttcacttcccttctctcacctcttacagaagcgagaagtcagtttagtagcaatggcgtatgctgcgatgaagcctaccaagccgggtttggaggagccccaagagcagattcacaagatccggatcactctctcctctaagaatgtgaaaaacctagaaaaagtttgtgctgatttggttcgcggtgcaaaggataagagactgagggttaagggaccagtaagaatgcccaccaaggttcttcacatcacgaccaggaagtctccctgtggtgaaggaacaaacacatgggatcggtttgagctccgtgttcacaagcgagttattgacctattcagctcccctgacgtggtgaagcagatcaca

SEQ ID NO: 4193 - DNA, 391 bp, Gossypium hirsutum
  Clone ID: LIB3083-089-Q1-L1-B10
gagctttccgttctttgtgatgctgaagttgctcggatgatcttctccaatagaggaaagttgtacgaattttgcagcagctcaagcatgatcaaaacattggagaggtaccaaaaatgcaactatggagctcctgagccaaatgtgtcatcgagggaggctgctttggaattaagcagtcggcaggaatatttgaagcttaaagcacgttacgatgccttacaaaggtcccaaaggaatttactgggagaagatttgggacctttgagcagcaaggaactcgagtcacttgagaaacagcttgattcatcattgaagctaattagatcgacgcggacccaatacatgcttgatcagctcaatgatcttcaaagaaaggaacatcttctta

SEQ ID NO: 4194 - DNA, 408 bp, Gossypium hirsutum
  Clone ID: LIB3083-089-Q1-L1-B11
aagaaaaaggctaagggagataaggaagctgttccagagaagaaagcacctgaaaaagaagcatctgataaagacaaagaactcagtgtcagtttactgaatatacaggttggtcttatacgtaaagcatggaaacatccatctgctgatagtttactggtagaggagatagatgtcggagaggctaaagtacgacaggttgttagtggattggccaagtattgcagtccagaagacttgacgaatcgtcgtgttgtgctgattacaaatgtaaaacctggaaagctacgagatgtgatgtcagagggactggtgctttgtgcttctaatgaagatcataccaaggtagagccattactgccccctgaaggtgctaaacctggcgagcccatttcattttcagggatt

SEQ ID NO: 4195 - DNA, 290 bp, Gossypium hirsutum
  Clone ID: LIB3083-089-Q1-L1-B12
gcaattaaattttgactttatatttatcaattatgaattatttagtaatggagtgaatatactaaatgtatcattgtaagtacccaaatttgcccgagcctaatttgcccaattctgacaaaaacaaaattaaacaaaaaccaaactaaaattaaaatgtccatttaaaacccaaagcccaatttcaaacccaacagacttacccaacttgcccaaaacttttaaaaaacctacgggcccgataggcccactacctaaactagtttcagcaaagttgaaaccctaaccct

SEQ ID NO: 4196 - DNA, 317 bp, Gossypium hirsutum
  Clone ID: LIB3083-089-Q1-L1-B8
tgggaataaagttgcggacttgagaaccaattctgagtgtttacaggcttttaaggaggatccagaggcactcaggtcatttcagaatttcatttccagtgccgatcccgacactcttgctgcaatgagtggcggtaaagttggagaggtgtcacccggcatgtttaaaactgcatcaagtatgatcagcaagatgtcacctgaagagctacaaaaaatggttcaattagcttcttcatttcaaggggaaaacccatatacaggtggatttggaactggacctgttcctccgaatgtgactcctgacatgcttaaaa

SEQ ID NO: 4197 - DNA, 331 bp, Gossypium hirsutum
  unsure (1)..(331): unsure at all n locations; Clone ID: LIB3083-089-Q1-L1-B9
ggttgggttgtgtgaacatggggtgggtatgccgctgcttccgtgttagaacgttcaaagatgatgtgtttgtggatatatttcccaataatacgagagataagtgttgctgcggtacttgattagtatcagatatgttgagttagtcgaactaattttgaaataaaaagaagaaaaagaaaaagggataaaggtgagcacttcatggaaaaagaaagaaatgtgttatggtaacaatttaagatgggtgtcaaacgctacataacgccagttttgaaacatgaacacggatacagacaattgaaaatttttatgtataaatatntaataa

SEQ ID NO: 4198 - DNA, 377 bp, Gossypium hirsutum
  Clone ID: LIB3083-089-Q1-L1-C10
aatcatccgaaccaaacatgggtcaccattcttgctgcaatcaacagaaggttaagagagggctttggtcccctgaggaagacgaaaagctcattcgatacatcaccactcatgggtatgggtgttggagtgaagtccctgagaaagctggtcttcaaagatgtggcaaaagttgtcgcttgagatggattaattatttgaggcctgatatcagaagagggagatttactcctgaggaagagaagttgattattagccttcatggggttgtagggaacagatgggctcacattgcaagtcacttgcctggaaggacggacaatgagataaagaactactggaactcatggatcaagaagaagataagaaagccttca

SEQ ID NO: 4199 - DNA, 399 bp, Gossypium hirsutum
  Clone ID: LIB3083-089-Q1-L1-C11
gtgaaattaaagatgaggaaagcaaaaatcctcccgaagtgaacaagcaactcaatgatgagaagcagtctatgatcaaagaactgaattcgtatgtagctatgaggaaaacatacatgaatacccttggtaacaagaaaattgaactctttgatatgggagctggagtcagtgaacctacagctgatgaaaatgttaaaatggcatcatcaatgtcaaaccaagagcttgttgatcatgggatgaaaacaatggatgagactgatcaggccattgaacgctcaaaaaaggttgttgaacaaacaattgaagtaggaactcaaactgctggtactctaaaggacaaactgatcaaatgggccgtattgtaaatgagctggatacaattcagttttcaat

SEQ ID NO: 4200 - DNA, 299 bp, Gossypium hirsutum
  unsure (1)..(299): unsure at all n locations; Clone ID: LIB3083-089-Q1-L1-C12
atcctccagttgtnatttttcaaatcaatgaagacccccactctcttatcaaagaacttaatccttatttatctataacttaaacatacactaatacccttattaacaaaaaaattaaactctttgatatgggatctctattcttttaacctacagcctatataaatgtttaccccacatcctctatatctaaccaatatcttttctatcactttataaaaacaataatataatactgatctttccaatcttcactctattactttgttaaacaaacaattgaagtattaactcaaact

SEQ ID NO: 4201 - DNA, 392 bp, Gossypium hirsutum
  Clone ID: LIB3083-089-Q1-L1-C2
gaaaagaaaaggaaaataaaaaaaccctttacttcccctgcccattgtttttagttttcttttggctaaagaaaattatggaaccgagtcagacggtcgaggataaatcacaaccatccgtcgccaccgtgacccgtcgtatccaacgcttgtcccttcacctgatcccacttccgcccctccaatgttcacctcagctcgacatgctgacctgcgccaaggccaataagcaggaggtcgacgtatcctccctttcaagctacatgagagggaagcatagggaaattcaagagaagatttttgatttttttaactcaaagcctgatttgcaaaccccgactgagatttcaatgaaagaacataaggagctttgtttgagacaacttttgggg

SEQ ID NO: 4202 - DNA, 363 bp, Gossypium hirsutum
  Clone ID: LIB3083-089-Q1-L1-C4
agttttctttttttttttttttgtaacaaaacacacttcacatgatataggcgaggtactattataaagaaatgtgtataccacaaagaatcattaccatggtgttcaatcgtatcgttgtccatcaaaccagaacatacaaagtcttacaaacatgagccattgtaatgccaaccgattgacatggaatataagacttacactgcaaccatgtcttccctatcatggggagacaagcacccaacttataaaccttcactacaatgggccctatacacaaggaatagagggagaatcatcatatttgactacacaaatcttcaccttcatccaagactcttatattttatccagtttcttagc

SEQ ID NO: 4203 - DNA, 396 bp, Gossypium hirsutum
  Clone ID: LIB3083-089-Q1-L1-C6
gcaatcggtaccatggagttccggctgttgttttttcgcttggcggatatgcggggaacaatttccatgactacaccgatatcattattcctctttatctaacatctcgacggtttaacggagaagtgaagtttcttatcaccaacaagaacccatggtggatcaacaagttcaagaccatactacgaaatctttcccattacgacccaatcgacattgataatgaacaacaagtccattgtttcccaaccgtgatcatcggcctaaaacgcgaccctaaagaactaaccatcgatccatcgagatcacctcattccatgaaagaatttcgacaattccttagaacaacgtactcattgaaaaaaaccaccgctgtaaaactaaccaacaacaatc

SEQ ID NO: 4204 - DNA, 399 bp, Gossypium hirsutum
  Clone ID: LIB3083-089-Q1-L1-C8
ctctagagaatgatttggctaacatgtgggtgcttgttgctaagttgaaaaaagagggagttgctacccccgagagtaatacggatgagcagcatggtaatagtattgataatgccgacaatccaaaggcaaacagcatcgagaataacagacaagtgtcagatgtgtcatcaaaaccagctattgaaatgcctaaggaagaacccctggttgttcgcctcaaggcacgaatgcaagagatgaaggaaaaagaactcaactccgttggaaatggagatgcccattcccatttatgtaaagtatgtttcgaatcaccaaatgcagcaattcttctcccttgtcggcatttttgtttatgtaaatcatgttcgcttgcttgttccgagtgtccaatttgtc

SEQ ID NO: 4205 - DNA, 405 bp, Gossypium hirsutum
  Clone ID: LIB3083-089-Q1-L1-C9
ctcaaataaacccattagcagataacagcttagttgacgcaacttggcagtcaggaacatagagagttggctagagaagcagtgagaaaatcacttgttttgctaaagaatgggcactctgccgatcagccattgcttcccttacctaagaagacatcaaaaatacttgttgctggtagtcatgcagacaatttgggttatcaatgtggtggatggactattgagtggcaagggttcagtggcaacgaccttacaaatggtacaacagtcctaaaagccatcaaaaacacagttgattcaagcacgaatgttgtgtatgaggagaatccggatcccaaattcgtcaagtccaacaacttctcctgtgccattgtggtagtaggggagcatccatatgtcgaaaca

SEQ ID NO: 4206 - DNA, 389 bp, Gossypium hirsutum
  Clone ID: LIB3083-089-Q1-L1-D10
cgacattgatgtcctggttcacggagagcctgagagaaatgatatggttgagtatttcggtgagcagttgtctggttttgctttcactgttaacgggtgggtccaatcttacggatctcgctgtgttaagccaccaatcatctatggtgatgttagccgccccaagccaatgactgttttctggtcatcaactgctcaaagcatgactcaacgcccaatgaagggaatgcttactggccctgttaccattcttaactggtcctttgtcagaaatgatcagcccagattcgagacttgctaccagattgccttggccatcaaggatgaagtggaagatcttgagaaggccggtatcaacgttatccaaattgacgaagctgctttgagag

SEQ ID NO: 4207 - DNA, 398 bp, Gossypium hirsutum
  Clone ID: LIB3083-089-Q1-L1-D11
ctctgggcctctccaaagcgaaccctctcttctctagaaaccaccgtcgagccatggctctaatcacccgaaccaccgccaatcgcctccctcacctcctctccctacagcgtgccctcgctattcacaccaccgtcccttctctctcctcttctgccaccccaaccacatacgctcgcccttctccgccgtccacctccggcactccctccagtctgtctaagcctgctgagtacgtgatctccaaggtcgatgacctcttgaactgggcccgtcgtgggtccatatggcccatgactttcggcctcgcttgctgcgccgtcgaaatgatgcacgccagtgcttctcgctacgacttcgatcgctttggtgtcatttttaaggctagccctcgccaa

SEQ ID NO: 4208 - DNA, 397 bp, Gossypium hirsutum
  Clone ID: LIB3083-089-Q1-L1-D12
taactccaggctttaccttctagcgttagttcgttcagcgccttcgattccaatagagatagagagagaggaggagatcttcgcttctctccgtcgttctgctccatttgataaccgcttgcagttctctcagacgtgaaaaatggggttgtctttcacaaagctattcagccggcttttcgccaagaaggagatgcgtatactgatggttgggcttgatgctgctggtaaaaccaccattctttacaagcttaagttgggagagattgtcactaccattcctaccatcggtttcaatgttgagaccgtggaatacaagaacatcagcttcacggtttgggatgttggtggccaagacaagatccgaccattgtggagacattactttcaaaacaca

SEQ ID NO: 4209 - DNA, 257 bp, Gossypium hirsutum
  Clone ID: LIB3083-089-Q1-L1-D2
cttggttatttaaaaagaaaggtttcctttacttgggtggggcaatgagcttaccagggctctccaccatctgtatgctccaatccataatcgctattacttgtggaactccaatgatgctatacactacagaagtcacaatttcttggccacggtcatgaaatatcaagcaaactgcatggttcaacgcctcatgaacaactcttgatccaaacctcaaaatcctttgctaggtagctttggtatcactattgatc

SEQ ID NO: 4210 - DNA, 357 bp, Gossypium hirsutum
  Clone ID: LIB3083-089-Q1-L1-D4
ttttctttagccaaaaataactcacattgtaaagagcattctatccgtgaacacgttctccctaaacttctatatctcctaatccctattcaacttttaaactaaaattcaaaatccagaacatttttccccatacagccaacttattcactataaataaaacattttgattacaaccaaaacttatcactcatcatcatccaaatattaaaaactaaacaccttatatctcacctaatcacagtaaaaaaaattttatataaaacctctactatcaatacaatcactctcaagaacgtaatttcaaacgctatcatcattctattttcctcaaacattctacaaaaaaataaattt

SEQ ID NO: 4211 - DNA, 411 bp, Gossypium hirsutum
  Clone ID: LIB3083-089-Q1-L1-D6
agtttaccacttctcgcctattgtaccctaccggcaatctgtttacttaccgataaatttatcatgccaccgataagcacctttgcaagtctattcttcattgccttgtttctttcaatctttgcaactggtattctcgagctaaggtggagtggagtaagcattgaagaatggtggaggaatgagcaattttgggtcatcggtggcatttcggcacatttgttcgctgttatccaaggcttgttgaaagttctagctggtattgacactaatttcactgtcacatccaaggcaactgatgacgaggagttcggggaattgtatactttcaaatggacaacccttctaattcctcctactaccgtcttaatcatcaatttagtcggtgtcgttgcaggcatctcggatgcc

SEQ ID NO: 4212 - DNA, 390 bp, Gossypium hirsutum
  Clone ID: LIB3083-089-Q1-L1-D8
ccacttttaactcatcttagttacaaggaaacgaactttttagagagcatcatgttgttgtacagttttcgcgaaaactgataagcttggtgatcccatttgggttcttaatataagggataaagtccagacatttggtccgagaaaggccaacttatccatataagattagtcggattgggtagaaccaagaggaataattcatgtcttttgtcatattggatttcaaatgctttagagcttaccagatgattgtagaaattggtgtattgtgggtttctctagtttattattttatttttaggagggaaattaaggagcatggatgatggatcgtctctgacgtttccgaggcagctagcttggggaaggtcggttgtttcgttcatg

SEQ ID NO: 4213 - DNA, 370 bp, Gossypium hirsutum
  Clone ID: LIB3083-089-Q1-L1-D9
cggcacgagacgagctgagccttacaaggctatgtacgaaaacccgactcctaaacaagcctaattacaaccccctttttttttctcaaaggaagactaataatcataaggaatatatgtatataaatccgaaaagagcacgatagatactacacacagcaatgagattacttggatttctatgccctttttgcggtaatttgatccatgttagcggaacttttggcatgtttaggcctccatcgggtcctgcctctcacaatctcagctccatcgtcgagtcggagcaaatgttggcaattaaattcaccaacatttactgcattttccgtattggaatcagacacagtggtcagtgactgcagcacgc

SEQ ID NO: 4214 - DNA, 396 bp, Gossypium hirsutum
  Clone ID: LIB3083-089-Q1-L1-E10
ttcgttaatggcagatctttcgttttcttgatttgcatgttgagtttacggcctcgttagtgacttaactgagtttaattgttctgctgagttgaattaggaagtcatcggagatgctggacggaatctggggccgtggttttgcctccaaatgtaagtcattgataaaactgataaagagtcggatcgatgtaataaggaggaagaggagtgcgacgcttatgtttttgaagaaagacatagctgatctgctcgctaatggccttgatattaatgcttatggcagggtggaaggatatatagctgaatcggtcctttcctcttgctacgattttgttgagaaatgctgcgagttcgtgtctaagcatgtttcacttatgcaaaaactgagtgact

SEQ ID NO: 4215 - DNA, 388 bp, Gossypium hirsutum
  Clone ID: LIB3083-089-Q1-L1-E2
tttatggctttggtccaccttcaatgccaagttttcccaagtcatcctcctcatcttgctcgtgttgctgcccgggcaagaaggaacctaaagatccatcagagctttatagggatgcaaaacgggaagaacttgatgctgccatctttaaccttagggaaattgacaattatgatgagtatgaaagatcaatgttgatctctcaaacaagctttgagaaaacttttggcttatcttcagtcttcattgaatctacactaatggagaatggaggagtggctgaatctgccaacccttccacactaatcaaggaagcaattcatgtcatcagctgtggctatgaagagaagactgcatgggggaaagagattggatggatatatggttc

SEQ ID NO: 4216 - DNA, 407 bp, Gossypium hirsutum
  Clone ID: LIB3083-089-Q1-L1-E4
ttcagcacgagcggcacgagccatatttgtcattctttgagaggtacaacgggagcagggatggggacactgttgatatcaaagatcaaagaagaataccctgatcgtatgatgctgactttctcagcttttccgtcgcctaaaacgtctgatactggggttgagccctatattagcgactctatcagggcaccagcttgtaggaaaatggcgataaatgcatggtgcttgataataaaactctctattatatctgttttagaactctcaagctcactaatcccagctttggtagattcgtatcagatagatttcaacaactatgagtggagctacatgctgactttttttcccaggccaaactaactacgatcttcgaatactagccgtaaacttgatcccattcc

SEQ ID NO: 4217 - DNA, 396 bp, Gossypium hirsutum
  Clone ID: LIB3083-089-Q1-L1-E6
gtaagttggtgaatagtgttgtaattagtgccaatggctcggattgggacctctgcagctcacattgtgttggcaatatttgctgtggccatgtttgttgtgtccgggaccatggcacaggatattgctccttctcctgcaatggctaccggagcaggctctgctttgccggtttccgctgtcttcttatgctcttccatgttggtctctttaattgctctcttggtgcattgaattcaaagcttttcaagactttatgacattggctacccttaatttcactctcactggtgatgaggggagtagcctctaatcttctccgagataatatttgggtgttatcaattttcaatttctctaaagttttagatatctctatatatatcatgttacatt

SEQ ID NO: 4218 - DNA, 373 bp, Gossypium hirsutum
  Clone ID: LIB3083-089-Q1-L1-E8
tgttgatccacacacactggtgaaggcaaagctcaacaaccatggcaatcttggtgctcttgtacagcatgagcttagaccgaagtccttccttactatatctggggcctttgacacaaaggcgttggagaagactcccaagtttggtttggcactctctctaaagccctgaacaggtatattgacttaatgataggaacaaacaatgtggctgatgagattgataaatcgtgtcattttctttttcacgtaggcttctagtgattgaaaatggaatcttagtaactttcagaaggtgtttgctttttggattgttaaaaaacctttgattattactcattttaataaattattacacctattgattaggcct

SEQ ID NO: 4219 - DNA, 400 bp, Gossypium hirsutum
  Clone ID: LIB3083-089-Q1-L1-E9
cttctgagtaggtcgaggagtaggcctgatgaccgacggcctataaagagagaagcagttcctcagatgaacattgatgcccctaggcggttgcttcagtttgctgtgcgagatgcagttggaacttcaagggcacctatttcagcaaaggagccatcttccaagcgccttcgatctgttgtgtcaacatcttctggagagttgccagctcgtcctaagagaattcagtctgttgcaagagtgccaaatccaatggcgacagtgatcaaggctgtggcagaagctgctgaagatgtgacaaaggtaaaaaatgcgggaagtgtgtttgacaggcttgtcctggaatggatgttttggagacccgtgacctacatccagaattcagagagtctcttactga

SEQ ID NO: 4220 - DNA, 374 bp, Gossypium hirsutum
  Clone ID: LIB3083-089-Q1-L1-F10
gagagagtgagagagaactagtctcgagttttttgttggtttttttaacaccaacaaaaacattagagaaatctttcatatatgcaaatcaaaaccctctttttatctacataattgtgaactagtaaggccaaaaccttctttttcaattgaatccaacaagccatgagagaaaagggtacctgtttttttcttgtctcctaagctttgtcacacttcaaagatatgcatcaacacatatgccataacttttccattctttgttcatcgtaatattgaacagtttggaaaaaaaaatccaacatcatgtaaggaaattcatttcttgctcttcttgactttcccatttcgtaaaaaggatcctaaaccgaaca

SEQ ID NO: 4221 - DNA, 379 bp, Gossypium hirsutum
  Clone ID: LIB3083-089-Q1-L1-F11
attaaacactaacgggtaaaataatttcaaagactttcacacccactctcatatatatattttgaaaagaaaaaagaaactaataatccggtcaacatagcagttcaacagcaatgcttaaaaaatacctgaaagacaaaatattaaagtagaaaccatatactactgaaaaataccttactcatagtagaggagattttattgatcatccaaagacactcacaagcttgaaatctggagatttggagaagcaaagtttaggaattcatgatctttttgtagtgcagacattctggtttcatctaaggttatccaagcttctattcctttcccacatttggtttcaaggagaatagttaagtttccaaattgccctatt

SEQ ID NO: 4222 - DNA, 302 bp, Gossypium hirsutum
  Clone ID: LIB3083-089-Q1-L1-F12
ccccccactctcatatatatattttgaaaagaaaaaagaaactaataatccagtcaacatttcagttcaacatcaattcttataaaatacctaaaaaacaaaatattaaagttctaaccatatactactgtaaaataccttactcatagtataggacattttattgttcatccaaagacactcacaaccttaaaatctgtatatttgaataatctatattttagaattcatgatctttttttatttcatacattacttacttcaatctaattgttattcaatcttctatttcctttcccaca

SEQ ID NO: 4223 - DNA, 378 bp, Gossypium hirsutum
  Clone ID: LIB3083-089-Q1-L1-F2
caaaagtggtagtttatttttcacttctttatacacaaaaggttgtgtcctcgagtttcaacaccccgttcgatttgggggtttctttaaactccaaattgagtggggtttgtggctctaaaagaaaagaaaatggggcaaaagagtgtgcgcaaaaagggcgcgttgcccccataggggctcacacagcccccttctgaagaaagatgaaacaacactctccccaacttctttctttcagtaaggctgaaatatgtggagcttggctaccattacgttatctctaacgctatgtatttgatgttggtgcctctcctacgcatagctgcagttcatctttccacacctactctcttatattatgttcgactatggaac

SEQ ID NO: 4224 - DNA, 389 bp, Gossypium hirsutum
  Clone ID: LIB3083-089-Q1-L1-F4
attttgtcccttcaacggaccggctaaccttaagatcgggttaatgaatatacaaatgaacaaaatcgggcaacatgtaggtgactgggaacacttcactcttcggataagcaacttcacgggtgaactatggcaagtatacttctcacagcatagtggtggtgagtgggttgatgctttcaacttggaatttattgaaggtaataagccgatcgtttactcatccaaacacgggcatgctagttttccacatcccgggatttaccttcaggggtcagataaactcggaattggaattagaaacgatactgctcgaagcaattattttgtagattcaagcactaggtatcagattgttgcagctgagtatcttggaggagtagttacag

SEQ ID NO: 4225 - DNA, 397 bp, Gossypium hirsutum
  Clone ID: LIB3083-089-Q1-L1-F6
atcattgttgtctttgtcattgtttttccaagaaagcacaatgaatgtagacgaggaggtggagagactcaaggaagaaatccaaagactaggccagatccaatcagatggttcttacaaggtcacattcggggtgctatttaatgatgatcgctgtgcaaacatctttgaagcactagttgggacactaagagcagcaaagaaacgaaaagttgttgcatatgatggtgaactactgctgcaaggagttcatgacaatgtggaaatcattctcaaagctacaacaccagcagcagcccagagtagcaactaatgcagttctaaacaaataattgcaattatagttttgcagcaaaagtttgatgatattctatgtaatttttcaatagttatcatg

SEQ ID NO: 4226 - DNA, 412 bp, Gossypium hirsutum
  Clone ID: LIB3083-089-Q1-L1-F8
tttctatttagttttctcttcctccaattaagatgcagatcttcgttaagagggtgagcggctagaccatcaccctcgaagtcgagagttccgacacgatcgacaacgttaaggcgaaaatccaagacaaggaagggatcccaccagaccaacaacgtctcatcttcgccggaaaacagctcgaagatggccggaccttggccgattacaacatccagaaagagtccaccctccatctcgtcctccgtctacgtggtggcatgcagatcttcgtcaaaaccctgaccggcaagaccataactttggaagtcgaaagctctgacaccattgacaacgtcaaggccaagatccaagacaaggaaggcatcccaccagaccagcaaaggctcatctttgccgggaaacaactcga

SEQ ID NO: 4227 - DNA, 396 bp, Gossypium hirsutum
  Clone ID: LIB3083-089-Q1-L1-F9
cttcgatttactttcggtttccatttacttctttatttgtacgtttttgaatttttagtaagcgaaaatgagagagtgcatttcagttcacatcggtcaggctggtatccaagtcggaaatgcctgctgggagctttactgccttgaacatggaatccagcctgatggccagatgccaagtgacaagactgtcggaggaggtgatgatgcttttaacacctttttcagtgaaactggtgctggaaagcacgtccctcgtgctgtctttgtggatcttgagcctactgttattgatgaagtgaggactggtacttaccgtcagcttttccaccctgagcaactcatcagcggcaaggaagacgctgccaacaacttcgcccgtggccactacactat

SEQ ID NO: 4228 - DNA, 399 bp, Gossypium hirsutum
  Clone ID: LIB3083-089-Q1-L1-G10
tgcatttctattcacatcggtcaggccggtatccaggacggaaacgcctgctgggagctttactgcctcgagcatggaatccagcctgatggtcagatgccaagtgacaaaactgtcggaggaggtgatgatgcttttaacacctttttcagtgaaactggtgctgggaagcacgtccctcgtgccgtctttgtggatcttgaacccactgttattgatgaagtgagaactggtgcttaccgccagctcttccacccagaacaactcatcagcggcaaggaagacgcaactaacaactttgcccgtggtcactacactattggacaatgagattgttgacctctgttggaaccgaatcaggaaactggctgataactgcactggtcttcaagggttcct

SEQ ID NO: 4229 - DNA, 396 bp, Gossypium hirsutum
  Clone ID: LIB3083-089-Q1-L1-G12
agtttaatgtatgggatggattacctgaggggtatagctttagagggaatcctgatgagcccgtcgattatttccttaaggcagttcctgggagttttataaaggctatagatgctgttgtgtctgaaactggtaaaccagttgattgtttgataacagatgcattttatgcatttggggctgatatcgcggacgagctgaatattccttgggtggcggtttggatgtctggccctagggcactcttccttcatctccagaccgatgttattcgccagcatgtaggaattaacaatccggaagacaaaccacttgattttcctgaattttctggctttcgtgttactgacttacctaatggaatagcctctggagacattgatgcccccatgccag

SEQ ID NO: 4230 - DNA, 387 bp, Gossypium hirsutum
  Clone ID: LIB3083-089-Q1-L1-G2
aaacagagagcctctgaaatcccagatctctctttggaacccatatttctaaggaaaatggtgcacaaatcgttgatctatgcatttgtatctcgtggggaagttatcttagcagaatatactgaattcagtggtaatttcaattccatagcttttcaatgcctccaaaagcttccttcttccaacaacaagttcacttacaactgtgatggccacaccttcaattaccttgttgacaatggctacacatattgtgttgttgcagatgaatcagctggaagccaagtaccgattgcttttttggagcgtgtcaaggaggactttgtgtcaaaatatggtagtggaaaggctgctactgctcctgccaacagcctgaacaaggaattt

SEQ ID NO: 4231 - DNA, 316 bp, Gossypium hirsutum
  Clone ID: LIB3083-089-Q1-L1-G6
ccgaaagtaccaagcattcgcacaaacgttgcagcaatcgagggggtttggaagcgaattcaagtttgcagaaaccggttccagggctgcaacatctgatccttttgcaactacagcaggtggagctgatgaagatgatctttacagttaaaattgctttcatttgagggtttcttttttaaaagaattttaatttaatccattatggtaacaattattgaactaaaggagcctttgcttgtggcttaagcatcggagtccaaaataacagtttttgttgtttttggaactgagaattttacaattgtctattttt

SEQ ID NO: 4232 - DNA, 387 bp, Gossypium hirsutum
  Clone ID: LIB3083-089-Q1-L1-G8
tttaagtcaacagttatcagaaagagacattatagtggcatgcatagactacagaaattttccacagggtacaataagtgacatggtggaggatgcttctcaaggcatctcatttatttgcaataatatttctgaatatggaggtgatcccaacaggatttatcttatggggcaatcagctggtgcacatattgctgcttgcacacttgtaaaccaggcaatcaagagactggcgaaggcgacagtgtttcttggagtgtgtcccagataaaagcttaccttggtttgtctggagggtacaatctttttaacctcatagagcactttcatactcgaggtttataccgttcgatctttttaagtcaaaattttgctgatacgcttcga

SEQ ID NO: 4233 - DNA, 403 bp, Gossypium hirsutum
  unsure (1)..(403): unsure at all n locations; Clone ID: LIB3083-089-Q1-L1-G9
gacagtaaatagctccactgaggagatgaaaagagagacgactacaataaagagctcagcggagaagatgaacaaagagacagccttgaaaataaataactcagctgagaagatgaagaaagaaacatcattaaatagctcagctgagaagatgagacaagagacagctacagaaaatggttcagctgaaaagatgaagaaagagacagccttgacagtaaatatctcagctgaaaagatgaacaaagagacagccttgacaataaataactcagctgagaagatgaaggaagagatggccaggacagtgaatagctcagctgagaagatgagacaagagacagctacagttaatggctcggctgagaagatgaagaaagagacnggcctgacagtaaagagc

SEQ ID NO: 4234 - DNA, 396 bp, Gossypium hirsutum
  Clone ID: LIB3083-089-Q1-L1-H10
gaaaaatggttctgctagagaaactttgggatgatgtagtggccggtcctcaaccggaacgtggccttggccggctgaggaagatcaccaccaccccacccttgtccaccaaagatgaggcttcatcaatggcgatgccgacgagtccgacgacacctgggacaccatcgacgccggtgtcggctcgtaaggacaacgtgtggaggagcgtgttcaatccaggtagcaaccttgcaaccaaaggtattggcgctgaagttttcgacaagcctcaacctaactctcctactgtttatgactggctttacagcggggagacccggagcaagcatcaccgttgattaggcggtggctgacggcggcggatggtagcaaaaccactagcagaaggttgca

SEQ ID NO: 4235 - DNA, 392 bp, Gossypium hirsutum
  Clone ID: LIB3083-089-Q1-L1-H11
cgacgcgtctgttttgacggggttagccgattccggggggaccgttgtcgtcgcactgtctaatgaactactttcatccaccgctgctgatcagtcgtttgcagacaactgggttgaagcaaacataacaaagttttacccaaagacaaaaatcgaagccatagctgtcggtaacgaagtgtttgtcgatccggccaacacgaccaaatacctcgttccggcgatgaagaacatccacgcttcgttagttaaatccaaacttgattccgccattaaaatctcttctccgatagctttcagtgctttaaaaacctcgtatccttcatcgggcggttcgtttaagccggaattgattgaaccggtgattaaacccatgttggtttttttgaaac

SEQ ID NO: 4236 - DNA, 396 bp, Gossypium hirsutum
  Clone ID: LIB3083-089-Q1-L1-H12
aacaaattttcccctctaacttggtagtttatcctaaagatttcccatttattaaccatccccaaacaagacgaacagtgtctgcaactgtttgtaatcttgaagaagacagaaagattagctaaactaaaatggagggaatgattcaggacccatcgcagccggcgtcgcagccacagcagcagaatcaggcagtggtaggggcggagaggctgaaccaggcgcttcaacaacagctcaatttggaatctgtaaagaccagagcaatttcccttttcaaggccataactcgcatcctcgaagacttcgacgcctattctcgcacaaataccacccccaaatggcaagatattttgggtcaatactcaatggtgaatctcgaacttttcaacattg

SEQ ID NO: 4237 - DNA, 350 bp, Gossypium hirsutum
  Clone ID: LIB3083-089-Q1-L1-H2
gtttttttttttttttttttttttatattgcaaaaggaggtgccaatcaccttcatcatctgtattacacttcatttctttatatataactacatccttccctacatttttataggattaatcccttgaatttatgctcaacattaaactgggatctatttggtaggaaaagagagatggggagactaaagcattttcagaaactcacatatattattattaacatcaagcagcgcgcagaagcaaaatcaacaaaaaattctggaaatacaaataatgtggataacaagaatatgttcaacgaccaatcaaacccttatcgatccatttgaaaaacgaaaatttatagt

SEQ ID NO: 4238 - DNA, 268 bp, Gossypium hirsutum
  Clone ID: LIB3083-089-Q1-L1-H6
ttcaacttgaggcttctacaacgagagccttcttgcaggaattatcttcaacaaaatcgagccttcaacaaaatataacatctttaaagcaaaaggtctatttcataaacaaaatggttccagaacttgaaacaaaaaaaaaagttgctgctgcttcgaaaaatttcaaggaagctgcacgattagctgctgaaacaaaatctttaagcactgaaaaagaaagtgtacagatcgaaatggacaaagctgtgttggatcttgggaaact

SEQ ID NO: 4239 - DNA, 400 bp, Gossypium hirsutum
  Clone ID: LIB3083-089-Q1-L1-H8
tgataatatgcgtgctcctggagagcagaatctggttgcatgggcacgaccgcttttcaaagatcgtaggaagtttccgaaaatggctgacccgctactacaaggtcgttatccgatgcgtggattgtaccaagctcttgcagttgcagcaatgtgtttgcaagagcaagcggctacaaggcctttaataggcgatgtggttacggcccttacgtatttagcctcacaaacttatgacccaaatgcccctggcaaccaaagcaacagagtcggtccatcaaatccaagacttaaggatgataggaatatggctgacgggttagacagccccgagggtcgtggatggcatcatggttctccttccacgcatagaaattcacctgattacaggaagaggaat

SEQ ID NO: 4240 - DNA, 306 bp, Gossypium hirsutum
  Clone ID: LIB3083-090-Q1-L1-A1
ttcatgaattctgtacgtggttatgatcttaagaaatttgggaagctccaacgaactcatttaatttacttgctcgaaaaaacaaaatcttcacgaactgcagataaaaaaaaaactgttagttcaccaatcgattctttcacccgagtgtaacctttaactatgcttaaactgcaagcggtgacacataaaatattctccgcagttgtcaaaaaggctatttatatctgtcgtccttaatgtaagtgggagatccagcatccctctcttaaggctctaaacatggggaattgattgaaactcgtg

SEQ ID NO: 4241 - DNA, 67 bp, Gossypium hirsutum
  Clone ID: LIB3083-090-Q1-L1-A10
gttgtgccttctttttaaaccttttctggtggttaaagaggaaaggatgtttctttgcaaggacccc

SEQ ID NO: 4242 - DNA, 278 bp, Gossypium hirsutum
  unsure (1)..(278): unsure at all n locations; Clone ID: LIB3083-090-Q1-L1-A11
tatgcaaccatagccagggctttttcaccaaagcggttggttatgnntatactcttcctttttgcccccttctccatgcaaatccatgctatagagtacttcagcaaattcccaagagttaacatcattgaggaagagacaccttccagagagcagaagctcgagaccttttttccccacaccaccccaaagccacaaaaacatgagccactggttatatttgaaacccaaaaaggttatggcctctacagccacaaatcatgctcaagcttaggctc

SEQ ID NO: 4243 - DNA, 385 bp, Gossypium hirsutum
  Clone ID: LIB3083-090-Q1-L1-A2
ttcatcaggccttccaagaacacctactcatttaacgagctcatcgccctgtgggagaaggtgattggcaaaacccttgagaaaacatatgtttctgaggaccaacttctcaaacagatccaagagtctccaatcccaatcaatattatgttggccatcagtcactcaatctttgtcaatggtgattgcaccaacttcgatatcgatccatcattcggatacgaagctattgagctcttccctcaagtgaaatacaccactgtggaagaaggcctcattcgttttgtttgagaaagctacaaatcaaatcagatcattgttgttattaaactgataccaggtattattcaaaaactgtcactgtgagatttgtgcataggacttg

SEQ ID NO: 4244 - DNA, 338 bp, Gossypium hirsutum
  Clone ID: LIB3083-090-Q1-L1-A3
tcaaaactggcttttatgatcttcaaactgcgagggatgagtataggttctcttgtggcagtgggggcatgaaccgtgaccttgtatggcgttttatggatgtgcagactaggcttatcactccagtctgccctcactatgcggagtttgtttggagagagcttctgaagaaggatggctttgtgataaaagctggctggccatcagcttgttctccagatcttaaacttaagagtgccaataagtatctgcaggattccattgtgttgatgagaaagctgctgaataagcagattttgggctcaaagaaatctaataagaaaggggctccagcttca

SEQ ID NO: 4245 - DNA, 387 bp, Gossypium hirsutum
  Clone ID: LIB3083-090-Q1-L1-A4
gtcatgtgtggagatcagtctgcaaggcacgtggacttgaagatgatcaagggactaaactgtacattgccactgatggaagggcaaggttgcgccccccactcccacctggttactttgggaatgtgatcttcactgctaccccaatagcagtggcaggggatctactgtcaaagccaacatggtacgctgcgagccgtattcatgatgcattggttcggatggatgatgaatatctaaggtcagcccttgattacctggaacttcagccagatttgtctgcacttgtacgtggtgctcatactttcaggtgtccgaaccttgggattactagctgggttaggctaccaatccatgatgcagatttcgggtggggcaggcccatat

SEQ ID NO: 4246 - DNA, 392 bp, Gossypium hirsutum
  Clone ID: LIB3083-090-Q1-L1-A5
gagatgatctaaagaaatatggcaggttccaacgttttcattttaatagcttgcttcattttgttgggtttttcaagtatggaggttagcctagcaactcgaaatattcagcacgtgtcactaattgaagtgtcaccaataacattgtcgttattcccaccattgccaccaataagatctccgttcttgccaccaataccaccaataacattgtcaccaatgacattggcaccaataacattgacaccaacaggtacaccaatcgaggaaccaatagatccaccaaccgagaaaccaacagatccaccaactgaggtaccaacactgccttgaatcccaaagctaccaacaatcccaccatcttagcctaagcctatcactgttctttcaca

SEQ ID NO: 4247 - DNA, 393 bp, Gossypium hirsutum
  Clone ID: LIB3083-090-Q1-L1-A6
aaaaaacacaccctaaagagacaatgagaaagctgctggggtttgcctttcttttcttcttcttttgggataaaacattagctcaaatagctccggcgccgccgttaaaggtggacaacatcacttccatcctcgaaaaaggtggccaattcaccactttcatcaagctattgaaagccacacaggtggctgatcaactaaacaaccagttaagcacaccggaccctaacgacgggataacggtgtttgcaccgagtgacaacgcgttcttcggactcaaacccgggacgtgaaactcactttccgaccaagagaagcttcaggtggttcagttgcatatactccccacgtttatggcgacatctcagttttaaaccgcgagttaccctttga

SEQ ID NO: 4248 - DNA, 392 bp, Gossypium hirsutum
  Clone ID: LIB3083-090-Q1-L1-A7
tcgagttttgccttcagattctccctctttgtaagttcaaatctacaaagccatggcaaatgctgcttctggaatggccgtgcatgatgactgcaagctgaagtttctagagctaaaggctaaaaggacataccgcttcatagtattcaagatcgaggagaaacaaaagcaggttgtcgtggaaaagcttggtgagccaagtcaaagctatgacgatttcactgctagcctccctgccgatgagtgtcgatatgctgtatacgatttcgactttgtgactgctgagaattgccagaaaagcaggattttcttcattgcatggtctccggacacatcaagggtgagaagcaagatgatttacgcgagctcaaaggacaggttcaagagagagt

SEQ ID NO: 4249 - DNA, 393 bp, Gossypium hirsutum
  Clone ID: LIB3083-090-Q1-L1-A8
gttggactaaatgctcttgctggaaaatctataaagcctggtggttcagctgtaggagcttggaactacaccaatgcagaatcttttatacgttacaccgttgaaaagaactataaaatccatggttgggagctaggaaacgaattgtccgggaatggggttggaactaggatcgcagttaatcagtatgcagctgatacagcagctctacaaagaatagtgcaaaagatatacaaggatgttgatttgaaacccttgatcatagcacccggtgggttctacgagtcaaaatggttcaaagaattcatcgataaaacaaccacatccttagatgtagtcactcaccacatatacaatcttgggccaggagtcgatacccaccttattgaaaag

SEQ ID NO: 4250 - DNA, 391 bp, Gossypium hirsutum
  unsure (1)..(391): unsure at all n locations; Clone ID: LIB3083-090-Q1-L1-A9
ggaacatatagatatctgattttggccttagtgcattgcctcaacatattaggggggatggcttactgcatacaacatgtggaagtccaaactacgtcgcgccagagattttggcaaatagagggtatgatggtgccacttcagacatatggtcatgtggtgtcatcttatatgtcattctcaccggttatctcccttttgatgatagaaaccttgcagttctttatcaaaagattttcaaaggggatcctcagatcccgaaatggttgtcancctgggctcggaacatgataagaaggattcttgacccaaaccctgaaaccagtataacaatggcgggtatcaaggaagatgaatggtccaacaagactatactcctgctgtacctgat

SEQ ID NO: 4251 - DNA, 392 bp, Gossypium hirsutum
  Clone ID: LIB3083-090-Q1-L1-B1
gttgtttctgacaagagcttgatcgtcagcttcggtgagatgctgatcgattttgtccccactgtctccggtgtttctctagccgaagctcccggcttcctcaaagcccctggcggtgctccggctaacgtggccattgctgttgctagactcggaggcaaagcgtcatttgtcggaaaacttggggacgacgagttcggtcatatgctggccgatattctcaagcaaaacagtgtctccggtgacgggatcttgtttgaccaaggcgctagaactgctcttgccttcgttacgttacgcgccgacggagagcgtgagttcatgttctataggaatcctagcgccgacatgctgttgaagccggaggagttgaacgttgatcttatcaaatc

SEQ ID NO: 4252 - DNA, 392 bp, Gossypium hirsutum
  Clone ID: LIB3083-090-Q1-L1-B10
ctcttggtctctctctcagcccaccccttggtcggccatggtcgccgccgtggctggtggctggcgttgcgcaaaaagtcatttttagccctcgtttcgcagctgccttgaaagcccagccctctcgacccaaaaaaatgaaagagaggactcccgaccccctctaagatccaatggcgacaatagagaaaagccctcctacggcgcggtcacggggcatcttccacacgtggatggtcggtgataggcgaaccttgagcggcggcggcatgcggcacaagtggtcatgcggcgttgaaagcttatggggctaggggtttttttgttgtgtttaagtgttgagctaattgggctacggttagttttgggttattgagttttaatttgtattt

SEQ ID NO: 4253 - DNA, 384 bp, Gossypium hirsutum
  Clone ID: LIB3083-090-Q1-L1-B12
gccatcgcccctccctcccatggcggaatccaaccctagggcctgcatatggggtcatcaagctcttggaggtggcacatttaaccatgtgctgctgtggagagaacggtgtaacggtgttttgatgctgaccttgtcaaccacggtgtggaaccttattgaaagagctggttataatctcatgtctttcatggccaacgtaatgccgctcactgtcgctattctcttcttctggggcaaaaatgattttgttctcaacaggtcattaccatgccttcctaatttagagattattgagaacacagttgtgattcttactgatgagctacaccaatggatcaaccacacattattcattgcacataacattgcaaatgcaagaga

SEQ ID NO: 4254 - DNA, 411 bp, Gossypium hirsutum
  Clone ID: LIB3083-090-Q1-L1-B2
ctcgagtttttttttatgttttgtgcgtaaatggcatcatcccttctctctagaactcttttgggtcaccgcttaattcgattttcctcgtctctccctcagaaccccttgattttctctaatcttttcaataagagagagttccgtgtacaggctgagtcttaccataccacatataaggcctctggtcagcattctcgtttaatggcttctgcagcaattgagacaagaagtaatttttcgacacagtctctttctaccaatgatccggttgtttctgttgattggcttcatgctaatttaagggagcctgatttgaaggtattggatgcatcatggtacatgccagatgagcagaggaatccaattcaagagtaccaggttgctcacattcctggtgctcttttcttt

SEQ ID NO: 4255 - DNA, 350 bp, Gossypium hirsutum
  Clone ID: LIB3083-090-Q1-L1-B3
aatcagataggagccaagttctgggaagtcgtatgtgccgaacatggcatcgattcaacgggtcgatatggtggtgactcggagctccagcttgagcgaatcaatgtttactacaacgaagccagttgtggccgttttgttccccgcgcagttttaatggatctggaacccggtaccatggatagcgtaagatccggtccttacggacaaattttcagacccgataacttcgttttcggacagtcgggcgccggaaacaattgggctaagggacattacactgaaggagcggagcttatcgatttcgttctcgacgtagttagaaaggaagccgagaattgcgattgctt

SEQ ID NO: 4256 - DNA, 387 bp, Gossypium hirsutum
  Clone ID: LIB3083-090-Q1-L1-B4
cgacgaagtaggaagagttcttgttttggacattgatcatttgttcatccacttctttggtgctcatcttgcctcggaacatggctgatgctgtgaggtatcgaccgtgcctcgggtcagcagcacacatcatgttctttgcatcccacatttgttgtgtcaactcagggacagttagagctcggtactgctgagaaccgcgggaggtcagtggagcaaatccgaccatgaaaaagtgaagacgggggaagggaatcaagttcacagcaagctttcggaggtcggagttgagttggccggggaatcttagacagcaagtaactccactcatggttgcagagatcaaatggttcaaatcaccaaagctaggagtagtctatttaagag

SEQ ID NO: 4257 - DNA, 366 bp, Gossypium hirsutum
  Clone ID: LIB3083-090-Q1-L1-B5
aatctacccgaatttatatgtcattcaatcaacttttcagatacgaggcatgcatacccttattcgtgactctcaaacaacgaaacatgactttgttttttacgctgatcgattgattcgtctggttgctgaacatgggctgggacatctgccatttacagagaagcaggtgatcactcctacagggtctgtatatacaggtgtggatttctgtaagagattatgtggagtctctattattcggagtggtgagagtatggagaatgctttgcgagcatgttgcaaaggtatcaagattggcaagattcttatccatagggaaggtgacaacggtcaacagcttatctatgaaaaattaccacaaga

SEQ ID NO: 4258 - DNA, 391 bp, Gossypium hirsutum
  Clone ID: LIB3083-090-Q1-L1-B6
atctatacttcttctcactaatcatgagtcgtcatccagaggtaaagtgggctgaaagagctgacaaggtttacattacggtgctattaccggattcgaagaatgcgaaggtcaatcttgaacccgagggagtgtttactctttcggctaatgccggagctgacaataacctttatgaattgaagttggatctttatgataaggtcaatgtggaggaaagcaaaattagtataggagtccggaacatagtttgtgtgttggagaaagccgagaaagtgtggtggaaaaaactattgcgcagcgaaggaaaggccccccattatattaaagtggattgggacaaatgggtcgatgaagacgaaaacaatggtcctggtgatattgacttggg

SEQ ID NO: 4259 - DNA, 396 bp, Gossypium hirsutum
  Clone ID: LIB3083-090-Q1-L1-B8
gttggttgttcgtgaagtatatcgggccataacgggttacatgaaaatgatgaagagtgcctctgggaaaaagcaaacagtgtttgatgctgacaactcgatgaataatatgaaacttccactcatctacctgatggattgcacattgaacgactgcagtttaatcctaaaatcagtaaaccagagggaagtttatcctgctctgatgttattccctgctgaaactgaagcagttatctcttacaatggagatgtgtcagtagctaatataatcaagtttatagctcatcatggaagtaattcccatcatctctatggtgagaaaggaattttattgacgaccactgaagctgtgaagaatcaggctatactcaaggattcttctggagtttcagc

SEQ ID NO: 4260 - DNA, 393 bp, Gossypium hirsutum
  Clone ID: LIB3083-090-Q1-L1-C1
caacttgaggatggccgcacattggctgattacaacatccagaaggagtccacactccacttggtgcttcgcctacgtggaggaatgcaaatttttgttaagactttgactgggaagaccattacattggaggtagagagttcagataccattgacaatgttaaggcaaaaattcaggacaaggagggaatccccccagaccaacagaggctgatttttgctggtaagcaactggaggatggccgtaccctggctgactataacatccagaaggagtccaccctccacttggtgcttcgtcttcgtggtggtatgcagatttttgtgaaaacacttaccgggaagaccatcaccctggaagttgagagctcttacacaaatcattattgttaa

SEQ ID NO: 4261 - DNA, 390 bp, Gossypium hirsutum
  Clone ID: LIB3083-090-Q1-L1-C10
gatttctctctttaatgaatctccaaatcgaaatttaaggccaaaaagacacaagggttactaattaaattaatcttcagcgaatatgttggtttatcaggatcttcttacaggtgatgagctcctctcggactctttcccatacaaagaaatcgagaatggaatgttatgggaagtcgagggaaagtgggttgttcaaggagctgtcaatgtagatattggggctaacccttctgcagaaggtggtgatgatgatgaaggtgttgacgatcaagccgtcaaggttgtggacatcgtcgacactttcagacttcaggagcaacctgcttttgacaagaagcagtttgtgaccttcatgaagaggtacatcaagaacttgacacccaaatt

SEQ ID NO: 4262 - DNA, 392 bp, Gossypium hirsutum
  Clone ID: LIB3083-090-Q1-L1-C11
cccaatcaccgtatcgcttgtcacagacgacgacatcgctattggagaaggttccttcggttccttcgtgcacggaactaaaaacacgaccctcttgaaagctgccataactagtagcaaccaagaactcgatgacgcgtcagctgccaaattgaagaaagctttgaagagcaagaaggggctgccattaaagataaagctcgatactaaagtggaagcaaaaatgggagcattgaagacaccaaaggttgggataagggttgtttgtgaagggattaaagctactgccccgaaggcaaaatcagcaaccacagctttaacttctaatgcaaaatgtaaggttaatttgagactcaagatctggaaatggactttctgatcgacgagaatat

SEQ ID NO: 4263 - DNA, 400 bp, Gossypium hirsutum
  Clone ID: LIB3083-090-Q1-L1-C2
gaaaatgagagagtgcatttcgatccacatcggtcaggccggtatccaggtcggaaacgcttgctgggagctttactgtctcgagcatggaatccagcctgatggtcagatgccaagtgacaaaactgtcggaggaggtgatgatgcttttaacacctttttcagtgaaactggtgctgggaagcacgtccctcgtgccgtcttcgtggatcttgaacccactgttattgatgaagtgagaactggtgcttaccgacagctctttcacccagaacaactcatcagcggctaggaagacgcagctaacaactttgcccgtggtcactacaccattggcaaggagattgtcgacctttgtttggaccgtatcaagaaacttgcttataactgcactggtctt

SEQ ID NO: 4264 - DNA, 252 bp, Gossypium hirsutum
  Clone ID: LIB3083-090-Q1-L1-C3
ctcaatacctccaacaatgagtccatgtcggttttgccgggtgggtgttttgaccctcgagatgaccgtaaatcctcttttgggttcgacaaaaccggtccttacagagccacatttttgattgaattcggatctgatctccggatgaatctgcaagcacgagggtctgatcttgtggttcggattgtgaagccggtgtgtgttatggttgagtatagcaaaagctttctgggccgactctttctttgctta

SEQ ID NO: 4265 - DNA, 356 bp, Gossypium hirsutum
  Clone ID: LIB3083-090-Q1-L1-C4
attttctttggactttctctgaaatccgagtcctaggaaagatgcgtgagattcttcatattcaggcagggcattgctgcaaccaaatcggtgccaagttttgggaggtggtttgcgcctagcacggcatatattcaacggtacgctatcaaggggacaatgatttgcaactggagcgcgttaacgtttactacaatgaatctagtttcgggaggttctgtccacgagccgtccttatggacttggagcctgtcactatggatagtgttagatccggtccgcacggacagattttaaggcctggcaactttgttttctgcctgtcctgtgcatggaattactgggccaatggttat

SEQ ID NO: 4266 - DNA, 380 bp, Gossypium hirsutum
  Clone ID: LIB3083-090-Q1-L1-C5
gagagagagtagagagagagagagagagagagagagagagagagagagagagagagagagagagagatagacaaataattcaaattacaaatgattcaaaatacaaaggtatacaatcaaacaaaaaagaatgtgttttaacccttccaacatgatatatcaaacaaagataaattacattatgaatctctctcttattttccccatttttctttataatttcatgaattcttgaatggcagcaacattaaaggccttattggtacttttcatccgaaaaaactgaaatcccgaaacatattctttatggatagacaagcatacactaatcataagcatatttttatgcttttttttccaaagaaaaaaagctttttaaa

SEQ ID NO: 4267 - DNA, 352 bp, Gossypium hirsutum
  Clone ID: LIB3083-090-Q1-L1-C6
gggttgtactttgatcttgatgtaatattagcctttcattctgctgtgatttgtgatgcccgctggtgtcactgtgatagagatgatgggtctttggagctggtggtcggcagacagtgggtgcttatttccatcctttccatgcatctttcaaccatgttgctgaatagaatgtagctggagagattgtgttgcttctttattctatttttcttcaatttcatattcaaggctaccccctcccctcttcaaacattaatgtcaatagctattgtacgagaaattttaaaattcgatgggaattatatttaatacttggttttgaattcttaatgtgaatcatttttatctg

SEQ ID NO: 4268 - DNA, 379 bp, Gossypium hirsutum
  unsure (1)..(379): unsure at all n locations; Clone ID: LIB3083-090-Q1-L1-C7
accaagaatccacttcatgctttcctcgtatgccccagtgcatctctgctgagaaggcttaccacgagcaactgagagctgtttntggttagtcaatgttgctgagaaggctttttaagggctgttgcagagaggaatgtttttttgcttccgcgcagaggtaatgtcgtcttttgtcttgcacatattaacttggcttagatggggcttggatttaatccctttgctgatttgtatacagggtttaagaaatttgtaagattgtttctcaacttctattctggttgtaaaaagggcttcttgattgattaattgttttatttttgtgggaggtatccttctgactaattaatttctaattattgtttttgtacatttt

SEQ ID NO: 4269 - DNA, 273 bp, Gossypium hirsutum
  Clone ID: LIB3083-090-Q1-L1-C8
gtatattcattctaatgggtcttcaacactgtggggtcacatttattgggaattggcttccatcaggaattagtggtggggagaagatgtgacttatctattgctctcgtgatccacacgatgcccaaaatgttattcctggatgaacctactagcggccttgacagtgcctctgctttctttgtggatcaaacttatccggaacatatttcgcgatgggaggacctttgtctattctattcaccagcccagttattgaagtatttagcactt

SEQ ID NO: 4270 - DNA, 394 bp, Gossypium hirsutum
  Clone ID: LIB3083-090-Q1-L1-C9
catccagttgttcttaagttccaaccaaaagcaaacagcaaaagagagagggcgaggcggcgaccgcatttaacgcttatccccttctaatttagaaaagaaatggagactttcaacatcccggcgacgccgtcattgatgaaggagttcctccgccagatgggaggcaccgctgttatcgacggtggactggcgaccgagctggaactccacggtgctgacctaaacgatcccctctggagtgccaaatgcctcctcacttctcctcaccttattcgctccgtacaccttgattaccttgaagctggtgcagatattattatcacagcatcctatcaggccacaattcaggggtttgaagcaaaaggcttttctagagaacaaagtgaaaact

SEQ ID NO: 4271 - DNA, 388 bp, Gossypium hirsutum
  Clone ID: LIB3083-090-Q1-L1-D1
agaagagtactgggagtggagggaagaagaagggtcctgctcaatttagggtatacaatttggggaatacttcacctgtcctggtttcggatcttgtgagtatcttggagaggcttttaaaggttgatgcaaagaggaatgttatgaagctgccgcagaacggagatgtccggttcactcatgcaaatattagcttggctcagagggagctcggatataagccctcgactgatttgcagacagggttgaagaaatttgtaagatggtatctcagctactattctggtgggaaaaaggctgctggatagattcattgttttatattgtggtaggatcctcttgttcattatcattcttatcattgttttgaacatttctccgttcgatt

SEQ ID NO: 4272 - DNA, 395 bp, Gossypium hirsutum
  Clone ID: LIB3083-090-Q1-L1-D10
ggaagtcaagcaacatggtggaagcaacttacaacattgacaaaacgatcatttgtcaacatgtgtagagatgtaggatattactgggcaaggattgtgatatacatacttgtatctatttgtgtgggaaccgtcttctatgatgtcggatatggcaatactgcaatccttgcccgagtagcctgcggtgcatttattacaggtttcatgaccttcatgtccatcggaggttttccttcttttatcgaagaattgaaggttttcaataaagaaaggctgaatggatattatggagttgcggcttatacactttccaatttcttgtctgcatttccgttcctagttacgatttcacttatcacaggaaccataacattttacctggtgaaatttcg

SEQ ID NO: 4273 - DNA, 365 bp, Gossypium hirsutum
  Clone ID: LIB3083-090-Q1-L1-D12
ccaaagtattcaaactatgattcacaatagaaatgggaattttagccgaaagttctacactcaaaaaattcctattaactatcccttcgtccattataaccagaccaattccaccaaatgatccagttctgatgcaattttgttttctgctatacaacttcattacacactgttaacaattccatgtatttacatgcaaaagaccagaatagagattttttcaaaagcaatatccccctgttgccaaaaattcaacaaaagagtcccttgttattccaccatcgcaatggagagctcaagccattaaatgctttctaattttcaacataaattataatatgcaagattggaggaaattttcccca

SEQ ID NO: 4274 - DNA, 330 bp, Gossypium hirsutum
  Clone ID: LIB3083-090-Q1-L1-D2
ctgaatcattccaggatgatctaggaagcgccggtgcacttgatgtggatggcaaagagctgcctcgacttgtctatgtttctcgtgagaaacgacctggttatcagcaccatgagaaagccggtgctgagaatgctctggatcgagtttctgcagagcttactaatgcacccttcatattgaatctggattgtgatcattacatcaacaatagcaaggccattagggaagcgatgtgctttttaatggatcctcagtttggaaagaagctttgttatgttcaatttccacagagatttgatggtattgatcgtcatgatcgatatgcta

SEQ ID NO: 4275 - DNA, 367 bp, Gossypium hirsutum
  Clone ID: LIB3083-090-Q1-L1-D3
gagagctctcgcgtcaatttgtacttctttcaatccgatttgactcagttaccttgttttaaggcgtttttggctcgctttccggtcgttcgtttcgatggcgtcgacctcaaaccgaaccggtggcggttcctcctacggcggtgcggctccttaccgatcaagagatggtttaagcacgagaccggtggctagctccgatgagatacaattgcgtattgatccgatgcatgctgatttggacgatgagatctctggtctccgtagccaagttaaacaattgagaaacgttgctcaagagatttgatcagaagccaaatttcaaaaggacttttttagatcagctgcaaatgaccatgatttaagc

SEQ ID NO: 4276 - DNA, 399 bp, Gossypium hirsutum
  Clone ID: LIB3083-090-Q1-L1-D4
caaaagataactcagcaagtgctgttattacttgccctggtgtctgtgccatggatgctattaccaaagccttttcttctaaagagacaacacgaaaataggcaccaaggccaatcctacgcaccacttgaaagcacagatgaaactctcctttcagtcgcaaatcatgattcccatggtcatgaccatgaggaatttgagtttagtgaagtctttgtgcatcaactgatccataccatagagtttgtgcttggtgcagtttcaaatacagcttcataccttcgtttatgggccctcagtcttgctcactcagagttgtcagttgtgttctacgagaaggttcttcttcttgcttgggggtataacaatataatcatcctcattgtcggcataatcgtc

SEQ ID NO: 4277 - DNA, 210 bp, Gossypium hirsutum
  Clone ID: LIB3083-090-Q1-L1-D5
gtttcccagtgctgcttgactaaacatgtatttagaatgagcaaacaatatttggccaatgtggcattgaaaattaatgtcaagggtgggggaagaaatactgttcttgttgatgcaatatcacgaaggataccttttgttagtgaccgcccgactataatatttggtgctgatgttacccatccttaccctgtggaggattcaagccct

SEQ ID NO: 4278 - DNA, 384 bp, Gossypium hirsutum
  Clone ID: LIB3083-090-Q1-L1-D6
cctaagcaggcattgccctctatggtatggctttggaggtggtcgtcttaaatggcttcaaagactagcatatataaacaccattgtctatcctttcacatcccttccactcattgcctattgttcactaccagcaatctgtcttctcacaggaaaatttatcataccaacgctctcaaacctggcaagtgttctctttcttggccttttcctttccattatcgagactgctgttctcgagctccgatggagtggtgtcagcattgaggacttatggcgtaacgagcagttttgggtcatcggtggcgtttcagcccatctctttgccgtctatcaaggtttccttaagatgcttgcgggcattgacaccaactttactgtcac

SEQ ID NO: 4279 - DNA, 293 bp, Gossypium hirsutum
  Clone ID: LIB3083-090-Q1-L1-D7
gacagattgatgggttgcaccaggttcttcgatgggctcttggatctgttgaaattttcctaagcaggcattgccctctatggtatggctttggaggtggtcgtcttaaatggcttcaaagactagcatatataaacaccattgtctatcctttcacatcccttccactcattgcctattgttcactaccagcaatctgtcttctcacaggaaaatttatcataccaacgctctcaaacctggcaagtgttctctttcttggccttttcctttccattatcgtgaccgctgtt

SEQ ID NO: 4280 - DNA, 392 bp, Gossypium hirsutum
  Clone ID: LIB3083-090-Q1-L1-D8
tatcatctcaaatgaacagaatccgaaatggtgaactttaccgatacatttgcgacacgaaaggtgcctttgtacagcctgcattgtatgaagcctttggattgacagttgtggaggcaatgacttgcggtttgccaacattcgcaacctgtaacggtggaccagccgagattattgtccatgggaaatctggtttcaacattgatccttaccatggtgatcaagctgctgacatactcgtcgatttctttgaaaagtgtaagaaagatccatctcactgggataagatctcccaaggaggcttgaaacgaatagaggagaagtatacatggaagatttactcggagagactattgaccctgacaggagtgtatggattctggaagcatgtt

SEQ ID NO: 4281 - DNA, 275 bp, Gossypium hirsutum
  unsure (1)..(275): unsure at all n locations; Clone ID: LIB3083-090-Q1-L1-E1
ccgggacacaggaaaagagggcgcaaaacnnggaccaaacggcgganacaggaggggaggcgcggcaaaacagcacncnaacaaacgcncngacagaagaagagccaaanaccaaagggggcacaccaggcgcacacacaagggcgcggaggaaaagggcacagcncggggaacacaggaagaagacncngcaggaaagancggcgcnacaacggcaaaggaacacaaggcagccgccggggacgcgcgaaagaccaacancaccacagnggggc

SEQ ID NO: 4282 - DNA, 325 bp, Gossypium hirsutum
  Clone ID: LIB3083-090-Q1-L1-E10
tgacttcaagaaagccactgctttgattctcacagtggctttgcttgtgaatctcgctttaatggttgatgctgatggtgatgatgataagaagattcgagtcaggaaacataagggtgagaagcagtgtatacaaggatgggaatgttcctactggtcgaaatattgttgcaacaaaacggtttcagatgtcttccaggtttatcaatttgaggacctgtttgctaaaaagaattcgccggtggctcatgctgttggattttgggattaccattcttttattttggctgcttccatttatgaacctttgggttttgggactact

SEQ ID NO: 4283 - DNA, 130 bp, Gossypium hirsutum
  Clone ID: LIB3083-090-Q1-L1-E11
gtcctgttaataagtctttgctttaatttttacactaggtttgcttgttaataatgttgctatggcatatgctctagtgtatgaccattctaacactaccgaaacggaacctcaagatgtgaaaccgtat

SEQ ID NO: 4284 - DNA, 391 bp, Gossypium hirsutum
  Clone ID: LIB3083-090-Q1-L1-E2
agccagtaactcaattaatagacaaaataattcggttaggcatgggagcaaacacatggcacaccctcacaaagttcaacaatgcagaatttaaaagagaaaaaaaaacccacgaatccagtcccaattcagaacttatatcacaaaatcaattcaaaacagaagaaatagaaatgaaaatgaaaatcaaacctatcatttaacttctctaacaattccctcattagactctggtgaggtgtcaagtatgactgaatcaggagtaacaccttcttgatgctgttgttgagcgctcattactttctccatgtctgtcagtctagtccttattacatttgtaaccaaaaaggctacggtgccgatggttcagacccagatgatctttaaaggg

SEQ ID NO: 4285 - DNA, 396 bp, Gossypium hirsutum
  Clone ID: LIB3083-090-Q1-L1-E3
ggctctcattgtaactactctcacccttcaactagccattacgagtgcacaaacaccagctgcctcaccttccagtacgccaaccaccaccaccaccactccaccttcaacttcgccaccacctacaacttccgcaccacctccttcaacaacccctccacctacaacttcagcaccacctccttcaacagcaacgcctccaccttccaccacgcccatcgcgccagctcaaccacctgcaacaactccccctcccactgttgcaccagctacaagcccaaccgtcccaccgtcacaaactccaccacctcaaccacctcaaactcctccaaccacagctccagcttaaccgccagcattgccaccaccatcaccaccaccagtatctcctgcacc

SEQ ID NO: 4286 - DNA, 404 bp, Gossypium hirsutum
  Clone ID: LIB3083-090-Q1-L1-E4
gtgcgatgagccagtagtccagccagagacgccagagaagaaaggtttcctcgagaagatcaaggagaaactccctggacaacacaagaaagctgaagaggccagtagcccagctccagccccagcagctgagccccatcacgaaggggagtcaaaggaaaagaagggaattctggagaagatcaaggagaagcttcctggtaaacactccaaatcagatgaagaaaaagaaaaggcttgagattcaagttcacataaaaatactgatgggattgtgtgtttcttcaattgttaaaaaaatatctgtttttgttttgaggttgtatttgttgtatatttcatattaagtttcttcttttcccagcatttttagtacatatcataagaaaaaaaaagtttgcttt

SEQ ID NO: 4287 - DNA, 385 bp, Gossypium hirsutum
  Clone ID: LIB3083-090-Q1-L1-E5
gtatgtatctttgaggaaaacatacatgaatacccttggttacaagaaaattgaactctttgatatgggagctggagtcagtgaacctacagctgatgaaaatgtttaaatggcatcatcaatgtcaaaccaagagcttgttgatcatgggatgaagacaatggatgagactgatcaggccattgaacgctcaaaaaaggttgttgaacaaacaattgaagtatgaactcaaactgctggtactctaaaaggacaaactgatcaaatgggccgtattgtaaatgagctggatacaattctagtttcatttaagaaggccttccaactggtgaatgagattggtaggcaggtagtcatgataaatgcatcatgctatttctttttt

SEQ ID NO: 4288 - DNA, 394 bp, Gossypium hirsutum
  Clone ID: LIB3083-090-Q1-L1-E6
ccattacaacagcataaggcccctcagcttcattctcttcactcataggaggtaatctagatatataagctaacataggcaaaacaaaagcagcagtcttacctgatcctgtctctgcaatcccaattacatccctttgttgcaaccccaaaggaatagccgccatttgtataggtgaaggcttcttatacccaactctttccactgctttcaataactcggcagtcaatttactctcactccaactcctcattgggcgtggtattttcgaccctttataggaaatattaaaatcttccctgaaaatcctccaatctctttcagtcatttcctcaagcttcttatcagaccaatgcttatcgaccctcatatcaaaagtatcataagtattcgc

SEQ ID NO: 4289 - DNA, 281 bp, Gossypium hirsutum
  Clone ID: LIB3083-090-Q1-L1-E7
ggcgagtttacttgagatgttgactggccggaggtccatggacaaaaacccaccaaatgggggacacaatcttgtggaatgggcgagaccgcatctatgagacaagagaaggtttttccggattttaaatactcgcgttgaagggcatttttatgtcaaaggtgcatttaaagcggcccacctggctgaccaaagtgttatcctagatcccaaagccagacctctgatgagtgaaattgttgaaactctatagccccttttataccttaatgatatggcca

SEQ ID NO: 4290 - DNA, 390 bp, Gossypium hirsutum
  Clone ID: LIB3083-090-Q1-L1-E8
ggtttgagaagatacaaaagacagttaagaacgttctagatgctgttaatatattcaaaactccagtaaatatatcagatgcggctcatgtacgtaaggaatatgatgaatccagtgccaagttatctaaaatacagtcaaggatatcaagtttgacacaaaagctaaaacatgattttggactggagaaggagttctatgcattctatgatcgttgttttgagatcaagcagaacaagtatgtttacaaagtttgcccatacaaacaagcttcttaggaggagggccacatgacaacccctttatggcgttgggataaatttgaggacgcataccagatgatggtattttcaaatggtgataagtgctggaatggtccacaacgaaata

SEQ ID NO: 4291 - DNA, 99 bp, Gossypium hirsutum
  Clone ID: LIB3083-090-Q1-L1-E9
acaagcatggagaaaaaccatccccccctaatctttgcacggagaatagtgaatgattatcccacgtaaggctacaagaatgcttctaaacacataatc

SEQ ID NO: 4292 - DNA, 366 bp, Gossypium hirsutum
  Clone ID: LIB3083-090-Q1-L1-F1
gagaaatcctccatgttcaagccggtcagtgtggtaatcaaattggtggcaagttttgggaggtagtatgtgatgaacatggcattgatgccactggtaactatgtctgcactttgcctgttcagcttgaaaggcttaatgtttactataatgaatccagtggtggcagatatgtgcctagagctgagttaatggatcttgagccaggaactatggacagtttactaacaggttccttatggaaaattgtttagaccagataactttgttttcagccaaaatggaactggcaataactggtctaatggacattatacttaatgagctcaatcgaattattcaattcttgatgtttttcttaaagag

SEQ ID NO: 4293 - DNA, 395 bp, Gossypium hirsutum
  Clone ID: LIB3083-090-Q1-L1-F10
aaatcgtttaaaaggtgaaatgagtcaggtgcgaaatgttatgatagagaatattgacaaagttttagagagaggtgatcgcttagaattgttggttgataaaactgctaatatgcaaggaaatacctttcgcttcagaaagcaagcgcgccgttttaaaaacacagtgtggtggagaaatgtcaggcttacggttgcgctcataataatcctcctaattgttgcttatatcgtgactgcgtttgtttgcaaggggcccacgttaccatcctgtgtctaaaacgaggtcaacagcttgagattcgaacacgttccgcatcccggtgcttcttttttccatttgtctccgtttttgtttgcttgtttctaatctgcttgggggatatatgtgggat

SEQ ID NO: 4294 - DNA, 374 bp, Gossypium hirsutum
  Clone ID: LIB3083-090-Q1-L1-F4
ggactttccgggtcggtgggttacagctttcaaagtttgacatcattgaaagaattggacttgagccacaacaattttgcaggagatataccatattttactcttccgaacttgcagcgattaaatctcgagtataatcaatttactggcagcgtcccttttgccatcagtcagatgccttctcttcagtacctaaatcttgctcataatcagttgcagaatgcgctgaacgacatgtttggaccactttcttccctctccacactggatctctctttcaattctctgaacggtggtctgcccgagagttttaagaatcttaccagtataagctttatgtacttgcaaaacaaccagttttcaagcactattga

SEQ ID NO: 4295 - DNA, 379 bp, Gossypium hirsutum
  Clone ID: LIB3083-090-Q1-L1-F5
agaagggagatattgctatttttaggaaaaaagttaatgacaaatcctgccgcaggaattctgccaatatgtgtaaacctaggggttcagatgatgtttggtacaagaaaatggaaacatgcataacccctttccctaaggtaagtagtgcaagtgaagtggcaggaggggaactgaagaagttcccagctaggctttttgctgtccctcctcgtatatccaaaggacttgttgagggggtctcagttgaaacttaccaagaggacaataagctttggaagaagcatgtaaatgcttacaaaaggataaatagattgattggtactgcaagatacagaaacgtgatggacatgaatgcttgtcttggaggatttgcagc

SEQ ID NO: 4296 - DNA, 154 bp, Gossypium hirsutum
  Clone ID: LIB3083-090-Q1-L1-F6
tttcttttttttttctttacttctttctatattgggctgctgtctttcttaggtcgtcgtcatctataaattttctaatttttttccaataaattgataaccctcctttaaaaaaaaaaaaatcctaactcctatacaatatctcccatttttc

SEQ ID NO: 4297 - DNA, 403 bp, Gossypium hirsutum
  Clone ID: LIB3083-090-Q1-L1-F7
tttgaattgcaacaaacaatagagaaacacattatgttttctttttcttgttctacataaatcaaactctgcctatttgaatgagaaggagaaattttgaacaaaaatcaaaactttcaatatccatgaaaatcaaagaaataaaccgaactcagttgtccttggtagctgcaatctgctttgcaccaactgcaaagaattccgtaatgacttcaagaggcatgcctttggtttctggaacttttaagaagacaaacacccatgatataacgcatacaactgcatacatgccaaagacgccagcaaggccaactgatttcagcagcaacgggagcgaatacgtgacaatgatgtcgcaaatccaaaaagttagggcgcatatagcaatgcagatgccacgaac

SEQ ID NO: 4298 - DNA, 396 bp, Gossypium hirsutum
  Clone ID: LIB3083-090-Q1-L1-F8
cgaatgcccagtatcctatcatggctaccgggtttatgctatgcctgtgtttgacctgctggagaacatgatgatcaaaaggctcaacttcccaccagggattgctctcaggctcataagtcgatctacttacgtagcatttaccctgttcataggagtcactttccctttctttggagatcttctgggtttctttggtggatttggctttgctcccacttcatattttcataatgtggttggtgatcaagaaaccaaaaaggttcagcctcaattggttcatcaattgggggtgcatatttgtaggagtgttcattatgatggcattaacaattggaggtttaaggaatatcatagcagatgcttcaacatacagtttttatacatgaatgaatg

SEQ ID NO: 4299 - DNA, 353 bp, Gossypium hirsutum
  unsure (1)..(353): unsure at all n locations; Clone ID: LIB3083-090-Q1-L1-G1
ggcacanggagaccccagacccagncaagaggaaaagcacgggggggagagccaagagaaaagacaaaaggggcangcccaaccaagcgaacncgacaagggcaacaccccgaccgagacggaaaagcgagaaganacgaagcccgagcacagaaaaangacggccaagggacagcgagaaagaccggggccccagggacaggacgaagggcacaacccncgaagcacgaaaacgagagagagaaaggcaacgaagaaagacgagacagaacggaggaaaagggacccagggacaaagggccagaacaaccaagcgagaagaagaaaacacccggggccacgcaagaccgaaa

SEQ ID NO: 4300 - DNA, 399 bp, Gossypium hirsutum
  Clone ID: LIB3083-090-Q1-L1-G12
cgatagtgtaattttacggttcaagttgaagaaaaaaggaaaaagagtaaattcgcggttcaccgagttacggtaagtggggttggaaaaagaggcattgaaggcattagcgtttcacaggtgtccaccctgtagaagttggttacccagtcagagatattcttgtcttcatttccactgttcctttgcccctctctgtatacccatttacataaaccaaattccctagtcgcttgagccatacttcaaacccaacccaacccaaccaaataccaaaaaaccagagatctaatctaccataacaaaaacaattaacctttgtctggttcccatagagacaaattaagaatgagggaaccaacgatggttgttggcgcagacagcaatgctgcttgtgct

SEQ ID NO: 4301 - DNA, 356 bp, Gossypium hirsutum
  Clone ID: LIB3083-090-Q1-L1-G2
acaaaacaggctctttatcaaaatgcctggataaggtgtgactaattaagtctctggaagagattgaaaaacagttgcaaatggaaagtgtatcccaagaccttgagttgggaaaatcaccaaatgcagatgtctctacacgattggggtatgaagaaaccagcatttctgagatcgaaaagtcttttcttcaatatacaatcagagtggcagataagaccgagcgtaatgaagtcgaagagatgcttaagagccaaatggttctatgtctaagcagcctaagctactgtcttaatgatttgaagagagaagccacagaaacagagaaagaaatagctgaactactgaaatgggag

SEQ ID NO: 4302 - DNA, 258 bp, Gossypium hirsutum
  unsure (1)..(258): unsure at all n locations; Clone ID: LIB3083-090-Q1-L1-G3
ccccgggccgcgaggaaacggaacgagaaaacgaancacacaccagcccncnaacaaaanccacngggcgcggaagaagacaagacggggaagcaaaccnggggaaaaaaccaaaagaaacagcnagggggggggaggcaaaaccagaaacaaagcccnccccaggcaacagcacagagaggggagcagccaccaaagagacagaaggccgnagcccaacacaancaaccangcanaccgaggaagcaagggaaaaca

SEQ ID NO: 4303 - DNA, 315 bp, Gossypium hirsutum
  Clone ID: LIB3083-090-Q1-L1-G4
agaacatcagcttcactgtttgggatgttggcggccaggacaagatccgaccattgtggagacactatttccaaaacacgcaaggacttattttcgtggttgatagcaatgatcgtgaccgtgtggttgaagctagagatgagttgcacaggatgttgaatgaggatgagttgagggatgctgtgctgctagtatttgcaaacaagcaagatctttcaaatgctatgaatgctgctgagattaccgacaagcttggccttaattctctccgccagcgtcactggtatattcagagaacttgcgccacatctggtg

SEQ ID NO: 4304 - DNA, 332 bp, Gossypium hirsutum
  Clone ID: LIB3083-090-Q1-L1-G5
acgtagtgagtgaaaattgactttcacaaaatgtgtttattaaacatacaaactttaaaaaaacaaaacaaaagggggtcattagatacatatacagataaactcttgctctagcaagtccttgatgagtgcaagggccatacctttaacacgagtccttatcctatgaattttttcttctcatatggtgaagaatgagaggtgatccttcaaataaatccaatagataattttccagatcctctggggtatacttaatgtattttccaaaatttcttccactctctaactgactcccaaatcttcccatgaaggatcgataagcaggaatt

SEQ ID NO: 4305 - DNA, 380 bp, Gossypium hirsutum
  Clone ID: LIB3083-090-Q1-L1-G8
gtggagagacttgaaaacagcagacaaaaacttctaatggagattgataaccaatcttcggagatagaaaggcttttagaggaaaattctaatctctcatcttcttatcaagaggcaacgaacacagccaaacagtgggagaatcaggctaaagactgtcttaagcaaaatgaatagcttcgtagaattctagataacttgagaacagagcatgctactttgctatccaaaaacggctctggggctatccaaactggttcacagggaaatacagctgacattctctccctctatggacaacttgtgcacgatcacaacatagcccattcactatcagctgaacaaatgcatctttcagcgcgtctacaacaagcgacgct

SEQ ID NO: 4306 - DNA, 394 bp, Gossypium hirsutum
  Clone ID: LIB3083-090-Q1-L1-G9
accgatcagatagcagcagctccagctcttcaagcgacggggaagaaggtgaaggagaagagaagaagaagaagaaaaagaaggagaagaaggggctgaaagaaaagattgaagagaagttagaaggagaaaagaaagaagaggacacctcagttccagtagagaagtgcgatgagccagtagtccagccagagacgccagagaagaaaggtttcctcgagaagatcaaggagaaactccctggacaacacaagaaagctgaagaggccagtagcccagctccagccccagcagctgagccccatcacgaaggggagtcaaaggaaaagaagggaattctggagaagatcaaggagaagcttcctggtaaacactccaaatcagatgaagaaaa

SEQ ID NO: 4307 - DNA, 366 bp, Gossypium hirsutum
  Clone ID: LIB3083-090-Q1-L1-H1
acagaaaagatggacatttttaaatttctgcaattagtacaccaaatttgtgttctaatagcacaacaatatgcatccacacacttaatggtttgattttttttcgaaagcaaagcactaactcgagttccctgcactcttcattgtgttacacttccatgaaagtattccgttacaaattcggctatgtagagcacaacttgtctcaccttacagttctctggctgattgttgagtcagcagggtggtacggtccaataggcggtagggcgagaaagttgatcatatatttgaagcacttaaggccattactttgcattgttcattcatggccaaaagttgagcttctttcttgtcgagaagtgc

SEQ ID NO: 4308 - DNA, 349 bp, Gossypium hirsutum
  Clone ID: LIB3083-090-Q1-L1-H10
ccgccgactatatttgtcctttgctgataatgcttaggtgctggaaggttcctgtggcaaatctcttgcttctttccctcaatgctgtttctactccacagcactttgaggattaataagctatgataatcctaagaacaagatcactgcagtgcctgctgaataagatgatatatggggtgctaatttcaaagtggaagggccatctgtttttgctgacacaaattattcctttgctctctccttttaaatctatggatccatggaattatatgagctgcatatgcatttcatatggatcaatccccatattaaagtacttgtttagtgtctaatgaaatgaataaaa

SEQ ID NO: 4309 - DNA, 403 bp, Gossypium hirsutum
  Clone ID: LIB3083-090-Q1-L1-H12
aaaaaaacaaaaaacatatttccagaaacaaagaggacacgacaaatcccctccgttcttcagtttcttcctgacaaactaagaagaaaaaaatggctgtctcttcggccacattttccacttttgtctcgccccaaacggtgtcgttctcgggcaaacccttttttttcggtttttttaatccaactaacgtgcccttggtccgaaccttgcttaaggccacggtttcaaagacggacagcggtccccggaagccgcgtggcatattgaagccccgccctgtgtcgcctgagatgcaagctctcgtgggagtcccggaaatccctcgaactgaagttcttaagcagatttgggcttatattaaagagcacaatcttcaggaccccaataacaagaggtttat

SEQ ID NO: 4310 - DNA, 302 bp, Gossypium hirsutum
  Clone ID: LIB3083-090-Q1-L1-H2
ccgacctccaatgagaacacggtcagggttaaaaagatcttgaatagcagttccctcggcaagaaactctgggttcgaaagaatttggaaattgattcccttgctattgtgggtgagaatcttttcgattgcctcagcagttttgacagggactgttgatttctcgaccacaatcttatcagattttgatacatcagcaatcattcgagcagcactttcccaatatgtaagatctgcagccttgccagctccaagccctcgagtcttggtcggagtgttgacggaaacaaagactatatcag

SEQ ID NO: 4311 - DNA, 388 bp, Gossypium hirsutum
  Clone ID: LIB3083-090-Q1-L1-H3
gctaaacttcaaccagatggaattggcttttctgacttaccaaatcacaaggccattctcgagacaagccttcgtcagcatgctaccctttctcaagatgatgttcttacagttaaatatggggagttgacatataagttacgtgttcttgagctaaaaccctcttcaagcatttctgtcttggaaacagatattgaggtggatattgtcaaccctggtgttgaatcagagaggactgatcaatatgtcctaaaaccactagcgtttggtgcatcagaatctggattggttgaggagggaaattacatgtactataagttctcaattgatgatgatacatgggaaaaacttgtttctgatgatgtcaaaatagaagtgaagatagatg

SEQ ID NO: 4312 - DNA, 334 bp, Gossypium hirsutum
  Clone ID: LIB3083-090-Q1-L1-H4
tgctgagcaccatagctactggattggctattgatgcttatggtcccatcagtgataatgctggaggcattgctgagatggctggcatgagccacagaattcgagagagaactgatgctcttgatgctgcaggaaacaccactgctgctattggaaagggtttcgccattggttcagcagcccttgtgtcccttgccctctttggtgcctttgtgagccgtgctgctatttcaacagttgatgtattgacccctaaagtttttattgggttgcttgtcggggcaatgcttccttactgtttctctgctatgaccatgaagagtgtgggaagtgc

SEQ ID NO: 4313 - DNA, 392 bp, Gossypium hirsutum
  Clone ID: LIB3083-090-Q1-L1-H5
tttccacagagatttgatggtattgatcgtcatgatcgatatgctaatcgaaacgtcgtcttcttcgatatcaacatgttgggattagatggacttcaaggccctgtatatgtaggcacagggtgtgttttcaacaggcaggcattgtatggctacgatccaccagtctctgagaaacgaccgaagatgacatgtgattgctggccttcttggtgttgctgttgttgcagaggttctaggaagaaatcaaagaagaaaggcgaaaagaagggcttactcggaggtcttttatacggaaaaaagaagaagaagatgatgggcaaaaactatgtgaaaaaagggtctgcgccagtctttgatctcgaaaaaatcgaagaagggcttgaaagata

SEQ ID NO: 4314 - DNA, 402 bp, Gossypium hirsutum
  Clone ID: LIB3083-090-Q1-L1-H6
gtttctcctgatccgtttggaccagaagcaaaatattttacagaagttcgctgtttgaatagagaggttcgtattgtcctcgaaggtgtagacaaattcagcaatttgattgggtcggtttattatcctgaaggtgatacggcaaaagacctcgctttggagcttgtggaaaatggtctagcaaaatatgttgaatggagtgctaatatgatggaggatgataccaagcggcggttgaagtctgcagagcttcaagccaagaaggctcggctgaggatgtgggcaaactatgtaccgccagctacaaattccaaggcaattcgtgatcaaaacttcacaagaaaagttgtggaagttgttagtggggactgtattgttgaggctgatgattctatcccttat

SEQ ID NO: 4315 - DNA, 384 bp, Gossypium hirsutum
  Clone ID: LIB3083-090-Q1-L1-H7
cgattttctttagagttttaaatttgatcttctcttccaaaatcaaatccaaaaagagagaaaatcccaccaaaaaaatggcgatttctaatgacaacaacaacgacgagcaccatgaatcgagtcctcttttgagcaaacaagtggcagaccaagatttgaaggagaaaccaagtggtaaaaaggcaaaagaagctgccgccgaggtgccagctcatccggtagttgctaccggagatgggtttgggtggacagctgatgggttgccgttggtccaccggagtgtcgtcggagaacccttgggtcgatctcaatggaactcatctctccttgcttgtcttggccgtaacgatgaattttgcagcagcgacattgaagtttgtc

SEQ ID NO: 4316 - DNA, 285 bp, Gossypium hirsutum
  Clone ID: LIB3083-090-Q1-L1-H8
ggcaaaaagaacccaccgctttattgttttcaaaatcgaggagaagcagaagcaagttattgcggagaagcttggtgagccaactgatagctatgaagattttacttaatgtcttcccgctgatgaatgtcgttatgctgtgtacgattttgattttttaacagccgagaacgtcccaaagagcataatctttttcatcgcatggtctcccgatacatcaaggatcaggagcaaaatgatttatgctatctccaaagacagattcaagctagaactggatggaat

SEQ ID NO: 4317 - DNA, 388 bp, Gossypium hirsutum
  Clone ID: LIB3083-091-Q1-L1-A10
ggataccccggacttaatttttttaaatcatattatatatattctatacatatcttctaacttcgtcgggatatttgatatgtatatatatatacattttcaatcaactaattaatgccacctttctcaaatcttaatatactattgtgaattaaatataaatctttttattcatgtccccgagccataaaaagtgataacatctttgtatccacccgtaccatttccggatgaattttaatttaaccatcacctcctcctccacaattgtaatccaaacaattccacccgatgtttaaacacttctttacacacttttttacttctttttctccgctttttctgccaacaatttctgccttcattaaaaaccacaccattctaactc

SEQ ID NO: 4318 - DNA, 281 bp, Gossypium hirsutum
  Clone ID: LIB3083-091-Q1-L1-A12
tagatactgtgttgcaaattctcctaattttttcagaaaatggtgcggaatggaaaaaatgagggagatccttcatgttcaaagtggacaatgtgggaaccaaatcggttccaagttttgggaggttgtttgcgatgagcacggtatacatccaactggtaggtacattggtttctttgatctgcaattggagcgtgttaatgtttactataactaggctttttgtggtcgctaagaacctcttgctttgctcatggacttggaaactggtactattgaca

SEQ ID NO: 4319 - DNA, 370 bp, Gossypium hirsutum
  Clone ID: LIB3083-091-Q1-L1-A3
aaaaaacctacaccgccatccctcgtaacgcacagcgactgttcccagactttatccgaggaatttcttttgtcatttcgttgataatccgaacttcaattctttaaaaaggctttggattcttggataaggcctctttgataaacaaagtttcatgtctgatctcgacgtccaggttcctactgcctttgatccctttgctgatgcaaatgctgaggactcgggtgctggtgcaaaggagtatgttcatatccgtgttcaacaaaggaacggtaggaaaagcctgacgactgtccaagggttgaagaaagaattcagttacaacaagatacttaaagacctcaagaaggagttttgctgcaatggcact

SEQ ID NO: 4320 - DNA, 300 bp, Gossypium hirsutum
  unsure (1)..(300): unsure at all n locations; Clone ID: LIB3083-091-Q1-L1-A5
ctctagtctttctttngttgttacacatgaagagtgggtagtgtatatattgcgaaggggatttataaatatacccatggaagtactggccccaaattaatatttaaagtttttatggcaaaagtaaaccttattaatgtaaaacttaaccatggaaaaattagaacatgcatacctttatatttatatgtatattaactaccggaaggatttatacatattaacttgaataaaactggtaacctaataaaagtgttatgaagcccgggttaaagtaatcttaagggggtgaaaaagccc

SEQ ID NO: 4321 - DNA, 248 bp, Gossypium hirsutum
  Clone ID: LIB3083-091-Q1-L1-A7
tcccaacaggtgagaagacttaactaatttggtatataaaacaagctatgtacaggcgctattttaggattgtttcttggctaaaactaacaataacattaacgctgtgaaaataagcaacatactacgaatcacatatcccctgttattactaagagaatgaacatattaactgctctattgaacggaggcctaaaaacacagcataccaaaacccatatgcagccaaatggggcaaaagaaaaccg

SEQ ID NO: 4322 - DNA, 369 bp, Gossypium hirsutum
  unsure (1)..(369): unsure at all n locations; Clone ID: LIB3083-091-Q1-L1-A9
gcaaattaacgcctttttcttctgattgctgaactctggcccccaacatcaccatggcagatagggtataccccaaacaagcgacaaatggcaccgccgccacatccaacccttcttttccggccactaaagcacaacaatacggagccacccgccctgtctaccgtccacaacccgaacgccaccgctaccgccgctcttgctgttcttgctgcctttggaccaccatagctatcctcgatctcatactcatagccgccgtagcttctgctatatagnacgttctttaccgccctcaccgtcctactttcactgtatcctccctcaaaatctcggcacttaacgtaacctcagcttacaagctgatca

SEQ ID NO: 4323 - DNA, 342 bp, Gossypium hirsutum
  Clone ID: LIB3083-091-Q1-L1-B1
aaaataaaataaaaaagcattaaaaccccgtgaatggaaggagtacctacagtaatatttgtcaacatcccaaaaggaagaagacataaaaattaaataaaaaacaacagagtacagggcattttagattgttcttcctctactaacatacattaacctgtgaaataagcaacatatgtgaatcacaatcccctggtattactaagaaatgaacataataactagtctatggaacggaggcctaaaaacacaacataccaaaacccaaatgcagccaaatggggcaaaagaaatccgatcccctcatttccttttgcccttaaatgcaaaccttcacgatca

SEQ ID NO: 4324 - DNA, 383 bp, Gossypium hirsutum
  Clone ID: LIB3083-091-Q1-L1-B10
ggagagtctagcttacacaaaaacaccactaccaatgggcgccggtcaaagtgactggtatttataatcacataaagaaaggcttagtttggtggcaattccctgctttccacacttgtattctaatcctatatactactaaaagcttaaggattctgatattcacgatcaccactatataatatgttagcttttaaaccaaagccttcttccctcaggtcaactttctccggcactgccctccggtcacctccacggctatatggggttccggtgctgctcttctttttccggactacgaagtcaaggcccctggttcgtgccgtcatcagtgaatacaaggctgtggaataactaaaaccttttcacttgatcaaaaacac

SEQ ID NO: 4325 - DNA, 394 bp, Gossypium hirsutum
  Clone ID: LIB3083-091-Q1-L1-B12
cagggaaaaggggagaaaaaaaaacccccagtaaccacttaagacctaaaaggtaaaaagagggggaaaaaaaagaaggggaataatggtttggttttggttgggttctgaatgataattcttttcctcgattaaggcttaaaaaactctggtttccttcacttcttcactttcaggggggctttgagttacttatcggcgtactactagaaacctttcttgttaagtatcttctgcatcatacataggaagctagatgggttccagattcccatctcatcagctcagcaatgggctttacgtgtcaggcaggccagagcagcctaaagaaaggactccgaccatgagctcagtggccatgccctatactggtggagatattaagaaatcagga

SEQ ID NO: 4326 - DNA, 350 bp, Gossypium hirsutum
  Clone ID: LIB3083-091-Q1-L1-B3
tgagcggagctcttacggcggcgtatttagctcgaagagcggcgcaaaaggagagggttcggatcctctaccgccgtgccctgaaagacacactcaactgggccgtccatcgccacctcttttatcaagatgcttctgaccttcgcgagaaattcgaagccaacaagcatgtggaagatcttgatataatcgacaaaatgatagatgcaggtgaagcaacttataataagtggcggcatcccgatccttatatcgttccttgggctcctggtgggtccaagattactcgaaaccctggcccaacttctgggatcgaaatcgtgtatgattatgggctagaagaaaatgac

SEQ ID NO: 4327 - DNA, 392 bp, Gossypium hirsutum
  Clone ID: LIB3083-091-Q1-L1-B5
gtctcgagttcatttgattttttttttccaaattgcgtggcgctttttttggtccaaattcgtgttcacagttgagttcgcagcgatgtcgaacgagttcgccgataagggggacaagattatctatgaaaccgaagccaaagggttcaacccgggattgattgtattgctggttattggtggactactgataacattccttgtggggaactacatactttactcgtacgcgcagaagactcttccttctaggaaaaagaagcccgtatccaagaagaagatgaaacgagagaggctgaagcaaggagtctcaacaccaggggaataggaattcaaggaccgactcttctcttttttcgacattgataaaaactgttttgttcacaatttct

SEQ ID NO: 4328 - DNA, 187 bp, Gossypium hirsutum
  Clone ID: LIB3083-091-Q1-L1-B7
cgcgcctgttccgaattctgattccctaatactgcgtggcgcattgaaaggcaaggggttcctctactcaacaagccctcaagaacatagttacctgaggcaagcatcgcctcatggtctatttaaatgcttccaaacatgatcaggaatttacaatcaacaagaacttggaaggtctttcaataaa

SEQ ID NO: 4329 - DNA, 400 bp, Gossypium hirsutum
  Clone ID: LIB3083-091-Q1-L1-C1
tatggcccagcctttgcttctccaaagcgagtgattgcatgtcttattgaaaaggagattgaattcgagactgtccctgttgatttgcttaaaggagagcacaaagaccctgaatttctcaagctccagccttttggaacagttcctgtcactcaagatggagattatgttttatatgaatcccgtgcaatcataaggtactatgcagaaaaatacaaatcacaagggactgatctactgggaaagacagtagaggaaaggggtcaagtggaaaattggctagaagttgaggcacacaatttcaacccatcaatttacgccttgaccctacatgtgatgtttgcttccaagatggggttccctcctgatgaaaatttgatcaaagaaagcgaggaaaagc

SEQ ID NO: 4330 - DNA, 151 bp, Gossypium hirsutum
  Clone ID: LIB3083-091-Q1-L1-C3
actgggcccgctgcagaattccacgagcctgtactttaatcacaccgatttggcgtattgattcgatttgccccaaatggccttgcacactacgcttattaactgtgcttaaccaaccagattagggcctttctataattaccctgtaata

SEQ ID NO: 4331 - DNA, 403 bp, Gossypium hirsutum
  Clone ID: LIB3083-091-Q1-L1-C5
aaatccgaagatgaagaacataaaaagaaggtcgaggcaaagaatgcattggaaaactatgcatacaatatgaggaacacagtgaaggacgagaagattggtgctaaactcccagcagctgataaaaagaagattgaagatgctattgaacaagccattcaatggctagacagcaaccaactcgccgaagccgatgaatttgaagacaagatgaaggagttggagagtatttgcaaccccatcattgctaagatgtaccaaggtgccggcggtgacatgggtggtggcatggatgaggatgttccggctggtggaagtggtgctggtcctaagattgaggaagttgactaaatcattgattttcttcacctggtttctctattggtctcttatgttttttggg

SEQ ID NO: 4332 - DNA, 398 bp, Gossypium hirsutum
  Clone ID: LIB3083-091-Q1-L1-C7
ctcaaaaagagaaagattgaccgaaacaatcggatggctgcacaccttgaatccaaggagggaaaggcatctgaagcttttcttagaaagtatcgtcttcatgggaacttgggggaatcagaggacattgatattgtggcactaaagaactacatggatgctcagtactttggtgagattggtattggcactcctacacagaacttcactgtgatatttgacactgggagttctaatttgtgggttccttcatctaaatgttatttctcgatagcatgctatttccatccaaaatataaatcaagccgttcacgtacctacaaggctaatggtaaaccagcggatatccaatatggcactggggctatttcaggattctttagtgaggaccatgtaac

SEQ ID NO: 4333 - DNA, 395 bp, Gossypium hirsutum
  Clone ID: LIB3083-091-Q1-L1-C9
ttacgagagaggtcctcaagatcattatcctcctcctgggtattcctctccttatcccccaccgggctatccatcagcccctcctcccccatcttacgaaggctatcctcctccgccaactggatatcctgcctatcctcctcagccgcctcgccagccctacgacggttaccaaggctattttgctgaagggtatccacctcctccgccccctcaacctcatcctcaatatcaacactaccaccactatgaccactaccattaccagaaccagtctgattctggctgtttctctttcttgcaaggctgtttggctgctctatgttgctgctgtgtgttggaggactgctgcttcttcctatgatataattcatgacggatgagttatttcattt

SEQ ID NO: 4334 - DNA, 399 bp, Gossypium hirsutum
  unsure (1)..(399): unsure at all n locations; Clone ID: LIB3083-091-Q1-L1-D1
ggattttcgagagaaatgagtgccacaagacaccgggcccgtagggggtggggttaaccatgtattggactatttgagacgaatgcaagcggagaatccttcgttcttttatgcaattcaaggtgataatgaccacaccggtggaagcatattttgggcggatgcaacatcaaggatgaattatgcttactttggggatactgtcatatttgacacaacatataggaccaatcgttatagggttccgtttgcctcgtttactggactcaaccaccatgggcagccggtgttgtttggttgtgctttaattctcaatgactctgangcctcatttgcatggctnattcaaacttggcttcatgcaatgtctgatcgtcgtcccatctctataacaactga

SEQ ID NO: 4335 - DNA, 394 bp, Gossypium hirsutum
  Clone ID: LIB3083-091-Q1-L1-D10
gtaacctctaacttaacccgacccgcgatcgctttttcggcgaaccttcttgaatcttccgtcgattccgataaccctagaaggagcacttcattcttcaagtttagcaatggagatgaagtcgaagacactactcatactatacgcaactcagacgggaaacgcattatatgtagccgagcgtattgcacgagaagctgagcgaagagcctgcaccgtcgttattcgttcaaccgacgattatgatgctaattcgttgcctgctgaagacactgtcatttttgttgtttctaccacaggccaaggggatactccagattctatgaaggtattttggaggtttcttctgcaaagaaatcttggcagccattggttggaaagaattcactatgca

SEQ ID NO: 4336 - DNA, 389 bp, Gossypium hirsutum
  Clone ID: LIB3083-091-Q1-L1-D3
caacaatttcttgtttacgaatatatacccaatggaagcgggtccattcacttgtacggagttggtcaagtctcagctcagaagatagaattcaagcatagactttcaatagctctaggtgcagctaaaggtgatcctctgcaaaatcagcttggctcatctccactctttaagtcctcgattggtacataaagatttcaaaacggcaaatgttcttgtagatgagaattttatagcaaaggttgcggatgcaggactgcgtaattttctgggaagaattgatgttgctggaccttcttctcaagtgacagcagatgagatatttcttgctcctgaggtgagggagtttagacgtttttccgaaaaaagtgatgtgtatagtttcggag

SEQ ID NO: 4337 - DNA, 335 bp, Gossypium hirsutum
  Clone ID: LIB3083-091-Q1-L1-D7
tgaatctgaccatgtattcgaaaataccgggcctgatttggctgatggaagggatccaacatgatttcctttgttttacattaagccttctgaccaccaacatgttattacgaagtattatcctgaggagaagggtcctgtgaataatatcgatccaattggcaattctacagtgatatattagaacgtctgcgctggagaaaattgcacctacatggatgaatatttctttgaggatgaaagatgacccattgactgacaaagcatttggatgggtgctagaaatgtatgcatatgctgtggcatctgcactgcatgacgtgcaccacatactt

SEQ ID NO: 4338 - DNA, 385 bp, Gossypium hirsutum
  Clone ID: LIB3083-091-Q1-L1-D9
ggccgcacccttgctgactacaacatccagaaagagtcgaccctccaccttgtccttcggcttaggggtggcatgcagatctttgtaaaaacgctcactggaaaaaccatcactttagaggtggatagttctgatacaattgataacgttaagtccaagattcaggacaaggagggcatcccaccagaccagcagaggttaatttttgctgggaaacaacttgaagatggcagaacccttgcagactataacattcaaaaggaatctaccctccatttggtgttgcgtcttcgtggtggtatgcaagtttttgtgaagaccctcacaggaaagactattaccttggaagttgagagttctgatacgattgacaatgtgaaagcta

SEQ ID NO: 4339 - DNA, 344 bp, Gossypium hirsutum
  Clone ID: LIB3083-091-Q1-L1-E1
attctaatggctgaacctgaccatgtatttgtaaatcctgtgcctaacttggctcgtggaaaacatccagcagggtttcctttcttttacattaagccgtctgaccacgagcatgttattaggaagtattatcctgaggagaagggtcctgtgaagaatatcgatccaattggcaattctccagtgattattagaacgtctgtgctggagaaaattgcacctacatggatgaatatttctttgaggatgaaagatgacccagtgactgacaaagcatttggatgggtgctagaaatgtatgcatatgctgtggcatctgcactgcatgacgtgcaccacatact

SEQ ID NO: 4340 - DNA, 394 bp, Gossypium hirsutum
  Clone ID: LIB3083-091-Q1-L1-E10
aaatggttctgctagacaaaatgtgggacgatgtagtagctgggcctccacctgaacgtggtctcggcaggcttaggaagatcaccacccagcctttgtccatcaaagatgaaggagaaaggaaaaagtaccagaggtcgttgtcgctgccgaatagtccagtgtcaggtccgacacccgtgacaccgacgactccgacggcgcgtaaggagaacgtgtggaggagtgtgttccatccgggtagcaacctcgccaccaaaagtataggttctgaagttttcgacaagccacaacctaactctcctaccgtctatgactggctttacagtggggagaccaggagcaagcatcgctgagagggtggcgactgacaggcggctagcaagctgctcta

SEQ ID NO: 4341 - DNA, 389 bp, Gossypium hirsutum
  Clone ID: LIB3083-091-Q1-L1-E11
cttgtttctaactttgctgctttgttctcttcttctatgttcttcagtttttgaaccaacaatggctcagcctcgttcacctttttgtgaagggaaatgcaaagggaggtgcaataaagcggcggtttgggatcgatgcttcaaatattgcggcatatgttgcgaggagtgtaaatgtgttccttccggtacttttgggaacaaacacgagtgtccttgctacagagacaaggtgaataacaagggcaaacccaaatgcccttgaaaatgaaatatattcgagttcgggatttcatcaagcttaaagatcgaggacgaagaggctatatatatatatgcatgctgatggtgttattataaaaatgaactgttttattgctgttgttttc

SEQ ID NO: 4342 - DNA, 394 bp, Gossypium hirsutum
  Clone ID: LIB3083-091-Q1-L1-E12
gagctgcttcaagtgtccacactgtggtgaagcttcgtgcatctttggtgctggtggagcccgtaaaacagcagctgagatgggtttgcaacttgttggtgagatacccattgaattggacattaggaaaggctgtgacaaaggcatgccgatagtggtatcagcacctgattccgctgtctccaaggcttaccatgatgtagctcaaactgttgtcatgagacttgaggatctggcaaaggcatgaaactactcttgaggttggtcagtgaagtttactcgtgccatccatctccattcctgtgctttcgtggtggtgctttgttcatcttgatataaataatttttgagtttgagcatttttggtcattcgatgacactattaagcatttgg

SEQ ID NO: 4343 - DNA, 251 bp, Gossypium hirsutum
  Clone ID: LIB3083-091-Q1-L1-E3
gcaagcttgtttactttcgaatgacttattccaaaacaatggatgagatttgttttaaggatggggtacaaaatgatcatcttaatgttaagtaatccaaacctcccaaggttcaatgcaagaccaataatgagaagccctctagtcccacaaatgcttatatcatatttaatgaacaaaagtccagatggaataactgcatacgtgatgttgacagcatcaaatacatgatctgaggttacatattcaca

SEQ ID NO: 4344 - DNA, 391 bp, Gossypium hirsutum
  Clone ID: LIB3083-091-Q1-L1-E5
atggatgagttgagcaagacattaggggagttgaagcgacgggttaggggagacgttggggtttcaaatgagtaatgcgcggacatgggtgagtgcggtgctgacgaatgaggacacgtgtcttgatgggttcgaaggagttgacggcaaggttaaatctaatgtgaagaggaagatcacgaatgtggctaaagttaccagtaatgctctgtacatgatcaataggctcaatgaaagtcgtggtaggcaccgttgaatctttgatgatgatgatgatgaataatggatggatgcgatttatttagcttattatgggtcttaaatataagttcttattttgattttggttgcaagctgtatatgtaatgctttctatacatatattaagcat

SEQ ID NO: 4345 - DNA, 394 bp, Gossypium hirsutum
  Clone ID: LIB3083-091-Q1-L1-E7
tttggctgcaagatttggtttcttggaccaagattggcaagatttgaaatcttgattgtcttgattcttgaaatctcttcgaagagcaaaattgggccaagattcggtttcttgattttcttgacaacaagaaagtgaatcttgattttcttgttctctcgtgtatgcatctaaggccttgctaacaagctcttgaatggtcccatttagtttggaccgcatttgtcgggcctttgatctcgttattgggccttgtggcaatttgagcccatcacgttcttaaacttggattgggcctttatgactcgtattagcccgatcgtgaattaggagtaaattgaggctttacaaaataggctagaagaaagagggttatttaagcttaaaagggttt

SEQ ID NO: 4346 - DNA, 392 bp, Gossypium hirsutum
  Clone ID: LIB3083-091-Q1-L1-E9
aaaaatgggagatcagttagcgaaaggagaagaattcgtgaagaaagcagagaaaaagctaaatggttggggcttgtttagttctaaatacgaagacgccgccgatttatttgataaagctgctaattgcttcaagcttgccaaatcatgggacaaagctggatcaacttatgtaaagttggcgaattgccatttgaaatcagacagcaagcatgaaacagctcaagcttatgttgatgctgctcattgttataagaaaacagctacaaaggaggctatatcttgcttgcagcaagcagtgaacttgttttgtgatattggaaggctaagcatggctgcaaggtattataaggaaattgctgaattatacgagtctgaacagaacattgagc

SEQ ID NO: 4347 - DNA, 341 bp, Gossypium hirsutum
  Clone ID: LIB3083-091-Q1-L1-F1
tagacctgccacacgtgctcttaaacgtgcccttttggtggcacttaggtgtgttgatcctgatgcaaataagcgacccaaaatgactcaggttgtgcgaatgcttgaagctgatgaatatccatttcgtgaggaccggaggaacagaaagagccgaacagccagcatggaaatcgaatcattgaaggaaccaacggacgcggagagcaaggccggggaatcacagagcagcgtaaccaagacgacgcatgagtaataggactactgacaaaaaagcaatgacatggtgaataattggtgtagtatttaaagcttttcggctacccattgatacatgtaca

SEQ ID NO: 4348 - DNA, 357 bp, Gossypium hirsutum
  Clone ID: LIB3083-091-Q1-L1-F11
catcaatcatacggaagggcacatttctatacacgaataaattaaagtgaaaacccaataattaaaatagaaaaaaacactcacttccttcttatgccactacaataaataaagagcatgtgtaacatggctaccaaagaagtggaagttatatgtaggcctgaattatcaaaattgtatctctccaatgtaatgcttagacccttattccatggacttgaaaaggaactgctttgatgtccaaatctcccttcctccttggcaccttcctttattttgctggcgaaactacaacatgaacggtgtgtggtcgatctttttagatctagtagggtgttggtggtggaggaaaaacgt

SEQ ID NO: 4349 - DNA, 404 bp, Gossypium hirsutum
  Clone ID: LIB3083-091-Q1-L1-F3
tgctttagagtattacgatcgctcctttgatcgaattaccccgaagaacgaacggagactcgagaggttcaagaacagaaacttctttaaagtcaccacgactgacgacccggtgatccgaagattggcaaatgaggacaaagcaactgttttcgccactgatacgattctggcaacgttaatgtgtgcacccaggtcagtttattcttgggacattgtgattcaacgtgttgggaataaactatttttcgacaaaagagatgggtcacagttagatttgctatcagtccacgagacctctcaggagccattgcctgaagctaaagatgatattaactctgcttattcattgagtgttgaagcagcttacataaatcagaatttttcacagcaggttttggtta

SEQ ID NO: 4350 - DNA, 396 bp, Gossypium hirsutum
  Clone ID: LIB3083-091-Q1-L1-F5
gagaattaaggatgtggcggtgccagagaaggaacgggaggcaaaaatggtggctgtcggagccatggatcaccacaacttggtcccgttaagggcgtattacttcagtggggatgagaagcttcttgtttatgattacatgcccatgggaagcttgtctgcacttttgcatggcaacaaaggagctggtaggacaccattgaattgggacacacggtcaagcattgcacttgaagcagctagaggcattacatacctccattccaagggaccattaatctcacatggaaacatcaaatcctcaaatatcctactcactacatcctacgaagctcgtgtatccgatttcggtcttgctcagtttgctggccccacatctaatcccaaccgtgttga

SEQ ID NO: 4351 - DNA, 394 bp, Gossypium hirsutum
  Clone ID: LIB3083-091-Q1-L1-F9
gttcctacctcggcaaagtggtgatcttacaattatgggtgatgtgacgagaacgtacgactcgaactattgggcacaggttactatctcaaaccataacccccttgggcggcttgataattggaaattgagttttgattggatgagggatgaatttatatatacgatgaaaggggcttatccgtatgtcgttgattcatcagactgcatatttggtccgcaaggacaacactatagggatctagactttggcaatgtgttgaactgtgagaggaggccgacgattattgacctgcctctgacaaaggcaaacgatacaaccatggggatgatcccaaaatgttgccggaatggtactattttgccaccaacaatggaccctagcaagtcaagt

SEQ ID NO: 4352 - DNA, 392 bp, Gossypium hirsutum
  Clone ID: LIB3083-091-Q1-L1-G1
acagactttaagcagtaccaagttttgaagcagaacccagggtggtggactcaccaaaggcatgatggcaaattgtggaacttgaacaactatcgaactgatgttatccaagctcttggaggtgttgagggaattctagaacataccttgtttaaaggaacatactttccaacttgggagggtctgttttgggaaaaggcttctggattcgaggagtcaatgaagtataagaagctcactaatgctcagagatctggtcttaaccagattcctaaccgtaggtttactctttggtggtcacctacaatcaatcgggctaatgtttacgtgggttttcaagtgcaactagatctaactggaattttcatgcatgggaagattccaaccttgaa

SEQ ID NO: 4353 - DNA, 391 bp, Gossypium hirsutum
  Clone ID: LIB3083-091-Q1-L1-G10
ttgagagataatagcatgagttcttacatgtccagcaggaaaacaatggagattaatcccgataatggaataatggaagagctaaggaagagagctgaagccgataagaatgataagtccgttaaggatctcgtactgttgctgttcgagactgctctattgacctctgggttcagcttggatgatccgaacacattcgcaggtagaatccatagaatgctgaagctgggtctgagtattgatgaggacgggaccggtggtgatgatgcggacatgcctactcttgaggaagatgaagctgagggaagcaagatggaagaggtggattaaaaaaatcataattaatttcacttttctgctttctgatgatttcatggttttggtttttgtc

SEQ ID NO: 4354 - DNA, 226 bp, Gossypium hirsutum
  Clone ID: LIB3083-091-Q1-L1-G11
gatcttatgctaaatcatcatgtgctgctctttttgtggcgtccatatcatcctttggtatcagccataagtttacagcaatgtcttatcccttgctcattaactcaaagggaattgaggtatgtttgataactacactttttgcaactgatctgtttctgatcaataaagtacgtgtcatactaccgttattcaaaccacaactgcttattttcacacaacttat

SEQ ID NO: 4355 - DNA, 362 bp, Gossypium hirsutum
  Clone ID: LIB3083-091-Q1-L1-G3
ggcaagtacatctgcacttcagaaggctttctggggtcctggctgtttcaatcccaagaccagagatgattgttgggaagaagggattaagcgcaggaagtaaggcaaggccagtgtttgtgcagtttgtccttgaaccactttggcaggtttaccaggctgctttggagccggatggggacaaagggacacttgagaaagtgattaagtcttttaattagtctattcctcctcgtgaattgcagaataaggacctcaagattgtgcttcaagctgtcatgagtagatggcttcctttgtcagatgcagttttgtcaatggtggtgaagtgtatgccacatccaatttctgctcagtctcac

SEQ ID NO: 4356 - DNA, 317 bp, Gossypium hirsutum
  Clone ID: LIB3083-091-Q1-L1-G5
ttcactagttttttttttactctcataggaacctctgtcaccgggatgggttcaattcaaagagggggcttcaactttcacaggccaatttcaatactcaagtacttcacatttacgtaatagaacaaactattttaattataacaatgactggtttgtatttacaaaatgatcccagcaccccattacattttctaagaaaattaagtttacataatatacccaccctacaattcaaactataactacaggtaggggaccactaatttcccttaaaatacaaattacggatggctcacaatttgccatctgtcttt

SEQ ID NO: 4357 - DNA, 386 bp, Gossypium hirsutum
  Clone ID: LIB3083-091-Q1-L1-H10
gcagaaaatggtcctagacaatttggcaatatctgtattgatactaaatggatacaagaaacagaaacctcattattgatacgcaacttggaagtaaattataaggagtcagaggacccaccattatcagttttgcacattcaatatcctgagtggcctgaccatggagttcccactgacactcttgctgttcgtgaaatcttgaaaagagtattacaagtaccagtaaatattggcccaatactggtgcattgcagtgcaagtattgggaggactggaacatactgtgctattcataacaccgtccagagaatcctcattggggacatgtctgcattagaccttgctaatacgatatctatgttcaagtcccagcgcatcggaat

SEQ ID NO: 4358 - DNA, 388 bp, Gossypium hirsutum
  Clone ID: LIB3083-091-Q1-L1-H12
atgatattcatggactacgagtcattgttgaaaatgaggaagactgttatgaggctttgagagtagttcaccagttatggtctgaagtgcccggaaagctgaaggactatataagtcgccctaaatttaatgggtatcagtccttgcacacggtggtgatgagtgaaggtacagttccacttgaagttcaaattcgaacaaaggagatgcatctgcaagctgagtttggctttgcagctcactggagatacaaggagggtgactgtaagtactcttcatttgtacttcagatggttgagtgggctcgatgggttgtgacttggcattgtgaaacaatgagcaaggaccaatcgtcaatatgctacattgattctgtcaagccaccctg

SEQ ID NO: 4359 - DNA, 395 bp, Gossypium hirsutum
  Clone ID: LIB3083-091-Q1-L1-H9
gatagttgagagacacacctcaaaaaggatctagaaaagagaatatctcatccttttattttcatttcgtcttcttttcagctcaaattcatcatcgaaattacttgtagttatcaaaatggggacaataggcaaaactactacggccgctctttttctttgtcttcttctgtttcctattgtcttttccacgcctaatgacagattggttagaattggactcaaaaagagaaagattgaccgaaacaatcggatggctgcacaccttgaatccaaggagggaaaggcatctgaagcttttcttagaaagtatcgtcttcatgggaacttgggggaatcagaggacattgatattgtggcactaaagaactacatggatgctcagtactttggtg

SEQ ID NO: 4360 - DNA, 272 bp, Gossypium hirsutum
  unsure (1)..(272): unsure at all n locations; Clone ID: LIB3083-092-Q1-L1-A1
ccaactcgccctgacaaggctcgtcgattgnngtacaagccaagcagggttatgttgtctatcgtgtccgtgtaaggcgtggtgggaggaagagaccagttcctaagggtattgtatatggaaagccaacaaaccagggtgttacccagctgaaattccaacgtagcanacgatcagttgcagaggaacgagctggccggaagcttggtggtcttagggtcgtgaactcttattggatcaatgaggattcaacttacaaatacttttgaagt

SEQ ID NO: 4361 - DNA, 327 bp, Gossypium hirsutum
  Clone ID: LIB3083-092-Q1-L1-A10
aagggcctatcgtgattctccgggaggaatacccgcagcttggcggtgttttcacattgaacttggttaacaagaagattactctcttggttgggcctggggtttcatcacacttttttaaggcttcagaatcagacctcacccaacaggatgtctatcagttcaatgggccaaccttcggtcctggtgtggtttttgatgtggattacactattaggcaagagcacgtcctgttctttacagaggcccttagagttaattaacttaagggttatgttgatcagatagttacagaagcttaggactacttctcaaaacggggggata

SEQ ID NO: 4362 - DNA, 370 bp, Gossypium hirsutum
  unsure (1)..(370): unsure at all n locations; Clone ID: LIB3083-092-Q1-L1-A11
gggaacnnaaacgcagccgcccacgaccaaacccccnaagaagaacaaaatcaccatcacaaacgacaagggccgactctccaaagaagaaattgaaaagatggttcaagaagcagagagatacaaatccgaagatgaagaacataaaaagaaggtcgaggcaaagaatgcattggaaaactatgcatacaatatgaggaacacagtgaaggacgagaagattggtgctaaactcccagcagctgataaaaagaagattgaagatgctattgaacaagccattcaatggctagacagcaaccaactcgccgaagccgatgaatttgaagacaagatgaaagagttggagagtatttgcaaccccatcatt

SEQ ID NO: 4363 - DNA, 332 bp, Gossypium hirsutum
  Clone ID: LIB3083-092-Q1-L1-A12
taagtaacaagttaacaaaatgggacctggaaggccgggaggagggcccggaggaccttgtggacccggaggattgggaggaagaccttgtggttggggtccttgcccccgaggaacttgcggatttgggcctggaagtcctggtttgggtcccggacctggaaggtccttgggcccttgatttggaaggccttggttttggcctggtggggtctttggcggctttgcaaatggtttgtgcaatatgatatcttccctgctctactgtctttgcttgtgttggctactacaagactgctttggtcgacgccctggctatggtcctcgccctt

SEQ ID NO: 4364 - DNA, 94 bp, Gossypium hirsutum
  unsure (1)..(94): unsure at all n locations; Clone ID: LIB3083-092-Q1-L1-A2
ctgataaaaagtgtgagattgatttcccggaacatctnaagctgggtctgattatctcaaggggaattccctttaaacagggcatgggatttaa

SEQ ID NO: 4365 - DNA, 52 bp, Gossypium hirsutum
  Clone ID: LIB3083-092-Q1-L1-A7
gagtataattttaccgtgcgtttattcatagaaaataccaaaaactagtaca

SEQ ID NO: 4366 - DNA, 364 bp, Gossypium hirsutum
  unsure (1)..(364): unsure at all n locations; Clone ID: LIB3083-092-Q1-L1-A8
aaaaacacaccctaaagagacaatganaaagctgctacctttgccggtcgtttcttcttcttttgggataaaacattagctcaaatagctccggcgccgccgttaaaagtggacaacatcacttccatcctcgaaaaaggtgggcaattcaccactttcatcaagctattgaaagccacacaggtggctgatcaactaaacaaccagctaagcacaccggaccctaacgacgggataacggtgtttgcaccgagtgacaacgcgttctacggactcaaacccgggacgttgaactcactttccgaccaagagaagcttcagttggttcagttccatatactcccgacgttaatgtccacgtcgc

SEQ ID NO: 4367 - DNA, 85 bp, Gossypium hirsutum
  Clone ID: LIB3083-092-Q1-L1-B1
ttgcaacatacgatacctgaactcgagaacaaaatgatcacatagaggaagaagtgggccatgtttatgaaagattacaagccct

SEQ ID NO: 4368 - DNA, 253 bp, Gossypium hirsutum
  unsure (1)..(253): unsure at all n locations; Clone ID: LIB3083-092-Q1-L1-B10
aaactccgctttcgtcaacacgcgcgtggactggaaggagacacccggaggcacacgtgtcaaggcggaccttcccgggatggagaaagaggaggtgaaggtggagatcgaagacgatagggttctccaaatcagcggagagaggcacgtggagaaggaagacaggaacgacacgtggcatcgagtggagcggagcagcgggaagttctcgcggaggttcangttgccggagaatgtgagaatgggcgacgtg

SEQ ID NO: 4369 - DNA, 376 bp, Gossypium hirsutum
  Clone ID: LIB3083-092-Q1-L1-B2
cttcttattcctttattgctttttagaatttttcttaatcaaaatgagagagtgcatttcgatccacatcggtcaggccggtatccaggtcggaaacgcttgctgggagctttactgtctcgagcatggaatccagcctgatggtcagatgccaagtgacaaaactgtcggaggaggtgatgatgcttttaacacctttttcagtgaaactggtgctgggaagcacgtccctcgtgccgtcttcgtggatcttgaacccactgttattgatgaagtgagaactggtgcttaccgccagctcttccacccagaacaactcatcagcggcaaggaagacgcagctaacaactttgcccgtggtcactacaccattggc

SEQ ID NO: 4370 - DNA, 375 bp, Gossypium hirsutum
  Clone ID: LIB3083-092-Q1-L1-B3
cccactcaccatcttttttattaacaatataattacaatatcccataaattactgcatgatgatggcacatgcaccagtgtcatatggcttaaggcttagtgctcgagccagactgagtaaacatggacttcggccattcaggcattttaacccactcagggtactatgcctttctcaggtttcttctcctcttctttttcatgctttgggaactcatgtttatgttccttatcctcatctagtttttccttgcactcaggtattttcggatattcggctttatgtttctcgtgctctttaggcttttcccctttggggaaattgggtttttctttctcgtactcttcgtgctccttcgattcgtgtgactcgtg

SEQ ID NO: 4371 - DNA, 346 bp, Gossypium hirsutum
  unsure (1)..(346): unsure at all n locations; Clone ID: LIB3083-092-Q1-L1-B5
aacaccaaaccaaaagaaagatggcagtaatggcggatcaccattccctggctgttgtttttggtatattaggtaacatcatctcagtcctcgtatttctggcaccagtgccaacattctgtcggatttacaaaaagaaatcgactgagagtttccagtcactgccataccaggttgcattgttcagttgcatgctatggctgtattacgcgttgattaaaaagggtgctttccttctgatcaccatcaactcttttggatgtgttgntgagactatttatatatctatgttctgggcttatgcttcaaagaatagcaggatgtcggctatgaaactttttatatc

SEQ ID NO: 4372 - DNA, 387 bp, Gossypium hirsutum
  unsure (1)..(387): unsure at all n locations; Clone ID: LIB3083-092-Q1-L1-B7
aaagaaacatcccgaactggataggttactgaaggaaaataccggcgattggaagatttccgtaccaaagagaagaatactagtagcacaagagaggagcgccattgatgagtgacgtaattgatccctagtgttattgaaccccaattttgacaagcaactctgatgactggatcaaagagtaggaaggagttcaaggtctatatgaattatgatttggtttatgaatgcagaaggaagatgagttttgggtaatgtatattggaagggggtcagataaattctggtgcggctgncgattctggaggctatccatttttggggttcctgatatttgtgtaggctttttttggctcgaggggtatatctttttttcttgagtgatct

SEQ ID NO: 4373 - DNA, 378 bp, Gossypium hirsutum
  Clone ID: LIB3083-092-Q1-L1-B8
ctcgtgccgctggatcaggaagttcgatcctatattctttcttttgtttactgtcattctttcactccaagaaatgtatcgagggaagttagcatcgtcggagctttttacaatacttggaggattcatcagctccctcttgtttcttgtgttactaacattcattgggaatttccaggaagcaagtggagtgaagaccggctggggtgctgtcatattagcagaagctgtagcactgattgctgctagcactgtccaccgagtgtgtatcacaacatgtttcttgttctcggccgggttactttatgaggtcaacaagatttcagcagtgactatttctaaaattgaatcgaaagcaaagaggcactgagctaataa

SEQ ID NO: 4374 - DNA, 382 bp, Gossypium hirsutum
  unsure (1)..(382): unsure at all n locations; Clone ID: LIB3083-092-Q1-L1-B9
tgaaaagttgtgatttttgttgaagtgggggttggnnttctcttttaatagttttagaaatgggtttgatggagatttcaataatgcttcatgttggattagttttgttcctgctttggacgctttctcaattcaatctttgccatccagttgcttatttcgtgtctctcatctacctctatttggttcatgaaaggtatgtggcgagattgaggaagaaattggagttcgaggaaaaacgccaacaatttaggagaagggtactttcggattccgaatctgttcggtggctaaaccatgctgttgaaaaaatatggcctatttgtatggaacagattgcatcacagaagattctgcttcccatcataccttggttcttggc

SEQ ID NO: 4375 - DNA, 318 bp, Gossypium hirsutum
  Clone ID: LIB3083-092-Q1-L1-C11
ggggggggggggcaaagggagaggaaaaggggggggggaaaaaggccaaggcaacctttaaggggggggggagggcaacgggaaaaaggggggggaggggggggaagggaaaccggaaaggcaaggggaagggaaggggaaaggaagcttggggaacggagactttaaaaaagggctggggggggggggccggcaagaggcccgggggaaaaaaggaccccaaagggggaataagcggaacaaaaacggggaaggcaacaaactttggccccccaaacaaggcttaatcaagggacaagggcggggggggcaatcccc

SEQ ID NO: 4376 - DNA, 230 bp, Gossypium hirsutum
  Clone ID: LIB3083-092-Q1-L1-C12
ttataagatgaatcaacaagcaatacaacaacatatactttgtaaggtgggaggacaaaactaaaggcgacacaatcaacaacacagtgatccaaagacccaaaaaagggagggagaaattggaccaaaacaattcaaaaggccaattcaaaacacaacaaaaaacattcaaattatttcattagaatttaaggctttggcttggatttcttctttttcttggaattttt

SEQ ID NO: 4377 - DNA, 146 bp, Gossypium hirsutum
  Clone ID: LIB3083-092-Q1-L1-C2
gatccccccggcctccagaattccgccccaggattaattgaggataccccggcctttattcttaaaataccttcctttaaaaccccaaggtggcaaatattttcctaaaccgggggggaccattctttgcacattaacaggggggc

SEQ ID NO: 4378 - DNA, 77 bp, Gossypium hirsutum
  unsure (1)..(77): unsure at all n locations; Clone ID: LIB3083-092-Q1-L1-C7
ctcattgctcaaatgactgaacaagattgtancncaaccgtcgagtactagttgtttgtggtctcaaaagtcttcat

SEQ ID NO: 4379 - DNA, 316 bp, Gossypium hirsutum
  unsure (1)..(316): unsure at all n locations; Clone ID: LIB3083-092-Q1-L1-C8
aggtttgaccaggctacttatgataagcttttatctgangctccccgaagnaactcatcactccctcaattttgtctgatcgtatgaggattaatgggtcccttgctaggaaggctataaaggaattgatggcaagaggatcgattcgtttggtgtctgcccattccagccagcagatttacactagggcaaccaacacctaaatcccttggtatattttttcttaaattaagtctaatgagtatttggctttcttgactttctataaaatgattttcccttttgctaaagaccctcatctaaaattgtgtgagct

SEQ ID NO: 4380 - DNA, 389 bp, Gossypium hirsutum
  Clone ID: LIB3083-092-Q1-L1-C9
catcactgtgtttgccctgttgttgttgttaggtacccgatgataaagatggcgggagtggtgagcctgtggttaccattaaggaggctgaggtagaggaggaagcttccaaagatgcttagcaagtccttggtaattgcagcagctttattgcatcagtagcagcatggtagaaggcttccagttgtgaagagaactcaagtaaagtggattgtagggttctcattcccctggggtatatcctctttgtataaactcggttgttgaggttcttggtttcatttttatggcactgtgaggagatattgttgtactatactatgatataaatataaagataaatccagtgtcaacatttgaattttagcattttacgagcttttatgttt

SEQ ID NO: 4381 - DNA, 137 bp, Gossypium hirsutum
  unsure (1)..(137): unsure at all n locations; Clone ID: LIB3083-092-Q1-L1-D1
cgcctgagctcaactccgcttatttcacaatgcctgaggaantggnacaaaggtgcccttcttgctgaaaaaatttctcccgatctggcatgggatgtgggtggtatccctcaaatgattggcaagggcggggattt

SEQ ID NO: 4382 - DNA, 180 bp, Gossypium hirsutum
  Clone ID: LIB3083-092-Q1-L1-D10
ccgtctaaactcgaaatacatctttagatctggtagaacaataataagggggggaaaagaacgaaagaaagaaagcaaaacgatgcgcttgttttgaagatcgaatttccctcatttccatccgctaaaaaaagtgtcagtttctctgatcgttcgagaaaaggagcaagaaatggaaaa

SEQ ID NO: 4383 - DNA, 294 bp, Gossypium hirsutum
  Clone ID: LIB3083-092-Q1-L1-D11
tgtttataggactcatgtcaggcccctgcaagagcagcttcagaaactgccaaagccttttccgattttgaagatcaatcccgagaaaaacaatatagattcctttgtggcttctgatttcaaactcatagggtatgatccttacaagaaaatagagatgaaaatgggtggatagagctttattttagggtctggaaaaccaaagtcttcaggggaattttggacaggatcttcttaagtttaaagggcaggtactggaaggttatggtgatgtaatgacttataccgataggc

SEQ ID NO: 4384 - DNA, 160 bp, Gossypium hirsutum
  Clone ID: LIB3083-092-Q1-L1-D12
gctatcaaactatggcaatggcggatcccgcacttcaccatcaaatccaacccatcaaagaaatagccctagactacaccccggaggcccgcacccactggcctggcttcaactccatcacactcacccttgatcctccgggaggcccccgggggccttc

SEQ ID NO: 4385 - DNA, 251 bp, Gossypium hirsutum
  Clone ID: LIB3083-092-Q1-L1-D4
gaaaagaaaaaggctctgaaagaaagaggagctaatagagagtagtaaaacgaaagaaggtttaaggagggaaaaaaagatgaaaagaatggttaggagaacaaaaagatgagggagaaaaaaacgggtgagaagataagaggaacaagcaaaagcaaaagaacggcaagggggaaaaaagaaaaatggaggagttgaggaagggaaggagaaacaagaaagaaagcagagaggtaaggaggaacaagaag

SEQ ID NO: 4386 - DNA, 346 bp, Gossypium hirsutum
  unsure (1)..(346): unsure at all n locations; Clone ID: LIB3083-092-Q1-L1-D7
ggaaatcttgcatatccaaggaggccaatgtnnnaaccgatcggggctaagttctgggaagtcatatgcgatgagcatggaatcgacaacactggaaagtataacggtgactccgatctccagctggagcgtatcaatgtctactacaatgaagccagtggcggtaggtatgtccctcgcgctgttctcatggatcttgaacctggcactatggactccgtcagatccggtcttttcggccagatctttcgtcccgataactttgtcttcggtcagtctggtgctggcaacaactgggccaagggtcattataccgaaggagctgagctcattgattctgttctag

SEQ ID NO: 4387 - DNA, 383 bp, Gossypium hirsutum
  unsure (1)..(383): unsure at all n locations; Clone ID: LIB3083-092-Q1-L1-D8
cttttcttctcttctcttgtcttctctcctnnnnnnnccactttctgatgctatggagatagaggtagcaagctgctgtaagaaaggtgccggtggcgcttctcatgaggatgagctcaggggtgtttacttggtttggcaggacctcacggtggtgttgccaaactttggtaataaaccaaccaaaaggttgcttcaaggacttagtggatatgctgagcctggcagaatcatggccattatgggtccttctggttccggaaaatctactctgctcgactctcttgcaggtagacttgccagaaatgtggtcatgactggaaatatccttttaaatggaaagaagaagagactagagtatggtgctgttgcttatgtaactc

SEQ ID NO: 4388 - DNA, 281 bp, Gossypium hirsutum
  Clone ID: LIB3083-092-Q1-L1-D9
attaaacagctttcacgaaccccaattactgaataatatctcgttagaacacgtatttatgtcggtgtatattgctgaacgtgcacgtgtatacaacataaaaatgatcaatgaatgaacaaaattttcttcatgactgccaaaaccaatcatagttttcatacccatcctttgccaatgggggatttcaagcaccgacttacagtgagttgcaaaaatttatctttgcttacctaaaggagatcttcatgtgtgaaaatggtcgatcagatgttggatta

SEQ ID NO: 4389 - DNA, 275 bp, Gossypium hirsutum
  Clone ID: LIB3083-092-Q1-L1-E10
ggaggaggaaggctgaggagattaccaaggaagaatatgctgctttttacaagagccttacaaatgactgggaagagcatttggccgtcaagcacttctcagttgaggggcaacttgagttcaaggctgtcctctttgtccccaagagggctccttttgatctctttgatacaaggaagaagcccaacaacattaagctctatgtgagacgtgtctttatcatggacaactgcgaggagttgattcctgaattcctcagctttgttaagggtatt

SEQ ID NO: 4390 - DNA, 392 bp, Gossypium hirsutum
  unsure (1)..(392): unsure at all n locations; Clone ID: LIB3083-092-Q1-L1-E3
gnnnnnnnncatnnncnagnnccttccttcnccgnnnnnnntttttgttacctcgatttcaagtgaatcagaatgggtaaggaaaagactcacattaacattgtggttatcggccacgtcgattctgggaaatcaaccaccactggccacctgatttacaagcttggtggtattgacaagcgtgtgattgaaaggttcgagaaagaagctgctgagatgaacaagaggtcattcaagtatgcttgggtgcttgacaagctcaaggctgagcgtgagcgtggtatcaccattgatattgccttgtggaaatttgagaccacgaaatactactgcactgtgattgatgcacctggacaccgtgactttatcaagaatatgattactggtacgtc

SEQ ID NO: 4391 - DNA, 348 bp, Gossypium hirsutum
  unsure (1)..(348): unsure at all n locations; Clone ID: LIB3083-092-Q1-L1-E7
gagagaactagtctcgagttttaagtgccaanancnccgattcaagttataataatgtataccctgggaacgaagatgaagcacgtgacccaccagttgtccctcctcacctgcatcataccttgcttaggtaccctgctagcatgaacacatccgggaatcttcccttgcctgaaaacgtgattctaaatcatctttacattgaaaaccgagaaccaccgagatctgtggtggcacttgggttcactcaacgctttcgtgcaaaatatgttactggtgtgctatacaaaccagttccaagaaggggaagtagcaatacttaatgcatgaatcaagagtagaccttga

SEQ ID NO: 4392 - DNA, 373 bp, Gossypium hirsutum
  unsure (1)..(373): unsure at all n locations; Clone ID: LIB3083-092-Q1-L1-E8
ggaaaaagnagnggaaaaggatatcactgtcnnnnnnttgctgatttcggcattgttttgggttcaaagaccattgtttcagttcgtaaagagacttcatctcggtggtcaaaggtgttttcagtgcattactcacgtaaaccatttgctgttgtttttcgggtagctgtgatgttaatcttgtttatagttttgattagcacaccaaaggccttgtaacttgatgctacttatcgcgttttgtatagttaacagtagcacatcaccctttttttgcccccatttcgaggatcgtatctagttagggctgcagctatgtttttgagtgctgacgtttatgtatatgatatgagtacatctatttagttgttgt

SEQ ID NO: 4393 - DNA, 278 bp, Gossypium hirsutum
  unsure (1)..(278): unsure at all n locations; Clone ID: LIB3083-092-Q1-L1-E9
gntngagctagctagctcttactcaaatggnnnccgnccgatgatgttgcaaatatttccacttttcttctttttgttcagtgtctgcaactccattttccttggtgctaatggagatgacaatggtggttggcaaactgcccatgccaccttctacggtggtgctgatgctaccggcacaattgggggagcttgtggttatggaaacctgtacagtcaagggtatggaacgagcacagcagncttgagcactgcacttttcaacaatggcttgagct

SEQ ID NO: 4394 - DNA, 219 bp, Gossypium hirsutum
  Clone ID: LIB3083-092-Q1-L1-F1
ccttgtttttgtatgcctaattgtgttgtcattgaaagaaaggtatgccactgctgaagctgagagtcataccatccatgtcgcctctcttttaccctcttctgtttgcacccctcctgctactgcaaaaggtttggacaaaaagtcatctttacaagtcattcacaagcatggcccatgctcacaaccccatgaagagaaagcaaatattcccacaca

SEQ ID NO: 4395 - DNA, 329 bp, Gossypium hirsutum
  Clone ID: LIB3083-092-Q1-L1-F4
tttcatttgttcactggctctggcaattgcgcatataattgtggcttatagaacaagttgcagagaaagaagaaaactccttgtctacaaaattgacattgaagcaatttcagcttgcaagaatgggtttccaaggtatccaaagatcgtgaagtaaataatagaaaagtggtgacaaatctcccccctcttttgcctctcccttgttaggtttcagattcctgtaaacaagttggttgtatagaaataggtgatgatgattgtgcaaatggaagactatgagtttgaggataaatcatagctcatacatctaacattctttttattct

SEQ ID NO: 4396 - DNA, 285 bp, Gossypium hirsutum
  Clone ID: LIB3083-092-Q1-L1-F6
tcagacgcgaagggaggcgtttcgcccctctgatctctccgcgtccaatttctgctgtccgatcctctcctatcgctcccactcacgaatatgagggtccgagtggggttcgttatatttcaactcaagtcgttagaaaccggatgaagagtgttaagaatatgcagaaaattacaaaggctatgaagatggttgctgcctcaaagttgagagcagttcaaactaaagctgggaattccccgggcctctggcggccatttactggacttgttggggatcttccca

SEQ ID NO: 4397 - DNA, 329 bp, Gossypium hirsutum
  unsure (1)..(329): unsure at all n locations; Clone ID: LIB3083-092-Q1-L1-F7
gacctatgcatgagatggcacacattgncnaaggncnnttcatggcaattgcgtttccctcctgcgtgccagtgccatgaacgcaaatcagagcagcatgttgatattgcaggaaacatgcatagacgcagcagggtcgcttgtagtgtacgcgccagttgatattccagccatgcacgttgtcatgaacggtggtgattccgcttacgtcgcacttttaccttcgggattcgccattgtcccggacggtcctaggtctcatggacctatctctaacggacatgttaacggaaacaccggcggagggtcgtcgagtgtcagtggatcgc

SEQ ID NO: 4398 - DNA, 334 bp, Gossypium hirsutum
  unsure (1)..(334): unsure at all n locations; Clone ID: LIB3083-092-Q1-L1-F8
caggaaacaccanccancnaccancccnanccaagcnnnnttattgctgcgagagtgcacatacagagggctatattcatacagatcgtttcacatcacatgggccaggctgatattaacgtccgaaacgcctggggtggactagactggccctgacaaggaacaacccctgatggccagattccatatgacaagactgatatgggaggtcaatatgcttagaacacgtctatgagtgaaacccgagctggaaagcacatcccatccgcagccttccaagatctcgaacctactgttctcgacgaaggcaggactgcatcttaccgactgcttt

SEQ ID NO: 4399 - DNA, 376 bp, Gossypium hirsutum
  unsure (1)..(376): unsure at all n locations; Clone ID: LIB3083-092-Q1-L1-F9
gcgagnnnnnnnnnnnnnnnnnnannnnacaacggggngtatatatttgtgttggaagacaaagaattgcaactcttattacaacacgaaagctgtgaagacatcctcaacaaaaaaaccaaaacacccacttagaaaaaagacactccgcccaagattaaccaaaaatatcattatgatttactgataatcacatgctatatacttgaaaaactattaaacgaattcgagtcagccatcatgtcttgcaaacaaacgtcaaacacattactcagaagaccacattcttgctgctgggaagatcttttgagtttgcccttgatcatcttggacgactttctgattaggctgccagtactatgatcactatcagaag

SEQ ID NO: 4400 - DNA, 259 bp, Gossypium hirsutum
  Clone ID: LIB3083-092-Q1-L1-G10
aggaaggagtacataaaatatattatattacaaatgagggttaaaatcatgatttggaaaacaatatatgctatgttttatttatttacacatgtattagtgtattaccaatacagtgacacatcatagaactataaagtacaaatcgtagaacttccataagaaaaatatagagagtagaacatctattttaagtaagaataccttaactttaaaattttaaagaagaaatatagaatgggaattttgtcgttatttt

SEQ ID NO: 4401 - DNA, 145 bp, Gossypium hirsutum
  Clone ID: LIB3083-092-Q1-L1-G11
actgtgacaaataacaattgagtagaaatataaagagctttcaaacatctccaaatcaaacaacaatgtcaaatggaaaccaacaaaggcactagattgaaaaatcgcttggatttgtatgcaaatatgaaatcaagaacccaaa

SEQ ID NO: 4402 - DNA, 336 bp, Gossypium hirsutum
  Clone ID: LIB3083-092-Q1-L1-G4
caaccggaacgtggccttggccggctgaggaagatcacaaccaccccacccttgtccaccaaagatgaggcttcatcaatggcgatgccgacgagtccgacgacacctgggacaccgtcgacgccggtgtcggctcgtagggacaacgtgtggaggagcgtgttcaatccaggtagcaaccttgcaaccaaaggtattggcgctgaagttttcgacaagcctcaacctaactctcctactgtttatgactggctttacagcggggagacccggagcaagcatcaccgctgattgggcgatggctgacgggcggcggaggtaacaaaaccactagca

SEQ ID NO: 4403 - DNA, 349 bp, Gossypium hirsutum
  Clone ID: LIB3083-092-Q1-L1-G8
cacatcggaggcatcaacagctgaagttgagggatacggtgcttccaagctcactgttgactctgctggtaagtacctacaacttggcaataaacttttctctcaagcttaactctatcatttctgggcaagcattttggaactccgtattccaggttataagagcagaagagcatatggacaactggctaaatgtcatacattgctcacaaacatctatgaatcaatccttgagcaggagtcaagccctatccctttcactgatgctacttactatagggttggggatttatggtgagagatttggtaagcttgacccggaaagatatgtttaccgagaacctcgtga

SEQ ID NO: 4404 - DNA, 291 bp, Gossypium hirsutum
  Clone ID: LIB3083-092-Q1-L1-H10
cttcaaattggccaagttgctggaaaagaaagactgagaagaagaacaataataaaagaggaaaaagaagacttaaaaaggcatcatcagtgaaaattttcgagcaactagagacgctgaataaaacaaagaaaacccaaattgacacaggaaatcagattccattgaattgcagatctcttttagcttttgctagttcttgttttgtatatatgggtggttgtctaggatgctgtgcgaggcccattttcaatcccttggtgaatgagtcatcaaaaggattaaaatttc

SEQ ID NO: 4405 - DNA, 291 bp, Gossypium hirsutum
  Clone ID: LIB3083-092-Q1-L1-H12
gagatctgaatatgggtgagagtagggtgactgggaaggtaaagtggttcactgaccaaaggggatttggtttcataacgccggatgacggcggcgaggagttgttcgttcaccaatcgtcaattcgttccgacgggtttcgtatcctcgccgacggcgaagaagtcgagttcgttatcgattcttctgaaggaggtcgtacccaggctgttgatgtcactggccctaatgggaaccctgttcggggccccaccagatctggaccccatggtggcggagggggattccggg

SEQ ID NO: 4406 - DNA, 343 bp, Gossypium hirsutum
  Clone ID: LIB3083-092-Q1-L1-H7
ctaagcatcctttttaagtgcattacagttcaaagaaaataacccaaagtcactacaattggaagcaacatctgtaatcgttatcgcatcatcttttttttatcatcatcctcgtcaaccatctaaggcctagcaaaaaaacaaactggaaaaagaaaacagcccccaactttacaaaatcaacccacaaaaacagaagaagatagactattgaagtgaatcatggtcatggtttttggccgagtttgtttgaaaaccattgaagtaaataacaataaattattcaaaccctaaaacaacccacatgatgatggtgatgatgatgatgatgaaaatacttttc

SEQ ID NO: 4407 - DNA, 339 bp, Gossypium hirsutum
  Clone ID: LIB3083-092-Q1-L1-H8
ttgcattctaaaggaacgctagatttgaaaaatggacagagtagcactaattctggaggagacaccaccgttaagaagaaaaatatccatgggatactgaatactgtgagttggggaattttgtttccacttggagctatgattgctaggtacataagaagctttgagtcagcagatccagcttggatttatcttcatgttttctgtcaaatatcagcttatgccatacgagttgctggctggggaactggtcttaagcttggaagtgaatcctctggtatcacatattcgggtcatagatacattgggattgcccttttcgtcctcgctactgtccag

SEQ ID NO: 4408 - DNA, 348 bp, Gossypium hirsutum
  Clone ID: LIB3083-092-Q1-L1-H9
acctttccccttctgccgatgatttgaaggatattctcggatctgttggagctgaggctgatgatgataggatagagttgctattgtccgaagtcaaaggcaaagatatcaccgagctaattgcatctggaagggagaagttggcttcagtcccttcaggtgggggtgctgttgctgctgctcctaccgcaggtggcggtggtgccagtgctgcaccagctgctgaggccaagaaagaggagaaggtcgaagagaaggaagagtccgatgatgatatgggtttcagcctcttcgattaagccaagtaatgcagatgtcaaggtttttcttatgcggttagtgctttta

SEQ ID NO: 4409 - DNA, 368 bp, Gossypium hirsutum
  Clone ID: LIB3083-094-Q1-L1-A1
gagggcttttcaccagatgatgcatacccatttggtgctccattgtttatggagaccccaagaccatgttccccacttgcgcagatggagtttctggcatttgaagagattatgccacttgctgcaataactgatgatgaagcctttcctgaaggcaatggaagtcaatcaggtcgcaaagcatcactatctctcagtacactagatgtgctaagtgtcaatgaacttttggattcggttctggaaacagcgcgacaagtagcaagcttttcagtttcgcctacacccattccttatgaacaaatgaggagtcagtgtgaagctcttataataggtaaacagcagaagatgtcggtgattcatagctt

SEQ ID NO: 4410 - DNA, 261 bp, Gossypium hirsutum
  Clone ID: LIB3083-094-Q1-L1-A11
gaaaattggttctgctagagaaactttgggatgatgtagtggccggtcctcaaccggaacgtggccttggccgcctgaggaagatcaccaccaccccacccttgtccaccaaagatgaggcttaataaatggcgatgccaaccagtccgacgacacctgggacaccatccacgccggggtcggttcgtagggacaacgtgtggaggagccggttaaatccacttaccaaccttgcaaccaaaggtattggccctgaaattt

SEQ ID NO: 4411 - DNA, 367 bp, Gossypium hirsutum
  Clone ID: LIB3083-094-Q1-L1-A2
caggaacaatcactacaacctacctccttggtctatcagcattcttcccgactgcaagaatactgtgtataacactgcaaggattggagcccaaattgctcggaagaaaatggttcctgttcccatgcatggaggactctcttggcaggcatacaatgaagagactgcttcagatgctgacagttcattcacaatggccgggttgttggagcagataaatacaaccagagatgcaactgactatttgtggtacacaacagaagttaagattgactcccgtgaaagattcttgaggaatggaaaatctcctgttcttactgtcttatcagctggccatgctttgcatgtttttgtcaaatgtcaacta

SEQ ID NO: 4412 - DNA, 373 bp, Gossypium hirsutum
  Clone ID: LIB3083-094-Q1-L1-A4
gatggatcggagacaccgtagactccatcaaaccaattcagatccggcagctcctcactcaggccgtcagtcttggtatgatcgttacatcagcccttataatatggaaggcattgatgtgcatcactggcagtgaatctcctgttgtggttgttctttctggaagtatggaacctggcttcaagagaggtgatattttgttcttgcacatgagtaaagatcctattcgtgcaggggagattgttgtttttaatgttgatggccgtgaaatcccaattgtccatcgtgtaattaaggtccatgaaaggcaagatactggagaaagtgatgtcctcaccaaaagagacaacaattatggggatgacaggctttt

SEQ ID NO: 4413 - DNA, 368 bp, Gossypium hirsutum
  Clone ID: LIB3083-094-Q1-L1-A5
gtggtcaaactgtgtcgttttgagagcaattataagtgaaagtactgttggatgcacggaaagaaatggagttgagaaggggaagaaactggcatcatctccattgaaatggagagaatcctctcctggtagaaaggaaaataaaagttttagcgactgggacaacccgcttgcctttacttcggccttagaaagggttgaaacatgggtcttttctagaatcatcgagtctgtctggtggcaggcactcactccgcatatgcagtcggagggcaaaaaggaaatttatgaaggcaagggctctggttcaagtaaaagctatgggaggatacctagttcaagtaatcaagaccaagtgaacttttcat

SEQ ID NO: 4414 - DNA, 369 bp, Gossypium hirsutum
  Clone ID: LIB3083-094-Q1-L1-A6
tagacaagggaatcgaccaaaaagctttgcatgatacgttttctgcatttggaaacattctctcttgcaagctagccacagattcttccggccagtcaaaaggttacgggtttgtacaatttgacaacgaagaatctgcccaaaaagcaattgagaagttgaattgtatgctattgaatgataagcaagtctatgtgggcccttttgttcgcaagcaagaaagagatacttctactagcaagacaaaatttaacaatgtctacgtaaagaatctctcggaatcaactaccgatgaagacttgaatcaaacttttggtgaatttggtcagatcactagtgctgtggtaatgagggatgctgatgggaaat

SEQ ID NO: 4415 - DNA, 364 bp, Gossypium hirsutum
  Clone ID: LIB3083-094-Q1-L1-A7
ctcgtgccgcacaattcatagaaagtaaaactccgacgccatgtccagctccgatcccaacaagctcatctccaaagccgacaaactaacaaagctaagtcttacaaggtggagtgcagattggaaaagtgctactcttttatatgaacaagctgcaaatggatttcgagtttcaaaggattatgagaaagcaaagttggcattcgagaaagcttccaaaggacaagagatgctagcttctccctgggatgctgctaaacacatggagtctgctgctgctttagcaaaggaactacgcaactggactgaggttatcgatttttacagaagggcatctgagctatacatgcagtgtgacagacca

SEQ ID NO: 4416 - DNA, 369 bp, Gossypium hirsutum
  Clone ID: LIB3083-094-Q1-L1-A8
caaggattcaaataaggaggaaagggagagaatgggtcgaaggtcgaagtttgaagagccacgaattgaacagatccaagatcttgagaatgatatgatgaagtatttcagagaggatctacataggcgcttattgagcaccgatttcaagaagcaagttgatggtcttgagatgttacagaaggcactcccttccattgggaaggaaataattgaagttctggacatactattgaggtggtttgttttgcagctatgtaaatctaacacgacatgccttttgaaggtgctggagtttcttccagaactttttgactcgttgaagggtgaagcatatagtttgacggaggcagaagctgccatttttct

SEQ ID NO: 4417 - DNA, 313 bp, Gossypium hirsutum
  Clone ID: LIB3083-094-Q1-L1-A9
acagccattgctttttggcctgtccactggtaatgatgctacggattttgttcacttttgtgcaaaggcatcgttatatatcaactcacctgactatccaatcacatcgaccgtcgaatacaaacatcaccaatactgattgaaaaaccatattagaagcagaggaaaaaggtgttagagtgttgagtctaggcctcatgaaccaggctgaagagcttaacatgtatggtggggtgtttatacaaaaacatccccagcttaaagtgaaattggtagatgggagtagcttggcagttgcagttgtgttaaatag

SEQ ID NO: 4418 - DNA, 370 bp, Gossypium hirsutum
  Clone ID: LIB3083-094-Q1-L1-B1
ccccaacttcacaccagcaaagcaaaagcttcaccaatggggatcgatttagtcgcaggaggtaagagcaagaagacgaagaggacagcccccaaatccgatgatatttacctcaaactcctcgtcaagctttaccgtttccttgtaagaagaactgggagcaaattcaatgctgtgatattgaaacgcttgtttatgagcaaagttaacaagcctccactatctctctctaggcttattgaattcatgaagggaaaggaggataagattgctgtggtagtggggacagtgacagatgatattagggtttatgaggtttctgctttgaacgttactgctcttaggtttactgagactgctagagctagga

SEQ ID NO: 4419 - DNA, 75 bp, Gossypium hirsutum
  Clone ID: LIB3083-094-Q1-L1-B10
ctacaacacacttgctagtattcctacttggagtggtgacgtctagcacttccacatttggttcctatgagtcac

SEQ ID NO: 4420 - DNA, 438 bp, Gossypium hirsutum
  Clone ID: LIB3083-094-Q1-L1-B11
gaattcccgggtcgacccacgcgtccgacggttgcgagaagacgacagaagggcaccctagaatgtcccatttgataaaaatgaaaatggatgcttgtttgataagaaacacattttattccttgatcatcaacatgggatgctacagagacaggaaagagcatttccaagatgaaaagagaagaagccaaaatcactgtctgggaaaatctgcagaatgctaaaggcgatgcagccataacgaaactagagatgaagctggaaaagaagagatcgtcatcaatggataaaataatgaataaactaagatcagctcagaagagagcccacgatatgaaaagtttgatgctggccaaccaggcccaccaggttacaaagacctcgcatatggctatatctttcagacgaacccgccagatgagttcattgagtggttgc

SEQ ID NO: 4421 - DNA, 176 bp, Gossypium hirsutum
  Clone ID: LIB3083-094-Q1-L1-B12
atctctctcgctctgaaaacccgtacggattctcaaattgccaacaaatctgcttggtacctggaaaaaccaaagaaaatgaaaaggaatgcctgttgattgacgggaaatttttgttcctctaagctcgactttctgcatcatcaaaaggggagaaattagtcaggaaatggggg

SEQ ID NO: 4422 - DNA, 382 bp, Gossypium hirsutum
  Clone ID: LIB3083-094-Q1-L1-B2
caaaaaaaaaacacaccctaaagagacaatgagaaagctgctagcctttgccgggcttttcttcttcttttgggataaaacattagctcaaatagctccggcgccgccgttaaaggtggacaacatcacttccatcctcgaaaaaggtggccaattcaccactttcatcaagctattgaaagccacacaggtggctgatcaactaaacaaccagctaagcacaccggaccctaacgacgggataacggtgtttgcaccgagtgacaacgcgttctacggactcaaacccgggacgttaaactcactttccgaccaagagaagcttcagttggttcaataccatatactcccgacgttaatgacgacggcgcagtttcaaacc

SEQ ID NO: 4423 - DNA, 363 bp, Gossypium hirsutum
  Clone ID: LIB3083-094-Q1-L1-B3
cgagagcggcttcggcaaatggacctttggccagtccgagacagggaatgaaaactgggatgatagcttgctgacaaaggaagaaatggaggcaagaatgcagagaaaggtggaggcagtcatcaaaagagaaagggccatggcgtatgcatattctcaccagctatggaaagatgcaatgaaatcacctcacacaggtgtacccaacattcggtccggtgtattcccatggtggtggaactggttagaacgtcgattaccaccaaccgatttacccgaaaaccaagccacaaagaccttccaatttacaccaacaatgccaaactccgaattaaagcctagtccgaggccacaatccagtca

SEQ ID NO: 4424 - DNA, 324 bp, Gossypium hirsutum
  Clone ID: LIB3083-094-Q1-L1-B4
aatagcaaaggccagatttatcaagtgtgtcacggtcggtgatggagctgtggggaaaacttgtatgctcatttcatataccagcaatactttcccaacggattatgttccaacagtatttgataactttagtgccaatgtggtggtggatggcagcacagtgaaccttggcctatgggacactgccgggcaagaagattataataggctaaggccactgagttatagaggagctgatgtgtttttgttggccttttctcttataagcaaggccagttatgaaaacatctacaaaaagtggatcccagagctaagacattatgc

SEQ ID NO: 4425 - DNA, 353 bp, Gossypium hirsutum
  Clone ID: LIB3083-094-Q1-L1-B5
gacgtttccccacacgagttcgtcaaggcttatgccgcccatctcaagcgctccggcaagattgagcttcctccatggactgatattgtcaagaccggtaaactgaaggagcttccaccctatgaccctgattggtactatgtcagagctgcttccatggctaggaaaatatacttgaggggaggtcttggtgttggtgcctttaggaggatctacggaggagctaagagaaatggaagtcgcccacgccatttctgcaagagcagtggatctgttgctcgtcacatacttcagcaattgcaggatgtcaacatcattgatattgatcctgaaggtggtaggagaatcacatc

SEQ ID NO: 4426 - DNA, 323 bp, Gossypium hirsutum
  Clone ID: LIB3083-094-Q1-L1-B6
ccaccatgcaccagcaccagcaccaacagttccaagccccccagcaccacctgcagtgccaactacagatgacacgacaccagcaccatcacctagtctcaatttgaatggaggagattcattgttggtggcaggaacaaagctttggtgggcaaggacaggattgactattgccattttgatcgctattacaggctatagtttctaggaactcataagctaaggggtgattgtgatttactttacaattgcttgtcataccttttttcttttgggtttgtatttctgtcacataacagagaatattgtttcatttgtgtaac

SEQ ID NO: 4427 - DNA, 299 bp, Gossypium hirsutum
  Clone ID: LIB3083-094-Q1-L1-B7
gcattgaagaatcatagaagagcaagttttacttttacatggcaaccttgacttattagttccaaaaagtcaaattgaagtggtaaccgaatacaagcatcaaaaggaaactcacatttttcctgcagcaatagcagcttgcacaaaatcctcacaccgggaaaatccacccgataaaacatcacccaaggcaccaatgatgtcgaaagcctgttgcaaatcacttgcagaagtcatgtcatcgagccatgaaagcaactctttggagaaccctatcattttctttacattcaacaacc

SEQ ID NO: 4428 - DNA, 370 bp, Gossypium hirsutum
  Clone ID: LIB3083-094-Q1-L1-B8
ccaaattctaaaaaccaaagcgaaaatttagaaagaaaatcactcctcccatgttttaacttcaacgctttaacaacaccaattacataaacaaagcaaaacccaattatttttctccttttcttcccatttctggtcatccatttttcttttaagccactcttcttttgagttcatataaacttcaactcaatacccccaagaaaacccagaaaaaaagatcacaacttcgtttattaaagagtctcgtttattaaagagtcaaaaaggaagggactttttggtttttgaaggagaaatggcaagtggggatcttgaaagaggaggaggaagtaatgtgaagaacagggggaatagctataaccaatca

SEQ ID NO: 4429 - DNA, 227 bp, Gossypium hirsutum
  Clone ID: LIB3083-094-Q1-L1-B9
cggcacgagaaatcgttatggataatattgacacagggcatcagaaattcaaaggggaggagactactgaacgcataatagcaacactcaaagtgggaaacgaagaactagaatcgtcactcaacaaggagaagtttcagtctcttcaacttaaacaagaacttgctgaaactaaagcgcaaaacttaaatttgcacaaggagctccaaactatacgtaatcaactt

SEQ ID NO: 4430 - DNA, 371 bp, Gossypium hirsutum
  unsure (1)..(371): unsure at all n locations; Clone ID: LIB3083-094-Q1-L1-C1
gaagcatgtgtccctcccaaggtctaccgtccattcaaatggtattactccaaatacacagtcaacttcagtttcgtacgagaaccgacaagatagagaagcagatgccaggaaagcaatggatgtaatttctagtaaaccaaagccaacacggcctccgcctagggtgccttcagcaaagcccgggagagttgtcggatccgttgtaccatatgaggacgtaaaaaacattaaagatggttacgacactaagaacttctacagaaatgcagtccctccacagaatgtcaccccccattgtttcctcctaaatcaagagaaatccngaacacaggccgacaggaatcttgcaaccaaaccgcaacaacagt

SEQ ID NO: 4431 - DNA, 396 bp, Gossypium hirsutum
  Clone ID: LIB3083-094-Q1-L1-C11
aatttgagtactgtttcttgtgctctcttctctggcatgcaacgcaatggcgtctgatcttgagaccaaagccaaagaagccatatatcgatgaccacttcgagcttgcgctccatctctactctcaagccatgcaacttaatcctaaacacgccgagctctatgctgaccgtgctcaagccaacatcaaactcaatattctcactgaggctgtggcggatgcgaacaaagcgattgagttggatccttccatgtctaaagcttatctgcgtaaagccactgcctgcatgaagcttgaagagtatcaaactgctaagtctgcactggagactggcgctgctttggcacctgcagagtcaagattttccaaagtgataaaagaatgtgaagagcgaa

SEQ ID NO: 4432 - DNA, 362 bp, Gossypium hirsutum
  Clone ID: LIB3083-094-Q1-L1-C2
caaagcattcgactttgcaaacagaaggggcgtcaaagaaccgtcttctctgcctctacggcaaccgtatattactcatacaaattgcaaagcaaaaccaagaaatccctcacatacaaaaatgggtgattcaaaggtcgaaaccatctccagattagctcaatggaggatcgacaactttagtccttgttcttacaaaaaatccgaccccttcaaggtcggtctttggaactggcacttgtctatagagaagaatcgatatatgtatattcgattatttcccgagccatctcgtgtgtctaaggagcagcctccttatgctaaatttatactcaggatctctaatgttggtgctaatcgta

SEQ ID NO: 4433 - DNA, 370 bp, Gossypium hirsutum
  unsure (1)..(370): unsure at all n locations; Clone ID: LIB3083-094-Q1-L1-C3
gttccatttcatctttttctgaaagattctctgatgagcaggctagcgccaccattagttctcaatcactggaagttacatcaaaagctgtacctgttgatgaagaaaataacaatgtgagatctctaacagagaaattatctgctgctcttatgaacatcagtgccaaagaagagttggttaagcagcatgctaaagttgcagaagaagctgtctcaggctgggagaaagctgaaaaggatgtagtagctttgaagcaacagcttgatgctgctatgaagaaaaatgcatcacttgaagatcgagttggtcatctggatggggcactcaaggaatgcgttagacaacttangcaagcaagggaagagca

SEQ ID NO: 4434 - DNA, 364 bp, Gossypium hirsutum
  Clone ID: LIB3083-094-Q1-L1-C5
ttgttgttgtcgtcgtcatggcttctcttcctttcatcttcttcttatctttctttataatctccacaacattgacgtcagccggcgccgccgccgccaccatcaaactctccctctctcccttccctcacccttcttcctcccatccttaccaaattctcaacaacttagtcacttcttctgttgcaagagcccaccacctcaaacaccccaaagccaaggccgataatactacctcttctcttctcagggcttccctatttcctcacagttatgggggctacactatctccctcaaatttggaactccgcctcaaacccttcctttcattatggacactgggagcagcctctcctggttccc

SEQ ID NO: 4435 - DNA, 360 bp, Gossypium hirsutum
  unsure (1)..(360): unsure at all n locations; Clone ID: LIB3083-094-Q1-L1-C6
aggagttccttatggttatagctgcattctgggttctgtcaattgtgggaagttggtgcaacttcttgaccttgttctatatatgtttcgtattgctgcacacggtacctgtattatacgagaagtacgaggataaggtagatccatttgcagagaaggctgcaatcgaggttaaaaaacaatatgcagtttttgacgccaaggttcttagtaaaattccaatgggccctttgaaggccaagaaggtttaacaaggaaaggggggttcagtctccacctctccggcaacatttggctagttctgggatgtggttntatgtgctgaattcacattagctagaggcatttcgtcctcaaatc

SEQ ID NO: 4436 - DNA, 356 bp, Gossypium hirsutum
  Clone ID: LIB3083-094-Q1-L1-C7
gataaagaaaaaatggctgaggagcataccaaggttggtggtgaggaagcagtggagagcaaggagcgagggatgtttgatttcttggggaagaaagaagatgagaagcctcaacctcaagaggaggtggtcgccacccagtttgagaaagtcaagatagaagaggaacataaggaagatgagaagaaacacagtctcctggacaagcttcacctatccaatagcagctccagctcttctagtgacgaggaagaaggtgaaggcggagagaagaagaagaagaagaaaaaggagaagggaaagaaagaacaggacagtgcagtcccagtggagaagtgcgatgaggtagcaacagt

SEQ ID NO: 4437 - DNA, 363 bp, Gossypium hirsutum
  Clone ID: LIB3083-094-Q1-L1-C8
ccaccatcaccacctaaacacccctacaagtacagggccccacccccaccatcaccacccaagcacccttacaagtacaagtctccacccccaccacctccagtttacaagtataagtctccaccacctccacctccatcatcacccaagcacccctacaagtacaagtctccacccccaccacctccagtttacaagtataagtctccaccacctacacctccatcaccacccaagcacccttacaagtacaagtccccaccacctgcaccaacatcaccaccaaagcatccttacaaatacaagtctccaccaccaccaccatcctcacctaagcatccctacaagtacaagtccccacca

SEQ ID NO: 4438 - DNA, 59 bp, Gossypium hirsutum
  Clone ID: LIB3083-094-Q1-L1-C9
ctcgtgccgtgcctgcggagttgattatgaagtgttggccaagaagaactctggggatt

SEQ ID NO: 4439 - DNA, 334 bp, Gossypium hirsutum
  Clone ID: LIB3083-094-Q1-L1-D1
ccaccattattttctaaacacccctacaagtacaagtccggagccttaccatcaccacccaagcacccttacaagtacaagtttccaccctcaccacctccagtttacaagaataagtctccaccacctgaacctgcatcatcacccatgctcccatacaagtacaagtctccacccccaccaccttcagttaacaagaatatgttgtaaaaactttcaccttcataaacacccaagcactcttataagtacaagtaccaaccacctcctcctgcatcttcaccaaagcatccttacatatacaggtttacaccaccaccaccatccccaccta

SEQ ID NO: 4440 - DNA, 376 bp, Gossypium hirsutum
  Clone ID: LIB3083-094-Q1-L1-D11
gaaaaatacaagttgaatggacaattcagatggatatcgtcccagatgaaccgagtgagaaatggtgaactctatcgttatatttgcgacaccaagggagcattcgttcagcctcctatatacgaggcttttggcttgactgttgttgaggcaatgacctgtggactaccaacatttgcaacatgttacgggggccctgctgagattatagttcacggaaaatcggggttcaacatcgatccttataacggtgatttggctgccgagacccttgccaatttcttcgagaagtgcaaagcggatccatcttattgggatgagatctcccagtgagggttgaaacgcatacaggagaagtatacatggcagatttact

SEQ ID NO: 4441 - DNA, 375 bp, Gossypium hirsutum
  Clone ID: LIB3083-094-Q1-L1-D2
ccaccatcaccacctaaacacccctacaagtacgggtccgcacccccaccatcaccacccaagcacccttacaagtacaagtcttcacccccaccacctccagtttacaagtataagtctccaccacctccacctccatcattacccaagcacccctacaagtacaagtctccacccccaccaccttcagtttacaagtataagtctccaccacctgcacctacatcaccacccaagcacccttacaagtacaagtccccaccaccttcaccaacatcaccaccaaagcatccttacaaatacaagtctccaccaccaccaccatccccacctaagcatacctacatgtacaagtccccaccatcaccaccacca

SEQ ID NO: 4442 - DNA, 373 bp, Gossypium hirsutum
  Clone ID: LIB3083-094-Q1-L1-D3
gatggaaaggggttttattgttttggccttgacgggggtgttcgccgcgacggtggttacggcggctgacgagagtgggttagcgaatgagtgcagcaaagatttccagagcgtgatgacttgcttaagctttgctcaaggaaaagcagcgtcgccgtcgaaggagtgttgtaattcagtggcggggattaaagagaataaacccaaatgtttgtgttatattttgcaacaaacacaaacttccggtgctcaaaatctcaaaagcttaggtgttcaagaagataagctgtttcagttaccgtcggcttgtcaattgaagaacgctagcgtcagtgattgcccaaagcttcttgggttatctccgagctcacca

SEQ ID NO: 4443 - DNA, 390 bp, Gossypium hirsutum
  Clone ID: LIB3083-094-Q1-L1-D4
ttggtattgaagtatataaaatgaaattgctttaaaaaaagcaatgcagcaaaacaagactgcattatggcaaatactatatattcttccacacatccctcaaaacacttttatttcaaaccatttggtcatcttcaaacaagaagagaccaaatcccacatcattttcccatccccagacactttcccatcacccaaacacaaaaaagaactctaaaaataaaacaaaaacctaaccatcatgaaatttcagtaaaacaagaaacaatcaaaccatccggatgctttttctttctcgataaaaactcattaactgtccccctcagtacctgtaatgaggaggcttgtaaggaccttaacaggcacactaatgtaatcagcttgatctta

SEQ ID NO: 4444 - DNA, 333 bp, Gossypium hirsutum
  Clone ID: LIB3083-094-Q1-L1-D5
ccaagcaagcattttccttacaagtttgtttttcttgtgattaatcgatatggctagctcaatgtcccttaagcttgcatgtgtggcggtgttgtgcatggtggtgggtgcacccctggctcaaggggccgtaacctgtggtcaagtcacaagctccctcgcaccctgcattggttacttgacagggaatggtgctggtggcgttcccccaggttgctgcggcggcataaaatctctcaactccgccgcccaaacaacaccagaccggcaagcagcttgcaaatgcatcaaaagtgcggccgccggcatttctggcatcaactatggtattgc

SEQ ID NO: 4445 - DNA, 368 bp, Gossypium hirsutum
  Clone ID: LIB3083-094-Q1-L1-D6
agaagattaaggatgaagaaggtgaggggtgtaatatatatggctttttagaagttaataaggtggcagggaactttcattttgcacctgggaaaagctttcagcaatcgaatgttcatgtacatgacttgctagcttttcaaaaggagagttttaatctaagtcacaggatcaatagattagctttcggagattacttccccggggtcgtgaatcctcttgatagtgttcattggactcaagaacagccaagtgggatgtaccagtactttctcaaggttgtccctaccgtgtacacagatgtgagtgggcacactatccagtcaaatcagttttctgtaacggagcattttaagggtgcagaagtt

SEQ ID NO: 4446 - DNA, 370 bp, Gossypium hirsutum
  Clone ID: LIB3083-094-Q1-L1-D7
atttaacagatcgagagaaaaaagaatggcagaggagcatagatgccaagcgccagaaggccatcgtctttgcgtcaataactgcggctttttcggaagttcggcgacgatgaacctttgctccaaatgttacagagatctctgtctcaaggaacaggaagcttcttcgatcaaatccgctctttcctcttccccttcgtcttcatcaacggtcgtcgaatccatttctcaggttcctcttttggctctccatgaagtcaacagagaatcggcggttccggagattgcatcggcggccgaacagcgatcgcagcaacaaccgaatcggtgcatggtttgcaagaagcgggtcgggttgaccggattcaaa

SEQ ID NO: 4447 - DNA, 371 bp, Gossypium hirsutum
  Clone ID: LIB3083-094-Q1-L1-D8
aaaaacccagtattctgtcatcactatggaggcccaatggctgctattttttacaatggcagcactaatggcagtggcaaacggccaggaatcagtgaagccattggtgaagatagttaaaggcaagaaactttgtgataaagggtgggaatgtaaagggtggtcacagttttgttgtaaccaaaccatttctgattacttccaaacttatcaatttgagaaccttttcgctaaacgtaatacaccggtggcacatgcggttgggttctgggattaccattctttcattacggcggcggctcagtatcagcctcatggttttggtaccaccggcggtaagctgcagagcatgaaagaagtggcagcttttc

SEQ ID NO: 4448 - DNA, 403 bp, Gossypium hirsutum
  Clone ID: LIB3083-094-Q1-L1-D9
atttgggataaggcagatattgtcaaggttagtgatgtcgagctcgagttcctcaccggtagcaacaaagtcgacgacgaaactgccatgaaactttggcgacccaactttacactgctcttggtcacccttggtgaaaagggtagccgatactacaccaagaatttccgtggggcagtcgatgctttccatgtcaataccgtggacacaactggcgccggtgactcctttgttggtgcattgctatgcaagattgttgaaaacccaaccattcttgaggatgaagcaaaattaagggaagtgttgaaatttgcaaatgcatgtggagccatcacgacgaccaaaaagggagcaatccctgcactaccaaccgtggccgatgcccttgccttaatcaatggag

SEQ ID NO: 4449 - DNA, 369 bp, Gossypium hirsutum
  Clone ID: LIB3083-094-Q1-L1-E1
ccacactctaataacctcgactccgagcttggtttgctgttgtctttcacggcgggtgttcgccgtgggtggaccactatcatgatcgccggtcctaaatgatgtgacgagctggactgatgcaaccaatttgcaaatatgtaccttccaacgccttggtgtccactgcctatactaaggccatgtgtgatataaaagaagcagtagcgaacggatggggattccactcctgctattggaagagatcaaggatacatctcaaacatgcccatgaaggccatactggggcatatgaatccgacatcgagatcgataacaaaatgaatcctctgaagctcttggacgatgcaaatcgatgggaatatgatc

SEQ ID NO: 4450 - DNA, 150 bp, Gossypium hirsutum
  Clone ID: LIB3083-094-Q1-L1-E11
gcgaaagattgtctcttgttattgtggcgaagcttggcgtaccaacgtaaagctgcacggattttactacatgtgttccctctgatgaatgccgatatgcagagaacgactttgattttataacagaggtgaacgtccctgagagcatat

SEQ ID NO: 4451 - DNA, 391 bp, Gossypium hirsutum
  unsure (1)..(391): unsure at all n locations; Clone ID: LIB3083-094-Q1-L1-E2
cccannaagttctgttgttcaattgggctctatgtgtgcgttgcagcgtttggttnagtgctacancgctattctgaataaccaatntggtggttgaaggggctatgtgtactgtgatanncttgccgtgctggttttgaaancccctaagacttagaagggctagctgatgccatggttaagctggtatgctccgacaggaagaccggcggagttgttttcgagaaggagggatataccgacaaaaccggaaaataccagattcgtgtatccgaggatcacttggatcagatctgtgatgcagttcttgtgaagagcccccagcttggatgtgccacaatgtcccccggtcgtgaacgtgcccgtgttatcttgaccaactccaatggca

SEQ ID NO: 4452 - DNA, 373 bp, Gossypium hirsutum
  Clone ID: LIB3083-094-Q1-L1-E3
gaaacaatggcgtcctcggatcttattggcaagctcgagactgatgtcgagatcgatatttctcccgaaaagttccaccatatgtggtgccacaggccgcaccatgtccaccacactagctctgaaaaagtacaaggatgcgatttacatgaaggtgaatttggaactcccggcgtcgttatctgctggagatatgtgcatgatggaaaggctaaaactgcaaagcaggtagttgaagttatggaccatgagaaaaagtcaataactttcaaaatgcttgaaggagatctgatggaggaatacaaaagcttcgtgattacaatccaaacttcccccaagagcgacggtaaaggcagtatagtgcactggactc

SEQ ID NO: 4453 - DNA, 379 bp, Gossypium hirsutum
  Clone ID: LIB3083-094-Q1-L1-E4
ctccaagcaaccattttccttacaagtttgtttttcttgtgattaatccatatggctagctccatgtcccttaagcttgcatgtctgctagtgttgtgcatggtggtgggtgcacccctggctcaaggggacgtaacccgtgctgatggcgtagtcatccttccacgctgccttcctttattgatagggaatggtaatggtgctgatgctgatgttgatgccccagcttgctgcgacatcgtcaggggtctcttgagctcgctgctctgtggtggtgtttaggaaccgatctagcttgaaatcgggttcggattcgggtggagtttcaaattggtgtgttatggaatcccaacttaatcgtgtttaggggtgggatcca

SEQ ID NO: 4454 - DNA, 369 bp, Gossypium hirsutum
  Clone ID: LIB3083-094-Q1-L1-E5
atcctatcttaaatcaactcgcttccgatccgctggcagacccgtcccagacccgccacgagtggactctcctcttaaccttccagttctgttacctaattttcctctttgccttctctcttttatcaacggctgcagttgtatttacggttgcatctctctacacgtcgaagccagtctctttcacttcaacgatctcagccatacccaaggtttttaagcgcctttttataaccttcacatgggtttctctcttgatgtttgtttacaatgccttgttgatcggtttcctggtcttgtttgtcattgccgttgattcccggaatgcctttttttccttcttctcatttatggtgatcttagtgctgt

SEQ ID NO: 4455 - DNA, 373 bp, Gossypium hirsutum
  Clone ID: LIB3083-094-Q1-L1-E6
attctcaatgttcctcgcgatttgcgcaatcctggccgtccacgtggcttttacaacttcgtctccgacgttcgatttctccggcaaccatttcctcccgatcaaatcggaatgcagcggatccatcgctgagtgcctgatgcaaggcggggacgactcgtcggacttcgatgccgagttcgccatgggatccgagaccggcaggcgcattttagcggcgagacggtacatcagctacggtgcactgaggagaaacactgtgccgtgctcgcgacgcggcgcatcttattataactgccgacctggagctcaggcgaatccctactcacgcggatgcagtagaattacacgctgtcggcggtagatttatttt

SEQ ID NO: 4456 - DNA, 370 bp, Gossypium hirsutum
  Clone ID: LIB3083-094-Q1-L1-E7
cagaacttgagtgggacttcaggctcccccttgtgaagagtattaatgttagtgggcataaatatggtcttgtttatgctggaattggttgggttatctggaggagcaaagaagacttacctgaagaactcattttccatattaactatcttggagctgatcaaccaactttcactctcaatttctccaaaggttctagccaagtcattgctcagtactaccaactaatccgtttgggatatgagggatacagaaatgtgatggagaactgtcatgaaaacgccatagtccttaaagaaggattggagaaaacagggcgttttaacatcgtatcaaaggacaatggggttccactggtggccttctccct

SEQ ID NO: 4457 - DNA, 371 bp, Gossypium hirsutum
  Clone ID: LIB3083-094-Q1-L1-E8
caaatcctaagacaagaggaaggtacaatttactttttggcctgacatctggcggaccatataactacaatgggactcagaagtggcttcggagttttgatcaacgtttacgtgagagtatcgactatgctatttgcttaaatagtattggttcttgggataatgaattgtggattcatgtgtccaagcctccagagaatgcctacatcaagcaaatttttgagggtttatctaatgtagcagaggagttggacctcaaagttggcctaaagcacaagaaaataaatatttctaatcctcgagtagcatgggagcatgaacagttctcaaggctgagagtcactgctgccactctttctgaactttctgtc

SEQ ID NO: 4458 - DNA, 380 bp, Gossypium hirsutum
  unsure (1)..(380): unsure at all n locations; Clone ID: LIB3083-094-Q1-L1-E9
agagcacccaaaagaaaaaacactgatcaacgaaggatttctagggttttttttcggtatcagcaagcgatggcaatggctgctctcagacgcgaagggaggcgtttcgcccctctgatctctccccgtccaattactgctgtccgatcctctcctatcgttcccactcacgaagatgagggtccgattggtgttcgttatatttcaacccaagtcgttagaaaccggatgaagagtgttaagaatattcagaaaattacaaaggctatgaagatggttgctgcctcaaagttgagagcagttcaaactaaagctgagaattcccgaggcctctggcangccattactgcacttcttggtgatcttcccagtgttgatgt

SEQ ID NO: 4459 - DNA, 369 bp, Gossypium hirsutum
  Clone ID: LIB3083-094-Q1-L1-F1
gtaacttcagcaagggagaacagaataagcaaaaagggtggtcgggctgctgaacatttcactcccagtaaagctagtggtgctgcactggacttgatgaagttattcagtttcaggtcaagtgttgtccggaaaagaaaggagtgggattattataaacccgttcttgaccttttatctaatgaggaagtagacgctctcgaagccaaagaagaaaggagtggccgaaataataatagcactaatcatggagtccaaacatgggagttggagactctcattaatgttgcttctggttatgcttgggttggcaaaagctgatatcaatcaagacaaaacagaatgtagtaatgagctagtagggctggc

SEQ ID NO: 4460 - DNA, 372 bp, Gossypium hirsutum
  unsure (1)..(372): unsure at all n locations; Clone ID: LIB3083-094-Q1-L1-F11
gagattttggttttgaaaaaaaaaaaaacagatatgagggaggtgattagtatacatattggtcaagctggaattcaggtcggaaattcctgttgggagctttattgtcttgaacatggaattcaacccgatgggatgatgcctagtgacaccacggtaggtgcttgccacgatgcttttaataccttctttagcgagactgggtcgggcaagcatgtaccaagggctatatttgttgatctagagcccactgtcattgatgcagttagaaccgggacttatagacaactgtttcatccggagcaacttattntccgaaaggaagatgctgctaataactttgctagaggacattatactgttggtagggag

SEQ ID NO: 4461 - DNA, 390 bp, Gossypium hirsutum
  unsure (1)..(390): unsure at all n locations; Clone ID: LIB3083-094-Q1-L1-F2
tttgaatcaggtttttgagtttaagtggcgagatctgagcaatggcagcaaattcatcaaatggggaacaacaaacaccctcaaagccaccacctttgccatctccattgcgtttttccaagtttttccagtccaacatgaggattttggttactggaggagctggttttatcggctcccacttagttgacaaattgatggaaaacgagaaaaatgaggtgattgttgttgataactacttcactggatccaaggacaatcttagaaaatggatcggtcatcctagatttgagcttattcgtcatgatgttactgagccattgttggtcgaggtcgatcagatttaccaccttgcatgtccagcttctccaattntctacaaacacaacc

SEQ ID NO: 4462 - DNA, 332 bp, Gossypium hirsutum
  Clone ID: LIB3083-094-Q1-L1-F3
gtcatttcaagctcaagtctctgaaaatttttgtgctgaactccttttttctgtttgtactaccatgtgtggaggtgctattatttccgatttcataccgccgtcgtggtcgcgacgattgacggccgatttcttgtggcccgatctgaaaaaatccgggttgaagaaggggtcgggtaagagatactcgaagcccgtgatcgacttgggcgatgatttcgagactgactttcaggagttcaaagatgaagaatctgatatagatgattatgatgttgatgatgttttggctgatgtaaagcccttttcttttaacgctagaacgaaaccct

SEQ ID NO: 4463 - DNA, 363 bp, Gossypium hirsutum
  Clone ID: LIB3083-094-Q1-L1-F4
gttgcatgtggtgctgcagtccaagctgctatattgagtggtgaaggtaatgagaaagtgcaagatctcttgctcttggatgtcactccattgtcttccggtttggaaaccgctggtggtgttatgaccgttttgattccaaggaacaccaccattccaaccaaaaaagaacaagtcttctcaacctactccgacaaccaacctggtgtgttgatccaagtttacgaaggtgaaagaacaaggaccagagacaacaacttgctcggtaaatttgagctctctggcatccctcctgctcctagaggtgtcccacagatcactgtctgctttgatatcgatgctaatggtatcttaaacgtatct

SEQ ID NO: 4464 - DNA, 367 bp, Gossypium hirsutum
  Clone ID: LIB3083-094-Q1-L1-F5
gtgggtgccgcttcaaaattcactggcagtggaggagctgtagttgcattctgccccgagggaccaccgcaagtgaaacgacttgaagatgaatgtagaaaagctggatttagtattcaagcaatacaagtagttccttcatgtctaaatgatgtggatcttaagacattgtctaagtagaacattttagggattgtttttgtttggattgattgaggtttttatagaattaatgaaaatgatgagtagctgtcctgtctctattaatgtctaccctactgaatttgctctgcacattcctggcaaccagaagtaaacaggaagacaagggatccactgtctaattccgtgtgtcccctttacaata

SEQ ID NO: 4465 - DNA, 374 bp, Gossypium hirsutum
  Clone ID: LIB3083-094-Q1-L1-F6
tactttcgccctttttcttgtctctgtttttctttttttttattcagctccaaatcagagaaggaaacttatttattttgaattttttaaggaaaggaaaaagaaccaggccagtaatggagaaaaagcaaggttttctctcagctctcaaagaagatatagttcgcgggctttcaccttcccgctcgcggtccaacagccctgcaagacccctttcactcatgtccactacgttacgtggaaacaaagacaaccaccatggcggtgctcacgtggtgaaaccggaaccgttgatggcgagatccgggactgtaaggccagtcggtgaagcgttatctcctctcatggaaggtccggagccggaccgagggaaa

SEQ ID NO: 4466 - DNA, 371 bp, Gossypium hirsutum
  Clone ID: LIB3083-094-Q1-L1-F7
cggcacgagcaatcagataaaacatagcagaaaagaaatggaagaagagcgaagagtgcacccggattgtataaatgcatcaaatccgtatcatgaatgcgttgaatattgcttccggaagattgctgaggccaaagctagaaaggataaatcagtgacaggcttaactgttatacttgtaattcttaaattaatgtttttgtttaccctgccttttccttgagaactcattagacagtttaactttatcggcttaattgcaatttatgttgttatagaaactccgcaacctgagcatggccagcctgttacacctgctgcttatcaagaacaagatgtgcaacctggcattccaaaaccagaagaaagcc

SEQ ID NO: 4467 - DNA, 350 bp, Gossypium hirsutum
  Clone ID: LIB3083-094-Q1-L1-F8
cccctgttagcagagattcacgaatgggagctgctccagcagcaattgttgagtcgacaacaattagggtcatggaaataagggggggaattgaaagactcacaatttacagatctatccttgctctttgaaatttctatcctaaaaatggtggggctttagagtgatgaagccccccaccaatcaaacgacaaagagtaacaactaagaccactcagcaagggagcaccggacggaggagcagaaaacagaattcacagaaatagtaaagccctcttgagagaattacagctagaccttttcaagctaaacacccagcaagagcctaaacacatcactcaatgaaatga

SEQ ID NO: 4468 - DNA, 399 bp, Gossypium hirsutum
  Clone ID: LIB3083-094-Q1-L1-F9
caaagccaagccaaagaagcacacagccaaggaaatagcagcgaagatcgacgccgccacaaccaatagaggcggcggcaaggccggattagctgaccgttcaggtgtggagaaaggtggacatgctaagtacgagtgtcctcattgcaaaataacagctccagatttgaagtcgatgcagattcatcatgatgccaagcatcccaaggttccctttgaagagtcaaagcttgtgaatctacatgctgttcatgtggttgagccttccaagcctcgtcctggtgttaggggtagccttaaaaagtgataataaaaaaacccaaaaaatgtgtttttcgtcaagctttggtgttttgtgatgtttcgaaatatgggtttggttcctttttcatcttttaa

SEQ ID NO: 4469 - DNA, 375 bp, Gossypium hirsutum
  Clone ID: LIB3083-094-Q1-L1-G1
tttatatctccgctgctgattttggcttcgcaaactatttacttaaaggatattacgaggggaagagagctgctgagacagagttactcacgaaatttccgtatggaggagtgattttgaggcctggcttcattcatggaactcgcactgttggaagcatgaagttgcctctaggcattattggttcaccactggaaatggttcttcaacatgcaaaaccattaaaccagctaccactagttggacccttgttcactcctcccgttaatgttacggcggttgccaaggttgcagtgagagcagcaactgatccagtttttcccccaggcatcgtagatgtctatggaatacaacgatttagccagcaaatgtcaa

SEQ ID NO: 4470 - DNA, 377 bp, Gossypium hirsutum
  Clone ID: LIB3083-094-Q1-L1-G2
gtcgaatatccgaaaatacccgagtacaaggaaaaacaagatgagggcaaggaacataaacatgatgagtgccacgagtcacacgaatcgaaggagcacgaagagtacgagaaagaaaaacccaatttccccaaaggggaaaagcctaaagagcatgagaaacacgaagtcgaatatccgaaaatacccgaatacaaggaaaaacaagatgagggtaaggaacataaacatgagttccaaaagcatgaaaaagaagaggagaaaaaacctgagaaaaaggcagagtactctgagtggccaaagtacatgtttactcaatctggctcgggcactaagccttgaaccatatgacactggtgcatgtgccatcatcatgc

SEQ ID NO: 4471 - DNA, 307 bp, Gossypium hirsutum
  Clone ID: LIB3083-094-Q1-L1-G3
gggacttatacgaatacttaagaaaggttaaatgttgtatggatggaaaacgaataaaatggaaccttgacccactatcaaagatgataggaacctcggtataacttgaacgccacacttttgggattaaagtgataagttcggatagaaagacggttgactccacaagggttacttgataagtcagacgagtctttggagaacaatgagagttgaaaacaaactcacaaagtgatcataaatcatataagattcaaaagtgtattgtctaaccccaaaatgattacaaaacaactctttattatat

SEQ ID NO: 4472 - DNA, 374 bp, Gossypium hirsutum
  Clone ID: LIB3083-094-Q1-L1-G4
acaacattggtctaggtgctaccagggaccctaaactggttaagaaaattggggctgcaacagcacttgaatctagagcaactggcattccatatgttttcgcaccttgtatagcggtttgccgagatccgagatggggccgatgttacgaaagttacagcgaagatccccatcttgttgacgcaatgacagagattgtaccaggattacaaggagacatacctgctaaatcttctaaaggcattccatttgttgctggaaataaaaatgttgcagcttgtgctaagcactacgtaggagatggtggaacaaccaagggcataaatgagaacaacacagtgatcaactggcatgatttgcttagcattcatatg

SEQ ID NO: 4473 - DNA, 142 bp, Gossypium hirsutum
  Clone ID: LIB3083-094-Q1-L1-G5
caaaacatcatcctccaaagccacctaagcctcccgtggtaaacccaccatatcaccctaaaccaccgaagccaccggtggtgaagccaccgtatcaccctaaaccacctaagccttcgatggtgaaacccccatatcaccc

SEQ ID NO: 4474 - DNA, 375 bp, Gossypium hirsutum
  Clone ID: LIB3083-094-Q1-L1-G6
atttcgaaggctttgaaaaaaaaaaaaatcgaacgaagaagaataatttgttaagcgatcgatctgtggattacaatggaagtgcctgtctcatgggatgctctacgcaaacaggcaaggaaacttgaagctcagttggatgagcaaatgaattcatatcgtaagttggtctccagtaaggcttcgaccaaaaatgactcggaagagaatgatattgaatctggtatcgaccgactactaaaacagctacaacaagtaaatatgaaaatgcaagactgggtctcatctggtggatctgaaatggtttctcataccttgactaggcatcaggaaattcttcaagatcttactcaggagttctatcgtcttcactct

SEQ ID NO: 4475 - DNA, 320 bp, Gossypium hirsutum
  Clone ID: LIB3083-094-Q1-L1-G7
gcactggactttatacatgaaatgggatggcttcttcatagaaatcacttgaacaggaagctgggtgacatgaaccccaatctaaatctctttcctttcaggcggttcaagtggcttatggaattctccatggaccatgactggtgtgccgtagttaagaaacttctgggcattctctttgacagaacagttgatttaggggaccatagttctatggagtttgctttgttggatatgtgtctgctccacagagctgtccgaagaaactgcaggcccatggtagaattactattaagatatgttcctaataaaggattgga

SEQ ID NO: 4476 - DNA, 358 bp, Gossypium hirsutum
  Clone ID: LIB3083-094-Q1-L1-G8
aaaaaaaatggggcttgaagaaaatctcaaatcaatgaacatcaacgaagaagagaacaagaaccctaaccctaacactaaagatgaagaagatggtgaacttgaagaaggggagatcgcaggtgaagaagatgatacgacgtcgtcttcgttaaagaaaggtgtcgtcgaacagcctcaccagttggagcattcatggaccttttggtttgataacgcttctgctaaatcaaaacaagctccttggggtagttctatgcgcgctatttacactttctccaccatcgaacaattctggagtctatacaataacatacatcatccaagcaaattggctgtggagcgggacttcattgtt

SEQ ID NO: 4477 - DNA, 91 bp, Gossypium hirsutum
  Clone ID: LIB3083-094-Q1-L1-G9
gtggaactcatcaagtgtttgaggtctattaaagagtatgcttttgtagcctcagaatatccggttgtcataactctggaagatcacctta

SEQ ID NO: 4478 - DNA, 374 bp, Gossypium hirsutum
  Clone ID: LIB3083-094-Q1-L1-H1
gctacctgtgttaagatctctactgatgcttccatcaaagaaatgatcccaccgggtgctcttgtcatgctcacacccctcgttgttggtatctttttcggcgtggaatctctttccggtgtcctcgctggatccctcgtctcaggtgttcagatcgctatctctgcatccaacacggggggtgcttgggacaacgccaagaagtacattgaggctggtgcttcaccacatgcaaaatctcttggccccaaaggttcagatccacacaaggcagctgttatcggcgacaccatcggtgaccctttaaaggatacatctgggccatcgttgaacatcctcatcaaactaatggcagtcgaatcactcgtcttcgc

SEQ ID NO: 4479 - DNA, 377 bp, Gossypium hirsutum
  Clone ID: LIB3083-094-Q1-L1-H2
agatcgaagattatggggcgttttgctcttctcctcttactagctttcgcttcatttcaagccctttgcttcgccgctgatgatgatacggccttttatgactcatttgatgagccatttgatggacgatggatcgtgtccgataaagatgattacaaaggtgtatggaaacattcaaagagcgaaggacatgatgactacgggcttcttgtgagcgagaaggcacggaagtatgcgatagtgaatgagctcaatgagcctgtgagtctcaaggatggaagcactgtgcttcagtttgagactcgctttcagaatgggcttgaatgtggtggtgcatatttgaaataccttcgtcctcaagaggctggatggaaggc

SEQ ID NO: 4480 - DNA, 333 bp, Gossypium hirsutum
  Clone ID: LIB3083-094-Q1-L1-H3
ctgcaacaattaaacacaaatttattgtcaatggatattggtgtgtttcaaataatacaacattaatatcatacatgcactccgtctgtctgtataccacaaaatccaaatagacttcatatacaaattatcaatgtttgaatgcttctctgactctccaatctgacagccaaacaccacgagttttgtccaggttgtctcatatcactcatctcctgtcttgcctttttgcgttacttacacttccaaggtcatttacgtaccaaaaactaattccaaaatcatcagactgtaagtcacacatggacagaagaaagatcaaaacgttttcat

SEQ ID NO: 4481 - DNA, 370 bp, Gossypium hirsutum
  Clone ID: LIB3083-094-Q1-L1-H4
gagagtttcgatgaggccttacaacgagatgatgtgaaggccattgttgttgcaggtgcaaatggaaaattttctggtggtttcgatatttctgcttttggtggaattcaacagggagcagtgcagcagccaaagtctggctatgtatctgttgaggttctcaccgacaccatcgaagccgcaagaaaaccatcagttgctgccatcgatggcctggccttaggtgggggtctagaggttgcaatggtatgtcatgcccggatatcgacccctactgcacaactgggcctgcctgaacttcaacttggactaattcctgggtttggaggaacgcagcgacttccacggcttgttggtctcgcgaagtccc

SEQ ID NO: 4482 - DNA, 385 bp, Gossypium hirsutum
  Clone ID: LIB3083-094-Q1-L1-H5
ttctaatccaaccattgcattggactccatttcaatttgcatgaattatttgaactgggacatgcaatttatgctaggcctgagtgcagctgccagtgttcgagtgagtaatgagctaggggcaggccatccaagggtagcaaaattttcagtgtttgtggtgaatgggacaagcatattgataagtattgtattcagtgcaattgttttgatattccgagttggattgagcaaagcatttacaagtgattctgaggttatagaagcagtttcagacttgactccactgcttgccatctctgttttcctaaatggcattcagcctatactctcaggtgtggcaatagggagtggatggcaagcaattgtggcttatgtaaacctg

SEQ ID NO: 4483 - DNA, 367 bp, Gossypium hirsutum
  Clone ID: LIB3083-094-Q1-L1-H6
gaaagtttcaatggcaaccctcaaagttccagttcacgttccttctccttctgatgatgctgagcaacttcggaaagcttttgaaggctggggtacgaacgagcaattgattatcgacatattggctcacaggaatgcagcacagcgcaattcaattcggaaagtttatggtgaagcttatggggaagatcttctcaagtgtttggagaaggaacttacaagtgatttcgagcgggctgtgctgctttttacgttggaccctgcagagcgagatgctcatctggctaatgaagctacaaagaagttcacatcaagcaattggattctcatggagatagcttgcagtaggtcttcgcatgaactactc

SEQ ID NO: 4484 - DNA, 372 bp, Gossypium hirsutum
  Clone ID: LIB3083-094-Q1-L1-H7
ctcgtatcttatcttttccgattgcctcgtaaatgcttcagatcttttttaggtttctaattttccaattccatgcataatttctgaattcttcgaaactatcttcatttccatctgtggaagtaaaagaaaatccaattcttggttatcgtgagatgaagatcgaggagttggatgaagtggagaatgatcggcgaaacgacggcgttaagcagctacagatagttagagtcgacgacgcgaagagagttctagtcggagcaggtgctcggatcctgttttacccgacccttttatacaatgttttcagaaacaaaatccaatctgaattcagatggtgggacgaagttgaccagtttcttttgctggggg

SEQ ID NO: 4485 - DNA, 367 bp, Gossypium hirsutum
  Clone ID: LIB3083-094-Q1-L1-H8
attaccttgtccaaggctatgacgatgcagggcctagtgcctctcttttgtcaccatatctcactgacataattagttgtctgatttcaactgctgatcggacagatgggggtgactccaagcttaggtcttctgcttatgaaaccttgaatgaagttgtgagatgttctaacattgctgaaacatcttccgttatagcacagctactaccagtcatcatgaataagttgggccagactatggatattcagattgtgtcatcagatgacagggaaaagcaaggggacttgcaagcctctctttgtggtgttttgcaggttatcatccaaaaacttagcagcacagatgaaaccaaaacaatcatact

SEQ ID NO: 4486 - DNA, 266 bp, Gossypium hirsutum
  unsure (1)..(266): unsure at all n locations; Clone ID: LIB3083-095-Q1-L1-A1
tttattcaataatggtggtcccgacgtgggatgatgacacattaggagtggtgaattgagaaaggaaaacacgtgggggaacatgcagatgctcccaagtcccaacgccaacagatgaaaggcagagccaggtaggaaaaatgaacactttagctcttttgttgaccccaacaaatcgacggtaatgaagatgatgattcaagtgggaagattctcgtgtcagaagatcatcntcccgggacccactgatgggaactatccatgtc

SEQ ID NO: 4487 - DNA, 320 bp, Gossypium hirsutum
  Clone ID: LIB3083-095-Q1-L1-A10
gggaagaagttgttattgttcttagcatctttataataggattcttttcaacttatgcaaaactgtacccagcaatgaagccttacgagtacggtttccgcgtgttcacgttgacgtattgtttcataacggtatccgggtataggacaggggaattcgtccatacagcagtgacgcgatttttgctaatagcacttggtgccagtgttagtttagttgttaatataggcatttaccccatctgggccggtgaggatctgcacaactcggtggctaaaaatttcatgagtgtggcgaattctttagaaggatgtgttaaa

SEQ ID NO: 4488 - DNA, 326 bp, Gossypium hirsutum
  Clone ID: LIB3083-095-Q1-L1-A11
caagcgccggaatctgaaaatgaggagcttcaagaagaaaacgatgatgaagaagaagaggaaagcaagggagaaggaagtcaaaatacaaggagaagtaaatctgataagaaagcgaagaaaagaggaggtggttttcagacagtgtgtagcctttctcctcagcttcaaagagtagtaggagagtctaaattggctagaactgaggttgtaaagaaactttgggcatatatcaaggagaaggatttgcaagacccaaagaacaagcggaatattatctgtgatgaattacttcgtgacatttttcgagtaaattctattaatat

SEQ ID NO: 4489 - DNA, 323 bp, Gossypium hirsutum
  Clone ID: LIB3083-095-Q1-L1-A12
agaaaaataaaaagtccgagtaatagattttatcccaataaaaaattacagtatcatatatcctagaaaaagctccatgttttcagcaaggaacaatcaaattctctatcaaacaatgttttcttctacacctcacaaaaatagtaccaagaaattgtctaccttcccacattttcaacaacaaaaaatttgattcttctgcctccctttttttcttatagatgtttttgctttctgtttacctgcttatctgttcttaaacagggcagggtgggacttcaatggttgttccagcttggatttggccccatccgattagacgc

SEQ ID NO: 4490 - DNA, 331 bp, Gossypium hirsutum
  Clone ID: LIB3083-095-Q1-L1-A2
gtcaatctgcacaaccaaatgctaatccgtatagtcaaccagcacaaacaaatgctaatccatacagccaacctgtacaggtacatgctaatccatatggccaacctgctcagccaagtgctaatccatacaaccaacctgctcagccgaatgctaatccatacagccagcctacacagcctaatgctaatccatatggccaacctgttcagccaagtgctaatccatatgcccaacccacacagtctgtgtctgcagcccctcaaattccaggatctgctgctcagagcagcaatgggagcttaatgataggttctaatggtcctgtcag

SEQ ID NO: 4491 - DNA, 257 bp, Gossypium hirsutum
  Clone ID: LIB3083-095-Q1-L1-A3
tgcttatctccaatctatctctctgttgtggtttgttttgtttgctgcagtttctgcatcaaacatcttccgctgtctggcataactgaatcctcgccgggaaaaatgatatcccggcggcatcctgcttcggaggaccctgcttactctagacaatcctacagccatggcagcctacacagcctagtactgatacatacggccagactaatctagcccatcctaatccatatccccaacccacacagtctgtgtat

SEQ ID NO: 4492 - DNA, 312 bp, Gossypium hirsutum
  Clone ID: LIB3083-095-Q1-L1-A4
catcaggtacaccatgaatggacattcgtacttcaacatggtgttgataacgaacgtgggaggggcaggggatataacgtcagtgtccatcaagggttccagaacaggatggctacctatgtccagaaattggggccaaaactggcagagcaatgcttaccttaacggacaaagcctctcttttaaagtgactgccagcgatggcaggactatcacagcctacaatgtagtgcctgctggttggcaattcggacaaacttttgaaggaggccagttttaagacaatattatagtgtctgtctaatataaaac

SEQ ID NO: 4493 - DNA, 324 bp, Gossypium hirsutum
  Clone ID: LIB3083-095-Q1-L1-A5
ttgaagaaaatccctcttaaaacagcctgagtgaaacgtagtgagagaggaaaagcaaagattttcagtggaagaaagctagcaatttgaatcggtgtcgtacggaaaatgttcaggaaccagtacgataccgacgtcactacatggagcccagctgggcgattgtttcaagtggagtacgcgatggaggccgtgaagcagggttcggcggcgatcggtctccgatccaagacccatgtggtgttgggttgcgtcaacaaggctaattccgaattgtcttctcatcagaagaagatcttcaaagtctacgaccacattggggtc

SEQ ID NO: 4494 - DNA, 303 bp, Gossypium hirsutum
  Clone ID: LIB3083-095-Q1-L1-A6
ctggtcatcacctttctgccgctgctatcgttggtcatgatggcagtatctgggctcagagctctaactttcccaagtgtcagcccaaggagatcactggcatcatgaaaaatttcgacaaaccaggtcaccttgcccttacaggctggcccttgggggccccaaagttattggcattcaaggggaacccggggcctgcattcgtgaaaaaaagggatccggaagggtgactattaaaaaaacaacacaagcacttgtgtttgggatatatgaagaaccagtgactccggggcaatgcaacat

SEQ ID NO: 4495 - DNA, 332 bp, Gossypium hirsutum
  Clone ID: LIB3083-095-Q1-L1-A7
tgcatgtatcaagaaatggcatccaagcccaatgtagagtatattgctggaggtgctactcaaaattcaatcaaagttgcacagtggatgcttcaaattcctggtgcaactggttacattggctgcattgggaaggacaagtttggggaggaaatgaagaagaactcaaaagctgctggtgttaatgttcaatatctcgaggatgaaactgcaccaacaggaacttgtgctgtttgtgttgttggtggtgaaaggtcactcattgcaaatctatcagctgctaactgctataagtctgagcatttgaagaagcctgagaattgggcgttggt

SEQ ID NO: 4496 - DNA, 325 bp, Gossypium hirsutum
  Clone ID: LIB3083-095-Q1-L1-A8
aaatgatcctgttgcagctgatatgttcaaggaggtcacattttcttacaatatattgtctgatccagataaaagacaccagtatgatacagctggttttgaggctgttgaagctgaaaaccaagaattggaactagatctttcaagcttgggggctgtgaacaccatgtttgctgcactttttagtaaactcggtgtgcctattaagaccactgtatctgcgactgtcttggaggaggcacttaatggtgtggtcaccatccagacacttctgctggggcaacctgtttctaggaaggttgaaaaacaatgtgctcacttctac

SEQ ID NO: 4497 - DNA, 333 bp, Gossypium hirsutum
  Clone ID: LIB3083-095-Q1-L1-A9
tgaattgtttgagctagctagctcttactcaaatggcaaccaaaacgatgatgttgcaaatattttcacttttcttctttttgttcagtatctgcaactccattttccttggtgctaatggagatgacaatggtggttggcaaactgcccatgccaccttctacggtggtgctgatgctaccggcacaatggggggagcttgtggttatggaaacctgtacagtcaagggtatggaacgagcacagcagctttgagcactgcacttttcaacaatggcttgagctgcggggcctgctacgagctccggtgcaacaatgatcctcaatggtgca

SEQ ID NO: 4498 - DNA, 328 bp, Gossypium hirsutum
  Clone ID: LIB3083-095-Q1-L1-B10
aaagtaatgggaaaccctaatttcaacatccaatctgaaactgctgaattgaagaaaattgatgagaaagttcttcaagaatctggcaatgatttaccaaaaacatgcaccccacgtcggcttaatctccccaacgctttcaatttccctgaaagaagtccaacagattcagtggtgtcgcctgttacaagaggtcttcttgcaagagacaggaaagctggcggttctctcttgccacctagtattaatcaagccaagattcatgaattgcgagttgaagaaataggtcttttttcagagttgaagaagtgatctgtggtatggattg

SEQ ID NO: 4499 - DNA, 307 bp, Gossypium hirsutum
  Clone ID: LIB3083-095-Q1-L1-B11
aatattgtaaagattcctgattttcttaatttcttaaaattgctggaagaacttgtatattcatgttagacacatctgaacatgaacaaaaacatagggcatagctctcaaaaagaaattaaacttattggtgtcggacagatatcaatatccaacacttgaacccatgtaacataggctatatataactccattttatcaatcatgatccagtcaaaacgggtacatgccaaaatttcttatttcctgaaaatgccgtttctcagttgacaacttcactggatttcccgaaatgtaccatcttaca

SEQ ID NO: 4500 - DNA, 328 bp, Gossypium hirsutum
  Clone ID: LIB3083-095-Q1-L1-B12
gaaggtttccgtcaaaactctcaaaggcactcacttcgatatcgaagtcaaacccgaagatgcggttgcggatgtaaaaaagaacatagaaactgttcaagggactgatgtttatcctgcttcacaacaaatgcttatctataagggaaaagttcttaaagatgacacgacactggctgaaaacagtgtcactgaaaatagctttattgtgatcatgttgacaaagaataagggtacaactggtgagggttcagctgcttcaacagctcctacaaagaaagatcctgaggcaagtaatctgccaacagctccagcaccagcttctact

SEQ ID NO: 4501 - DNA, 318 bp, Gossypium hirsutum
  Clone ID: LIB3083-095-Q1-L1-B2
ggatgaagaatgcagtgagttggaaggtactggtaaccttctattgggtctggctcgatcgacacattcaaaatcagccttatctgattctgagagggtgtccagacagtctgaggcccttcaggccttggaacgggcttggaaaattacaagtatgaaagaccctaacattctttactacctctgcctggaaaatgctgagcagagaaagttggaagctgcgctatattatgcaaaatatttgctaaaactagaaggtggttctaacattaaagggtggttgttgttggctcgcatattgtcagctcaaaaacgttt

SEQ ID NO: 4502 - DNA, 222 bp, Gossypium hirsutum
  Clone ID: LIB3083-095-Q1-L1-B3
ctctggaagcaaagcaactatcaactacgtttacctcagatctaaaacccctcgtctcagatccactaaattcaccatgtcttctactttcagcggcgatgaaacggctcccttcttcagcttcctcgtcttctcctgtatgggagctgcatatgggacggctaatagcggtgcgggtgtggcttccacgggtgtgatcaggcctgagctggtgatgaaatc

SEQ ID NO: 4503 - DNA, 332 bp, Gossypium hirsutum
  Clone ID: LIB3083-095-Q1-L1-B4
acttttactcattactgtctcactaataatcggtagtcacaccgtctcgtcagcggctcgacatttattccagacacaaacaacctcatcagagctgccacaattggcttcaaaatacgaaaagcacaaagagtctgaatacaaacaaccaaaatatcacgaaaagtacccaaaacatgagaagcctaaaatgcacaaggaggaaaaacaaaaaccctgcaaacatcatgaagagtaccacgagtcacgcgaatcgaaggagcacgaagagtacgataaagaaaaacccgatttccccaaatgggaaaagcctaaagagcacaagatacacg

SEQ ID NO: 4504 - DNA, 330 bp, Gossypium hirsutum
  Clone ID: LIB3083-095-Q1-L1-B5
ctactcaacaccagagaccattgctttctatattcatgtcggccatattcccactgatcatgaccttgccaaagatgaacatttgaacccaattaatgttaaaattgctgagctgagagaggctttggagtctgttacagcagaacaaaagtacttgaaagctcgtgatactcggcatcgtcacacgaatgagagcaccagaaagcgtgttataggttacacagttggagaataccttctgcttgttgctgcaagtgtacttcaagttatctatattcggcgtctcttcagcaaatcagttgcctacaatcgagtttgaacaatttcatc

SEQ ID NO: 4505 - DNA, 324 bp, Gossypium hirsutum
  Clone ID: LIB3083-095-Q1-L1-B6
gtaccatgttgagtatgtaaccaaagtccaccaagcagatgatctgctagagacgggaatgaaggaggagtgcaaagtggtgggtgatcctagattctccaaatgtgacttagcactcaaagggttcccaaacgagatatatgacatagaatgggatctgatcatggttgatgccccaactgggttccatgatgaagcccctgggagaatgaatgccatctacactgcagggctgatggctaggaatagagaagaaggggagactgatgtgtttgtgcatgatgtgaacagagttgttgaagataaattctcaatggctttctt

SEQ ID NO: 4506 - DNA, 334 bp, Gossypium hirsutum
  Clone ID: LIB3083-095-Q1-L1-B7
tctgtggaccctttggttagcatattgtttgtagcattgggtttttctcaaggaagaagaaggagaaagataagtaatgtttttgagaatgatggaatctggggttcctgtttgccacacttgtggtgaacatgttgggttgaatgttaatggtgaaccctttgtggcttgccatgaatgtaatttccctatttgtaagagttgttttgagtatgatcttaaggaaggacgaaaagcttgcttgcgttgtggtagtccgtatgatgaaaacctgttggacgatgtcgagaaggcccaccgcgatcaatcgacattggctgcacatttgagcaag

SEQ ID NO: 4507 - DNA, 329 bp, Gossypium hirsutum
  Clone ID: LIB3083-095-Q1-L1-B8
ctgaattcgattccgttttctctgatcaatactgtttggttcttcgaaacgaagcggttaccatttggaagagattaggagaagcgattagagggatattcatggagttagagaatctaattcggcgtgacccagctaaagcagctgttcccggtggcggacttcatccgatcacacgttacgtaatgaactatctccgcgcggcgtgtcgatcacgacagacattggaacaagttttcgatgaaagtaatgcggttgttccatctaataagctagatgatcgacgggcatcttcgtcttcgatgtcggttcagatggcatggattatg

SEQ ID NO: 4508 - DNA, 327 bp, Gossypium hirsutum
  Clone ID: LIB3083-095-Q1-L1-B9
tggttttttttttttttttttttttttttttttttttttttttttttatttaactaatttgcttcaatcctggaaaaacttccaagttctaaaaaccttttactggcaatatacccgggaaaggggcccagaaaaacattaccaaatccctaaaaagagacccctaattattgggggcaaaaaccccatttcaagtataaaagatgaacacgaaactatttcaaggtcctttaccaaaaggaaatatctgcttaaatgtatacagaaagctcaatagtacaatcttctccccattcaataatttagtgcttacaagaatacaatata

SEQ ID NO: 4509 - DNA, 329 bp, Gossypium hirsutum
  Clone ID: LIB3083-095-Q1-L1-C1
cctgtttccatggagatctagggtttccagtggttccgcaactcaaaatcgtagctcttcattcgcatttttcaattgcttattaaaagaagagaaaatggaggcaggtgttgttggagatattgcgtgtttggatccggagctattgcagctccaggagatgtctccgttagctctcaaatccaaatcctgaattcacgcaaacgcttttcgaacagtggctttcgcttcccgatacttacaagctggtgacgcaattggttagtgatgcaaaggcacgcaatcccttgaatgttcctggaaatgcttcctctggaagtacagcagca

SEQ ID NO: 4510 - DNA, 327 bp, Gossypium hirsutum
  Clone ID: LIB3083-095-Q1-L1-C10
aattcccacttgcttaccaccaagcttattgccaagaggatagtttccttgggaagaccatagcccttgcttgacatagcggttagcagccgaaaccttcctcaaaacgtcgagcagcaatcccaccgcggaatccgcacaatcagtggagaaaatggttccagcgccagccactgcgatgccacggcgtcggcactcggagcaatcgatgtggttaatgccctggctagtggtaacgaccaaacccaggtggggcaaaaggcggatagtatcagcggtgacagaaccgctagctgatgtgagaatggcttgtacggactgtgcatg

SEQ ID NO: 4511 - DNA, 285 bp, Gossypium hirsutum
  Clone ID: LIB3083-095-Q1-L1-C11
gattaaagatttttctttgatgaaaacacccaagttctacattggcgcatgatgaaagtcacatttcaatgctaaaaagtctcaaaaccttagagctatgcaattattcccttctcaaaccaaacttgagtgaaagctcatgaccaactcaaatacagaaaagacttcaatcgaacaccgattcaaccaaatcacatcatgtttcgactaatgttaaatcgagtgatgctcgcccctaagaaacactatgagaaaagctaacggatggtcaacatgaacattatc

SEQ ID NO: 4512 - DNA, 326 bp, Gossypium hirsutum
  Clone ID: LIB3083-095-Q1-L1-C12
gttggcctattgctgcccgatttttgctattctgttctgctttctcttctttgtcgtattgtttgttgtcgcaggtataacgtggcatgaagcggcgcatgttggggagggtcgtggtgcgagattcgcggcggcgagcgaggacgagcggtgccagcttgctgcggcgctaagcagaagctagggtttctgctagtctgtttttttgtgggctaggtttaggattattgggttgaaaaggtctgggccaattgggccttattacaaatatattttatttgattttagtttaattataaactcgattgcgataattattcctaaat

SEQ ID NO: 4513 - DNA, 330 bp, Gossypium hirsutum
  Clone ID: LIB3083-095-Q1-L1-C2
gtgattgtggctcgtctagttatccttgctttctttcttcgctatcggattttgaacccggtacatgatgcaattgggctttggctaacttccgtgatctgtgaaatctggtttgccttttcatggatccttgatcagttccctaaatggttccctattgaccgcgagacgtatctcgatcgcctttccctcaggtatgagagggaaggtgagcccaacatgcttgcttctgttgatatttttgtcagtacagtggatccattgaaggaacctcctctagtaacagcgaatacagttctatcgatcttggccatggactatccagtggat

SEQ ID NO: 4514 - DNA, 326 bp, Gossypium hirsutum
  Clone ID: LIB3083-095-Q1-L1-C3
caaacacagaaaaaagggatttgattctcctattctgaagaaccatgaatcctcgaagggacatgcgtaacagcagagttgcactctttgatggcatcgaggaaggtggcataagggcctcatcttcttactcacatgaaatcgatgaacatgaaaatgaaagagcaatggaaggattgcaagatagagtcaatctactgaagagactgtcaggtgatatacatgaggaggtcgatagccacaatcgcatgctggatcggatgggaaatgatatggatgcatctaggggaatactctcaggaactatggacaagtttaagatggta

SEQ ID NO: 4515 - DNA, 330 bp, Gossypium hirsutum
  Clone ID: LIB3083-095-Q1-L1-C4
gttgaaacaatgctaaaaaggtggaaaggcaaagaaggcaaagagattgaagtgtatcaagaatttagattattgacttcagaagtgatatccagaacagcttttggtagcaattacttggaaggggagaagatttttgccatgttgaacaagttatcaataattatgggccgaaatctttttaatactaaaattcctttgatcagcaagttatggaaacctgctgatttgctagagtctgaagaacttgcaaaagaaataaaagattgtgtgattaagattgtcaggaaaagagaagataaagctgtaaatggagaagttgatagcttc

SEQ ID NO: 4516 - DNA, 329 bp, Gossypium hirsutum
  Clone ID: LIB3083-095-Q1-L1-C5
agaaaatggttcagctgaaaagatgaagaaagagacagccttgacagtaaatatctcagctgagaagatgaacaaagagacagccttgacaataaataactcagctgagaagatgaacaaagagatggccaggacagtgaatagctcagctgagaagatgagacaagagacagctacagtaaatggctcggctgagaagatgaagaaagagacggccttgacagtaaagagctcgaacgagaaggtgaagaaagaaacagccttgacagtaaataactcggctgagaaagtaaagaagagatcgcttcaacagtgaatggctcagctga

SEQ ID NO: 4517 - DNA, 252 bp, Gossypium hirsutum
  Clone ID: LIB3083-095-Q1-L1-C7
caccggggcgcgtctagaactgggatccccgctgagaatcgccgtgagtggtcctcacaccaggtgctagttccctgtaaacctacagtcgctcctacatacgcaaaagggaagaggacatattgctggtgagactatgcttggcagaccacactaatcagtgcctagggtgacggatgtcaccctgttgagtacattacaggtctatcaaccccatctaacaagtgcacacagtgctatgcggcgttatac

SEQ ID NO: 4518 - DNA, 329 bp, Gossypium hirsutum
  Clone ID: LIB3083-095-Q1-L1-C8
tgagaagccacaactcaatttcatataaagaaaaaaaaagtgagatggatccagacgcagtagccaaggccttcgtcgagcactactactccacattcgatgccaaccgggccggtttagccaatctctaccaggaaggttccatgttgaccttcgaaggtcaaaagatccagggctctcagagcatcgtcgttaaactcaccagccttcctttccagcagtgcaagcacaacatcaccaccgtcgattgccagccttccggctccggcggcatgctcgtcttcgtcagcggtaacctccaactcgttggcgagcagcatgctctcaag

SEQ ID NO: 4519 - DNA, 326 bp, Gossypium hirsutum
  Clone ID: LIB3083-095-Q1-L1-D1
cctaaaacaaatccgttggctgatattggagtcgacttcgatgctcttaatcggaaggaaaaaaggatggaaaaacctgccccaaatgcagtgacatctacagttacaatgggtaaagcaatgggatctgggtctgggattggtcgttctggtgctaccactcttagacctcccgcaaatcctatgatgggttctagtatgggtagcatgggcatgggcatgggcatgggaatgggtggtggacctgttggaggcatgggaatgggaggaggctatggtggtatgaatcaacaaccaatgggcatggggatggggatgaacaacat

SEQ ID NO: 4520 - DNA, 321 bp, Gossypium hirsutum
  Clone ID: LIB3083-095-Q1-L1-D11
gttcctcgtgctgtgctcatggacttggagcctggtacgatggacagtgtccgaactggtccttacggccagattttcaggccagacaactttgtttttggacaatccggtgctggaaacaactgggccaagggccattacactgaaggagccgagcttatcgatgccgttcttgatgttgtgaggaaagaagctgagaactgtgactgcctgcaaggtttccaggtatgccactcattgggtgggggaactggttccggtatgggtacattgcttatctcgaagatcagagaggagtaccccgataggatgatgcttacg

SEQ ID NO: 4521 - DNA, 329 bp, Gossypium hirsutum
  unsure (1)..(329): unsure at all n locations; Clone ID: LIB3083-095-Q1-L1-D2
ttctgatgcactgcgtctcgcctgctgcatagcattgcactgcgagggtggcatnacgnngctttctcttatctcattctttgcgtctacatcatatctttcagtgcctgagccaagcgccgatcacctcttttccctgccatcaatccattccattgccttccatcctaaaacaaaacaaaaataaatggagtcttgtccttctataaaaaatatcctcctcctggattccgaggggaaccgtgttgctgtcaaatattattccgatgagtggcccaataacagtgttaaggaagcctttgagaagtctttattttcaaagactcaaa

SEQ ID NO: 4522 - DNA, 299 bp, Gossypium hirsutum
  Clone ID: LIB3083-095-Q1-L1-D3
cagttcttaatactttatttgatttcatcaaaaaaaaatcccatcatgagagaaatcctccacgttcaagccggtcagtgtggaaaccaaatcggaggcaaattctgggaagttgttagcgacgaacatggcattgatcccaaagggaactacgtcggtacttctcgtgttcagcttgagagggttaatgtttactacaacgaagctagtggtggtcgttacgtacccagagctgttttaatggaccttgaaccaggaaccatggatagcttgcgtactggtccgcacggacatctttt

SEQ ID NO: 4523 - DNA, 331 bp, Gossypium hirsutum
  Clone ID: LIB3083-095-Q1-L1-D4
tggttatgcgggaccctagtggaataagtaaaggatcagggtttgttgcgttttcaaccccagaagaagcttctagagctcttgcagagatgaatggcaaaatggttgtcaacaaacctctctatgttgcacaggctcaaaggaaggaagacaggagggccaggttgcaggctcagttttctcaaatgcgaccacttacaatggcaccttctgttgcaccacgaatgccaatgtacccccctggtggtccaggtcttggacagcaaatattctatggtcaagcacctccgattttcccccctcagcctggatttggatatcagcagcagct

SEQ ID NO: 4524 - DNA, 324 bp, Gossypium hirsutum
  Clone ID: LIB3083-095-Q1-L1-D5
tggattatcattttttctttgttttaaaatattacattgttacagaaatgatgactgattcttttgatagaaaagctcagctgtatacgaactgaatatatattttttgggttattaatttgtgctctgcatatgagtaccaaatatcaattcgtttcattcatcagataagggtggaacaatttttggttgggttgattcctttgtatgtaattatggagagaggaataacgttgagttgttcattgattcattttccatttcccttgtgctctacatttttttttggtgggttctcttttagaaaatgaaatgggaattagt

SEQ ID NO: 4525 - DNA, 306 bp, Gossypium hirsutum
  unsure (1)..(306): unsure at all n locations; Clone ID: LIB3083-095-Q1-L1-D6
cncccctcttttcaaaanccacgnncaacgcaggggggaanngaaatnggtgtgatatttcttctcttttcttattactcgatcctaatcaagtctttccatttttgccctagactcgcttctcctaccccaattgttaacttcgattaggtcaatccatgattttcacttttcaataatttcgtatttcttcgcttttctttttctttataatcaagattttctgtgctccttcattgagcttagaaggatttggcgtctcgttacaagggggttgttgggtctgttttcggcaatgagaactct

SEQ ID NO: 4526 - DNA, 304 bp, Gossypium hirsutum
  Clone ID: LIB3083-095-Q1-L1-D7
tgaaaagaaggatgaggtagaagaagatgaagaattagaagagggaaagaaagaaaagaagagagacaaagaggcaaaggagaagaagaaagaaatgaagaaggatgaggtagaaggtgaagagaaagaagagaagaaggagaagaagaaagacgaagaggataaagatactaagtacaaggatgaagagaaagaaatcgacgaggaggaaaagaagaaagtcaaagtggaaaagaatgttgtgaagggtgacagtggcataacctccagggaaattgtaatagaagatactgggaaagaacca

SEQ ID NO: 4527 - DNA, 331 bp, Gossypium hirsutum
  Clone ID: LIB3083-095-Q1-L1-D8
tgcaacaatcccttttcctcaccctctttcccacgcaaacaaaaccaaaggaaaaacaagctttgaaaaaccgccatttctctcataaatttgttttattcctttcgtttaccaaaagatttaaataaaaaaggagaaatttatacgaaggaaaggtgcgtactgcgcacttttcctaatttctctgattttgaatttgtcttttatcctttgattgaagatttttatgttttttttgggctcgctatgtcgatgaattcgaggattttcttccgttttcttgtttggtggatcttcttcagcttcttttcaggattgatttcatcggcag

SEQ ID NO: 4528 - DNA, 325 bp, Gossypium hirsutum
  Clone ID: LIB3083-095-Q1-L1-D9
ctatttggttaaccatggctcataactgttgtcatcctttcttccttttccaacttttactcattactgtctcactaataatcggtggtcacaccgtctcgtcagcggctcgacatttattccagacacaaacaacctcatcagagctgccacaattggcttcaaaatacgaaaagcacaaagagtctgaatacaaacaaccaatatatcacgaatagtacccaaaacatgagaagcctaaaatgcacaaggaggaaaaacaaaaaccctgcatacatcatgaagagtaccacgagtcacgcgaatcgaaggagcacgaagagta

SEQ ID NO: 4529 - DNA, 330 bp, Gossypium hirsutum
  Clone ID: LIB3083-095-Q1-L1-E1
ctcgtgccgagaaattttctttctcgattttctctttagccaaaaaagatgcagatcttcgtcaagactctaaccggcaagacgatcactctcgaggtcgagagctccgacacgatcgacaacgtgaagaccaaaatccaagataaggaaggcatccctccagaccagcagcgtctgatcttcgccggaaaacagcttgaggacggccggaccttggccgattacaacatccaaaaggagtcaactctccacctcgtcctccgtttgcgcggtgggatgcaaatcttcgtgaaaaccttgaccggcaagacaatcactctcgaggtcgag

SEQ ID NO: 4530 - DNA, 324 bp, Gossypium hirsutum
  Clone ID: LIB3083-095-Q1-L1-E11
gcatatatcattgttgtctttgtcattgtttttccaagaaagcacaatgaatgtagacgaggaggtggagagactcaaggaagaaatccaaagactaggccagatccaatcagatggttcttacaaggtcacattcggggtgctatttaatgatgatcgctgtgcaaacatctttgaagcactagttgggacactaagagcagcaaagaaacgaaaagttgttgcatatgatggtgaactactgctgcaaggagttcatgacaatgtggaaatcattctcaaagctacaacaccagcagcagcccagagtagcaactaatgcag

SEQ ID NO: 4531 - DNA, 331 bp, Gossypium hirsutum
  Clone ID: LIB3083-095-Q1-L1-E2
gttttactatgcatacaatatgaggaacacagcgaaggacgagaagatgggtgctaaactcccagcagctgataaaaagaagattgaagatgctattgaacaagccattcaatggctagacagcaaccaactcgccgaagccgatgaatttgaagacaagatgaaggagttggagagtatttgcaaccccatcattgctaagatgtaccaaggtgccggcggtgacatgggtggtggcatggatgaggatgttccggctggtggaagtggcgctggtcctaagattgaggaagttgactaaatcattgattctcttcacctgggttctcta

SEQ ID NO: 4532 - DNA, 60 bp, Gossypium hirsutum
  Clone ID: LIB3083-095-Q1-L1-E3
tgtagaacgtgctggcacgcctgtaggttcttcgaggatttatagtctttggtcgaaatt

SEQ ID NO: 4533 - DNA, 327 bp, Gossypium hirsutum
  Clone ID: LIB3083-095-Q1-L1-E4
attcaaaccagatttattagacaaaaattagaacaattacaacaacttacacaacattggaaaaagtatatattggattcaacttagagtatttaatacaatataacacttaagattatataagtataaatatggtaacacttgttaattaccactttaaccctgcaaattccttaactccatctcttcttaatcctaaccattaaccccttcttcatctgataaaccacactgtttttgggaccaatattctgcccttccaccacatgaacgttgtagttatgaatgatggctgttgcggtagccttcatcaagagatacgacacc

SEQ ID NO: 4534 - DNA, 307 bp, Gossypium hirsutum
  Clone ID: LIB3083-095-Q1-L1-E5
tgaagaagctgcagatcgtgttgccactcctggagtatctgttgggcttgtttggacagcttttggaggagaggttcagtttgtggaggctacgtcagtggttggaaatggtgaattgcatcttacaggacaacttggtgatgttattaaagaatcagcacatatagctctgacatgggtaagagccagggtggaggatcttaagttagcagctgctgaggaaactgatctgctgcagggcatagatattcatatacattttcctgctggggctgtacccaaagatggaccttcagctggtgtgacc

SEQ ID NO: 4535 - DNA, 326 bp, Gossypium hirsutum
  Clone ID: LIB3083-095-Q1-L1-E6
atcaaatcctcagccgctgcagccttctactggagatagtctttcagctccttcgtcaattagtattaatactgccaatggaaaaagcggaaatttggatctcacacaagaggatgagatggaggaggaggctcctgagacaaaccaaatgactgaacatggcttgggaagcttaagtagctttgggattggctcaaaccctaacccaactgctcctaagccaaacccatttggtgctccattcggagttgtggctacaagtgcagctacctcttcattcacctcaactgttaatcctggagagttgtttaggcctgcatctttta

SEQ ID NO: 4536 - DNA, 251 bp, Gossypium hirsutum
  Clone ID: LIB3083-095-Q1-L1-E7
tgaagaacatgatggcagtactgtttgtatatcttggatttatggtctttggaataatttctcttcgttttctctatcgtttcatagacaacaatggcctccctcgaaactggctatttgttgggatgattcccacgttacttctcaacatccgtcgccctcatgataaagttgcccaaatcctcagacgaagcaatggtaccttcttttatagaggactttggtttactaacaccagcttcttagccacc

SEQ ID NO: 4537 - DNA, 327 bp, Gossypium hirsutum
  Clone ID: LIB3083-095-Q1-L1-E8
tgggacctcggcctgctgtgtctgaaactaacgctggaactggtctgaacaaatcttctagcataaatggtgcacttcatctaaacacatgaaaacagaatcagcagccccaattggtcttgaggaagcctctgcaacctaataataagaagcattctgatgatgatgaatcttattctgttacttctatcactttggtgtcttcccagactgccaagccgaagtcaactgttgcatcagcgcctacatttcgatgttctgaacgcgcagagaaaaggaaggagttctattcaaagctggaggagaaacaccaagctctggaagctg

SEQ ID NO: 4538 - DNA, 325 bp, Gossypium hirsutum
  Clone ID: LIB3083-095-Q1-L1-E9
gttttgattattgattccaccactggtggttttgaggctggtatctccaaggatggtcagactcgtgagcacgcattgcttgcttttacccttggtgtcaagcaaatgatttgctgttgcaacaagatggatgccactacccctaaatactcgaaggctaggtatgatgaaattgtgaaggaagtctcttcctacttgaagaaggtgggatacaaccctgacaagattccatttgttcccatttctggttttgagggtgacaacatgattgagaggtctaccaacttggactggtacaagggccctactcttcttgaggctcttg

SEQ ID NO: 4539 - DNA, 326 bp, Gossypium hirsutum
  Clone ID: LIB3083-095-Q1-L1-F1
acaggttcataactgaatactgattcatgtgttctataaattccatattacagagtgaaagtatttacagaagaatcaactaattgaaatccccatccaaatttacagaaataacagcaaaagcttgtttcttttttaaatgcagctttttggcaggtagatagttgatagttgatacatgtcataattacattcttcacaaggttaatttatctgatctatttacctgatgcagaatcaccagaaatcaactccctttcaagttcatcgaactcccaatcacttatctcctccgaagtgtagtcttggttaaccttcccaaactc

SEQ ID NO: 4540 - DNA, 325 bp, Gossypium hirsutum
  Clone ID: LIB3083-095-Q1-L1-F11
cttttcccttttttcttaattctagaatctccgccatgagcaacaacggtaacaatagcaacagttccgatcccgatcgccctgtccgtgtttacgccgatgggatctacgatctcttccacttcggccacgctcgctccctcgaacaagccaagaaatcgtttcccaatacgtatttgctggttggatgttgcaatgatgaaacaacacacaagtacaagggcaaaactgttatgaccgaatcagaacgttatgaatcccttcgccattgcaagtgggttgatgaagtcattcctgatgctccatgggtgatcgatcaagaatt

SEQ ID NO: 4541 - DNA, 318 bp, Gossypium hirsutum
  Clone ID: LIB3083-095-Q1-L1-F2
cgagtttcttctccttttcttttcactccccactccccagattggctctctctgcatcttaaagattcttagtttctgctgtgaaatatcacttcttgagaatgacagctacagcagcttctggccttcaactagcttcagcaagaccctgcattgcatcttctcgcagggtatttaaggctggtgctgccaatctagatgtcaattccaaagctgtgtcatggactaagctagctagtgcttgccatttatcacaatctttggagcctttccggcgcagttttgcatcgtcttcggtaaagtttaacaaagttgtga

SEQ ID NO: 4542 - DNA, 329 bp, Gossypium hirsutum
  Clone ID: LIB3083-095-Q1-L1-F3
ttgtcatcctttacaagattgcatcaaacattggcctcaaaagccagttcgatacagggaagttgtggctacatatacgattgaagcaaagaaattgggattaaggatcctggagttagtgtcagaagggttggggctagaatctagatactttggggataaattaagtgaatctgagatactatcaatcaaccattacccaccctgtccagatccgagtttgactctaggagtagctaaacattgcgaccctaatctcttaacccttctccaccagggagatgtaagtgggcttcaagtcttcaacaatggggaatggattggcgtgg

SEQ ID NO: 4543 - DNA, 334 bp, Gossypium hirsutum
  Clone ID: LIB3083-095-Q1-L1-F4
tggtaaaagaaagaggaaaggaagaaaatggggaaatcaactcctgtgaaacaagcggcggtggttttgggagcgctagctttcgggtggatggctatagagatggcgtttaaacctttactggacaaggctcgctccgccatggacaactccgaccctgatcgggagcccgacgacatcgactccgctcgcaaggacgactccgactccgactccgatcggaagcctatctcttatgctgatgccgtcgccaagaacatagcgggtgcaagttaggggcgagattcttgtgtttggtccagtccaagtaatcatgaaagtagggttccttttt

SEQ ID NO: 4544 - DNA, 323 bp, Gossypium hirsutum
  Clone ID: LIB3083-095-Q1-L1-F5
tgatccacaatcacttgacttttacagtcaaatatcacaaggatccattgtcaggctctgcaaggattgttggatttgaggtcaaaccattcagtgttaaacatgaatacgaaggtgagtggaatgagaagacccgtctgacaacctgtgatccccatgcaaaacgtgctgttactagttctgaatctcctcaagaggttgaagaaaaaaaggagatcatatttacatatgatgtctagttccaggaaagtgatataaagtgggcatcccgatgggatacctatcttctaatggctgatgatcagatccattggttctcaatt

SEQ ID NO: 4545 - DNA, 328 bp, Gossypium hirsutum
  Clone ID: LIB3083-095-Q1-L1-F6
cttttaaggatttaagaactcaggctactcagcagaatcaaacagtggaaactgagttgttttcttgccctgtgtgctatgaaccactgatcagaaaaggccctcctggtttaaacttggatgctatctaccggtctggattcaagtgtaagaaatgcaacaagtcatactcaagtaaagatgtatttctggacctgactgtcactactggattgagaaactacactgaagtcaaacctgttaggacagagctattccggagtcctcttgtatcgtttctctatgaaagaggctggcgtcaaaattttaatctcagtggcttccctgg

SEQ ID NO: 4546 - DNA, 328 bp, Gossypium hirsutum
  Clone ID: LIB3083-095-Q1-L1-F7
gagctgcttatcttgttcttcataaacttgagaaaaagaagtatgtgttgaagaagattcgcctggccaaacaaacagagaagttcaaacgtacagctcaccaagagatggaattgattgcaaaactaaataatccgtatattgttgagtacaaagatgcttgggttgataagggaaacagcatttgcattgtaaccagctactgtgaaggaggggacatggctgagcttattaagaaggcccgaggtatgcacttccccgaggagaaaatctgcaaatggatgactcaattactcttagccgtggactacctacactcgaaccgttc

SEQ ID NO: 4547 - DNA, 305 bp, Gossypium hirsutum
  Clone ID: LIB3083-095-Q1-L1-F8
atcttcaacttggaataaattaatcttcaaatcaacacacaattaaacatgtaaaaaaataaaaaataaatcatagttctaataattactgattaagtcctctctttctctctattctcttcctttgaatgatgaaaattatatggttttttgggaagaagaagaagaagaaacaggggccaccttaggcacataaacaggatattcatcaatttcatcaatccatggactcttctcctttgctggattaatggtcttcaatgctttccatacagcactgttgcatttaaaccctgacccgaatg

SEQ ID NO: 4548 - DNA, 329 bp, Gossypium hirsutum
  Clone ID: LIB3083-095-Q1-L1-F9
caccagcagtcagcagagtgaagatcagctgcaagaaaataacaatggaatttcacaggaacttaatccaacaggtgaaagtgttacatgtcaagggcagctcaatcctcagtgtggtgatatggctgaatctattcaaaggcatgaagggatattaactcaaacgttttctttgaacaatgcaccagatgagcatgataacatggaaattggagatgggaattgcacaacagctgctgatcaagtagagcaaatttctgaaatggttaacttgcctgaggggggttctgttgtgcctgaaaacctttcaccacagagcatgggtgatg

SEQ ID NO: 4549 - DNA, 331 bp, Gossypium hirsutum
  Clone ID: LIB3083-095-Q1-L1-G1
ggaaaatcaagaaaatagaatacttgatcagatcagaaactgttcttagtttccttttttttttttttgcaagagctgctttgaattcgtaagtggacgccggagattggaagagaaagatgcgcttgatctgttccaagtttcatttccaactcttcccagaagattggtgcttggacgggatgggcagctgcactgcagagtatatggtggatagcaaatactagagaatctattaaggtttcctggctgaattatggcttctgcaagcctaggaaatggtggagcaggtagttcaaggtctgtcaacagtttcaaaagttcttctagt

SEQ ID NO: 4550 - DNA, 315 bp, Gossypium hirsutum
  Clone ID: LIB3083-095-Q1-L1-G11
gttgactcgatgtctaaggttgctgagattgaagggggtgaaaaggaaaagatgagagagaaagtgaaaaagatcttaggacatgggattaactgctttgttaacaggcagttgatttacaatttccccgaagaactctttgcagatgcaggcatacttgctattgagcatgctgattttgatgggatagaacgtctggctttggtaacaggtggtgaaattgcttcaacctttgacaacccagagtctgttaagcttggacattgcaagcttattgaagaaattatgattggtgaggacaagttgatccacttt

SEQ ID NO: 4551 - DNA, 330 bp, Gossypium hirsutum
  Clone ID: LIB3083-095-Q1-L1-G2
attccttgtgcctttaagagccgtggattgtggaagctatacttagtacgtcaaccttgtcttcttgcccttatttgacctgagtgcaagccaaataacaggtggaatgcaggaggcatttaagagctaataggctctctggatttttgttgatcaactggttaagtgaaagaatcaaacatggaattccttccaaacttggtcaattggcctttctcaaggttcttcatcttttccataattctcttagtcaaaccacaacttgctttcatccgaccgtcctggacctttctttaattgaactttctggtctgatacctaatctctaac

SEQ ID NO: 4552 - DNA, 331 bp, Gossypium hirsutum
  Clone ID: LIB3083-095-Q1-L1-G3
ctcaaacccgacaccgtcaccctcaccagcaccggcaccgacaccggcatacacaaatatcaaagacttactctctgtggcaggtccatatcacaagttcctgggctacctcgagtcgactaaattaatcgacacgttccaaatccaagccaacaacacggttgaaggcattacgattttcgtaccgaaagacagcgcattcaaggctcttacgaagccttcattgtcaaatctaactgatgatcagttcaaatcagtgctcctttaccatgccttgccacgatactatgcccttgcggacttcaatgacctaagagagaaaggccctatt

SEQ ID NO: 4553 - DNA, 302 bp, Gossypium hirsutum
  Clone ID: LIB3083-095-Q1-L1-G4
atctcgggtcagatgctcaaagcgttgctatagacgaaatgaaaaaaaaagggggggcttaatacaacgtcttcctaggccttacatgaatctctcaagcgaaagcaaggcgaacaaaaccgatctagtcgtttgccgttactacgatcatgtctttgttatggctacccagattggaactatgggaacaatactacatgcaagaatggtggaaggctacacggtccagccaactttcaatgtgaccgtatacttggcatacgagacgagccactgctaccgtctattacccgcgatcttat

SEQ ID NO: 4554 - DNA, 326 bp, Gossypium hirsutum
  Clone ID: LIB3083-095-Q1-L1-G5
tagattttcacccatggtaaattttggagaaggtttagactccatcgtaggtccttcacctcttatgccatcaattcccaattttgtgggttactcatctcctagatttcctgctgtagatattcccattgtttctccggcatctggagcaggggctcctacactgactggaaggcgatggttgcatcgccagattcaaaatcttcgttcaatcaataggatgaattttatggctggtaggactgatgggatattaagcgccaatatgggcactgattttgtgaactctcacactgatcagagtacggaaacaacagttcaacaag

SEQ ID NO: 4555 - DNA, 328 bp, Gossypium hirsutum
  Clone ID: LIB3083-095-Q1-L1-G6
gctgcaaattctcccaaatttttcagaaaatctaacacaagttgttatcaattagggaaaaaaatgagagagatccttcatgttcaaggtggacaatgtgggaaccaaatcggttccaagttttgggaggttgtttgcgatgagcacggcatagatccaactggaaggtacattggttcctcggatctgcagttggagcgtgttaatgtttactataacgaggcttcatgtggtcgctttgttcctcgtgctgtgctcatggacttggagcctggtacgatggacagtgtccgaactggtccttacggccagattttcaggccagaca

SEQ ID NO: 4556 - DNA, 327 bp, Gossypium hirsutum
  Clone ID: LIB3083-095-Q1-L1-G7
gtttgaagaagcacgagcaatactcgaacaagaatgcggcccatgtcatcaagataccctgggagtatacagcaatcttgcagcaacttatgatgctatgggaagggtcgaagatgcaatcgagatattggagtatgtactaaaattacgagaagaaaaacttggaatagcaaatcctgattttgaagacgaaaagaataggctggctgagctcctgaaagaagcgggcaggccacgcaacagaaaagcaaaatcactggaaaatctcatcgatccgaactcaaagaggacggcgaagaaagaggggacgaaaaaatggggtttcag

SEQ ID NO: 4557 - DNA, 292 bp, Gossypium hirsutum
  Clone ID: LIB3083-095-Q1-L1-G8
tagttttttttttttttttttgtttttttttttttttttttttttttgtttggaaatgaaaatttatcaatcagattaatagagggcagagcaaacaattaaatttcaataaagtactctattgtcactgaccaaacaaatgagtgattgatataataaataaaactacagcgcaatacaaagtgatttgggtgcccattttacttgatgaagattgaactagatgagaggtttgtttgtgtgccgacagccaaccaaaaagttaccccctacataaaaatgaatgaaaggg

SEQ ID NO: 4558 - DNA, 325 bp, Gossypium hirsutum
  Clone ID: LIB3083-095-Q1-L1-G9
gtcggaggaggtgatgatgcttttaacacctttttcagtgaaactggtgctgggaagcacgtccctcgtgccgtcttcgtggatcttgaacccactgttattgatgaagtgagaactggtgcttaccgccagctcttccacccagaacaactcatcagcggcaaggaagacgcagctaacaactttgcccgtggtcactacaccattggcaaggagattgtcgacctctgtttggaccgcatcaggaaacttgctgataactgcactggtcttcaaggattccttgttttcaacgctgttggtggaggtaccggatcaagtcttg

SEQ ID NO: 4559 - DNA, 328 bp, Gossypium hirsutum
  Clone ID: LIB3083-095-Q1-L1-H1
gaacttctcccctgctttcaagatcgggcagggtggattcggaacagtttataagggaaaacttgatgatggaactttggtcgctatcaaacgagctaaaaagagtgtatatgataagcatttgggtgtggaattccaaagtgaagtaacaacactggcacaagtggaacatttgaatttggttaggttttatgggtacttagagcatggagatgaaagagttgtggttgtcgagtatgtccccaatggaactctaagggaacacttggatggtgttaatggaaaagaacttgactttgcttcgaggcttgatatagccattgatgtg

SEQ ID NO: 4560 - DNA, 327 bp, Gossypium hirsutum
  Clone ID: LIB3083-095-Q1-L1-H11
cgccaaccacctccactggtttaatcaactttatggctagttcgctccaagggatatttaagcttgaagacttcacttcagatcactctgaaaagtcggtgaaaggattcaaattcattgatacaagaagcttgtggctaaatttgaaagccattaaaaggcttgtagataccagtgcactgaatttggataacctttctactttaaagttatttgaaaattcaattggcatgtccattccccaatctcgttttcttcctttgaattccacatcagacttattccttctccagtcggacctttactcatttactgaaagcatgtttg

SEQ ID NO: 4561 - DNA, 328 bp, Gossypium hirsutum
  Clone ID: LIB3083-095-Q1-L1-H2
gttgctactcacagtcaactagtgaaatctctaccacgtgagctttccaagtctgaccagcttcaagaaattttagatagggttgctgtatactctaatccatcaggctttaatcagggaatgtattcattgcgttgggcctattggaaggagctggatttataccaccctcgttggaactcaagggatttgcaagttgcagaagaaagatacttgcgtttctgtggtgtttctgcaatgactactcagctgcctaagtggacaaagatatatcctcctcttgagggagtcgctaggattgctacatgcagagagacacttaagatta

SEQ ID NO: 4562 - DNA, 336 bp, Gossypium hirsutum
  Clone ID: LIB3083-095-Q1-L1-H3
cgatagagaggttaatattagtagaggacatttttgctggctttaattgtactttgcgaggaggaaatgtctcacatcatgaatacatccaggttgggaagggaagggatgttgggttgaatcaaatttcgatgtttgaagccaaggttgctagtgggaatggtgagcaagttctcagtagagatgtttatcgactgggtcacagattggacttcttccggatgttatccttcttttataccactgtaggattttttgtcaatacactgatggttattcttactgtatatgtttttttgtggggcagactttatcttgctctcagtggtgttgaga

SEQ ID NO: 4563 - DNA, 289 bp, Gossypium hirsutum
  Clone ID: LIB3083-095-Q1-L1-H4
tgagttgctacatattacaattcaacagggtatggagatgagcttttatgggcagcaagctggctctatcatgcaacaggcgatcgatcgtaccttgactatgcgactggcgaaaatgggaaactgtttgcttcatggggaagtccaacctggtttagctgggataataaaaatgcaggaacccaggtcttgctttccaggttaagcttgtttggtgccaaaggagtctctgggaattctggccttggaaactataggagctctgctgaaggtgttatgtgtggtcttt

SEQ ID NO: 4564 - DNA, 318 bp, Gossypium hirsutum
  Clone ID: LIB3083-095-Q1-L1-H5
gagatgaagagtaggtatttagaaggggaatgtagacgactgagccgtgtgcttcagtgcttcattgctgagaatcaagctcttcgtcttactttgcataagggttgtgcatttgatacatcctcgaccaagcaggagtctgccgtgctcttgttggaatccctgctgttgggttccctgctttggttcctgggcatcatgtgcctcttcaccctgccaatactgcccaggtctgttctggaggcagctccaatggcaaacgaggaaacacaaggtcccgaaagagtggctccaagaggggcagggagtaaccgggtc

SEQ ID NO: 4565 - DNA, 330 bp, Gossypium hirsutum
  Clone ID: LIB3083-095-Q1-L1-H6
tgtggcaatacggagaagctgttgaaccagatcatggacctcaaattcacctccaaatcgctgcaacgccaggccaagaagtgcgagaaggaggagaaatctgagaaattgaaggtgaaaaaggcgatcgagaaaggtaacatggacggtgctcggatctacgccgagaacgccatccgtaagcgcactgagcagatgaactacctgcgtctcgcttcccgactcgatgctgtagttgccaggctcgatacccaggctaagatgaccaccatcaacaagtccatgggaaatatcgtcaagtctctcgaatcttccttagccaccggcaat

SEQ ID NO: 4566 - DNA, 330 bp, Gossypium hirsutum
  Clone ID: LIB3083-095-Q1-L1-H7
ggaatggctgtgcatgatgattgcaagctgaagtttttagaactgaaggctaaaaggacttaccgcttcatagttttcaagatcgaagaaaaacaaaagcaagttgttgtggaaaaggttggtaaacctactgatagttatgaggctttcactgctagccttccagccgatgagtgtcgatatgctgtgtatgactttgattttgtgaccgatgagaactgccagaagagcagaatttttttcattgcctggtctcctgatacatcaaaagtaagaagcaagatgatctatgcgagctcaaaggacaggttcaaaagggaattggacggt

SEQ ID NO: 4567 - DNA, 285 bp, Gossypium hirsutum
  Clone ID: LIB3083-095-Q1-L1-H8
gcgacgtgcgattgaatcggctgggttgcttatgaaagggtggggctgacgcccggtcaaaagcacctactgattatagtacattgacggggaccgggtcctgttctatattagccagccctgacctttgacatgtcaggcgcgcttgcttgcctggtcaccccacttaatgatggctgcacttctcttgtggagttatttgaaggcagaccgcacgggagtgtgcccaatatcttcctcatgctgaagaagtctaatagcgtgtgagagtcttcgaccctcttc

SEQ ID NO: 4568 - DNA, 322 bp, Gossypium hirsutum
  Clone ID: LIB3083-095-Q1-L1-H9
taaaagtaaaccaaagttgtggagccgaacccaagttcccagttgtttcatgttcatcttctcggatctgactgcgtttccttgctgttctacctttgattcctatatatatttttttccgttttccttgtctttttttttaatttcaaagagggagacgcaagtccaagtctgatggttagtatctgggagaaaggagaattcagatctgtgattaccatgaagtaaaaggctgaaaaggttgaaggcggtggttgctttcacttctttttaatttttttatttgcttttacgagatgatgaagcgttaagctgggatttg

SEQ ID NO: 4569 - DNA, 391 bp, Gossypium hirsutum
  Clone ID: LIB3083-097-Q1-L1-A1
gtttgatcttagtttataatggggagatacccatattctatttagtcttaaattttatgggttcacttcctatagaaaaattaatgcatgtttttgtctttcaatataggaagcaggaacaggctgctttgctaactttgttatttgattcaccattctaaagtaaggtattgttcagtaaggcctaaagttaaatatacgtaagtatgggcagtcctgcagagccaaagagaagagtggcatttgtgctgattgatggattaggagatgtatcaataccaaggtttgggaataggactcctctgcaggctgctgatgttccaaacttggatgccatagcatcagctggagttaatggccttatggaccctgtggaagtaggtttgggttg

SEQ ID NO: 4570 - DNA, 245 bp, Gossypium hirsutum
  Clone ID: LIB3083-097-Q1-L1-A2
ggttattaaacaagggccctgggatttattattattacttggaaaagacaacatgcaaactgccttttttaataaaaacattcaagcagaaacccttcctaaagcgttctggcgagaagaaaaaaaacttttttcttttttttttaccagtgctttttggtggtgttgtgctcaatatgcatctgcattggaagaaacatgaaactgtttttgttatttgcaagccttgtcagccagggcaggtt

SEQ ID NO: 4571 - DNA, 391 bp, Gossypium hirsutum
  Clone ID: LIB3083-097-Q1-L1-A3
caattgattttgaattatggctgttgtctgagcaaagaagccaggagatactttgtatcattcaaccggctttggtttctgaacaaaatcgacaaaatattattgcttactttcagaggctaatcaaaggttactatggaattgaggtaaacttaattttccttcatatttttagccgtggttgtgtaaaatggtctcatttctgtgtgttggtgctccttgtataactggacaaattctagaaattgttggttcttgctttgtcaaatgcctttttaggagagatgacttttatgtgaacgttacacctagggaagttcaattctcaaagttttccacattgaagcataataaactagcctctgaaatcggtgccttcataaaagattgg

SEQ ID NO: 4572 - DNA, 383 bp, Gossypium hirsutum
  Clone ID: LIB3083-097-Q1-L1-A4
gaggaaatgtcggttatttgggcattagggttgatgaaaccgcctgatactatccggccatattattggccccaaaatcacgggggtccaatgatggttgcatatggacatttgaggcttaatgtttcagagaatgtggatgattgtttcgggccattggatgctgatgataagcaggaccaagatttgattattgccagtgcaaaagttccgcttgttgttacgactggggaggcgttgcattatccaaatccaccaaatccatcaaaggttttgtatattaataagaaggaagctccagttttgagagtggaaagaagggttcctgtgaaagtttcggtgcagacaggtcatgatgttgctttgtatattacttctgatta

SEQ ID NO: 4573 - DNA, 386 bp, Gossypium hirsutum
  Clone ID: LIB3083-097-Q1-L1-A5
ctaatttctttttcccttttttcttaattctagaatctgggccatgagcaacagcggtgagaatagcaacagttccgatcccgatcgccctgtccgtgtttacgccgatgggatctacgatctcttccacttcggccacgctcgctccctcgaacaagccaagaaatcgtttcccaatacgtatttgctggttggatgttgcaatgatgaaacaacacacaagtacaagggcgaaactgttatgaccgaatcagaacgttatgaatcccttcgccattgcaagtgggttgatgaagtcattcctgatgctccatgggtgatcgatcaagaatttctggataaacacaatattgactacgtggctcatgattcacttccctatgctg

SEQ ID NO: 4574 - DNA, 384 bp, Gossypium hirsutum
  Clone ID: LIB3083-097-Q1-L1-A6
aatgccgcctccaggatggggaccgcctccaggaggaccgccggggcctcccggtttatgtggctgctttgattttatttgcggtggtatttgccgtcttctttcttcttgtttttatgttctctgctgctgctgcatatttgaaagctgctgtgggccaatgttcggcgggccgcctgggccacctgggccaagacctttttaattatagtgctcatctctttttcccttttactctgtttttgatttgtgttttaggctggtgtgaactgtgatgtgaaacaaaaatctagttctgcccctttctgttctttcttgccagcatggaacatggttccagtccacgcctttattttgttctaaataaaaaaaattagttaaaaa

SEQ ID NO: 4575 - DNA, 325 bp, Gossypium hirsutum
  Clone ID: LIB3083-097-Q1-L1-A8
atccacagcttattgtgagcggtgaacttcgagcccttcaaccaatattccaaatatatggtcgtcgcccagtattctccggacctatagtcacacttaaagtgtttgaggacaatgtattgatccgagagttccttgaggagaaaggtaacggcagagttctggttgtagatgggggtggtagtttaaggtgtgccatacttggaggcaaccctgtagttcaagctcaaaacaatgggtgggctggaatagtggttaatggctgcgtaagggatgttgatgaagataaacggtgtgacattggggtgagagcgctttattctca

SEQ ID NO: 4576 - DNA, 357 bp, Gossypium hirsutum
  Clone ID: LIB3083-097-Q1-L1-A9
ggatagttcatttcgctggacttaccaatgtttacgatgttgatttcttcaaagaacttagacaaattgaggtgtttggcacttggccaatggccctgctatcagcaaacgagagacgggttgtgattgaaggacctgtttgtgattcatcacaagttataggatggcacctaaggaagatgaataaccagacagatgcagaaacagatgctgatacgaaacctcctattcatatatcaagttttgcatttaacagttcaatcctttgggaccctgagagatggggacgtctcacatcggtccaaggcacttcacagaactcactgaaatttgtgaaacaaattgtaatggaagatg

SEQ ID NO: 4577 - DNA, 373 bp, Gossypium hirsutum
  unsure (1)..(373): unsure at all n locations; Clone ID: LIB3083-097-Q1-L1-B2
ctccgatggagtggtgttagcattgaggacttatggcgtaacgagcagttttgggtcatcggtggcgtttcagcccatctctttgccgtcttccaaggtttccttaagatgcttgcgggcattgacaccaactttactgtcactgccaaagcagctgatgatgcagattttggtgagctctacattgtgaaatggactacacttctaatccctccaacaacactcctcatcgtcaacatggttggtgtcgttgccggattctccgatgccctcaacaaagggtacgaagcttggggaccactctntggcaaagtgttcttttccttctgggtcatcctccatctttatccattcctcaaaggtcttatgggac

SEQ ID NO: 4578 - DNA, 389 bp, Gossypium hirsutum
  Clone ID: LIB3083-097-Q1-L1-B3
gaagatgatcaagcatacatgcaaaagagatcgaagggcacaaaacgtaaaacccgacaggcgaaagcacttgaaaatgctaggaaggctcccagatcatttcttgagctcttacatgaggcaaacttagagtccttacctcctcatgttccatcctatttgagggcagcagtgggacctccaagttctacctcccgccggcatttttgcagcgtttgcggctttagtgcaaagtatacatgtgtgacatgtgggatgcgcttttgttcgtgccgatgccaaaatatacataacgatactcgatgcatgaaatttgttgcatgagtggtaatattaggaacccaaaaggattttgttgacattagcagacattcatcatatgccaaaaa

SEQ ID NO: 4579 - DNA, 389 bp, Gossypium hirsutum
  unsure (1)..(389): unsure at all n locations; Clone ID: LIB3083-097-Q1-L1-B4
tccatggcgctttttggaagagttggtggaggcatctatacgaaggctgctgatgtgggtgctgatcttgtaggcaaggtggaaaggaacattcctgaggatgaccctagaaacccagctgtgattgctgacaatgttggggataatgttggtgatatcgctgggatgggatctgatctttttgggtcctatgctgaatcatcttgtgctgcacttgttgtcgcttccatctcttcttttggcatcaatcatgaattgactccgatgttatatcctctcattataagttccgttggtatcattgtttgtttaatcaccaccttatttgctactgatttctttgagatcaangctgttaaggaaattgagccatcattgaagaggcaact

SEQ ID NO: 4580 - DNA, 374 bp, Gossypium hirsutum
  Clone ID: LIB3083-097-Q1-L1-B5
tttctaatattagtattagaaataaaaatgaaaaagctttttgtgacttatcctccctctcacaagcatatgtattttacaaattatcacaaacccaagttattagtttttataaattcaaacctatccttcaatatcatggaacatctctttttcttaaaaatgaaataaaagattattttgaagaacggggagtatctcattccagattaagacatcattatgggttaagacagaaaattgtttggcattctggaatgaatgaatggaaaaactggttaaggagtcgttatcaatacgatttagttcagaatagatggctaaaattaggaccaggacaatggcgaaatagagtcaatcaacactatctggct

SEQ ID NO: 4581 - DNA, 281 bp, Gossypium hirsutum
  Clone ID: LIB3083-097-Q1-L1-B6
cttgggcgatgccattttcaccgagaaaggatggagcaccaaggaaaaccagaacaacaactactacaacggcaacattaatggcgagaagcaaggcatgagcgatactaggtacttggagaatggaaagtactactatgacgtcaagagtgagaacagctattatccaaaccagctcgacaactcaagaggagttgcttccaggaacgagttcgatgagaatcgttacaacaacatgggaaggtaccaccagaaccaagaggagttcgaggaaagcgagg

SEQ ID NO: 4582 - DNA, 309 bp, Gossypium hirsutum
  Clone ID: LIB3083-097-Q1-L1-B7
ggtacttgaattatcaaaagagagaaaggcgcgaacaaaaaaaaaaaaacatacaactaagtgaaaaacccgacaagagagaaaacaagaaaaatgggtgttctggatcatgtttcagatctgtttgactgttctcacagttccaagcacaagaaacgtaagctgttgcagacggtggaaatcaaggtgaaaatggactgcgaaggatgcgaacggaaagtgaaaaaatcagtggaagggatgaaaggggtgacacaagtggacgtggagcggaaggccagcaagttgacggtcgtcggatatgtggac

SEQ ID NO: 4583 - DNA, 361 bp, Gossypium hirsutum
  unsure (1)..(361): unsure at all n locations; Clone ID: LIB3083-097-Q1-L1-B8
ggaaaaagaaaaccctagctttacctttttgttctttgtgaaacatcaaatcgcagagatggatctttcatagatttcacctcagatctctttctctttgtaaaagaaaattgggtttacttatttatttgggtcggattgggttggtttggttttagaaaagaaggaaggcgatgtcaaccccagcaaggaagaggctgatgagagacttcaagaggttacagcaggatccacctgctggtattagtggggctcctcaagataataatatcatgctttggaacgctgttatttttgggcctgacgatactccttgngatggaggcacggtcaagttgactttgcagtttacagaggatta

SEQ ID NO: 4584 - DNA, 390 bp, Gossypium hirsutum
  Clone ID: LIB3083-097-Q1-L1-C1
gagctctgggttggctatatttccgagaatggagacatacacaaacgtgtttgtgtagctggttatgatcctaaaatcgtggagtctcctactgagccgaagtggtcccctacaggagaactatttttcattacagatagaaaaaatggattttggaatctctataaatgggttgaatctaagaacgaggtgcttccactttatcctttgaatgctgagtttgcaagaccattatggatttttgggatgaattcttacgagttcgtcaagaacgaggctggaaaaaccttaattgcttgcacttataggcagaatgggaagtcgtatcttggaattttggatgatgttcagggttcattttcactgctcgatattcctttcacggatata

SEQ ID NO: 4585 - DNA, 392 bp, Gossypium hirsutum
  Clone ID: LIB3083-097-Q1-L1-C2
agaatttcttttcatgcttgcttccagtgtagctagactgctagatctgattgttggaaatgtcaatgatcgagggctactttcaactcttcctgtcattgacattctaatacagtgctttcccacggaagtgcctccgttaatcagcagtactttacaaaaattggttgttatttgcctatgcggaggagacgacaaggatcccttaaagacagcagttaaagcatcttcagctgctatcctagctaggatttgggtgatgaataccaactatcttgcacaactaacatcagaaccttctctttcttcactactgcagcagactggtgtagctattgaagataatattcttctttgcctgggtgacatatggcttgacaaggtagacaatg

SEQ ID NO: 4586 - DNA, 395 bp, Gossypium hirsutum
  unsure (1)..(395): unsure at all n locations; Clone ID: LIB3083-097-Q1-L1-C3
gaagctgattgaaaagattgatgctcgcaatagcctggagacttatgtttacaacatgaaagaaccagattagcgataaggacaagcttgctgacaagcttgaatccgacgagaaggagaaagttgaaacggccgngaaagaagccctcgagtggctagatgacaaccagaatgccgaaaaggaagattttgaggagaagctcaaggaagttgaggctgtttgcaaccctatcatcacagctgtatatcaaagatccggcggaggtcctggcggtgctgcgtcaaatgaagaagaggatgattcacatgatgaactctaaaacaaaaatcttcgatggctactgccactgaaaagtgattgagtttattagagttaggtgtaatgaggatactgg

SEQ ID NO: 4587 - DNA, 409 bp, Gossypium hirsutum
  Clone ID: LIB3083-097-Q1-L1-C4
tttgaatcccctctcgttaatcaaattagggtttcttgaagccaaatcgaccagacatgggaggaggcaatgcccaaaaatccaagatggctcgtgaaaagaatctcgagaaggctaaaaacgcagctaaaggcagccagctggaaacaaacaagaaagctatgacgattcagtgcaaggtatgtatgcaaacgtttatatgcacaacatcagaggtaaagtgcagggaacacgcagaagcaaagcatccgaaatccgatgtgtatgcttgcttccctcatctcaagaagtgatgtatttgaagcaagaaaatgccatatatatattatagaattgtttggaatatcttttcccttatcatgtaaaacctcagctatgatttttaaacccaggttgatgtgtgtggaac

SEQ ID NO: 4588 - DNA, 382 bp, Gossypium hirsutum
  Clone ID: LIB3083-097-Q1-L1-C5
tctgctcgatatattatcgtgctcctgaactcatatttggtgctactgagtacgcaactgccatagatatatggtccactggttgtgtgatggctgagttgcttcttggacagccactgtttcctggtgagagcggggtcgaccaattagttgaaatcattaaggttttggggactccaacaagggaggagatcaagtgcatgaacccgaactacactgaattcaagtttccccagataaaaccacatccatggcacaaggtcttccaaaagcgtttacctccagaagcagtagaccttgtctgtaggttttttcagtactctcctaatttgcgatgcactgctttggaggcttgcgttcaccctttctttgatgaattgag

SEQ ID NO: 4589 - DNA, 387 bp, Gossypium hirsutum
  Clone ID: LIB3083-097-Q1-L1-C6
gttgcccacatttttgcatcttttaatgacactttcattcatgtgactgatttgtctggaagagagactatggttcgtattacaggtggtatgaaggtgaaagccgacagggatgaatcttcaccttatgctgcgatgcttgcagcacaagatgtttcccagagatgcaaggaacttggaatcacggccctccacatcaaattacgtgctacaggaggtaacaaaaccaagacccctggtccgggtgctcagtcagctctcagggctcttgctcgctccgggatgaaaattggccgtatcgaggatgttacacccattccgactgatagcacccgaagaaagggtggtagaagagggagaaggctataaactagcacattatgttct

SEQ ID NO: 4590 - DNA, 385 bp, Gossypium hirsutum
  Clone ID: LIB3083-097-Q1-L1-C7
atttaagaagccctaccatcatggccttccatcagatgaccttaagtgccaagaaggaaagccgcaggctgctgttgaccgcacactagatagtaaagcttttagagggtggacagaaacagataacccctggacatatgatgatgagactgataattctgagatgacatatgtgaaccttcaactgaacccggagcgctacactggctacactggtccatcagccagaagaatatgggatgctgtgtactcggagaactgtcccaaatatccagctgaagaattgtgccaagaggaaaaaatactttacaaattgatttctggacttcactcatctatttcgatccatatagcttctgattatctacttgatgaagccacaaac

SEQ ID NO: 4591 - DNA, 389 bp, Gossypium hirsutum
  Clone ID: LIB3083-097-Q1-L1-C8
cttcaattttgggcccaaaccggccaaacccaaaattaagggggtgaaacctggaccaatagaaatactagaccgggtgaagatgaacaacacttttgaaacttcttgggccaccattaaaggtcttctgcaggttccaaaacaggcggagatgagtttcagtagggaaaatctaagaaaagttgaagatcaactcaagcgggctttcgttgaattttaccaaaagcttcgcctgcttaaaagttacagctttttgaataccttggcattctccaaaatcatgaagaagtatgataagatcacatcgagaagtgcatcgagatcttacatgaaaatggtggataactccaaccttggtagctctgatgatgttacaaagctgctggaga

SEQ ID NO: 4592 - DNA, 373 bp, Gossypium hirsutum
  Clone ID: LIB3083-097-Q1-L1-D1
tttgagacataaggcaataaaaaaaaaggaagacagtgtggtatttttagtttggttttgagatggcgttctgctctatgatttgttgtgcgaaaggcgttgatcggaaagagaagggaaagcagcagccgacatggaggatattttcattgaaagaattacattcagctaccaataattttaattatgacaacaagcttggagaagggggatttggcagtgtatattggggtcagctatgggatggatcacagatcgcagttaagaggttgaaggtgtggagcaataaagcagaagtgcagttttcggttgaggttgagatattggcaagagttagacacaagaatctactgagtttacgaggatactgtgc

SEQ ID NO: 4593 - DNA, 388 bp, Gossypium hirsutum
  Clone ID: LIB3083-097-Q1-L1-D2
tcgaatccaatgccgacgccggcgcctctaaaacctatcctcagcaggccggtactatccgcaagaacggctatatcgtcataaaaaaccgcccatgcaaggtttttgaagtttccacctccaagactgggaagcatggtcatgctaagtgtcactttgtcggaatcgacatcttcactggcaagaaactggaagatattgttccatcttcccacaactgtgatgttccacatgtcaatcgtactgattaccagttgattgacatttctgaggacggatttgtgagtttgctgactgacagtggagacaccaaagatgatttgaggcttccaactgatgacaacttgttgaaacagataaaggacggttttgctgaggggaaagacct

SEQ ID NO: 4594 - DNA, 385 bp, Gossypium hirsutum
  Clone ID: LIB3083-097-Q1-L1-D3
gaaaaatggttctgctagagaaactttgggatgatgtaggggccggtgctcaaccggaacgtggcctcggccggctgaggaagatcaccaccaccccacccttgtccaccaaagatgaggcttcatcaatggcgatgccgacgagtccgacgacacctgggacaccatcgacgccggtgtcggctcgtacggacaacgtgtggaggagcgtgttcaatccaggtagcaaccttgcaaccaaaggtattggcgctgaagttttcgacaagcctcaacctaactctcctactgtttatgactggctatacagcggggagaccctgagcaagcatcaccgttgattaagcggtggctgactgcgggggatggtagcaaaaccactagc

SEQ ID NO: 4595 - DNA, 352 bp, Gossypium hirsutum
  Clone ID: LIB3083-097-Q1-L1-D4
ctggaaaggtggaaaacgtgaagaaagcacaagatgctttccttgttaggtgcaaggctaactcggaggccaccttgggtacatacaagggtgatgcaaagattagtgagggtgctgcagagagccttcatgttaaggactacaaatactaagaatttagtcttgtggtctgtgtatcagagaaattttctgtattgatgatagacgtttagtgctgtttttgggggttgtccgtttcttctcatggaatttaggttgtgaaatcagactcaaataagcttggggggccttagttctcgctgagtgttcatggttttttgtttgcttcagtttaaaacaatattctcagcat

SEQ ID NO: 4596 - DNA, 391 bp, Gossypium hirsutum
  Clone ID: LIB3083-097-Q1-L1-D6
agaagggtaggtctctattgtttaatttaaaggatcgtaacaaccctgaactcagggaaagagttgtgtctggcgaaattcccccagagcgattatgttcaatgagtgctgaggagctggcttctaaagagctttcacagtggcgacaagccaaagctgaagagcttgctcaaatggtaattttgcctgatgtagaagttgatattaggcgcctggtgaggaaaacacataagggtgaatttcaagtagaggttgaacaaactgacagttcttcagtggaagtttctgctggaacttcagttactcggcgacctaaaactgatgcaaaacaagctcctaggaataataaaactgttgcaaaggaacatgaatcaaatgccgtaggtgaaaa

SEQ ID NO: 4597 - DNA, 357 bp, Gossypium hirsutum
  Clone ID: LIB3083-097-Q1-L1-D7
ccagccacatcattcgccgcacggcatcagtctcatcaggcggggaagaatgtctcacaggaagtttgaacacccaaggcatggctcccttggatttcttccgaggaagcgagcttctcgtcacagagggaaagtgaaggcatttcctaaggatgacccaagcaaaccttgcaagctcactgcctttttgggctacaaggcaggcatgacacacattgtccgagaggtcgaaaaacctggatctaagcttcacaagaaagagacatgtgaagctgttacgatcgttgaaacccctcctatggtgattgtgggggttgtgggtatgtcaagacaccacgtggtcttcgcagcttgaac

SEQ ID NO: 4598 - DNA, 361 bp, Gossypium hirsutum
  Clone ID: LIB3083-097-Q1-L1-D8
gaaacaacgtataaaaattcgtcttcttatccgaaaaccaacaaaagaaactgtgtcaatcacataaaaactgagaagccattcacacacacacacggagtaacgccatggctaccatactaggaccatcctccgccgcaatctcagcatcttgtgggtcactcatttacccttcctcaaagcttgtcatcccttctatctccattaacgccgggtcttgttattggaagaagttttatggagggattgggattcaaggaaagaagggaaagccgcaatttcatatcgcagttactaatgttgccactgaaattaactctgttcaacaggctcagaagcttggtgctaaagagagtcaaag

SEQ ID NO: 4599 - DNA, 389 bp, Gossypium hirsutum
  unsure (1)..(389): unsure at all n locations; Clone ID: LIB3083-097-Q1-L1-E1
gccatcttttaccttatggaaattgaccattatgatgagggtgaaagatcaatgttggtctctcaaacaagctttgaaaaaacttttggcttatcttcagtcttcattggatctacacttatggagaatggaggagtggctgaatctgccaacccttccacactaatgaaggaagcaattcatgtcatcagctgtggctatgaagagaagactgcatggcggaaagagattggatggatatatggctcagtcactgaggatatcttaaccggcttcaaaatgcactgccgaggatggagatcgattactgcatgcccaaaggccagcattcanaggatctgcacccatcaatctgtctgatcggttgcaccaggttcttcgatgggctt

SEQ ID NO: 4600 - DNA, 390 bp, Gossypium hirsutum
  Clone ID: LIB3083-097-Q1-L1-E2
cttcaaagataaaaaagttagggttttaatttgaaatcggattcggtagagattaagcaatggctggagaaagggccttgttcaagttccttaagcctgggcaacgtctacagcccgccgacgttcaagctgccgccatgtggggcgtcgctgccacgaccggcgctctttggctcattcagccttttgattggttgaagaagacctttctggagaaaccagagtcggattagaagcaaatgggacatcttgcaactcattgcggttttgtttatcgggtttgctgatgaacaaatcatggaaagaataaaaataataatgtagtaagtgtaattttttgtggtttattgctaagagaacaagcctctttgcttttggtatcaattactg

SEQ ID NO: 4601 - DNA, 389 bp, Gossypium hirsutum
  Clone ID: LIB3083-097-Q1-L1-E3
aaaagagccaatctgacctggaaaataatgggatttttaagtactttattgggaatttttggttttgggattggaacttctattggactcttgattggattctttctcttcatatactctaaacccaaaactgtaaaggaaccagttcctaggccgctttatgagctagataacgatcaattgctggatattcttcctgatattccgttatgggttaaatgtcccgattatgagagagtagattggctgaacaagtttgttgctgatatgtggccgtacctcgataaggcaatttgtgctcaaataagaagcgctaccgaaccgatgtttgccgagtatgtggggaagtatcaaatagaagccattgagtttgataatctaagtctcgg

SEQ ID NO: 4602 - DNA, 383 bp, Gossypium hirsutum
  Clone ID: LIB3083-097-Q1-L1-E4
aaaatctataattgtttacctttttgcttcacttgattgttaaatctccatggctgccaaggtttttgcatattttgtcgctttggttgctgtcttcagcgtcgccaaatctgaccctgatctcctccaagatatctgcgtagccgatacatcttcaggggtgaaggtgaatggatttgcatgcaagaaggatgccgatgtaacggaaaatgatttcttctttagtggcttagccaagccggcggtggtcaacaactcggtgggatcggtggtgaccggagccaatgttgagaaaatcccagggttgaacacccttggggtgtcgctttctcgtattgactatcaacctggcggacttaacccaccttacactcacccacgcg

SEQ ID NO: 4603 - DNA, 383 bp, Gossypium hirsutum
  unsure (1)..(383): unsure at all n locations; Clone ID: LIB3083-097-Q1-L1-E5
gtcaaattggtcttctttcctgtagtagttcatctgatgagttcatcgcgcaatttgagtttaagcatcaggctcctgaaagctatcttctgtagggatctccgatcgccttgtataactatcgatcaatggctttcgcgctaggagatcatcagcttatggcaggaaggatggatgagctccctattgatataataaaaagggatggaggttaagtctgagcctcggatgaggggggaatatagacactgngaaaggaatcatgggagtcctgcccaagattggaatgaaggaaagactggtgaatcaagcaacccctctaccttgaattcataacttgcataatgaattgcatcgacatctttgcccgtgatcgaatgccc

SEQ ID NO: 4604 - DNA, 363 bp, Gossypium hirsutum
  Clone ID: LIB3083-097-Q1-L1-E6
caagtgtggtgatccgtttatcgtcgagcggaacccgcatatccatgaccctgacgatgttttccccggccttgttatcaagatcatcgcttcaactgataggaaattatagaggtagctgcttttacacattatacacacagaaaattttaatattgtatactgggttttggtcttcttttgtttcttagtgaaaagtctttgtaataagttgaagcctgtatactgaggcctttgatataggatcatatcatatcatatatatacatggagattggtttcttctccggagagatttcagctcttctgtaaatagctcttttatcagtatatggcataatgctagtttgggttcacaccagt

SEQ ID NO: 4605 - DNA, 384 bp, Gossypium hirsutum
  Clone ID: LIB3083-097-Q1-L1-E7
ctaaaaagtttataaaataaaatatattattttattaaaggttttgtttgggggaaattgagagaaaattttgaaaaaaaaaaatccaagatgaagatcacatcgttagtagtgctgaagtgcaacccggaaggatccgatccgataatactagcgaacgctaccgatttgagccattttggttactttcaaaggtcaagcgtcaaggagttcatcgttttcgtttctcgaactgttgctaaacgtactccttctggtcagcgccaatccgttcagcacgaagagtataaggtacatgcttacaacagaaatggactttgtgccttgggatttatggatgatcattatccagttcgaagtgctttttcgcttctcaaccagatt

SEQ ID NO: 4606 - DNA, 369 bp, Gossypium hirsutum
  unsure (1)..(369): unsure at all n locations; Clone ID: LIB3083-097-Q1-L1-E8
atttttactttgctcatggtgcattgggggatgcttttaaaagctatgttcgaactcgcgattattgtactacgtcgaagcatattattcagatgtgtttgaatgcaattcttgtgagcattgaaatggttcaatttagtaatgtgactagctacgttagtaaagctgagcaaacacctgaagcacttgatcccccaactgttgctaagctatgttgagctgccgggttggctcatttggaggctaagaagtacaagcttgcagctcgtaagtttttggaagttggtccataattggtgaattcatacagcgaagttatcgctcctcaagatgttgctacctatggcgggctatgagcactngcaagct

SEQ ID NO: 4607 - DNA, 387 bp, Gossypium hirsutum
  Clone ID: LIB3083-097-Q1-L1-F1
gttatctgggattttgttccaacttttttatggcttaatgggaagctggacagcataccttataagtttactttatgtggagtatagaacaaggaaagaaagagaaaaggttgatttcaggaatcatgtaattcagtggtttgaagttctggatggattgttggggaaacattggagaaacataggtctatttttcaactgcacttttctgctgtttggatcagtgattcagttaattgcctgtgctagcaacatctactatataaatgacaaccttgataagagaacttggacgtacatttttggagcctgctgtgcaacaactgtgtttattccttcattccataactacagagtttggtcatttcttggccttatgatgacttc

SEQ ID NO: 4608 - DNA, 352 bp, Gossypium hirsutum
  Clone ID: LIB3083-097-Q1-L1-F2
gttctataggaagacgccctgttaactacacgaagttggctcgccgggattcttctccggtggaaggggtagtggtttacggagatgaagacgacgaggccgacctctcccgggtgatatgtaacgggtacgagacggattcggatttggttagtttgaagatcagtttgttaggtgactgtcaaattggaaaaacaagctttctgatcaaatatgttggggatgaagaagagaaaagcttacaaatgtcaggattaaatttagtaaacaaaacattatcggttcaaggtgccaggattgctttcagcatatgggatgtaggaggtgacagtaactcacttgatcatcttcc

SEQ ID NO: 4609 - DNA, 385 bp, Gossypium hirsutum
  Clone ID: LIB3083-097-Q1-L1-F3
tctagattttcagaaaacatgccttctgataagaagaaaaatgtattggttgggattcgattagatagtgaaagcagggatttgcttagttgggctcttggaaaagttgctgaacctggtgattgtgttgtagcaattcatgttacccggaattcagatcatgctttgggacagaaattgttattagagggttatttagaagcatatgaaggcctgtgttctataaagaaggttgatcttaaaggccagattcataaaggaaattcgatacgaaaggttttaattcgagaagcaataaactatggtgctgtagctctagttgtgggtatagacaagaggagttctcttgggggctggacttccacggctagatactgcacgaagc

SEQ ID NO: 4610 - DNA, 331 bp, Gossypium hirsutum
  Clone ID: LIB3083-097-Q1-L1-F4
ctcaaataatctatatgtggatatatatatattataggggcccttccattggcaatggagatatacgaggctaattaagaaatgaatcacccaatatcaaatccaaaaccagatcaagatgatgatgatgatgatgcagaagaaggagatacagtgaaaggcttttgttcttcacatgtgagcacttcatggggtcctgcctcttctctcccaactcccattaggtcaaggtaagaaaggtaatgagagatgatgttgttcatggtgtcaacatcacctcgcccacaaacttgatctccatagagcacattcatggtggctccaaaccccg

SEQ ID NO: 4611 - DNA, 339 bp, Gossypium hirsutum
  Clone ID: LIB3083-097-Q1-L1-F5
cgcacctcttgagtctctttttgcgcagttctgtttacactcattatggtttggcaattgtagcatacgtgccattgcagtgttgtgggtagagtttgttcgagaaattcgttggtattgggaagagtcacagccattgcctaaaatgccagcccatggttcaattgacctaacatcttgtttaatcaaccataaactacaaatgcttgcaatatgcattgagaagaagcgtgaactcaatgaagaatttcaagactgtcttggaagtaatgatgatgtgtttgcacatatggaggttgaagatattcaagttggagaggagtctactagttttcttac

SEQ ID NO: 4612 - DNA, 304 bp, Gossypium hirsutum
  Clone ID: LIB3083-097-Q1-L1-F6
caagctttataaaatatctgttgaaacaggaaatcacgatcatcagctgattaaaactgtatcgaactttgaaagcagtatctagagattcggatatttgtttctctttcttttcttcgccgttatggaagctgatgtatctatttcctcctaaggccctcatcacaatcaaatctctttcgttccacagagagctagggttttctttttcaatcgaatttcttttgggtttttaatttttcagttttcggatgaagatgaatcgagttgtggttttattattgttattatggtttctctgttt

SEQ ID NO: 4613 - DNA, 342 bp, Gossypium hirsutum
  unsure (1)..(342): unsure at all n locations; Clone ID: LIB3083-097-Q1-L1-F7
cccgcaaaagatatggctctagaatgggtagtgctaggctacaccgccggcgctgaagccatcatgttgctcctcctcacagttccaggccttgacggactccgcaagggcttgatcgccgtcacacgtaacctcctcaagcccttcatgtcggnggttcctttctgcctcttcctcctcatggatatatactggaaatacgagacgcgtcctacctgtgacgccgattcctgtaccccttccgaatatctccgtcaccagaaatccatcatgaagagccagcgcaacgcgcttctcatcgctgcagcttttattttgtactggcttctttactctgttact

SEQ ID NO: 4614 - DNA, 353 bp, Gossypium hirsutum
  Clone ID: LIB3083-097-Q1-L1-F8
cgacggaagtatctcattactgaccaaacgtaagataacagtcacattccgatacggacagagaggttacattcccccctcttagacacctgaacaattttcttcctaaaactttagtattgttcatcaattaacaaaagagaaaaaaaaaattgcttacaaagtgaaattgcttcaaccccaaaagtccatgaccagtatttaatgaatctccagctgttcagaaactgagctgccaactgggtgattgtttgggtggttctctatgcacttgaggagatacttgaaggtctcgatctcacaagggagcgtaagtccaccgttgtgatcgtacccgaattcctcctcagcct

SEQ ID NO: 4615 - DNA, 365 bp, Gossypium hirsutum
  Clone ID: LIB3083-097-Q1-L1-G1
gctagactcttttttcttttcacccttacttttctcctcgggaccttgtctcaagcccgcgtcatcacgtctgaatcccaacatgatgtcacccccgaaaaatccgttaccgattttcccgaatccgaccccgaatccgccatccttctccccagcgagaaaccccactttgaaccccccaaattactcgacttcaagcacgatgatgatgcctccggcgtcgcctccgttcctttgaccaagatcagttttaaccctgtcaaccgccacttaccaaggcgtcccttgattccgttccgacacaagcacaactgccgcttccataaacgcttcatgcctttgaatccacgcttccatcagaaacg

SEQ ID NO: 4616 - DNA, 376 bp, Gossypium hirsutum
  Clone ID: LIB3083-097-Q1-L1-G2
aagacctcctaaaatcatccccaacacacccccatttgcagattcctcttcttcttctttgttctttgttcttcatcttcttcatcattttctgtgtttaacccacaaatttgcagctacttcagctaataacagaagctcaacaatctctctctctctctctctctttttaacaccatgttcacttgttattagaaagctttcaactcctctgtcccttttctctgctttgctcttcacacacatttttttgaggctacattattctaaaactacaacacaacctagctacttgacctaaagatgacaaagataagtcccgatatcgatgaaacaatgctgaaagagtcgattgtggcttgttcagctgatgtga

SEQ ID NO: 4617 - DNA, 255 bp, Gossypium hirsutum
  Clone ID: LIB3083-097-Q1-L1-G3
cgagttttgttatggtgttttgaaaagattcttgcccgaggaaaatgttcagtcagtgcaaggtctgacccttaccgctgatggaatgggtgcagtttttgatgttgcacaagatgatgtggaagcatttcttactggtgctgaaaatgcagctaatgttaacttatatgtgttgaagaatgcgttgccacccttgcaacataaggacatgtcaagaggaagatttggtggtggacggcgcggttttggtgatag

SEQ ID NO: 4618 - DNA, 385 bp, Gossypium hirsutum
  Clone ID: LIB3083-097-Q1-L1-G4
ctctgaaggtgtcttaataaacgccttcgatttaccttcgatttccatttacttctctattgctacgtttttgaatttttagtgagcgaaaatgagagagtgcatttcagtccacatcggtcaggctggtattcaagtcggaaatgcctgctgggaactttactgccttgaacatggaatccagcctgatggccagatgccaagtgacaagactgtcggaggaggtgatgatgcttttaacacctttttcagtgaaactggtgctggaaagcacgtccctcgtgctgtctttgtggatcttgagcctactgttattgatgaagtgaggactggtacttaccgtcagcttttccaccctgagcaactcatcagcggcaaggaagac

SEQ ID NO: 4619 - DNA, 384 bp, Gossypium hirsutum
  Clone ID: LIB3083-097-Q1-L1-G5
aaactttcattctttcagccataattaagcttcttcccttcagaaaacatcgactgaagctgctccaagattaaagaagcttcaatttataatactctgccccttaaactagcaaagcctgatctgctgcataatcgtctaaagaaaaattgatggggataaataagttgctgtgttggtttgcagttttcttctttttgttgggtttctctgcttgcagttcgatttctgatggtgtttttgactctttcacttctactggaaggcacctccttcaagctaagaaagcttgccctgttaactttgagtttctgaactacacaattatcacaagccaatgcaaaggaccaaagtatccacctgaaagtttgtggtctgcattca

SEQ ID NO: 4620 - DNA, 379 bp, Gossypium hirsutum
  Clone ID: LIB3083-097-Q1-L1-G6
cacttctgatcattgctgttggtctcccgaatgttggtccacactttgagacatggaatgccggtgttcttggcccagttacactgaatggtctcaatgagggaaggagagatctctcatggcagaaatggtcttacaagattggccttaagggagaagccttgaatcttctttcgctaagtggtagttcatccgtggagtgggcacagaggtcttttgtctcacaaagacaaccactgacatggtacaaaacaactttcaatgctccagctggaaattctccattggctttagatatgggtagtatgggcaaaggccagatttggataaatggaaagagcattggacgccactggcctgcatataaagcatctggaaa

SEQ ID NO: 4621 - DNA, 349 bp, Gossypium hirsutum
  Clone ID: LIB3083-097-Q1-L1-G7
cttgttccttccttcgccggctattgcttttagttgcctcgatttcaagtgaatcagaatgggtaaggaaaagactcacattaacattgtggtcatcggccacgtcgattctgggaaatcaaccaccactggccacctgatttacaagcttggtggtattgacaagcgtgtgattgaaaggttcgagaaagaagctgctgagatgaacaagaggtcattcaagtatgcttgggtgcttgacaagctcaaggctgagcgtgagcgtggtatcaccattgatattgccttgtggaaatttgagaccaccaaatactactgcactgtgattgatgcacctggacaccgtgac

SEQ ID NO: 4622 - DNA, 350 bp, Gossypium hirsutum
  Clone ID: LIB3083-097-Q1-L1-G8
aaaaagtatgtaagcattcattaaataacactttaacaagtgacagcattgaaaggaattacatcgattaaacaaaatttctcatcctgcatggatccaacaccttcagtgtctgcataaaattttctaggtatgtctagttctcatcactcatcaacttcaacacctgacattggaattcctccactagttttgctcctttcccttaacataatccacaccaaagtcataattatcatcatcatcatccatagcatcatcccctgaggttaatttatttttggcttttttccttctcttattctcagctcttttcatctttgtgttcagcatgccttctactgcataca

SEQ ID NO: 4623 - DNA, 289 bp, Gossypium hirsutum
  Clone ID: LIB3083-097-Q1-L1-H1
ccactgcggggaagtggtataaaaatataaaaaaatctgtcctaaaacaatatatttatgtttatatataattaggggaaacatgaatgaaatgcttttcaatgaaaataacatttgcttttacaaaggccttcaaaacgaaataatacccatcaacatgcatcctgggggtaaccataaaaagcttccgtttctgcacaacaaatttgaaagaaaaacgaatccgaacaaacatcactttttgtcttcctcctttggggcctgtgcctaattttgcttctgctggggc

SEQ ID NO: 4624 - DNA, 349 bp, Gossypium hirsutum
  Clone ID: LIB3083-097-Q1-L1-H2
aaacaggttcaatcaatatcattatttggacaagaatcaacatctccaaattacacctctaaaaacacagggtgctgctgctattttcttttttctttcttctctcttcactttacattacaaacaaatcctaaatttgggtttttgaggcaaactttgattttaaacaacttcaaaagatgccaaccatacaaacaaacaaaaaaaagagaatctaattgaagcttgatgatctgctccatctttcttttaaatattcatcagtagaaaagttactgctttgctccatgctactaaatgatgtacaatcatcatcaacatcaagcattgccacacttaaatgtaactc

SEQ ID NO: 4625 - DNA, 389 bp, Gossypium hirsutum
  Clone ID: LIB3083-097-Q1-L1-H3
ggacagttcctttggttttgagagaaaagagtagatcttggcttctctccttcgttcgattgcgcttaattatagcccgcgtttctctcagacgtgaaaaatggggctgtctttcacaaagctatttagccggcttttcgccaagaaggagatgcgtatactcatggttgggcttgatgctgcgggtaaaactaccattctttacaagcttaagttgggagagattgtcactaccattcccaccatcggtttcaatgttgagaccgttgaatacaagaacatcagctttactgtttgggatgttgggggccaggacaagatccgaccattgtggagacactacttccaaaacacccaaggacttatttttgtggttgatagcaacgatc

SEQ ID NO: 4626 - DNA, 405 bp, Gossypium hirsutum
  Clone ID: LIB3083-097-Q1-L1-H4
aaaaaaacaccctaaagagacaatgagaaagctgctagcctttgcctgtcttttcttcttcgtttgggataaaacattagctcaaatagctccggcgccgccgataaaggtggacaacatcacttccatcctcgaaaaaggtggccaattcaccactttcatcaagctattgaaagccacacaggtggctgatcaactaaacaaccagctaagcacaccggaccctaacgacgggttaacggtgtttgcgccgagtgacagcgcgttctccggactcaaacccgggacgttaaactcactttccgacaaagagaagcttcagttggttcagttccatatactcccgacgttaatgtcgacgtcccagtttcaaacggcgagtaaccctttgagaaacccagctgg

SEQ ID NO: 4627 - DNA, 352 bp, Gossypium hirsutum
  unsure (1)..(352): unsure at all n locations; Clone ID: LIB3083-097-Q1-L1-H5
gcttgattattatgcttgacttccgccatagccgatcaaggcgcagactgctgggtgataggaggtgcnnngacagaaatgcagttggtgctccaaatgcaagaaataaacctgaaatgttgactagttccgctgaagattgtcccanaccacttgatggtgaagaggaaagaacagctattgatgcgtgtaagccaagtgtgaagaaactcctagaagaggaaatgtctggagaggttgcaaagaaagaagcaagtaatactgaagttgaagtgaaacagttctattctggtgaaggagacgatggaaggaagaattggaacagaaaaaacaaaacttgcaagaaaagttc

SEQ ID NO: 4628 - DNA, 383 bp, Gossypium hirsutum
  Clone ID: LIB3083-097-Q1-L1-H6
gaaaagccttctgcttatgcccgggaagcaagagagtttgtgagaacacgcctgattggagaacaggtgactgtagaaatggaatattcaaggaaggttcccatggcagatggtgctatagctgctgctgcacctgcagattcaagggtaatggatttcggctcagtcttcctaatgtctcctgctaagggtgatggtgatgatgctcctgccgcactcccatccacagctggtagtcagccacctggcttgaatgttgcagagttggtggttggacgtggctttggctcagtgataagacatagggattttgaggaaagatcaaactattatgatgcccttttggcagctgaattacgtgcgatttctgggaagaaaggaat

SEQ ID NO: 4629 - DNA, 396 bp, Gossypium hirsutum
  Clone ID: LIB3083-097-Q1-L1-H7
ttccaatgtttcctgctcctcatcagcctgcacttcattgaattctgctacaggtaactcgcctggctgctcagcatcaacttgtgtctatggcatccaatatggagattcatctttctcgattggattgtttgctaaagaaaagctcactttgacatcaaacgttgtgtttgacaactttctatttggttgtggccaaaacaatcaaggcctttttggtggtgctgccggtttgctaggactaggccgaaataaactatcttttccatcacaaacagccataaaattcaagaaaatattttcctactgcttgccatcatctccaagctcaaccggcttcctaaaattcggcaatgatggtctctcaaagtcttgtaaattcacaacattatcaac

SEQ ID NO: 4630 - DNA, 349 bp, Gossypium hirsutum
  Clone ID: LIB3083-097-Q1-L1-H8
aaaattcaataaagaactagaaatttattatcgctcacaggctctttgagaaagcccaatgattccctctctcatttttaattttggatatttttgttgccctagattttctctctgtaagctctacctagagaagaagccatggctaatgcagcgtctggaatggctgtgcatgatgactgcaaactgaagttccttgagttaaaggccaaaagaacataccgctacatagtattcaagattgaggagaaacagaagcaggttgttgtggaaaagcttggtgagccaagtcaaagctatgatgatttcacttcaagcctccctgctgacgaatgtcgggatgctggct

SEQ ID NO: 4631 - DNA, 106 bp, Gossypium hirsutum
  Clone ID: LIB3083-098-Q1-L1-A1
gttttccgatttttatggcctttaaaaccttaatttgacgcgcgaaaaaaaaaacttaggggttctgggaatcccccaaacctgtttacggaagcatttaccgatc

SEQ ID NO: 4632 - DNA, 278 bp, Gossypium hirsutum
  Clone ID: LIB3083-099-Q1-L1-A1
tctagaatccttactgagcaaagagcgggacgccttgtccctgagggccgtggaaattatgatcaatgcattgaacaccactttactgcatctcgtgaatcattgtggtccgagttaaatcagcttctgcgcgatgactatgatgcaacatctgtttctaccccatacactgatgctgttttggaataccgtgttgtattttatgatcctgcaaatgcacctgtcaaggataagaactggaacaatgcaaatggccacactgtttatgatgctcaaca

SEQ ID NO: 4633 - DNA, 282 bp, Gossypium hirsutum
  Clone ID: LIB3083-099-Q1-L1-A10
ttttctagcatggatgtatgaggataaggggcttaaagatctatggggggttcatatactccttatctgcacactgagagggttcattcatcaactatggagctcttacaacaacatgtttttcttaactcgcaaccgttggatcaagcaacaaggtgttgatttcaagcaaatcgacgatgaatgggactgggataatttcataatccttcaagctatgttagcttcaatggcctgtttgatattcccatctttaaatacacttcctttatggaacctaaa

SEQ ID NO: 4634 - DNA, 278 bp, Gossypium hirsutum
  Clone ID: LIB3083-099-Q1-L1-A12
gagagagagagagagagagagagagagagagtctcagagagacaacctattgggacatcagcccagacagacaaggactacaaggagccaccagcagcacccttctttgagcctggtgaactcaaatcatggtctttttacagagctggtattgccgagtttgtagccaccttcttgttcctttacatcaccgtcttgactgtcatgggtgtgtctcagtctaaaaccaaatgtgcaaccgttggtattcaaggcattgcttgggcttttggtggcat

SEQ ID NO: 4635 - DNA, 276 bp, Gossypium hirsutum
  Clone ID: LIB3083-099-Q1-L1-A2
caagaatgtgaaaaaccttgagaaaggttgtgctgatttggttcgtggtgccaaggataagagactgagggttaaggggccagtgagaatgcccaccaaggttcttcacatcacaacaaggaagtctccctgtggtgaaggaacaaacacatgggatagatttgagctccgtgttcacaagcgagttattgatcttttcagctcccctgatgtggtcaagcagatcacatctatcaccattgaacctggtgttgaggtggaggttactattgcaga

SEQ ID NO: 4636 - DNA, 278 bp, Gossypium hirsutum
  Clone ID: LIB3083-099-Q1-L1-A3
gaaagtttcaatggcaaccctgagagttccagttcacgttccttctccttctgatgatgctgagcaacttcggaaagcttttgaaggctggggtacgaacgagcaattgattatcgacatattggctcacaggaatgcagcacagcgcaattcaattcggaaagtttatggtgaagcttatggggaagatcttctcaagtgtttggagaaggaacttacaagtgatttcgagcgggctgtgctgctttttacgttggaccctgcagagcgagatgctc

SEQ ID NO: 4637 - DNA, 294 bp, Gossypium hirsutum
  Clone ID: LIB3083-099-Q1-L1-A4
ttccaacattttgaagaaacaaagaatcaaacatgtcgaaggaagtgagtgaagaaggggtgagccgaaaggactatgtggatcctccaccggcaccgctcatcgacgtggctgagatcaagctttggtctttttacagagctctcatcgccgaattcatcgctactctcctcttcctatacgtcaccatagccaccgtcatcggccacaagaaacaacacgatgcatgcgatggtgttggtcttttgggcattgcttgggcttttggtggcatgattttcattcttgtttact

SEQ ID NO: 4638 - DNA, 209 bp, Gossypium hirsutum
  Clone ID: LIB3083-099-Q1-L1-A5
agaaggcctttctccaccgttacagcctctctttcagtttgtgtagctttcttttttaaaactcctctatttatataaacctttcaataatataagagcaaaatttctgggctgggtttcgaatttggggatctgggtttttggtctttctgggcttgagacagagagagagagacagagggggagagaaagaggggtgggggagagtg

SEQ ID NO: 4639 - DNA, 228 bp, Gossypium hirsutum
  Clone ID: LIB3083-099-Q1-L1-A8
gagaggtgcaatagggaagtttggattgtcagggaaagcgcaagtgatgccgatgaagaacctatctgatggacagaggagtcgagtcatcttcgcgtggttagcatttcgacaaccccacttgctgctgctagatgagcccactaaccatttggatatcgagacgattgattcactggcagaagcattgaacgagtgggatggtgggttggtattggtgagtcacga

SEQ ID NO: 4640 - DNA, 276 bp, Gossypium hirsutum
  Clone ID: LIB3083-099-Q1-L1-A9
aattcaagctcaatccattgtgcaatgtgtgagaaagaagttcatggagatcaatctctctgctgtgggcgatgtcgagcagtggtctactgcacttctctctgccaaaagcagcactggaaggagtcacataaaagcatgtgcggtctgtacaaagctatgatggaaagggaagaagagcttgtaatgaaaatcttcatgttcccttgctctgctgcccaaccttgtaaatggcttgaatcattgggaatccatcagaaagggatgtggagaagg

SEQ ID NO: 4641 - DNA, 278 bp, Gossypium hirsutum
  Clone ID: LIB3083-099-Q1-L1-B10
ggacgctccgttttgcagattctctcatcccgtatttcgattcttcttcgattgacggtgcaatggtttacgtaacatcgtgggacgaattcgtcgagcgaaccgtgcagttgttccgtgccagtcctgaatctacgcggtattgcatgaagtaccggcattgcgatggaaaattggttttgaaggttactgataacaaagagtgccttaagttcaagacagatcaagcacaggaggccaagaagatggagaaactgaacaatatattctttaccttg

SEQ ID NO: 4642 - DNA, 276 bp, Gossypium hirsutum
  Clone ID: LIB3083-099-Q1-L1-B11
gtgagggctctgtactgacacagcatatgttgaatgccaagaacatgatgtgtgccactgttcctggacaccgatgatgatcgacgatattgctggctcggaaaggcaacataaaccaactgttggattacaaggcaggaagacaggtcggtttggaggtaattaggattcatttgcagttcatttatttatttacttttgtcagacaacaaaaatccgttgtcatttagtggttaggatatctggtttctatttattgttttcggccgaaggaac

SEQ ID NO: 4643 - DNA, 277 bp, Gossypium hirsutum
  Clone ID: LIB3083-099-Q1-L1-B12
gctagcttcatcttctctgttcgaccttcccaaaaaaaaaaaaaaagaaaagaaaaattcaggttgggagtattacacagctttgttttggttaactccttttcgtccaccatatttgcccccaatatgaagatcttgttctcgaaagttctaacgaacaccgatatacagaaaagattggcggttcccaacaattcactgaagcatttcgagcttgaaaatggtaattgctccaaatcatttgaagttaaagatgaaaacggattcacatggcctt

SEQ ID NO: 4644 - DNA, 277 bp, Gossypium hirsutum
  Clone ID: LIB3083-099-Q1-L1-B2
tgagtacagtggatccattgaaagagcctccattgattactgccaatactgtgctttccatccttgccttggactaccctgtagataaggtctcttgttatatatctgatgatggtgcggccatgctgacatttgaatctctagtagaaacagccgactttgcaagaaagtgggttccattctgcaaaaaattttccattgaaccacgggcacctgagttttacttctcacagaagattgattacttgaaagataaagtgcagccctcttttgtaaa

SEQ ID NO: 4645 - DNA, 236 bp, Gossypium hirsutum
  Clone ID: LIB3083-099-Q1-L1-B3
cacatggtgctgtaataccggtggtaggtcttcttgatggtaagaattacatgcttcatgaggctgtttcaagagctcttgtgaagttagggaaagacaggcctgcttgtaagatggaaatggtgaaagctggggtaattgaaagcgtacttgatatccttcatgaagcgccagatttcttatgtgctgcttttgtggaattgcttcggatactgacaaataatgctactatagct

SEQ ID NO: 4646 - DNA, 279 bp, Gossypium hirsutum
  Clone ID: LIB3083-099-Q1-L1-B4
gagaaatggcgagcggagggaaagtgtcttttaaagtcactcttacctctgatcctaagctccctttcaaagtgtttagcgtgcctgaagcagccccttttacagccgtcttgaaattcgcagccgaggaattcaaagtccctcctcaaaccagtgctatcatcaccaatgatggcgtgggaatcaatcctcagcaaagtgcaggaaatgtgttcctcaaacatggatcggaacttcgcttgattccccgtgacagggtgggagccttttgaaataaca

SEQ ID NO: 4647 - DNA, 282 bp, Gossypium hirsutum
  Clone ID: LIB3083-099-Q1-L1-B5
ctgcagaaaccgggtgccaattttactgagccccaggttggactcctctgtcccatttactggatgagagagaggaaatccggttttcaatttcatcactgcatcttctttttgcttttggcctcaccttcagaaagggaagtcaagttctttagattgcttgccgctttttgagtttcaagatctatgaaccccagatctgtagagccttgatcttattgctgaattcttgaattttagtagtttgggttcttttgctttttccttaataactagatttag

SEQ ID NO: 4648 - DNA, 283 bp, Gossypium hirsutum
  Clone ID: LIB3083-099-Q1-L1-B6
gcctgggattttatgcagaaaatgatactacagggagaagggaacagtgcttgaccgatctcctctgttttgtcatactgcaatcctttctttcattctcatttcagcagatggatggtttataaatgttgcgcacatgccaactatgtatatagcttcctaattaatccatgctgcatttctgaaacagacggaacattgtcaatttctattgttttctgtatatcatgtcattcagcaataacctgcaagaattgatctgtcaatcttatcctgatctcat

SEQ ID NO: 4649 - DNA, 278 bp, Gossypium hirsutum
  Clone ID: LIB3083-099-Q1-L1-B7
aaaaaatcaaagaaaatagaaggactcaggaaaatttcaaaaaaaaaatattcaaaaaattatataaaattcacataaattaaatttttaatttttttaaaaaatacataaaagagaaaaaaatgcaaattaaaaagaaattttcaaaaaagaaaaataaaaatcacaaaataatatagatatataaatatcaacagtactttttaataaccttgaatgcttttttttaatttcttgtttctacaaaataaaattcaaaaaataaaaaataaaaagtt

SEQ ID NO: 4650 - DNA, 255 bp, Gossypium hirsutum
  Clone ID: LIB3083-099-Q1-L1-B8
aaacaaccaaagccactactgggtggcaaagcaactttcgattaagcaaaaacacatttaaacagactataccagacatgagctattgtccattaacatatcagacgccccacttcatcatcacatcacattgaacctaccactaccatcatggcctaaaagatgattagaaaaaacaaaaaaccaatacatttgcctaaaaataaacaatagtttcttctttctaagcgactgatccacacacatggaaattaa

SEQ ID NO: 4651 - DNA, 277 bp, Gossypium hirsutum
  Clone ID: LIB3083-099-Q1-L1-B9
tgcacatggtgctgtaatacctgttgtaggtcttcttgatgggaagaattacatgcttcatgaggctgtttcaagagctcttgtgaagttagggaaagacaggcctgcttgtaagatggaaatggtgaaagctggggtaattgaaagcgtacttgatatccttcatgaagcgccagatttcttatgtgctgcttttgtggaattgcttcggatactgacaaataatgctactatagctaaaggaccgtctgctgcaaaagtggttgagccccttttt

SEQ ID NO: 4652 - DNA, 275 bp, Gossypium hirsutum
  Clone ID: LIB3083-099-Q1-L1-C1
cttcctttcacaactggttgttcttctcaggcaagtgttgcagttggcaaaagtcctccaaggaaacaaaaaccagaaccgaactgtcaaaatctaataagtaaacaagttgtaggagaagagtgttcatcaaaggaaaaaaaaaaaaattcatttggtcggttggctctttcaaagcccaacatatcgaatgggatacatagattgattcgaattactgtaagaagcttctctcagttatttgtttacaaagacatagaggaagtgacaaccga

SEQ ID NO: 4653 - DNA, 278 bp, Gossypium hirsutum
  Clone ID: LIB3083-099-Q1-L1-C10
cccactgcaaaataaatctgatgttccatcttatgtgatgttgggaattcccaaacatgaggaagggcctcctactcctcagcaccctctgtctccaatgggtgatgcctgttcgaggatggatctgactgctattcatcaaattttgataatgacacattataaagatgatgaaggaacaaatgagctatccttccaagagtggacccaacaaatgagagatatgttggaggcaagaaagcgtggagatgtagcatttcgtgacaaagattttaaaa

SEQ ID NO: 4654 - DNA, 277 bp, Gossypium hirsutum
  Clone ID: LIB3083-099-Q1-L1-C11
cgaagtcgaatatccgaaaatacccgaatacaaggaaaaacaagatgagggtaaggaacataaacatgagttccaaaagcatgaaaaagaagaggagaaaaaacctgagaaaaaggcagagtactctgagtggccaaagtacatgtttactcaatctggctcgggcactaagccttgaaccatatgacactggtgcatgtgccatcatcatgcagtaatttcatggtatatcttaattatatggttaataaaaaaaagatggtgagtgaataatgtg

SEQ ID NO: 4655 - DNA, 273 bp, Gossypium hirsutum
  Clone ID: LIB3083-099-Q1-L1-C12
atcaaagttgcacagtggatgcttcaaattcctggtgcaactggttacattggctgcattgggaaggacaagtttggggaggaaatgaagaagaactcaaaagctgctggtgttaatgttcaatatcttgaggatgaaactgcaccaacaggaacctgtgctgtttgtgttgttggtggtgaaaggtaagtttgagaatgaccttatttttccttgtttcttataagctgctatttttattgttgtacttatgtttgctccaaggattatgat

SEQ ID NO: 4656 - DNA, 272 bp, Gossypium hirsutum
  Clone ID: LIB3083-099-Q1-L1-C2
gttggaccgagtgaagaacttaactgggctcgtagagttctatgccaagaacagccggctgagggaactggttaacttggttgtagtaggtggagataggagaaaggaatccaaggacttagaagaaaaggctgaaatgaagaagatgtatgaacttatcgaaaaatacaagttgaatggacaattcagatggatatcgtcccagatgaaccgagtgagaaatggtgaactctatcgttatatttgcgacaccaagggagcattcgttcagc

SEQ ID NO: 4657 - DNA, 323 bp, Gossypium hirsutum
  Clone ID: LIB3083-099-Q1-L1-C3
ggcgtcgttatcaactagatcccccccctgctgaattcttctcgttataaaaccccttattctgacatcactatggctggcatatggctgctattttttacaatggccgcactaacggcagaggcaaacggccacaaatcagggaatccaccggtgaatatcgtgacagggcctacacttggtgatttacgatgggtgagtcatggaaggccactcatttggagatacccaaccaaatatgggctcttacttggtcatttatgtgccaacatgcgggcttaaactcaactaagcagagaactttcggttaaactgaaataaac

SEQ ID NO: 4658 - DNA, 234 bp, Gossypium hirsutum
  Clone ID: LIB3083-099-Q1-L1-C4
atccatcttcaaaaaactactaatggctttgccgaaccatttttctctaaatctcaataactaccgattttgttttgccaaacatctcctgccatttcccccgctatatcgttcgccgatatgaattacaaagatctcaagactttaaaccctatgcttccatatcctaacttcgaaaaatgcccattgcatccgaaccacttataggtaaaaaatatgatatgggtgtcgaga

SEQ ID NO: 4659 - DNA, 279 bp, Gossypium hirsutum
  Clone ID: LIB3083-099-Q1-L1-C5
atgaagtagattgcccattctacctgaaaactggcagttgcaagtatggttctacttgccggtacaatcatcctgataggaatgcattcattcctcctgtagcactaggccattcccttatagcatctgccaataatctgaacattggagttgttaatccagcttcttctctatatcaaacaattgaccccagattaagtcagacagctctacttgctcagcaaacaatgccaacgttggtagggactcaaactgtgtatcctcagagacctggacaga

SEQ ID NO: 4660 - DNA, 243 bp, Gossypium hirsutum
  Clone ID: LIB3083-099-Q1-L1-C6
cgaacctctatctctcactcgcttacgcgccacttcgaattccaccgcttccattcaccatatgccttgccagctcatcttccgtcctttccaccgcctttcctttcctttatccaccgtcaacgccggctccagttctcgcaggtcatccacttttgttgtcgccgcttgcggcactctcaccgcccattccgtctcgccaagaggtgggggatatacaggtggggatttcatgaccagaaa

SEQ ID NO: 4661 - DNA, 277 bp, Gossypium hirsutum
  Clone ID: LIB3083-099-Q1-L1-C7
tggaagcatcatgagcttaaggtgaaggactcaaagacccttctctttggtgaaaagcctgtcacagttttcggtatcagaaaccctgaggaaatcccatgggctgaggctggagctgagtatgttgttgagtctactggtgtttttactgacaaggacaaggctgctgctcacttgaagggtggcgcgaagaaggttatcatttctgctcccagtaaggatgctcccatgtttgttgtgggtgtcaatgagaaggaatataagcctgaccttaaca

SEQ ID NO: 4662 - DNA, 189 bp, Gossypium hirsutum
  Clone ID: LIB3083-099-Q1-L1-C8
tttttttttttttttttttttggttgttttttttttttttttttttttttttttttttttttttttttttttttttttttttttttttttttttttttttttttttatatgaaacgaaaaaaaccccccaaactttttccaaaaaaaaaaaaaaataaattcctttaaaaacaaaaaaagggggccccc

SEQ ID NO: 4663 - DNA, 238 bp, Gossypium hirsutum
  Clone ID: LIB3083-099-Q1-L1-C9
gggggggaatcataaaaatggggcacattttaaactaataacatcaaagaaccaacacaattccaacttcaatcacatacgccaatgatatatatagttcaaggcaagaaactttgtgataaagggtgggaatgtaaagggtggtcacagttttgttgtaaccaaaccatttctgattacttccaaacttatcaatttgagaacctttttgcttaacgtaatacaccggtggcacatt

SEQ ID NO: 4664 - DNA, 257 bp, Gossypium hirsutum
  Clone ID: LIB3083-099-Q1-L1-D1
gaaggaaatcataaaaatataacaaatgagaaactaataacatcaaagaaccaacacaattccaattcaaagcacatacaaaatcaacatatgagaacacactgaatcatccattccattaaacaatggaattcaggtattccctcaatggccaaaatccataattgctgatttactgataatcttccaaatgatttttgtgcaatatatatatacacacacacacactcttcactctccttcacttaaaatgggga

SEQ ID NO: 4665 - DNA, 276 bp, Gossypium hirsutum
  Clone ID: LIB3083-099-Q1-L1-D10
aagatttgatgaagttaaaattagtagctagaaggcagaaacagaaactagtcctccaccacttctcatcatcttcttgaattcatcaaaattaaccattccatctccatcaatgtctactttccttatcattgctttgcaatcttgcaatttgttcccttctttcaaacccaaagaaaacagcacagatcccagttcctcaaacgaaatcaacccatctttgtctttgtcaaacacatcgaaagcctctttcagttcctcttctccattcatccc

SEQ ID NO: 4666 - DNA, 275 bp, Gossypium hirsutum
  Clone ID: LIB3083-099-Q1-L1-D11
attccaactccaactctaaggtgaacatagccatcatacacccagatcttggcataggtggagctgagagattgattgttgatgcggctgttgaattggcatcccatgggcacaatgttcatattttcacagctcatcatgataaaaatcgatgctttgaggaaacccgtgccggtatctttccggttactgtgtacggagacttcctgcctcgacatattttctatcgccttcatgctgtatgtgcatatcttcgctgcatttttgttgcactt

SEQ ID NO: 4667 - DNA, 277 bp, Gossypium hirsutum
  Clone ID: LIB3083-099-Q1-L1-D12
ctggcttctgaatctgtcatcaagcaaatccctcgtcttttgggtcctggtctcaacaaagcaggtaaattcccaacccttgtcactcaccaggaatccctagagtcgaaggtgaatgaaacaaaggcaatggttaagttccagctgaaaaaggttctatgcatgggagttgctgttgggaatgttgcaatggaggagaagcagatcttccaaaatgtgcaaatgagcgtcaatttccttgtttctttgttgaagaaaaattggcaaaatgtgaggt

SEQ ID NO: 4668 - DNA, 275 bp, Gossypium hirsutum
  Clone ID: LIB3083-099-Q1-L1-D2
ctaaggttgaaagagaggctgagatcccacctgagcaacaaatggaagataaaccggcaccggatgcttcccagcccctctcgactataattccaatcccgaaaagcagacttgcaccataccgaaccgtgatcattatgcgattgatcattcttggtcttttcttccattatcgagtaacaaaccccgttgacagtgcttttggactgtggctcacttcagtcatatgtgaaatctggtttgcattttcctgggtgttggatcagttccctaag

SEQ ID NO: 4669 - DNA, 273 bp, Gossypium hirsutum
  Clone ID: LIB3083-099-Q1-L1-D3
cttctttgtttctggttttgactttggtttctgtttttgtttgtgggtttggaaaaaggataccaattctgtcatttgatgaagggtatagtcagttgtttggagatgataatctagttctccatagagatggtaaagctgttcacttgtctttgaatgagagaacagggtctggatttgtgtctcaagacctttacttgcatggttacttcagtgcctcaataaagttacctgctgattatactgctggagttgtggttgctttctatatgt

SEQ ID NO: 4670 - DNA, 280 bp, Gossypium hirsutum
  Clone ID: LIB3083-099-Q1-L1-D4
cgcacacggagtgatagtcgcagcacgcgataaaaatggaggcagccagaaccgttaaagacgtttccccacacgagttcgtcaaggcttatgccgcccatctcaagcgctccggcaagattgagcttcctccatggactgatattgtcaagaccggtaaactgaaggagcttccaccctatgaccctgattggtactatgtcagagctgcttccatggctaggaaaatatacttgaggggaggtcttggtgttggtgcctttaggaggatctacggagg

SEQ ID NO: 4671 - DNA, 278 bp, Gossypium hirsutum
  Clone ID: LIB3083-099-Q1-L1-D5
gtctgatagagacagtgaagatgaagttgatgatgacatcgctgaccttgaagatcgcaggatgctcgacgattttgtggatgttagcaaagacgagaagcaacttatgcatctttggaactcctttgttagaaagcaaagggttctggctgatggtcacgtttcctgggcatgtgaggctttctctaaactccatgggccggatttggtcaagtcacctgctctcttttggtgttggaggttattcatgataaaactttggaatcatggtcttcttg

SEQ ID NO: 4672 - DNA, 276 bp, Gossypium hirsutum
  Clone ID: LIB3083-099-Q1-L1-D7
catcaatgctcttatattttcagatggaaagaacttgaaattggcaagttaggcacaggatatggtctattgcagctcccttctatgcctgaggtaaagcaccattcgctttccactgagggtttcactccagttgagaacatcaatatggacgatatcaagtttaaggataaatctcgtgagaaacagaggaagaaaaatttacaaacaaagaaagaacgagagcaacaagaatcaaaacctgagaaacccgaaagggccacatacgctgccgcc

SEQ ID NO: 4673 - DNA, 249 bp, Gossypium hirsutum
  Clone ID: LIB3083-099-Q1-L1-D8
gaacaataaattcatcacttttgattccaaaacaaaaataacaaaaatccctaaataatgtctataaaaaaaaactatttaactaaatcgtgccagaacacacaattccattgttcgacatagctcatattttaaaagcaaaccaaaacattttttgtcaaaatcataataaatccctctcattcccagccagtagcagcaggggccgacacatcgataggagcaccaggggtttgtgctggaggagct

SEQ ID NO: 4674 - DNA, 276 bp, Gossypium hirsutum
  Clone ID: LIB3083-099-Q1-L1-D9
gctgatgagtgcatggttcttgataatgaggctttatatgatatctgcttcaggactcttaaattgactactcctagctttggtgatttgaaccatttgatctctgcaaccatgagtggagttacttgctgtctaagattccccggccaactcaactccgacctccgaaagcttgctgtgaacttgattcccttcccccgtcttcactttttcatggtcggatttgctccactgacctcccgcggttctcagcagtaccgagctctaactgtccct

SEQ ID NO: 4675 - DNA, 280 bp, Gossypium hirsutum
  Clone ID: LIB3083-099-Q1-L1-E1
aatatgacaatagcttattaaccttatgtaaaacttcatatggacaacgatatagagctccaatgatcacaagaacctagttttcctaatacagcatcaaatttcaggcagaaaatatataaacacaatggggacaatggacatattcaaactatcaaaccactcagaggcttgaacaagaaaagaactggatggactgtaatagaaagagcaccactttcatcttattgagattgaaattcaggatcagataatcctgccatgacagctataagaaccc

SEQ ID NO: 4676 - DNA, 284 bp, Gossypium hirsutum
  Clone ID: LIB3083-099-Q1-L1-E10
tcgtggatacaaatacaaatcaaaggaaggctgcaggatggaaagcaatgcctttcgtcttagggtgtggcttttcctgagtgcaggaaatgaaacgtttgagagattggcatcattcgggttgatggcaaactttatggtgtatttgcagagtgagtatcacatgaaccaggttaaggctgcaacactccttaacacctggtctgctgcttccaattttgctccggttattggtgcctatgtctcggatgcattcatcggcaaattctggaccattgctttcg

SEQ ID NO: 4677 - DNA, 285 bp, Gossypium hirsutum
  Clone ID: LIB3083-099-Q1-L1-E11
ttcttgtagaaatcttgccaaacaaagggaggaaaggaaaaatggagttgtgccctacaattaagaacatccttcttttggattccgaagggaaacgtatagctgttaagtattactcagatgactggccaacgaatgctgctaaggaagcttttgagaaagctgtgtttaccaaaacccagaagactaatgctcgaactgaagctgagataacaatgtttgacaactatattgttgtatacaagttcgttcaagaccttcactttttcgttactggaggtgaaa

SEQ ID NO: 4678 - DNA, 262 bp, Gossypium hirsutum
  Clone ID: LIB3083-099-Q1-L1-E12
gaaagagcaaaaacataacaaaacatattcaacaaacataatactatgtttgtcattacaagatacacacacacacatacataacaatgataatccgcaactgcagtgaaattactctgctctgaaggcgccttcaatgtatttacagtgttccatgcgaactgataaggaatctgcgaattcacagatcttatttcctccaaaatgggaagcaacagccctttgcactgttgttagtgggtttccgattgcggccagtgtt

SEQ ID NO: 4679 - DNA, 276 bp, Gossypium hirsutum
  Clone ID: LIB3083-099-Q1-L1-E2
cttcctcaccaaaactcttctgtatgtctatcctcttcctttttgccctcttctccatgcaaatccatgctagagagtacttcagcaaattcccaagagttaacatcaatgagaaagagacaacaaccagagagcaaaagcacgagaccttcgttccccagaccacccaaaagccagaagaacaagagccaaggttcattcctgaaacccaaaatggttatggcctttacggccacgagtcaggctcaggctcaggctcaggctcaggctcaagcc

SEQ ID NO: 4680 - DNA, 268 bp, Gossypium hirsutum
  Clone ID: LIB3083-099-Q1-L1-E3
gagataatgggtttttcggtgcgcttcaagttccttctcttgctctctggctttggggtttcaatggcgttacaagaaaccccattggtggctaaaaacttgcgtcaaatcacatctaactcggcgcttgtggccttgttagactcgcattatacggcgcttgctgaattagtggaaaaagctttgttgttacaaaacttataagagtctgtgggaaagcataatatcaccattttgctcctaagaatgaatctcttgaaatgaatct

SEQ ID NO: 4681 - DNA, 256 bp, Gossypium hirsutum
  Clone ID: LIB3083-099-Q1-L1-E4
aaacataaataacatactcatattcataaccatttacagagtattgtaactgagcaaaattcaatctatacagaatttcccatgctgcttatctcccaagaacaaatatcaatcaataccctaccaatagtaacccacatcttacatatatattacaaaaagagcataattcaaacctttcttcacaacacaaagtttgttctgcctctccaccttatcttctcttcaatcaaactacttacaatggctactagca

SEQ ID NO: 4682 - DNA, 270 bp, Gossypium hirsutum
  Clone ID: LIB3083-099-Q1-L1-E5
gttctcttcatggttgatgctattgatgagtatgcagttggtcagctcaaggaatttgagggcaaaaagcttgtgtctgcaaccaaagaaggtttgaaacttgacgagagcgaagatgagaagaaaaagaaggaagctttgaaggaaaagtttgagggtctctgcaaggttatcaaggatgtattaggcgacaaggttgaaaaggttatagtatctgaccgtgtggttgattctccttgctgtttggtcactggtgagtatggttggact

SEQ ID NO: 4683 - DNA, 339 bp, Gossypium hirsutum
  Clone ID: LIB3083-099-Q1-L1-E6
gagggggggggcggtcgatatctagctagtgcctccggctgcctgaatgaagcccgagggagccaaaaccccttcaacaatggcgattaccaagcaacattcgatcccgcttttcgctatctcatttctgttgttacatgcagctccatcgctcaacaccttcagcccaggctcccgctcagtctgccgcaccacctggtccaccagacgtcaccaaaattctgcaaaaagccggccaatactccgtcgttcgttcgtcttctcaaatccacccaagtctccgaccgtctcattggcgagctcaaagacacagatgatgggaagaccatttttgccccc

SEQ ID NO: 4684 - DNA, 277 bp, Gossypium hirsutum
  Clone ID: LIB3083-099-Q1-L1-E7
ctcgggttcagcagagagtaaggtcacaagaggaggagccatctttttgcaaagatttctaacaacatcagtgctagtgataagttccatttgttgaagaatcatcttaacagctgaaagtacaacagcgcaattagcatgttgaagccgtggcgtaactctttccacaatgttttctgcttcacgtgcatcagatgccttgtatctggagagagcgtcaagtataaaaacttgaccccactctgtgcattcattaagagcagtaagaagctttgta

SEQ ID NO: 4685 - DNA, 278 bp, Gossypium hirsutum
  Clone ID: LIB3083-099-Q1-L1-E8
gagagcgagaaaaagaaaacagaagaaaaacagagaaaaaaaagaaatctgtaaaaaaaggtttttttttgtgggttttagctgttctgtttagagagatggcgcagattcaagtccaggggcaaaatgggagtgttaacaatggagctggaggagggaataaccagtttgtaccgacgtcgctttatgttggggatctggattcaagtgtgacggaagctcagctttatgattactttgcccacgtgggtccagtgcttacggttcgggtttgcaag

SEQ ID NO: 4686 - DNA, 233 bp, Gossypium hirsutum
  Clone ID: LIB3083-099-Q1-L1-E9
gggaaccatatgatgtgccaatgcgaagatttcttagaggtcgagctttagatgtggataaagcttctagcgtgtgcctaaaggtcccagaatggagacgaagctttggtcctaaaggactcatccatccatgagaactcacacattaaatgcaacaaaacatgatgtcctagcatggatgatacaagaaaggacgacctatatgagtgacttgttagctgcaagacattgtc

SEQ ID NO: 4687 - DNA, 280 bp, Gossypium hirsutum
  Clone ID: LIB3083-099-Q1-L1-F1
ctagtgagctggaaaggatgaaaaatgagaatctggttctttcaaaagatgctcatcatttcgacaccaagtttccaggtttacagcaagaattaatgcagttagataaggtgaatgaagaactgggaagcatatttcctatgtttaatgaatattcagaaactggaaatgcattagaacgagtacttgcattggaacttgagcttgcggaggcactgcaaacaaagaagtcaagcatcctttttcagagctctttcctgaaacaacacaatgatgagga

SEQ ID NO: 4688 - DNA, 275 bp, Gossypium hirsutum
  Clone ID: LIB3083-099-Q1-L1-F10
ggttcatgaaatggaaaatgggttcaacatatggtcctttaatggcaggctactttatcggatactgaaggatcatttcttccagttcttgtggcgtccaaggccaccatccttcttgacacctgagaaggaggaagagattgcaaggaacttgaagaagtatagcaagaagtacgaggcagaggaccaggatgtatcgatgttattgagcgagcaagatcgagagaagagaaggatgttgaaggaggaatgggaaaagtgggttagtgaatgga

SEQ ID NO: 4689 - DNA, 52 bp, Gossypium hirsutum
  Clone ID: LIB3083-099-Q1-L1-F11
gagaactagtcttgaatgggggttttttttttttgggaagggcataccttac

SEQ ID NO: 4690 - DNA, 278 bp, Gossypium hirsutum
  Clone ID: LIB3083-099-Q1-L1-F12
tggggatcgaaaagaatataaccctcagaaattgccatctgttcatttagcagtggaggaaacagggatggttagctctgagattgggaatttgatacgatggaggaagaattttggaaatatcgtgttaatcatgttctgcaatggtcctgtggaacgtactgccctggagtggagactgctttacgggcggatatttaaaactgtggttattttttctgcgcagaagaattcggatcttgccattgaagaaggtcaattagatcaaatttacaagc

SEQ ID NO: 4691 - DNA, 275 bp, Gossypium hirsutum
  Clone ID: LIB3083-099-Q1-L1-F2
gtcggctgtcaccgtgcaaaactgggtggaaaggggttattctgttgtgaatgttcaatgcaaggaccgaactaaactcctgtttgatgttgtttgcacattgacagatatgcaatatgttgtgtttcatgccactatcaaaacatcaggcgataaagcatatttggaattttatattaggcacagagacggaatactggttagttcagaacccgaacgacatcgtttaatccaatgtttacaagctgcagtcgaaagaagagcatccgagggtg

SEQ ID NO: 4692 - DNA, 276 bp, Gossypium hirsutum
  Clone ID: LIB3083-099-Q1-L1-F3
gagtaaaacagaggagacccaattgaacaggcttgaaaaccaggtagacaatggaggaggaggtgcttgggagtatctttgccttgtcaggaagctcaaagttaggcgttcagagaaagtcttgaagtatggcttatcgatcttaaacgaccccaaaaaacgatctgctcttggccctgaagaatggactctatatgagcagctagctattgctgctatggattgccaatgtctcgatgttgcaaaggattgcataaaggttttgcacaagaaatt

SEQ ID NO: 4693 - DNA, 257 bp, Gossypium hirsutum
  Clone ID: LIB3083-099-Q1-L1-F4
gggtggggtttttcataggaggggcgtattcaacaaacataatactatgtttgtcattacaagatacacacacacacatacataacaatgataatccgcaactgcagtgaaattactctgctctgaaggcgccttcaatgtatttacagtgttccatgcgaactgataaggaatctgcgaattcacagatcttatttcctccaaaatgggaagcaacagccctttgcactgttgttagtgggtttccgattgcggcc

SEQ ID NO: 4694 - DNA, 282 bp, Gossypium hirsutum
  Clone ID: LIB3083-099-Q1-L1-F5
ctctgaatggaaagaaatttgatgataaggagtggtatgttgggaaagcgcaaaagaaatctgaaagggagcttgatctgaaacttcaatttgagcagtcaatgaaagaggcagcagataagtttcaaggagcaaacttgtatgttaagaatttggatgacagcataagtgatgaaaaacttaaagagctattctctcaatatggtaccataacgtcatacaaggttatgcgagatccaagtgggataagtaaaggatcagggtttgttgcattttcaactc

SEQ ID NO: 4695 - DNA, 282 bp, Gossypium hirsutum
  Clone ID: LIB3083-099-Q1-L1-F6
gacgatgaaggcaaagtttgcggtgtcacatctgaaggtgaaactgccaggtgtaagaaagttgtttgcgacccttcctacttgccaaacaaggttaggaagatcggcagggttgctagggcaattgctattatgagtcacccaattccaaacaccaatgattctcattctgcgcagattatcctgccacaaaagcagatgggtcgtaaatcggatatgtatgtcttctggtgttcatattctcacaatgttgctgcaaagggcaaattcattgcatttgtt

SEQ ID NO: 4696 - DNA, 277 bp, Gossypium hirsutum
  Clone ID: LIB3083-099-Q1-L1-F7
gatggtcttttgttctcttcaaggaggttttttaaaggaaaacaataagtcgaggtttacttggattctcattaaaagcataagaacaacaacactttgtatttgtcatattttcaaaaaccatgcatcctccatagaagctgtggctcacgcaaagcttatgacttggcttcttatttttcggttctttaatattatcattagattggtgaataatgcttttcatatttatacactaattattttctcaccaaacaaaccaaatcaaaccacaatt

SEQ ID NO: 4697 - DNA, 311 bp, Gossypium hirsutum
  Clone ID: LIB3083-099-Q1-L1-F8
actagagcccccccctgctgaatacagccgagttcttagtcttaggatctctgccttccacagaggcttttccactgttctaaacgatctgaaatatgcggcttgtcatgagtgggtgaaggttgagggtaactctgccactattggtattactgatcatgctcaagatcatttaggtgatgttgtgtatgttgaattacccgaagtgggagctgctgtaaagcaaggtgaaagttttggagcagttgaaagtgttaaggctactagtgatgttaattctcctgtttcaggaaaagtggttgaagttaatg

SEQ ID NO: 4698 - DNA, 273 bp, Gossypium hirsutum
  Clone ID: LIB3083-099-Q1-L1-F9
ccaccccacatatcttcgccaactgcaatttttgcccccattcttcctcgtctgcttgcttacataatctatttatttatatttccatgctgctaacactaattttcagtccttaataaattgcgtgaaatgacacctgcttggtctatttgcttcaattgatacactcatttggagctctgcaaatataggcttattataagcatctaggtgatcatccatgggttcaggatactggcttacatcattcatctgattaaagaaatataaacc

SEQ ID NO: 4699 - DNA, 275 bp, Gossypium hirsutum
  Clone ID: LIB3083-099-Q1-L1-G1
gctccgtggcttgcaatggataccgtcgattcttagatctcttaaccctagccatttttattttttatcattctgatcgagcattgtttctaacgaagaaatcaacttttaggtttcatttgattcagttctggctggttttctgattttacctgcatttcgcgttctatttcgtcgtggttgctttgctgattgtttcgcctaaccaaacattgtatctgacgaagatatcaacgtttctgttccgtttgattcagttctggcttgtttcgatc

SEQ ID NO: 4700 - DNA, 275 bp, Gossypium hirsutum
  Clone ID: LIB3083-099-Q1-L1-G10
tagatatgggtgatgttcttattggtgacaaaccaactggattttgtgctggcggctgtgcggcaattgcagattctggaacttctttgctcgcaggaccaacgactgtgataaccatgataaaccatgcaattggtgccactggagtagttagtcaggagtgcaaggcagtggttcaacagtacgggcaaaccatcatcgatctacttttagctgagacacaaccacagaaaatctgctcccaaattggattgtgcacttttgatggagctcat

SEQ ID NO: 4701 - DNA, 277 bp, Gossypium hirsutum
  Clone ID: LIB3083-099-Q1-L1-G11
ttcctctccaattttccgtcactttcccgagaaaatgagagaaatccttcacatccaaggtggccaatgcggcaatcagataggagccaagttctgggaagtcgtatgtgccgaacatggcatcgattcaacgggtcgatatggtggtgactcggagctccagcttgagcgaatcaatgtttactacaacgaagccagttgtggccgttttgttccccgcgcagttttaatggatctggaacccggtaccatggatagcgtaagatccggtccttac

SEQ ID NO: 4702 - DNA, 74 bp, Gossypium hirsutum
  Clone ID: LIB3083-099-Q1-L1-G12
aatgaagctcgagcgaggtttgcttcaccttttaatcaaaaggcccgcgtgatgggtgctgatcttgttatgca

SEQ ID NO: 4703 - DNA, 275 bp, Gossypium hirsutum
  Clone ID: LIB3083-099-Q1-L1-G2
agcgaacaaaaaagagtaaggaaaagcagtactttgatcgccagccctagaagttaacccatgcaccagctgcttgtataaaaagctttacattttgcaaaagaagggatttcagcacgaaattgaagttgtttttaaaaaccatggttgccacggctgtgacatcggcgtttttctcagtcacttcttcacctgactcctctgactcgaaaaacaagaagctcggaagcatcaagtcgaagccatcggtttcttctggaagtttgcaagtcaag

SEQ ID NO: 4704 - DNA, 256 bp, Gossypium hirsutum
  Clone ID: LIB3083-099-Q1-L1-G3
agggttattatctttgaatttgctgatttgatttactggaaacgattttcctgattttgggtaattagaattggatttgatccatggtatttgtggattgtgaaggtattgattcaagaacaaagcaatcaacctagcttcttttctttttttctttttgttcaaaatagtgtaaattaattgtttaagattgtaagcctatgagtaattgaaaccaaataatccttgttctagccaaatattcgtaaaattctcc

SEQ ID NO: 4705 - DNA, 283 bp, Gossypium hirsutum
  Clone ID: LIB3083-099-Q1-L1-G4
gtctcgaattttttttttttttgtttgatgtgtttatattgctgacatttaaaaaaatacgaaaatacaatacacaattttttatattctatattctagttctaaccttctagaacatgtcgggagttaaaattttaacaataataacgacaattattacaatatcatgggtaaaaaaaattaggacgtaaaaaaaaaaattaaacttgtaggccagctaagaaagcaactccggttgagggtaaccatgaagttccatagatgaattttgcaacggtgaatt

SEQ ID NO: 4706 - DNA, 291 bp, Gossypium hirsutum
  Clone ID: LIB3083-099-Q1-L1-G5
aagcccgagcgccaatcctctactttcccgcattttctttttccctctttagattaaaattctgaaaccctccaatttggatacatcgtcatggcttctacgggtcggaaaatcatactaaagagctcagacggcgagaacttcgaggtggacgaggcggtggctctcgaatcacaaacgattaagcacatgatcgaggacgattgcgccgataacggcatccctctacccaacgtcaccagcaagatcctctctaaggtaatcgagtattgcaagaaacacgtcgaagca

SEQ ID NO: 4707 - DNA, 280 bp, Gossypium hirsutum
  Clone ID: LIB3083-099-Q1-L1-G6
aaacggcccttccttttcctttaatatcaacggttctcattcacttattctcctctttataaaccacatttcacttccacctgcttgcttacctatttgttgcgataatctcgaagcttccctttccgttttagatctcaaaattcaaaaggctctctttttcatctcatggctgctactattgtctccgtcaaagctaggcagatcttcgacagccgtggaaatcctacggttgaggttgatgtggaaacatcgaacggtataaaggctagggccgcag

SEQ ID NO: 4708 - DNA, 280 bp, Gossypium hirsutum
  Clone ID: LIB3083-099-Q1-L1-G7
cggtacctcaaacacaaataccgtcacggaaatcaatgctcagtattatcaacaagaatcagccaagttgaggcagcagattcaaatgctacagaattctagcaggcatctaatgggagattcgttgagttccttgacagtgaaggagttaaagcagctagagaatagacttgaacgagggattactagaatcagatcaaagaagcacgaaatgctgctagctgaaattgaatattttcagaaaagggaagttgagctggaaaatgaaagtgtatgtctc

SEQ ID NO: 4709 - DNA, 279 bp, Gossypium hirsutum
  Clone ID: LIB3083-099-Q1-L1-G8
ttaacatctatcaaaagctttatgaggctcctgatccttatcctgctcttgcttcaatttctgagcaagatctaaaaatctctgaattggaatctgagaaccggaagatgaaagttgagcttgaagagttcagaacagaatcaatgcacttaaaaaatcagcaggcaacgataagaagacttgaagagcggaatagacaattagagcagcagatggaggaaaaagtgaaagaaattgtggagatgaagcagcgcagtttagcagaagaaaaccagaaaa

SEQ ID NO: 4710 - DNA, 278 bp, Gossypium hirsutum
  Clone ID: LIB3083-099-Q1-L1-G9
ggcgaatctcagagaacttttatatacataaaggatgctattgaagctgttctcttgatgattgaaaatccagatagggccaatggccatattttcaatgtgggtaacccgaacaatgaagtcacagttaggcaacttgctgaaatgatgactaaggtctatgccaaggttagtggagaaactgtgctggagtctccaacagttgatgtcagctccaaggaattttatggtgagggttatgatgatagtgacaagagaattccagacatgaccataat

SEQ ID NO: 4711 - DNA, 276 bp, Gossypium hirsutum
  Clone ID: LIB3083-099-Q1-L1-H1
gatttaactcagatccatctgtatcgggtcttctaaattcgagatctttacttttctcgagtaaaggaagaaagaggaagggagagatgagagagattattagcgtccacattggccaagctgggattcaggttgggaattcatgctgggagctttactgtcttgaacatgaaatccaccctgatggaacaatgccgagcgacacctctatgggcgtcgcacacgatgctttcaacactttcttcagcgaaacgggttcgggaaagcatgtgccta

SEQ ID NO: 4712 - DNA, 278 bp, Gossypium hirsutum
  Clone ID: LIB3083-099-Q1-L1-H10
gtcactcccaagtacagtttgaagcctcttgtgccaaggttatctgaactccttggagtcgaggttaaaatggcaaatgactgtattggtgaagaagttgagaaaatggtggctgcattaccagatggcggtgtattgctgcttgagaatgtgaggttctacaaggaggaagagaagaatgatcctgaattcgcaaagaagctagcttctctcgctgatctctatgtttatgatgcatttggcactgagcacagagcccatgcttgcacagagggagt

SEQ ID NO: 4713 - DNA, 159 bp, Gossypium hirsutum
  Clone ID: LIB3083-099-Q1-L1-H11
ctcgagtgttttttattttttgaataattatcatttaaaaaatttatgttctgtatgaagattgaattttgagtttgtcttgttgatttcatttatttttgttttgaaattttctttgttatctcttatttctcaattgtaattgtgaattttgtggcc

SEQ ID NO: 4714 - DNA, 282 bp, Gossypium hirsutum
  Clone ID: LIB3083-099-Q1-L1-H12
attttcccaataaataatgaaggaattttatatttttatcaataatttattatctcaaacccagacaaaaaccatggactagatccactctctggttccatttttacaatctaatctcccaccttcaatttcgtgcaaaatcaaaatccctaatttcatccttttttttttgcccctttcgatttcttcgatttcatgggcaccatatcagatcccatggctaccaaatttgatttctttcgtcccatgctataaatttgtttcatttatattaggattttg

SEQ ID NO: 4715 - DNA, 179 bp, Gossypium hirsutum
  Clone ID: LIB3083-099-Q1-L1-H2
tcgtgtcttcttctgttgctctgaacttatggtctctatttgaggagcaagttttgaggttgcggtctaaaaagcgaaaatggtgtaaatctggtgcattgacgctgcttatgttgtcagtccttgccggccgggaatcacgattggttgctgatcaactaccaccgctgttgctgata

SEQ ID NO: 4716 - DNA, 285 bp, Gossypium hirsutum
  Clone ID: LIB3083-099-Q1-L1-H3
tcgtggttagtacaagccaaaaatgtctactgctacattgctctctttgattagtctttcttactaatcaaaggatgagttacatgttattccctaaatcactgaagccttggtttgacacgccgaccattaacatcagaaccatccaacgatccttctttccgatatccacaagaaataacagaatgctccccgattttcgcaacatattgcagcagttcagtaagaacacccgggcagctttccttcaaatactcaaatccatctgtttgcatcacagctttt

SEQ ID NO: 4717 - DNA, 281 bp, Gossypium hirsutum
  Clone ID: LIB3083-099-Q1-L1-H4
tcgagttttttttttttttttgttggttcccttgcctgaagtttacttgttagctaaatcctgcagtaaccaaaactatgagtagaggtgggagctacggaggcggccaaagttccttgggctacctctttggtgatgatgagcagcaaagtgcaccaactgtggcaccacctatccagccctcatatgggatagatgttaccgcagagatgcccccagctcccaataaatcaagttcaaagaaccagaaagagaaaaacttcagcaacaccaacaattac

SEQ ID NO: 4718 - DNA, 283 bp, Gossypium hirsutum
  Clone ID: LIB3083-099-Q1-L1-H5
tgagacttcatcctgataagaaccctggtgatgaggaagccaaagagaaatttcagcagttgcaaaaggtcatatcgattctcggtgacgaagagaaacgggctgtctatgaccaaacaggttgcgttgatgacactgatcttgctggggatgttgttgagaatttgaaaagctttttcaggactatgtacaaaaaggtcaccgatgctgatattgaagagtttgaagcaaattatagggggtctgattcagagaagaaagatttgattgatctttacaggaa

SEQ ID NO: 4719 - DNA, 284 bp, Gossypium hirsutum
  Clone ID: LIB3083-099-Q1-L1-H6
gtataatggagaaagaaaatgagcatgcagatggcaagatgcaggcactggtggaagaattaagtattaccaaagaaatgctccaggcttctgagaaagaaattgctagtttgaagtttgagaagaagcaatcttctgaaaaaattcaaaagttgcagggtcagcttgatacggctcaaagagagataatcacatggaaatccaaactgaatacagagagaagagaggtctccaagctgcaggaaagaattgcaatgttgaagaatagtttatcagacagggat

SEQ ID NO: 4720 - DNA, 277 bp, Gossypium hirsutum
  Clone ID: LIB3083-099-Q1-L1-H8
cagaaacacgagagaaaagaatggggacggaaaaaggaacagcttatttattatcctcttttttcttctccattatcttaactattgtctgtgaacggaccgtcaaagctcagtctttgccgccggcgaaacacgatgggttcttgtacaccaaccaccgagttgactcggacacgattatgatcgaagctttcttcgatccggtctgtccccgatagcagagacgcatggcctcctctcaagcaagctattcatcactatggttctcgcgtttcgc

SEQ ID NO: 4721 - DNA, 276 bp, Gossypium hirsutum
  Clone ID: LIB3083-099-Q1-L1-H9
ccgttgtcttgtttggtggatcgtcttcagctgcttttcaggattgatttcatcggcagtagttagattggattcaattgaaatatacaacacgcacgagtggataacagaaccgacggtttatttcgtctgcacaggagaaaatatgacggttttgccagatgtcaccaaagcagatactgtctatactttcaagggtgaagaatcttggcagcctcttacagaactcaaaagcaagaaatgcaagcggtgtggattctacgagaaggacacatt

SEQ ID NO: 4722 - DNA, 370 bp, Gossypium hirsutum
  Clone ID: LIB3083-100-Q1-L1-A1
gttcgccaagctccaaacttcgcatccatggcggagaagagagttccgtctccgaagatcagaaacgccaagtaatcatcgatgatgatgacagcaaagacatcaggcctcgtcgattgtccttctctccaacgtcgtcgttgacatcgcctcctaagcctgagaagttcattcacttaattcctcttctcactctcctttgcttcctcattctttatctaaattctcacagtccttcacaatctgatttggctgaatttaatggatttaagcatccctcaaagcattcagactcaactgcaatcggccatgttgaccattttattgattctcggagaggcgatgttttggggattcgaagcctaagaac

SEQ ID NO: 4723 - DNA, 399 bp, Gossypium hirsutum
  Clone ID: LIB3083-100-Q1-L1-A10
gaacactgttgatatcgaagataagggaggaatacccagataggatgatgctgactttctcagtcttcccatctcctaaggtctctgatacagttgtggagccttacaatgccactttgtctgttcaccaattggttgaaaatgctgatgagtgtatggttctggacaatgaggccttgtatgacatctgtttccgcacacttaagctaaccactcccagctttggtgatttgaaccatttgatatctgcaacaatgtctggagttacatgctgcttgcgattccctggtcagctcaactccgatctcaggaaacttgccgtgaatctcatcccctttcctcgtcttcactttttcatggtgggttttgctccactcacttctagggggtctcaacagt

SEQ ID NO: 4724 - DNA, 363 bp, Gossypium hirsutum
  Clone ID: LIB3083-100-Q1-L1-A11
ccttactttataacccggatctcggccctttttggctggggttggcccgagacaggatggcttctggagagggtcccactaaagctttggactatgcgattcgagcagcgaagtctttcgagagatgcgccgtggaaggcgagcccagtttggatctggcgatgagcttgcacgtgctggcggcgatttattgcagcttggggaggttcgatgaggcggttccggtgctggagcaggcgattcaagtaccggatgtggaacggggcccggatcacgcgttggctgccttttcggggcatatgcagctgggggatacgtactcaatgctgggtcaagcggagaagtcaattgggtgctatgagc

SEQ ID NO: 4725 - DNA, 182 bp, Gossypium hirsutum
  Clone ID: LIB3083-100-Q1-L1-A12
aaaaaaggtcttgtttgaagcttttatgggtttagtctgtgttttcccccccttttttttgtaatgttttatgatacttatttttatccactggtattaaggttcaagttgaacttggaagttttgttagctaaatattatgtgatttcgatatttgttaagcttaattcttggttcattac

SEQ ID NO: 4726 - DNA, 368 bp, Gossypium hirsutum
  Clone ID: LIB3083-100-Q1-L1-A2
gcagtagatgcagatggtaatgcgtacgtgaccgatgtgaaaggcagtaagatttggaaggtaggtgtggatggtgagttattgtctaccctcacaaacccactcttcactccaaaagagtggtacaaaagcttgcttggattaaacggaattgtctaccacccagatggctacttaattgtaattcatactctcagcggaaatttgtttaagattgatctagccaagggagatgaagtgaagttgattgaagttgccggtggtccactagcatttggcgatggtttagagctgatttctcctactaagcttgtagttgccgccggaaacccttctgggagattggtggagagcaccgatggatggga

SEQ ID NO: 4727 - DNA, 375 bp, Gossypium hirsutum
  Clone ID: LIB3083-100-Q1-L1-A3
gagtaatgaaaaatcaaatggtgatgaaagggtagaagaacatgagggtcctgaagtggcagcggctgggagttcacaaagcagtcctggaattgccgttgaacaaagagcggctgctaaaattcagaaggcatttcggtcttacagggcaagaaaagcagtccgccggctgagagatgcggggagattcaagaacatattgatacagggacatacagtgaagaaacaaacaagaagcacgctaagctatttacattcatggtgcaatgtccagtctcaaatccgagctcggagaatatgtatggttacagaaggcaggcttaagcaaaagaaaatggaaaaccagatgaagcttgaggctaaactccatgaact

SEQ ID NO: 4728 - DNA, 398 bp, Gossypium hirsutum
  Clone ID: LIB3083-100-Q1-L1-A4
gaaacatttatgttttgggtgtgtctctattcctcgggttatcgattcctcaatactttgtaatgaacacaaccggtgacggtcatggacccgtgagaacaaatgccggatggtttaacagtatattgaacaccttcttttcatcgcctgcaaccgtggccatcatcgttgggaccgtgctcgataacacattagaagcaaaacaggtggacgatagaggaatcccatggtggaaaccgttccaacacagcaaaggcgattctcgaaccgaggaattctacagctatccgttaagaataaatgaatatattccgacccggtttctctaaagcattattactaaattgtttttatattagctacaaagtacagggcatattttgtgttccatatgcatg

SEQ ID NO: 4729 - DNA, 377 bp, Gossypium hirsutum
  Clone ID: LIB3083-100-Q1-L1-A5
gacagatgaggatacttgtatggatggatttgctgggaacaacatgaatggatatgcaaagacaatggcgaggaaacgtatcattaaagttgcacatttgacaagcaatgccttggctctcattaataattatgcctcaactcaaggttactatttaccttaatttctcatgaaaacttcaaagagaaaaaagatcaatatgtatataggtatatcttaggttcgaattcgggattggtgtcaaccaaagattagatatcaactgtgactcggtcgactaggctgcttttatgtttattttgctttgggtgttgtatgcttatcatcaaacaaacagggcaattagaaaaatgttgtctcaaactaagatggtagga

SEQ ID NO: 4730 - DNA, 405 bp, Gossypium hirsutum
  Clone ID: LIB3083-100-Q1-L1-A6
gagtaatgtaaaatcaaatggtgatgaaagggtagaagaacatgagggtcctgaagtggcagcggctgggagttcacaaagcagtcctggaattgccgttgaacaaagagcggctgctaaaattcagaaggcatttcggtcttacagggcaagaaaagcagtccgccggctgagagatgcggggagattcaagaacatattgatacagggacatacagtgaagaaacaaacaagaagcacgctaagctatttacattcatggtgcaatgtccagtctcaaatccgagctcggagaatatgtatggttacagaaggcaggcttaagcaaaagaaaatggaaaaccagatgaagcttgaggctaaactccatgaactggaggtagaatggtgtggtgggtctgaaac

SEQ ID NO: 4731 - DNA, 360 bp, Gossypium hirsutum
  Clone ID: LIB3083-100-Q1-L1-A7
ccttactcgataacccggatctcggcccttttttgctcaagttggcccgagacaccattgcttctggagagggtcccactaaagctttggactatgcgattcgagcagcgaagtctttcgagagatgcgccgtggaaggcgagcccagtttggatctggcgatgagcttgcacgtgctggcggcgatttattgcagcttggggaggttcgatgaggcggttccggtgctggagcaggcgattcaagtaccggatgtggaacggggcccggatcacgcgttggctgccttttcggggcatatgcagctgggggatacgtactcaatgctgggtcaagcggagaagtcaattgggtgctatg

SEQ ID NO: 4732 - DNA, 360 bp, Gossypium hirsutum
  Clone ID: LIB3083-100-Q1-L1-A8
ggaaatcttgcatatccaaggaggccaatgtgggaaccagatcggggctaagttctgggaagtcatatgcgatgagcatggaatcgacaacactggaaagtataacggtgactccgatctccagctggagcgtatcaatgtctactacaatgaagccagtggcggtaggtatgtccctcgcgctgttctcatggatcttgaacctggcactatggactccgtcagatccggtcttttcggccagatctttcgtcccgataactttgtcttcggtcagtctggtgctggcaacaactgggccaagggtcattataccgagggagctgagctcattgattctgttctagacgttgtcagaaa

SEQ ID NO: 4733 - DNA, 85 bp, Gossypium hirsutum
  Clone ID: LIB3083-100-Q1-L1-A9
cagcttcttatcaatggacaatttgttgatgctgcatcaggaaaaagcttccctacagttgatcctaggacaggtgatgtaattg

SEQ ID NO: 4734 - DNA, 374 bp, Gossypium hirsutum
  Clone ID: LIB3083-100-Q1-L1-B1
ggattgcatgatatagtcaatctactgaagagactgtcaggtgatatacatgaggaggtcgatagccacaatcgcatgctggatcggatgggaaatgatatggatgcatctaggggaatactctcaggaactatggacaagtttaagatggtatttgagaccaaatcaagcagaagaatgtttacactggtggcatcttttgtggttgttttccttatcatatactatcttactaagtaactggtctacggtgtttttgatacagctgagaactttatgtgacaatttgtaagaccctttttatatatggttactgaaatgtgcttccgacatgtaagatattttcgtatgtttatatgaagatttcttggtat

SEQ ID NO: 4735 - DNA, 188 bp, Gossypium hirsutum
  Clone ID: LIB3083-100-Q1-L1-B10
ggcaacagctgttgaacatatctacttaaatgcggaaacctaactagtctatttcaaataagacgatttgggatgtgatattaatgctagttattaattaaatgaaactaccatgcatgttcatgatgaatcaatgtcacgtgagtagttaaaagagtcgaaattctgaatgatggaagtattatctc

SEQ ID NO: 4736 - DNA, 298 bp, Gossypium hirsutum
  Clone ID: LIB3083-100-Q1-L1-B11
agagcaatagcaatttgtaaggtaaattcagggaaagtccgaaatgaggatcaatgcctcaaccaccacaaaaaaaacacattgttaaatttggcttattacatcgggaaattttcaacagacattaggttccaaggaaagatctcaactacaaaaattaaagtttcccagaaggttgtttctgtttcacctttaattcctgcttttcaacttctaattctttttcaccgtcgcagccttgatgatatcaacaaactcgggctttagagaagctccaccaaccaaaaagccatcaaca

SEQ ID NO: 4737 - DNA, 389 bp, Gossypium hirsutum
  Clone ID: LIB3083-100-Q1-L1-B2
cccgatttatatcccaaccactcccaccctcctccttcgttaaagccaaaacataactatgacaacccaatatcacatgttctaagtgactgagttttctcatggcaaacaaggatttagaatttgtgaaagcagctgcttgggcatggtaccagcgtggtagttccggttcccctatggccataccagaatttgatgtcatacggactcgacgagctcctggtcctggcccttcacgttacaagttagaagccatgagaaacaacaacaagaacagcatgggatcttccaccaccaccacccataattctctactggatccttgggaagtccaaagcatttcaaagagacttgatcatcttattcagctgagtgggatccaattttta

SEQ ID NO: 4738 - DNA, 375 bp, Gossypium hirsutum
  unsure (1)..(375): unsure at all n locations; Clone ID: LIB3083-100-Q1-L1-B3
gcggcacgagtaacttttccatgnccaccttctacggtggtgcgtgatgtctaccggcacatatggggggaggcttgtggttatggaaancctgtacagtcaagggtatggaacgagcacagcagctttgagcactgcacttttcaacaatggcttgagctgcggtgcctgctacgagctccggtgcaacaatgatcctcaatggtgcattagtcgaaccataaccgtgacagccaccaacttttgtccacctaactatgctttatctagtgacaatggcgggtggtgcaatcccccacgagaacactttgatttggccgaaccggcattcttgcggatagcagaatatcgagctggaatcgtccctgttatgtt

SEQ ID NO: 4739 - DNA, 371 bp, Gossypium hirsutum
  Clone ID: LIB3083-100-Q1-L1-B4
tggatgcacagagtattgcatgatataaaaccattatacaagtaccttcatgcaactcatcacatctacaacaagcagaatacactttctccatttgctggtttggcttttcacccagtggacggaatactgcaggcagtacctcatgtgatagcactcttcattataccaactcattttacaacacatgtcggactgctgttcctcgaggccatctggacggcaaacattcatgattgcatccatggcaaactatggcctgtgatgggtgctgggtaccacactattcaccacactacgtatcgccataactatggccattacaccatttggatggattggatgcttggaaccctacgtgaccctagtga

SEQ ID NO: 4740 - DNA, 372 bp, Gossypium hirsutum
  unsure (1)..(372): unsure at all n locations; Clone ID: LIB3083-100-Q1-L1-B5
cggaccaagccttactttcttttttcgccgagggaaaatcgggcatggccgagactgagagccaagcacttcccacgaaacgacatcaccatcaccaaaacgacgattctgaaggacaagaggatgatgatgaagaagaagaagaagaggacgggttggagaatgaagaggaagaagaaggagcaagtcgagtcagtgagtcacagggtgctggcgccgcgcctncgagtgatgatgctggatggaaacactctcanatggataccctacccaatgatgatcctcccgatgggttgcaagtaaattctacttcggaatccaaggaaggatctgaatttaaggagaaagttaacatagctgacccaggaagtt

SEQ ID NO: 4741 - DNA, 391 bp, Gossypium hirsutum
  Clone ID: LIB3083-100-Q1-L1-B6
ctatcctggttgtactaacatggcatattcaaaagctattcaagatggtgtagatgttcttgactgtcctgttcaaatgacaaaggatggaatacctatttgcttgggctctataaatcttatagagagcaccgacattgtccgaacaggctttagcaatcttacaacaactgtgccagagattatgcagagcagtggaatatttacctacaacctgtcatggagtgatattaaaagtttgaaacctgtaatatcaagcccacagtcacagtacaaattgtttcgaaatccaaagttccaaaatgctgggaagtacttacagttatctgaatttttaagaatggcaaacaccactagctctctaatggtgtcttaatcagcatagagaatg

SEQ ID NO: 4742 - DNA, 394 bp, Gossypium hirsutum
  Clone ID: LIB3083-100-Q1-L1-B7
taacagtccttcaaccccgactgggcctcgggcgtggatcctgctagtacttattccaacctcagcaccaagtccaaatcgggctccatcacaaaatcgagtgcttgcattatgaaatactgcagcactgtcaactccatgtaagaaaatttcagcaacttcatgattttcagtgacaatgcaatcagtgtgagaacttccatgttgatgtatatggtcaatagcagcctgcacatcatccacaatttcaactgtgcaggccattgaactgtactcatgatgaaatgaatgtgcctcaggaatatttaacaaggaactcgctcttggtccaccataaagggtcacaccttcatgttggagttccttggtaagtgtattgagcaaaccattacta

SEQ ID NO: 4743 - DNA, 338 bp, Gossypium hirsutum
  Clone ID: LIB3083-100-Q1-L1-B8
aaacgtgaagcttcaatcaagttatatatacttctggatttgagcccaaggcaaagcaaaatacatggaatttattcttgttcctctcttacgtcggggggcttcatcagctatcgtgcatacaatttctctgtttttaacaaataccgcacactgtaaaccaaaactataatctaaaagagggaaagaactttactttacaggggaagaattgaagaattcatgcttcggtaacgtttggatgaagagaaaaaccttccaccacatgagaacgatcttttcattgtaactgggcttaaatgaagatgctgaaatatggatgaattccccattaccct

SEQ ID NO: 4744 - DNA, 287 bp, Gossypium hirsutum
  Clone ID: LIB3083-100-Q1-L1-B9
gtttaatatctgcacaggattcactggtggagaccgcgaaagagcaggccagttccattagcaatataattgcacaggccacaaagtaggttatgaccgagagtggttgcggattgccatttgtattggggttggttttggtgtctcatctgttgtgagaactctttctggattttagtttgagaacttaattgtatgtttatgaatgtagattcgggagccttttgtagaaatgatcacatataatcatcatattaattatgtatacagtcatgcatttgggtttc

SEQ ID NO: 4745 - DNA, 374 bp, Gossypium hirsutum
  Clone ID: LIB3083-100-Q1-L1-C1
atttgagctagttgtggcctgattctggcggagatggtttggtttcaatgaagtttaaggatgttgataaagatgctggcattgattttggtgattgtatggaaaagggagcggagatggagaattcaggcgagcttgataataggaatacctcaactttggatttgggagtagggcacggtactactgctggtaatgaaggttctaccattgatgaaatgaagttaagtgcgaagtcagttaatgagggggagaagaagaaggtagtatggtggaaagttcctttcgagctcttgagatactgtgttttaaaggttagccctgtttggtccttctctgtagcggcggccgtgatgggttttgttatattggga

SEQ ID NO: 4746 - DNA, 381 bp, Gossypium hirsutum
  Clone ID: LIB3083-100-Q1-L1-C10
gcatcttttatgagagatttggaatcaagagaagacgcagatctttgtgaaaacccttactggtaagaccatcacccttgaggtagaaagttctgatactatcgataatgtcaaggctaaaatccaagacaaagaagggattcctcctgaccaacaaaggcttatctttgccggaaaacaacttgaggatggccgaactcttgctgactacaatatccaaaaggagtccaccctccacctagtgcttcgtctaaggggtggcatgcagatattcgtgaaaactcttactggcaagaccatcaccctcgaggtggaaagttctgatacaattgataatgtcaaggccaagatccaagacaaggaagggatcccaccagacca

SEQ ID NO: 4747 - DNA, 328 bp, Gossypium hirsutum
  Clone ID: LIB3083-100-Q1-L1-C11
agaatggctgtttctctctaaataactgtcatgattgtggcatcctggccactcaaggtgggaagcataagctatgctcaacattgcactgatctctacctttaaccatggccaaagcagaaagtatcagtaagaaaaaaatggaaataactaatatcacagaataagcgccattgcgcaaagacaagttccccaggacggcatagaacgactatgcatcaggtgcagaggaccaatacactcataaagcaaatctaaatgcacggtctagaaaactgctgctaccactcattattactggagagggcaagatggacatgaccaccac

SEQ ID NO: 4748 - DNA, 406 bp, Gossypium hirsutum
  Clone ID: LIB3083-100-Q1-L1-C12
aattttcatttaagtcacttaactatttgggagtttttatttaagtcactaggttgttaagtttttcttttttttttaaagtttgatgatcgatatgatggatcagtccctgttaatgagtagaagaacataatttagatccaggtcgatttgatggccaatgttagagaccagaaaagaaaattgtttggaatttagttcacaaatttttaaatttgtgatgttcaaagttgtttcatgaaaaaatttgtaacaactcgcctgacgaagtctctgtatctgattattgtttggtgtgttattggtaaaataaggatagatatgagtaagtaaagtgtttgttttgactaaatataggattctgtgtgatgcatcatttgacgaactctttgttttagcgtgtttt

SEQ ID NO: 4749 - DNA, 391 bp, Gossypium hirsutum
  unsure (1)..(391): unsure at all n locations; Clone ID: LIB3083-100-Q1-L1-C2
ctccagattcgcttcccataatatatgaaagaggtctatttggcatgtatcatgattggtgtgaatcgtttagcacctatccaaggtcttacgatcttctccatgccgaccatctattctcaaagcttaacaagaggtgcaatttggtggccattgttgcagaggttgacagaatactaagaccagaagggaaacttattgttcgagacaacgttgagaccattaacgagctcgagaatatgttgaagtctatgcagtgggaagtgcgtatgacatactcgaaggacaaggaaggcctgctctgcgtccagaaatccatgtggcgacctaaggaggtagagacgatcaaatatgccattgcttangcaaatgctatctgttaattgatgat

SEQ ID NO: 4750 - DNA, 367 bp, Gossypium hirsutum
  Clone ID: LIB3083-100-Q1-L1-C3
gtgatctttacgactcgttgacaatcactcaagctgctattttctgcactacaaaacgaatggtcgattgtctaactgaaaagatgcgtaccagtatctttactgcatcctcaatgcatggagatatgccttagaaggaaagagatgcgattatcgctgaattttgggatggtgcaacccgtgttcttatcactacagatgtttgggccaggggacttgatgttgatcacgtgtctctggtgatcaattacgacctgccgaacgatctagagctatacattcataggattggacggtctggtcgattccgacgaaagggtgttgctattaattttgcgaaaagcgacgacatcgatattcttagaga

SEQ ID NO: 4751 - DNA, 406 bp, Gossypium hirsutum
  Clone ID: LIB3083-100-Q1-L1-C4
aagaacttatcttactttgttgaatggatcccgaacaatgtgaagtccactgtttgtgacatccctccaatcggcttaaagatggcatccacatttattgggaactctacttcaatccaagagatgttcaggagggtgagtgaacaattcactgccatgttccgtaggaaagctttcttgcattggtatactggagaagggatggatgagatggagttcacagaagcggagagtaacatgaatgacttggtttctgagtaccaacaataccaggatgcaactgcagatgatgaagagtacgaggaagaggaggaatacgaggcagaggcttaaaatctaatggaataatttggatgttttttgttgtgttttggattgggctagtggagtgtgctggtgcaatttc

SEQ ID NO: 4752 - DNA, 297 bp, Gossypium hirsutum
  Clone ID: LIB3083-100-Q1-L1-C5
caggcactgaaagaggacttggctgtgaaaaattgaacttcaagctatttaggactctttaaattttctagtttgtgtcatagtgctgggaaaatggcgaatgctatatcgatatcgccatattttagaccttcagatactagatcaatgggggtacttaatgttcttggtgggagagtattaatggagaactctttagggaaacttaggtgcgggtcttcgagtccgagccaaaggtctaatatgcctcattttagatgttccaccaactcccatagcgttagtccgtatcaaaat

SEQ ID NO: 4753 - DNA, 344 bp, Gossypium hirsutum
  Clone ID: LIB3083-100-Q1-L1-C6
cattgaggaggttgaggactgcttgtgagagagcaaagaggactctttcatcgacagctcaaactaccatcgagatcgattcattgtacgagggtattgacttttacaccacgataactcgtgcaaggtttgaggagctcaacatggatctttttaggaagtgtatggagccagttgagaagtgtttgagggatgctaagatggataagagcagtgtccatgatgttgttcttgttggtggttccactcgtattcctaaagtgcagcagttgttgcaagacttcttcaacgggaaggagctctgcaagagcattaatcctgatgaggcccgtgcttatggtgct

SEQ ID NO: 4754 - DNA, 394 bp, Gossypium hirsutum
  Clone ID: LIB3083-100-Q1-L1-C7
ctttcacctcttaaatcagagctttggaaggacatgggttggcaagggccagatccttccacagattttcggggtggggggttcatatcattggagagtctcatattttttgctaagaaatatccggaatcttttcaaaggttgttgcacaaacaagatggaaaccgagctgattgggaatatccatttgctgtagctggtatcaacatttcatttatgttaacacagatgttggatctgcaatcaggaaaaccatcttccctggctggaattcgattcttaaaactactgggggaagacgaaatggcattcgatgatctttattgtgtagcctttcagatgatggatgcacaatggcttgtgaaacgggcttcgtacatggaattcaacgatg

SEQ ID NO: 4755 - DNA, 372 bp, Gossypium hirsutum
  Clone ID: LIB3083-100-Q1-L1-C8
gaaaggttggatcagaagtagctcggcgagccaaggggcttggcatgcatgttattgcccacgatccttatgcctcagctgatcgagctcgtgctataggtgtggagctggtgaactttgaggaagccatatccactgcagattttatttctctgcacatgcctctcaccgctgctactaataaaatgctcaatgatgagacatttgctaagatgaagaaaggtgttcgcattgtcaatgttgctcgtgggggagtgattgatgaagaggctcttgtgagggcattggatgctggaattgtagctcaggctgctcttgatgtcttcactgaggagccaccgaaacaggacagcaaattggtgcagcacgaga

SEQ ID NO: 4756 - DNA, 391 bp, Gossypium hirsutum
  Clone ID: LIB3083-100-Q1-L1-C9
tctatggttacattgtgctcagtggtggttcaactatgtttcctggtattgctgaccgaatgagcaaggagatcactgcccttgctcctagcagcatgaagattaaggtagttgcaccaccagagagaaagtacagtgtctggattggaggatctatcttggcatcactcagcaccttccagcagatgtggatttccaagggcgagtatgatgagtccggtccatccattgtccacaggaagtgcttctaggttttataagttctttgatggtgagttacattttcatttacttggctttttcgtgtcctgtgtcaaaattgaaatcaaggtccggtttatatggggaaagtgttgaaggtgggatcacttgaggaggatgtactttgatc

SEQ ID NO: 4757 - DNA, 397 bp, Gossypium hirsutum
  Clone ID: LIB3083-100-Q1-L1-D1
cttttctccacattctaatcaatgttctttttatgaaaaaaactaatcttgttattgagttctgattactgggttgttgatactgaagcggaatcaataaaaagatacaaatttcctctcttttaagcaattttgaaatctggttttcttcaaaaagagaaaaacaatatggttacagttaatatagggatgcttcattacattctagaccatgtatatggtgcatttgtgcatagaacaaagattagcccaccgttcttctcaagagggtggggtggaacaaagcttgagcttctggagagattgataagccagttgttccctgaagttgaaggccaaaactggcctccaagcttgattcaacccatttggagaactgtttgggagacccaaaatg

SEQ ID NO: 4758 - DNA, 399 bp, Gossypium hirsutum
  unsure (1)..(399): unsure at all n locations; Clone ID: LIB3083-100-Q1-L1-D10
ggaggcctttagcctgttcgacaaggatggagatggttgcattactaccaaggagttgggaactgtgatgcgatcacttgggcagaaccccactgaggcagaactgcaagatatgattaatgaagtcgatgctgatggaaatgggaccattgattttcctgaattccttaacctgatggcaagaaaaatgaaggatacagactctgaggaggagcttaaagaggcattcagggtgtttgacaaggatcagaatgggttcatttctgcagccgagctgcgccatgtcatgacaaaccttggtgaaaagcttacagatgaggaagtcgacgagatgatccgcgaagccgatgttgatggtgatgggcaaatcaactacgnaggagtcgtcaaagtcatgat

SEQ ID NO: 4759 - DNA, 368 bp, Gossypium hirsutum
  Clone ID: LIB3083-100-Q1-L1-D11
aaccaaataatatatcaacaatacaaataaggggagatgaacagcctcattaatatttaattatgcatttaaaaactagctaaataaatgtataaaacaacactgagatccttgaacttagtccttaggcttaagtctatcctgtactactatgggcaaacagcaaatcactaattacaactactaattaaattaaaataccaaaagataataatagtttagatgaaaaccatgaagaatttctccatggccatgccagatgaaaccagttttgaatgaacgaaagaaaatcaaacgattttcagttaaccagcatgtgatcgaatcctgcaccggcctgaagcgttggcactcgattcactccaaca

SEQ ID NO: 4760 - DNA, 390 bp, Gossypium hirsutum
  Clone ID: LIB3083-100-Q1-L1-D12
gtgagttgttgattttgcttgaggacaagtaaatgcttaaatgtggggatatttgataaaccataatgtatacatattttttaccccatgtttaacatatttatggatgatttttccttagtttcattgaattcgatgctcctaatcctttaaattcatgttttatacttaggtaaacataagaaggcaaaaagagtaataaatgggccaaaaacagacaaaatgggcctaattcaatattttacacgactcaagcacttccacacgggtaaaccacacgcctgtgtgtcctggccgtgtcgactaaaaaccaagttagaattgcacacggcctgaggaccttcacacgggcgtggcatatggtcgtgtccctgtcgagcccaagtcaaa

SEQ ID NO: 4761 - DNA, 387 bp, Gossypium hirsutum
  Clone ID: LIB3083-100-Q1-L1-D2
gaaggctttgctttgccggtttccgctgtcttcttatgctctggcatgttggtctctttaattgctctcttggtgcattgaattcaaagcttttcaagactttatgacattggctacccttaatttcactctcactggtgatgaggggagtagcctctaatcttctccgagataatatttgggtgttatcaattttcaatttctctaaagttttagatatctctatatatatcatgttacattagtgacataaatttgattttgtaatgtaattggtgtgattttcttatatatcatagatatataagggtattgatcctatttcttttgtattcatattatgcagtttgctttgctttgccttttgtaataataatttttttttgg

SEQ ID NO: 4762 - DNA, 398 bp, Gossypium hirsutum
  Clone ID: LIB3083-100-Q1-L1-D3
ggttgaccggtgtcagctcaatgggacactacgctgattggggaagcaacaaatacaaaggaagccagaatgggtatgcagtggcttacaccgaaagtgaatgttataaccaaatccgcaagcccacccataggatgatcaaaccccagaaagcttatgggatggctgaaacctgggatgaggagaatgctcaatcttacgccacctacaagtcccaaactggacctccaatgttcaaaactcaagttcatggtccttctcggaatggcttcggctcccactccaatactgcaactgcccacatgcaatcctatggctttagtagccccggaaaacgcgaaggtcgtgtttatggatatgggggccccaccgcagccgctagacaccaaaaaaagtat

SEQ ID NO: 4763 - DNA, 377 bp, Gossypium hirsutum
  unsure (1)..(377): unsure at all n locations; Clone ID: LIB3083-100-Q1-L1-D4
cgaagattgtcctttggggataaccctttaccaggagtgccggaatgttgctcgtcgcccccgccgacgtcgccgagtggacgtacagacgattcggttgtgtggatgacggtacggaggcgaaccacctagtgaatagaaccaagttcaattccatgttttgaaacctgaactcatttcaaaatacaaaaagcaaaacggaagaggaattaccgatcaaagacagcaaattctgagacaagagacttgtaaacggcaaccatttcagggtcaaatccattcatgacattctgagacatagtggtagataggtccatggagtaagcttgttgggcgaagccattcatggggggagggatggcggangtgtcattaga

SEQ ID NO: 4764 - DNA, 358 bp, Gossypium hirsutum
  Clone ID: LIB3083-100-Q1-L1-D5
ttcttccttttccaactttaactcattactgtctcactaatgatcggtagccacaccgtctcgtcagcggctcgacatttattccacacacaaacaacctcatcagagctgccacaattggcttcaaaatacgaaaagcacgaagagtctgaatacaaacagccaaaatatcatgaagagtacccaaaacatgagaagcctgaaatgtacaaggaggaaaaacaaaaaccctgcaaacatcatgaagagtaccacgagtcacgcgaatcgaaggagcacgaagagtacgataaagaaaaacccgatttcccaaatgggaaaagcctaagagacgagaacacgagtcgatatcgaaata

SEQ ID NO: 4765 - DNA, 339 bp, Gossypium hirsutum
  Clone ID: LIB3083-100-Q1-L1-D6
cgccctttatgttttcagtgaggtgaagaaaaatgtcttgctgtggtggaaactgcggttgcggctccggttgcaagtgcggcagcggctgcggcggttgcaagatgtaccctgagatgaactttgctgagcaaaccacaaccgggacacttgttcttggcgtggcaccccggaaagtgcactttgatggagctgaaatggaaactggggctgaaaatggctgcaaatgtggagataactgcacttgcaacccttgcaattgtaaatgagaaaaaaaagctaagcatattatggaagctgatctaaataatatatgatgtatttgggtttttactatta

SEQ ID NO: 4766 - DNA, 390 bp, Gossypium hirsutum
  Clone ID: LIB3083-100-Q1-L1-D7
ctagtctcgagttttttttttttttttttttttggttggttttttttcttacttggcttgtctctgcaaatgacagagcttttcttttaagctctgcttctctcaattgtttatatggcatctcaagccagtctcctccttcaaaagcagctcaaagatctttgtaagaatccggttgatggtttctcagccggattggttgacgagaacaatatctttgaatggagtgttacgattattggaccacccgatactctttatgaagggggattttttaatgccatcatgagctttccacctaattatccaaacagccctccagcggtgaaatttacgtcagaggtttggcatcctaatgtttacgcggatgggcgtggttgcatatcaatt

SEQ ID NO: 4767 - DNA, 387 bp, Gossypium hirsutum
  Clone ID: LIB3083-100-Q1-L1-D8
aattttgtttcaaatcagaacctgagtctcgccattgcgacaagtccatagagatgaagtttttcatctcagttttgtttctttttgtcctcttttcttatgcagctgcatatgatcctttggatccaaatggaaatgtaacaatcaaatgggatattgtgtcttggacgcctgatggctatgtggcagtggttacaatgaacaattttcaaatgtatcggcacatcatgagtcctggttggaccttggggtggacatgggctaagaaagaagtaatatggtccatggtaggggctcaaactactgagcaaggtgattgctcaaagttcaaaggaaatatacctcactgctgcaagaaaacccccacggttgtagacttgctccctg

SEQ ID NO: 4768 - DNA, 364 bp, Gossypium hirsutum
  Clone ID: LIB3083-100-Q1-L1-D9
gatttgctttcgcaagtacttgctggtggtggtgtcgggtggcatgaatcaacagaggaatcagattgtggatgctgttgttattgctaggattctcggcgctgctttggttgttcctgtcttgcaagtcaatatcatctggggtgatgagagtgaattttctgatatattcgatttgggtcatttcaagaaagttctagccgatgatgtacgtatactatcctcattgccttctacacttgtaatgacaaggccagtagaggagaaacgtactccacttcatgtctcacctcaatggattcgttcacggtatctcaagcggataaacaaggaaggagttttgcttttacgaggtctggattct

SEQ ID NO: 4769 - DNA, 400 bp, Gossypium hirsutum
  Clone ID: LIB3083-100-Q1-L1-E1
aaaccctataaattcctaaacttgcagtggctattaatgatctaagcaaagaacatttctccgagttccttccgtactcaacagtatatttagaagttgagaagttaaagaagtccctaggaataaccatttgattgcctttcatttttcattattccataatatcggtctccccgagttttccttgcaaagaaataagcaaccaaagaacacctagaagaagaatcttttctgttgtttatccatgcacttcatcatgttggctgttgaaagaaaaaccttttaatcatgagtgtcctatgaaatggaatatggattgtaggtgaattaatttcattttgtatgatgttgagtttattggggcttggcctttgtgttgactgtgatggcatgtataaaa

SEQ ID NO: 4770 - DNA, 397 bp, Gossypium hirsutum
  Clone ID: LIB3083-100-Q1-L1-E10
atgattttagtgatgatgaggagttacagtctccaattgatgaagtggacccttttgttttctttgtggatacagtcaaagttttgcaagtatcggatcctatgaggttccagaaccttacacagacactggattttcattatcaagctcttgcgaacggtgttgctcagcatgctgaacagaggagagcagagattggaaaggagaaaatggagaaggcatctgctgccactgttgcatcatgagttgagttttggattaaaatttgagtttcattcatttagaagtggtttgatgaaagtctcatttcatttacagcattcattggttcatatggtcgtagagttgattgaacctcataagggtgagggtcaagtgcacatagtttgtgattttg

SEQ ID NO: 4771 - DNA, 371 bp, Gossypium hirsutum
  Clone ID: LIB3083-100-Q1-L1-E11
cagggcactggaggaaaaaattgtgccttactgtgatggtattatgacacaacttctcaagaatttgtcgagcaaccagttgcatcgctctgtgaagcctcccatattttcatgctttggtgacattgcattggcagtgggagagtattttgaaaagtatctaatgtgggccatgtctgcacttcagagcgctgcagagttgtctacccatatagcaagtgatgatgaattggtagagtacacaaactcccttagaaacggaatcctggaggcatattccgggatttttcaagggtttaagaactcttccaaaacccagctgctgattacttatgcacctgacatccttcagtttttggatgcatatacat

SEQ ID NO: 4772 - DNA, 368 bp, Gossypium hirsutum
  Clone ID: LIB3083-100-Q1-L1-E12
atgtaaccttagctctcataaaagctaaaattcagttgcatcattaattataagtatagagtaagtaaaattctttcctaataaaagctcctaccacaagcaacaatatatttacatgcaaattatcattacatactaaatcccactctcttatttttataagagtaatacttagcactgcatattatacataccaaaggggtgtaactgttgaagtgattactttatgtagcctctgcaaatccaatttgcatgtttccatagtcgaaaaccgtatggaacttacccataaacacgtcgcccaagatccagagtggtccgcgaggaggcggtacatcgagagcaccgaatccgctaatgcattgagc

SEQ ID NO: 4773 - DNA, 387 bp, Gossypium hirsutum
  Clone ID: LIB3083-100-Q1-L1-E2
ctttcttcttcttcttattcctttattgctttttagaattttgcttaatcgaaaatgagagagtgcatttcgatccacatcggtcaggccggtatccaggtcggaaacgcttgctgggagctttactgtctcgagcatggaatccagcctgatggtcagatgccaagtgacaaaactgtcggaggaggtgatgatgcttttaacacctttttcagtgaaactggtgctgggaagcacgtccctcgtgccgtcttcgtggatcttgaacccactgttattgatgaagtgagaactggtgcttaccgccagctcttccacccagaacaactcatcagcggcaaggaagacgcagctaacaactttgcccgtggtcactacaccatttgc

SEQ ID NO: 4774 - DNA, 390 bp, Gossypium hirsutum
  Clone ID: LIB3083-100-Q1-L1-E3
gctgagagcaacttgtcaacgtccgaacattagggaggggaatattacaaagatggtccaggtcaataattttgaggtggaggagcttgttactaaagaatttggaatgcatgttcgcaaagaacttgcattgattaatgcacgagttctgaatcctccagtgctaaagtatcacgatagtggacgtgacaaaattgttaatcctagctgtgggcaatggaacatgatcaacaagaaaatggtcaatgggggtaaagttgatttctggtcttgtgtgaacttctcctctgaatattggaatatgtcagaagacttctgtgcggggctggtgaatatgtgtaacagcaaaggaatggtgtttcgccaaactccttcaattgcaatgcgatc

SEQ ID NO: 4775 - DNA, 392 bp, Gossypium hirsutum
  Clone ID: LIB3083-100-Q1-L1-E4
cacccaacttatgtaaccagagttattcctgtctttgtgctagcattggctgatgttgatccggaacttatgatggaagatgaaagctttgtttggactggaaatgatgttgtcatagtacttgagcaccaaagtccaaatatacctctgagttatgtttctgagactgagagaaggcatgctattccatcacaagcacagcgccatattatagcagggcttgcttctgctgtgggtgggttgagtgcaccatatgaaaaagcttcccatgtacatgaaaggcctgttgtgaattggctctgggctgcgggttgtcacccgtttggaccattcttgaatacatcttgaaatagtcaaatgctttaagatgttgcactgagaaatacgattta

SEQ ID NO: 4776 - DNA, 310 bp, Gossypium hirsutum
  Clone ID: LIB3083-100-Q1-L1-E5
aagcataacatacagtaaaccatgtcaagtttttaacaggcttgaaagaataaaacctggcataacacggaagcaacaggtaataaaagacatcatacgcacactcaatcacaggtacttcttagtactcatcatcttcaccctcatcaccctcagccgactcagcaccaacttcttcataatccttctccaatgcagcaagatcctcacgagcctctgagaattctccttcttccataccctcaccaacataccagtgaatgaaggcacgtttggcatacataagatcaaacttatggtcaatgcgaga

SEQ ID NO: 4777 - DNA, 307 bp, Gossypium hirsutum
  Clone ID: LIB3083-100-Q1-L1-E6
tgcaagcttgtcttaaaggaaaagtcatcatatggattgatccactacttcgaccgcagatcagctgctcttgccatattatctctaaatggaaggcatttatttggacagcctatcaaggtcaattgggcatatgctagtggtcagagagaggatacatcaggacactttaacatttttgttggggatctcagtcctgaggttactgatgcaatgctgtttgcgtgcttttctgtctatcctagttgttcggatgcgagggtaatgtgggatcagaaaactgggccgtcaagaggatttgggtttg

SEQ ID NO: 4778 - DNA, 294 bp, Gossypium hirsutum
  Clone ID: LIB3083-100-Q1-L1-E7
aaaagggccaattaaaaacatgaatcctttttttaggaaaagcctcaaaaattttttttcagggctccaactaaaacaagtttaacctttaaatggggttgggggggccaaaccccacaagatacaattttggacaaaatcccttcggttttccaatagccaaaaaccttaccaaaatatggattttttttaaaaaaaaaaaggggggttctaaaacattttccagccttgaaaaaaacccctataacatcctgccgggagagggcctttttattccccccggcaaaatttttt

SEQ ID NO: 4779 - DNA, 387 bp, Gossypium hirsutum
  Clone ID: LIB3083-100-Q1-L1-E8
aaaaatcttaaaaagattaatttattattttttgagtaaaaagaataaaatgcaatctgaagggcttcgatcttataattttaccgtgcactttattcatagaaaataccaaaaactagtacattatccgaggtattcaaccctgaaaacacacatccaaaatcaacaagaaaatacatcacagtagcaaacggataacggtacatccctcaatactcctcctcatccccttcgtctccttcaccagactcagcgccaacttcttcataatctttttccagggcagcgagatcttcacgtgcctcggaaaactctccttcctccatgccctcaccaacataccagtgcacaaatgcacgcttggcatacatgagatcaaattatgat

SEQ ID NO: 4780 - DNA, 373 bp, Gossypium hirsutum
  unsure (1)..(373): unsure at all n locations; Clone ID: LIB3083-100-Q1-L1-E9
aagacagttcattcaaggctcttacgaagccttcattgtcaaatctaactgatgatcagttcaaatcagtgctcctttaccatgccttgccacgatactatgcccttgcggacttcaatgacctaagtgagaaaggccctattagtacacttgctggtggccaatacactttgcaattcaacgatgagtctggtaccgtccgcctcgattccggatggagcaaaacaaaagtcactagcgcagtacatacgtccaagccagtcgcagtctatcaaatcgataaggtccttcttccggaggccattttcgggaccgacatacctncgacacctgcacctgccccggctcttggtattggcccatcagctgacac

SEQ ID NO: 4781 - DNA, 346 bp, Gossypium hirsutum
  Clone ID: LIB3083-100-Q1-L1-F1
aagtttaccttcgatttccatttacttctctattgctacgtttttgaatttttagtgagcgaaaatgagagagtgcatttcagtccacatcggtcaggctggtattcaagtcggaaatgcctgctgggaactttactgccttgaacatggaatccagcctgatggccagatgccaagtgacaagactgtcggaggaggtgatgatgcttttaacacctttttcagtgaaactggtgctggaaagcacgtccctcgtgctgtctttgtggatcttgagcctactgttattgatgaagtgaggactggtacttaccgtcagcttttccaccctgagcaactcatcagc

SEQ ID NO: 4782 - DNA, 337 bp, Gossypium hirsutum
  Clone ID: LIB3083-100-Q1-L1-F10
aattcctgttggacgatgtcgagaaggccaccggcgatgaatcgacaatggctgcacatttgagcaagtctcaggatgttggaattcatgcaagacatatcagcagtgtgtctacattggatagtgaaatgactgaagacaatgggaatccgatttggaagaacagggtggaaagttggaaagaaaagaagaacaagaagaagaagcctgcaacaactaaggttgaaagagaggctgaaatcccacctgagcaacaaatggaagataaaccggcaccggatgcttcccagcccctctcgactataattccaatcccgaaaagcagacttgcaccata

SEQ ID NO: 4783 - DNA, 385 bp, Gossypium hirsutum
  unsure (1)..(385): unsure at all n locations; Clone ID: LIB3083-100-Q1-L1-F11
caaaaaaacaaaaaggaaaatcttcctcttgttttgcttgaatgtagatttgagctctgaaagtactgcatttgtgactttctcctgaacttcgcgaaatgggaaaatcaccgggaaaatggattaaggctgtgctttttggaaagaaatcttccaaaactggttatcataaaggaagggagaatgttgccaatgtaaatgaggtgctggtttcagccagggcatcagaagctgaagtccctgtggctcctcctttcccttcacagcttaatcaatatgctaatgagagaaatgagagagatgaaaggaaattagaactggaaaacaaggaggctgcaaatatctctaacgatgacaagatatcactgncagtgagtcaaggcat

SEQ ID NO: 4784 - DNA, 407 bp, Gossypium hirsutum
  Clone ID: LIB3083-100-Q1-L1-F12
ctcaacgcgacaaaacaagggttttaggagaacatctctggtagtagcttccatggctgatctcagcactgtgctcgtcactggagccgctggcagaacaggtcagatagtttacaagaagctgaaagagaggtcggatcagtttgtcgtgagaggactcgttagaactccagaaagcaaggagacaatcggtggagcagatgatgtgtttgttggggatatcagggataccacctctctggttcctgccatgcaaggaattgatgcactcataattcttactagtgctgttcctagaatgaaacctgggtttgatccgacgaaaggcggaaggcctgagttctattttgaagatggagcatatcctgagcaagttgactggattggtcagaaaaaccaaatagatg

SEQ ID NO: 4785 - DNA, 354 bp, Gossypium hirsutum
  unsure (1)..(354): unsure at all n locations; Clone ID: LIB3083-100-Q1-L1-F2
tggaagcatgggattggagaagagagagaaagtaatgcaaaattggttaaagcacgggtttctatttactcccataagggctgctttcatctacttgaaagtcttctgccttttcgtttacttctctcgggtaatcattcaatgctacctcttccctttaatcttctttctactttcatcctttccctaaggattagggttactacataatatatttgtaccgataaaagtatgagacccctatattaaaaatttgattgtattttacttattctattcaaataatactaaattagttccttttttanaaaaaaaaaaaaaaaaaaaaaaaaaaaaaaaannccctcgaggggg

SEQ ID NO: 4786 - DNA, 320 bp, Gossypium hirsutum
  Clone ID: LIB3083-100-Q1-L1-F3
aaatcaactgcattatatattgataggttcagaaaatagtacattcactctcacattcaattacaaagcaatccagctaaaactgggcttaaagacctatatgctatacacatcaaacgactgtgatgctatcctatttgatcagtttgagacccgacaattttctacacaatatgattacacataagccaaaaaaaacaagtcatgaacacaacacagacataaacatgtcaaaatctatatactactttagaacacaaatctgatgcgaaaaagaaaataataaaataggtcgaacatacagaagatatcgtcacctg

SEQ ID NO: 4787 - DNA, 353 bp, Gossypium hirsutum
  unsure (1)..(353): unsure at all n locations; Clone ID: LIB3083-100-Q1-L1-F4
caagaagtttntttgcacaacgtgaggatggtggcttgcacgacactagacaaaattggtttgaagggtcttacaatctacaagctgccaccattggaagaacagacacattttatcttcctgatgatgacaacgtacacaatactgaactgagggaactcttaagcaggagaagtgtgtctacccttcttcgtagtggttttcgtgagagccttgaccaattgatacaatcatatgtggaaaggcaaaatcatgcatctattgactgggatctgaatgaagcagttcctactcctgaatcccttgaacaagatatagaacagcaaagcatggatcagaatgagggtcagagt

SEQ ID NO: 4788 - DNA, 364 bp, Gossypium hirsutum
  Clone ID: LIB3083-100-Q1-L1-F5
ctcgtgccgaaatggaggagttacttttccagcgccagaagaggatagctgagaggagtgctgccggtggtcttaatccggttacttcccggaggagctccgccgaaagtaaaacttcagcagcttcaacgaagagccaaccatcaactcaagacactaagaaatcgccgaagccagtccttagaagttccaccatagaacgccttgcaaccgcacggaatacttcaaaggtctcttcggctgaattgaaatcgagccagccgaaaaagccaacattgaaggaaatcagttcttcaacaactcagaaggctgctcctgctaaggataagaaatcaagcacaaacaaagccaaagcttcagatat

SEQ ID NO: 4789 - DNA, 372 bp, Gossypium hirsutum
  Clone ID: LIB3083-100-Q1-L1-F6
ccctgactggctttaccatcaccctcgaagtcgagagttccgacacgatcgacaacgttaaggcgaaaatccaagacaaggaagggatcccaccagaccaacaacgtctcatcttcgccggaaaacagctcgaagatggccggaccttggccgattacaacatccagaaggagtccaccctccatctcgtcctccgtctacgtggtggcatgcagatcttcgtcaaaaccctgaccggcaagaccataactttggaagtcgaaagctctgacaccattgacaacgtcaaggcaaagatccaagacaaggaaggcatcccaccagaccagcaaaggctcatatttgccgggaaacaactcgaggacggtcgca

SEQ ID NO: 4790 - DNA, 306 bp, Gossypium hirsutum
  Clone ID: LIB3083-100-Q1-L1-F8
aagagttttagtggaccggtctctgcaactctctactgggggtattctctcttcatgggcctcgcaatcatgttggccactggcacgatcgggttcctttcatctttctggttcgtgcattacttgttctcttccgtaaagctggattgaagaggtaaatcggtaacccgagaggcaggggaggaaagaattggaccttttacattacttgatcatatattacatgtgttatattgagctcatttactctgttaggggaactttagtaaaatgcaataacaataatatggcgcagtttcatttaac

SEQ ID NO: 4791 - DNA, 389 bp, Gossypium hirsutum
  Clone ID: LIB3083-100-Q1-L1-F9
cttgcgtactggtccgcacggacaactttttagacctgataacttcatttttggtcaaaatggagcagggaataactgggctaagggtcattacactgaaggagctgaattgattgattcggttcttgatgttgttcgtaaagaagctgagaattgtgattgcttacaaggcttccagatttgtcattctttgggaggtggaactggttcggggatggggacactgttgatatcaaagatcaaggaagaataccctgatcggatgatgctgactttctcggtttttccgtcgcccaaagtgtctgatacggtggttgagccctataatgcgactctatcagtgcaccagcttgtggaaaatggtgatgaatgcatggtgcttgataatg

SEQ ID NO: 4792 - DNA, 385 bp, Gossypium hirsutum
  Clone ID: LIB3083-100-Q1-L1-G1
tggaattcagtcctggaaagtattaatggaggtgtgcctatgatctgcaggccattttttggagaccaacaattgaacactcgtactgtggaggttgtatggggatttgcgttgggcttagaaggtggaacattgacaaaaggaggagcaaagaaagcattgaagttgatattgtgcagccaagaagggaagaaaatgagagagaaaattagagttcaaaaagagctggtttgcaaggctgttaaacccaatggtagttctattgaaaatttcaaaacactggtgaaacttctccaacacttaccaccaagttgattgaaccaagtacacaaaacaagtaaacacaagtgctaggatgataaagttgttaaggatttatgtcatg

SEQ ID NO: 4793 - DNA, 365 bp, Gossypium hirsutum
  unsure (1)..(365): unsure at all n locations; Clone ID: LIB3083-100-Q1-L1-G10
ttttatttttctgtttccgnttctttcaatatggaaaggcgtttcaaagcgagtggttggttttttttttcttttaagaatttgtgtggaaaaaaaaaagaaaaaaaaatggctgagcacgaagagaagaagcacgaggaatctttgatggaaaagatagcggagaagatccatggtcatgattcatcgtcatcgtcgtcggattccgatgacgacaagcaatcggaatcttcgatcaaggacaaggtgtttcgtctctttggaagagaaaagcccgtccaccatgttttcggtggaggcaaaccggccgacattttactgtggaggaacaaaaagatctcaccaggagcgcttggtgttgcaac

SEQ ID NO: 4794 - DNA, 355 bp, Gossypium hirsutum
  unsure (1)..(355): unsure at all n locations; Clone ID: LIB3083-100-Q1-L1-G11
ggtctttgtacctccaaaccctccccaaacccttctgattctacaaatgcctctatcaatacccggaataacgatatccaccgcaagcctaactctgtttcggcttctcctttacctgatggtgtaaactccaaggaagatcaaggtaaacaaggagaagaagaaaaagaaagctccaattccaacaatgaaggcaagaaatcgccgtttttcccgttttatagtcccagtccagctcaatacttgttttccaaaaagtctccggcgagatcttcaaccaattccactccaaaacggtttttcaggaggccattccctccgccgtctccggcgaagcatattanggcagtgcttg

SEQ ID NO: 4795 - DNA, 404 bp, Gossypium hirsutum
  Clone ID: LIB3083-100-Q1-L1-G12
ggtaccattacactctttacgtccattccgaaaggcaattttacagagaatgtgacatctacgggaccgttgattggatattcggcaacgcagccgttgtgtttcaaaactgcaacatatacgcacgcaatccccctaataagaccaacacggtgacggctcaaggccggaccgacccaaaccagaacactggaattataatccacaactccagagttacagcagcttccgatttgaagccagtgcaaagctcggtgaaaacatatctagggaggccatggaaacaatattcgaggacggttttcatgaaaacgtatctggatagcttgattaacccggccggctggatggaatgggatggtaattttgcacttaagacgcttgattatgcggagtatatgaac

SEQ ID NO: 4796 - DNA, 326 bp, Gossypium hirsutum
  Clone ID: LIB3083-100-Q1-L1-G2
gcttatgcaacgattcttcattcggctcatgtatacgtatgtggagctatagctgttgctcaaagcattcgcttgtctggctcaacccgagaccttgtgatacttgtggatgagatgatcactgcgtaccacaagagtggacttgaggcagcaggatggaaagttaggacaattcaaagaatcaggaatccgaaagccgaaaaagatgcatacaacgaatggaactacagcaagttccggttatggcaactgaccgattatgacaagatcatattcatcgatgcagatctacttatactgcgcaacattgatttcttattcgcaat

SEQ ID NO: 4797 - DNA, 351 bp, Gossypium hirsutum
  Clone ID: LIB3083-100-Q1-L1-G3
attgttttggccttgatggtggtttccgccgcgacggtggttacggcggctgacgagagtgggttagcgaatgagtgcagcaaagatttccagagcgtgatgacttgcttaagctttgctcaaggaaaagcagcgtcgccgtcgaaggagtgctgtaattcagtggcggggattaaagagaataaacccaaatgtttgtgttatattttgcaacaaacacaaacctctggtgctcaaaatctcaaaagcttaggtgttcaagaagataagctgtttcagttaccatcggcttgtcaattgaagaacgctagcgtcagtgattgcccaaagcttcttgggttatcttcgagc

SEQ ID NO: 4798 - DNA, 373 bp, Gossypium hirsutum
  Clone ID: LIB3083-100-Q1-L1-G4
gttaaatcattttcaatcatcacttccagttcacaaacattttaatcttacaaaacctccacacctaaaagtaaatgaattgaacatgtcacttggtactcgctgatttagctaagtttatgacatcttcaatagatcatatgtaaaaaaaaaaacatatggttctcacacctaacagactaaatgcatgcttttagtgtcaatgtaatagtaaaaggaactatatatatgatcgcatacgaggcctaactattgactgtgccccatcaacgaatatggttgttcctgtcatatagcgtgaaccatcactgattagatagatgacagttgaagccaaatcttttttaacatccaaccatctttgcaatggagc

SEQ ID NO: 4799 - DNA, 395 bp, Gossypium hirsutum
  Clone ID: LIB3083-100-Q1-L1-G5
cttgtgtctatggtatccaatatggagattcatctttctcgattggattgtttgctaaagaaaagctcactttgacatcaaacgttgtgtttgacaactttctatttggttgtggccaaaacaatcaaggcctttttggtggtgctgccggtttgctaggactaggccgaaataaactatcttttccatcacaaacagccataaaattcaagaaaatattttcctactgcttgccatcatctccaagctcaaccggcttcctaaaattcggcaatgatggtctctcaaagtctgtaaaattcacaacattatcaacaatctccggaggggaatccttttatggcattaccattattgctatgagttgtggtggcaagaaactattaaatctcgca

SEQ ID NO: 4800 - DNA, 336 bp, Gossypium hirsutum
  Clone ID: LIB3083-100-Q1-L1-G6
ctttcctttatcttttcacgcattaagccccttctgaattttgtccgcaaaccagatttcaatggcggaagcgccgctggaaccacaaatgggctccgaacttgaatcgctggccattccaccaatggatccgttgtatctctcctcagatctagggtttcctctcgacgaaaacgatgatttccagcttaccttcgacgatttcgacgaattgtacttcccttccgattccgaccacctcatcatgcccgattcttacgacgcacccgctttcacatccgaatcgtacgtggaaaggtacctcaattcttcctccccgggacttgacagtttcag

SEQ ID NO: 4801 - DNA, 388 bp, Gossypium hirsutum
  Clone ID: LIB3083-100-Q1-L1-G7
ggtgatgctagatggcaccccatggcccggaaataacactcgtgatcatcctggaatgattcaggtctatctaggaagtgccggtgcactcgatgtggatggcaaagagctgcctcgacttgtctatgtttctcgtgagaaacgacctggttatcagcaccataagaaagccggtgctgagaatgctctggttcgagtttctgcagtgcttactaatgcacccttcatattgaatctggattgtgatcattacatcaacaatagcaaggccatgagggaagcgatgtgctttttaatggatcctcagtttggaaagaagctttgttatgttcaatttccacagagatttgatggtattgatcgtcatgatcgatatgctaatcgaaat

SEQ ID NO: 4802 - DNA, 367 bp, Gossypium hirsutum
  Clone ID: LIB3083-100-Q1-L1-G8
ttttacttcaaaccctttttttctctctctctctctctttctaggatatatctcccaattaacacctctctttaaattcatagatatataaaggaaagacctaatacttattgttgaaccacaaacagtgggaaagagtaggaggagtgattaggagagtggaagtgattgtttgggtgttaagaaagaaaagatggagctattcccagatttatccttgcagatcagccctccaaaccccaaacctacatccacatgtaggacaagggaggaagacatagatttgggtttctggaagagacctctggactcaaggaactccatatcttcaatggctaaacctgataactgcatcgacctatctttg

SEQ ID NO: 4803 - DNA, 404 bp, Gossypium hirsutum
  Clone ID: LIB3083-100-Q1-L1-G9
aagagtactacgaatcacgtgaatcgaaggagcacgaagaatacgagaaagaaaaacccgagttccccaaacgggaaaagcctaaagagcacgagaaacacgaagtcgaatattcggaaatacccgagtacaaggaaaaggaagataagagtaagaaacataaagatgaagagtgccaggagtcacacgaatcgaaagagcacgaagagtacgagaaagaaaaacccgatttccccaaatgggaaaagcctaaagggcacgagaaacataaagccgaatatccgaaaatacctgagtgcaaggaaaaactagatgaggataaggaacataaacatgagttcccaaagcatgaaaaagaagaggagaagaaacctgagaaaggcatagtaccctgagtgggtaaa

SEQ ID NO: 4804 - DNA, 308 bp, Gossypium hirsutum
  unsure (1)..(308): unsure at all n locations; Clone ID: LIB3083-100-Q1-L1-H1
atgttttgggctctcattgtaactactctcacccttcaactagccattacgagtgcacaaacaccagctgcctcaccttccactacgccaaccaccaccaccactcctgcaccttcaacttcaccaccacctacaacttccgcaccgcctccttcaacaacccctccacctacaacttcagcaccatctccttcaacagcaacgcctncaccttncaccacgcccaccgngccagctcaaccacctgcaacaactccccctcccactgttgcaccagctacaagcccaactgtcccaccgncacaaac

SEQ ID NO: 4805 - DNA, 408 bp, Gossypium hirsutum
  Clone ID: LIB3083-100-Q1-L1-H10
gacaaatacgacgtcgaaaagcagcgagaccaaaatatctccggcgacgatgcctttgctcgccaatacgctgctattgaagccgacattgaatccgctcttcaaaaagcggagcttgtttccaaggagaaaagtaaggcatctgctgttgcggtgaatgctgagattcgtcgaaccaaggctagattgcttgaggaggtccctaaactgcagaggttggctgttaagaaggttaaagggatttcaaccgaagagatgactgctcgtagtgatctggtcctcgcattgccggataggattcaagctatacctgatggaactgctgctcctaaaactggaggcgggatgtcttcagcaccttcagcttctcgtactgaaattaaagtcgactcagatgggcgatttgat

SEQ ID NO: 4806 - DNA, 378 bp, Gossypium hirsutum
  Clone ID: LIB3083-100-Q1-L1-H11
gcagtttttaagaggaatttgtttagtcgagtttcagcattgctgctaagcgagaggagagaagacagaattgatgattttgctcaacagatggaaattaatgggttttggccggttgacaagagagaagccattgtacaaacgttgctgaaaaatgtcgatgttaagaatgaatatcactgtagcatgaaattcgagactgcagaagaactttctctgcatatgccaacttgcagctttagggtaatgactggtgacaatgaagggtgcgacgatagattttcggctaataaatcagagaagcacgattccacttgccctttcaagataattccatgtgaacaaaagtgcccagatttcatcatgagacgtgatatg

SEQ ID NO: 4807 - DNA, 398 bp, Gossypium hirsutum
  Clone ID: LIB3083-100-Q1-L1-H12
cagatgcattgtacaagtctactatgctattggtgtgcctgagcccttatctgtctttgtggacagttacggaaccggaaagattcctgacaaggaaatactccaaattgtgaaggagaacttcgactttaggcctggtatgatcaccatcaacctggacctcaagagaggtggcaatggtcggttcttgaagacagctgcttacggacactttggaagggacgacccagacttcacctgggaagttgtgaagcccctcaagtgggacaagccccaatcttaagttcagccctgctgcctgtctcagtgcctgcttatccatagtactgaataatattgccttgctgctcacctatactctattctcatccccagaatgcttctaatctcattcatat

SEQ ID NO: 4808 - DNA, 382 bp, Gossypium hirsutum
  Clone ID: LIB3083-100-Q1-L1-H2
aatatctttcatccctctttgatttctcaaacacatcaaaccatggtgttatctaagacagcatctgaaactgatgtctcagttcactccacttttgcctctcgttatgtccgaacctcactgcccaggttcaaaatgccagaaaactccataccaaaagaggctgcttatcagatcatcaatgatgaactgatgcttgatggcaacccaaggttgaaccttgcctcttttgttactacatggatggagcctgaatgtgataagcttataatggactccattaacaagaactacgttgacatggatgaataccctgtcaccactgagcttcagaatcgttgtgtgaacatgatagcacatcttttcaacgcaccattgggag

SEQ ID NO: 4809 - DNA, 344 bp, Gossypium hirsutum
  Clone ID: LIB3083-100-Q1-L1-H3
gtaaagagtgggcttaattttgtcgaggttaagccacagggtgtaagcaagggtctagttgcaaagcgcctactctccacaatgcaagagaggggtatgttgcctgactttgttctctgcataggagacgacagatctgatgaagacatgttcgaggttatcataagttcagtattggggccgttgatcgatcccagagcagaagtgtttgcttgtactgtgggtaaaaaaccaagtaaggctaagtactacctggacgatacggtggaaatctgtaggttgatgcagggtctggcttctgtttcagatcaaatgcattcggtgttggcttagctagcgaaggg

SEQ ID NO: 4810 - DNA, 383 bp, Gossypium hirsutum
  Clone ID: LIB3083-100-Q1-L1-H4
agaaactccggccggagtttttcaagatattgccatgaagtgcggagccaaggtggaattcagaccagctttggttgctagcatggacctgcaattctccattgaggcttggtttgctggggagaaagttggtgaaggtactgggagaacaagaagagaagcgcaacgtcaggctgcagaggattctataaaaagcttagctaatacatatttgtcacgaattaagcctgatactgggtctgcacaaggggatttaagtaggtcggccaacacaaatgagaatggctttcctggtaatttgaatttgtatgggaaccagcaatcctctaaagaggaatctatgccattttcaaatgcaccggaaccatctaggcttcttgatc

SEQ ID NO: 4811 - DNA, 380 bp, Gossypium hirsutum
  Clone ID: LIB3083-100-Q1-L1-H5
tagaactatgccgcatccctcggacgagttcggcacgagattttattcaatcttttcttcaagttcccattttccccaatggccagtgttgaggttcaatcagctgcaacaacattgccagagaacgagacaacaccagaggtaaccaaggttgtggaaacgccaaaagaggagccagcggccgcacctgtagaagctgagccggagacaacatcagatgctccggctgcggaggaaaccgaagtttccatagccgaagctccagctgaagtcgataccaaagaagtggtagaagaagaagcgaaggctgctgaagaatcggagaaagcaaaggaggaaggtaaggatgagaccccggaggtgcagacagaaacagttac

SEQ ID NO: 4812 - DNA, 469 bp, Gossypium hirsutum
  unsure (1)..(469): unsure at all n locations; Clone ID: LIB3083-100-Q1-L1-H6
gaactagaactagccggatgccctcggacgtagtacgaattcgacgacgagcactatgcttttgtacattgttgatctgagatacacaatgtcttgtacantgtacnatatacagtacatgaaatatnnaaacatgttatacnnaaagaacttgcacaagganagaggaaaaaaaattaccaaaaatctattaatacacaggttgtgtccacaagcgaagtagcattcttatattaccatcatcatcttgctgtaagtgaccaatgaaagatggcatacttaaaatcccaacttcaatggccttagtatctcctatgcttctttggtaatgactctgcttgtgcttcattctaaaaacacacactaaaagattccatgtcaattagagaaaaataaaattttcgtgaaaaaaggtcaaatgatgtatcgagaagtggaaagagacctatcaatantttgagttggatca

SEQ ID NO: 4813 - DNA, 376 bp, Gossypium hirsutum
  Clone ID: LIB3083-100-Q1-L1-H7
aagttctgttgatctccttcaaggtggaaaagcttgtgataactgccattccgaatgttgtggaaacatggaccaagggtttcggtttcaagctggtggaggaagaggaaagaaaagcacttaataagatcaacttgatggtgtttccaggaacagtattgctgtcgaagtccttgtatcaatcccaaaaaacaggtggacaatcagaaaccggcaatacatcatgtttgcaacaagataactcaattgaacatttgagacgcgaagaattaaccaacataggcattcaagctgtaggagatcaattagccaattcattacagcacaccatttatgcaaaaaaaacttgtgcaaaaatagtaaccgagtttgttgg

SEQ ID NO: 4814 - DNA, 372 bp, Gossypium hirsutum
  Clone ID: LIB3083-100-Q1-L1-H8
gcagctttcaacgttttcattttattagcctgcttcatttccttgggtttttcaagcatggaggttagcctagcaacccgaaatcttcagcaagtgccacctccatttccaccaataccattgccacctccattgtcgccaataccattgtcaccagtaccattgctacctccattgtcgccaataccattgccacctccatttttaccagtaccattgccatctgcatatttaccggtaccattgccacctccgatgtcaccacttcctttaatcccagaaccaccaccatttccttcaatcccagaacttagaactaccaccacttcgtaagttgcccaacatacttccattgccttcaatcctagatct

SEQ ID NO: 4815 - DNA, 399 bp, Gossypium hirsutum
  Clone ID: LIB3083-100-Q1-L1-H9
gttgtcttatgaaattgggaggagaaggcaagaatggaagcattgaccatgcatttagaagactttgaaaactccgaaacagcctcgattatgaaggagatttctcatttgatctcttcttcgtcttatttctctctctttctttttcattattgactttgatatgatcaaaacagtatatcaaagcagcggcagcgactcttttcttcattttcttgaaattttcaaatcgaccaagatcggttttggactcaactaggagtttttcagcaaaaagtaaccgacacagtccggtttgggctcaaaatttccagttgagaaatagagaaaaccaagtacttgaagaggactcttggtatctattacagcaatccatattgagcttttttgtatacaatt

SEQ ID NO: 4816 - DNA, 351 bp, Gossypium hirsutum
  Clone ID: LIB3083-101-Q1-L1-A1
caaaaaattttgggtgatctgtgttgaaaaagaaataaaatatggcgacattccaaggaactcaacaaaaatgcaatgcatgcaacaagactgtttatctggtggataagttgacggctgataatagggtttttcataaggcttgcttccgttgccaccattgcaagggtaccctcaagcttagcaactacaactcatttgaaggggtgctatactgcaggccacactatgatcaactcttcaagagaactggcagtcttgacaagagttttgaaggaacaccaaaggttgtcaaacctgaaagacaaatcgatagtgagagtgcactgaaagtgatgaactcgtttggtg

SEQ ID NO: 4817 - DNA, 379 bp, Gossypium hirsutum
  Clone ID: LIB3083-101-Q1-L1-A10
aacatgaattccacaatttattctagtcccatttgccactcaatatagctgataaatacatttattcaaagataaaacaacacagacaaatattattaaaaacaaaaaccagacaagacaaaacaaaacaaaacaaaacataattccagttcaacatccttatccttctggtccctcacctttaaagctttaaagccactgcaattctctttttcctgaaacagattgaattgaaagctatagagcactcaaatgatatggagcaggcctaaccccaacactttgatcatcctcattccagctgcatgatttcagaattgacctaggggacacacacatgtcacccccaccaaagctgtagtacatgactgaaccccca

SEQ ID NO: 4818 - DNA, 392 bp, Gossypium hirsutum
  Clone ID: LIB3083-101-Q1-L1-A11
tgggttatttaagctagctagctccacattttctatggcttcaaagcttcttttgattgctgtctttgttcttgatctcattgcttttggtttagctgtggcagctgagcaaagaagaagcactgccaagattgtccaagacagtgaagttaattataactattgtgtctatgactcagacatatcaacaggctatggtgttggtgcatttttgttccttatggttagccaagcccttgtaatggctgcaagcaaatgcttctgctgtggaaagggtttaaaccccagtggttcaagggcctgggcagtcatccttttcatagtctgctggttgtttttcctgattgctgagatatgcttgctggccggatcggtgagaaatgcctaccata

SEQ ID NO: 4819 - DNA, 248 bp, Gossypium hirsutum
  Clone ID: LIB3083-101-Q1-L1-A12
ctcgtgccgttcgatttttttttttcacagaatccggaaaacagcaatggtgtctttgaagctgcagaagcggcttgccgctagcgtcctcaagtgcggacgcggcaaggtctggctcgatcctaatgaaatcaacgaaatctccatggccaactccaggcagaacgttaggaaacttgtgaaggatgggttcatcatcaggaagcctactaagattcactcccgctctctcgcacgtaggatgaagg

SEQ ID NO: 4820 - DNA, 309 bp, Gossypium hirsutum
  Clone ID: LIB3083-101-Q1-L1-A2
gtttactgtttttttttttttttgggggcccgccaacgagggggggcatccatctttcactgatgggtaaatcaccttctcatcacaatcaacttcagaatgcatagaccaaaaggtctaccaagtaaatctaccctgtgttttggaaggtttaaacggcgaaaaacaagacgaagcctgccaaatttagaagaatgttactgactaggcatataaaacttgttgcccataaaaaactcacaaagcaaacgctgctaagacggcatggattacaatgtcttccttcgtatgactagaggatacacattc

SEQ ID NO: 4821 - DNA, 267 bp, Gossypium hirsutum
  Clone ID: LIB3083-101-Q1-L1-A3
tagcggtcatcttttttttcatcttctggggctcaaacgctggcatagggggccataattcattggtggctgttccatatgagacaatgtttgctttggtcgacatgtggtttggaattatagttccacttgttattgctggtggttacattggtttcaagaagccagctattgaagatcctgtgaagacaaataaaattcccaagcaaatccctgagcacgtcttgcttatcaacccaattttcttcattctgattgtatgaatac

SEQ ID NO: 4822 - DNA, 222 bp, Gossypium hirsutum
  Clone ID: LIB3083-101-Q1-L1-A6
gcaaacgtgatagcactgtatagaagggctcaagcatacatcaatctggcagatttggatttggcggagcttgatatcaaaaaagctcttgagcttgaccccgataatagggaggtgaagctcgaatccaaagctttgaaggagaagaccagggattttaccaggagggagcccaattcttttggcacctggttggccagaagaaataaaaggaatctgggg

SEQ ID NO: 4823 - DNA, 373 bp, Gossypium hirsutum
  Clone ID: LIB3083-101-Q1-L1-A7
ggcttcaatttttcctcacaacaatggtctaagggctacgagggaccctaaactgggtaagaaaatccgcgctgcaacaacacttgaatctagagcaaccggcattccatatgtgttcgcaccttgtataacggtttgccgaaatccaacatggggcctgacgttaacgaaagctacaatctaatatccccatcttgtccacgcaaagacagatattgtaccaggattacaaggagacatacctgctagatcctctacaggcattccatttgttgctggaaataaaaatgatgcagcttgtgctaagcactacgtacgagatgggggaacaaccacaggcataaacgagaacaacacattgaccacctgggat

SEQ ID NO: 4824 - DNA, 298 bp, Gossypium hirsutum
  unsure (1)..(298): unsure at all n locations; Clone ID: LIB3083-101-Q1-L1-A8
ancctcattttttcccgtaacttcttcccctgacggctctgactcaaaaaacaagaagcttggaagtggatctactaacctcggaggcatcaagtcgaaaccatctgcttcttctggaagtttgcaagtcaaggcaaatgctcaagcccctccaaagataaatggtaccactgttgtaacttctccggctgaaggtttcaagaacgaagatggtgcaggttcccctcatcctcggacctttatcaatcaattacctgattggagcatgcttcttgccgctatcacaaccaattttctg

SEQ ID NO: 4825 - DNA, 397 bp, Gossypium hirsutum
  Clone ID: LIB3083-101-Q1-L1-A9
atagagctttccacacccgcgggagaggtcccccgggacctcctcggggctgctataactatgtcccttcctcatcacgcgccaccaccaccaccagaaaaagcagtgcaggtcctggagtcacccccaccgatgatgacgatgacgccatctcagctaccggcgctttataagcagcgctcgttgtcgccagacattttccgcgacgaggcatggcttagaaggaaagggaacagcaagaacagagggagcaagagcgtgacggacgaagaccttgatgaactcaaggcttgtattgagttggggttcgggttcgagtttgactcacccgaggtggatcaacgtttgtccgacactttgcctgctcttggcctctactatgctgttaacaagaact

SEQ ID NO: 4826 - DNA, 391 bp, Gossypium hirsutum
  Clone ID: LIB3083-101-Q1-L1-B1
tggccccctttggatctgtttcagaacaattttatggttcacaagatacttctcctgctggagataatagataccgtgttataaggcccttgcagcatgacaagtggtccaaagggaaggatggttttcttatcactgatatttggggtgtggatgttggtggctcagatgtaaccactccaatagtttggctacagcatacggaggagaggatgtatctatgtgcttatcagtacaaaagccttacgttgatccttcttatccctctttcttctatacttaatggggagcaaggtgtttcagctgtgaaacagcaacttcttgaaaatgcctcactgaagattttgaaagttgaagaaaagttgtcaaaaggatggggtggagagaatgc

SEQ ID NO: 4827 - DNA, 183 bp, Gossypium hirsutum
  Clone ID: LIB3083-101-Q1-L1-B10
tagcgagttttttattttttttgtttaaagaaatatttctttgcgctgtggaaattaaatggaaccaacgaaatcataggagactttttacaaacaagataaatcccttttagaatcacagcaaatcaacagtagtggcaaaaagggaaaattacataataagaaaggtttggtaaacaccat

SEQ ID NO: 4828 - DNA, 335 bp, Gossypium hirsutum
  Clone ID: LIB3083-101-Q1-L1-B11
agattatattcactttcccataagcaaaccacaaaggaaagcttggagagagacccaaaaacaatgtctaaggaagtgagtgaagaaggacagggtcgtaaggactatgtgtaccctccaccggcacctctgattgatatggctgaactcaagtcatggtctttttacagagccctaatagctaattttatagccactctcttcttcttttatgtcactgttgctaccgtaatgggtcacaagaaacaacaggatgcatgtgatggtgttgctctctggggtatggcatgggctttcggtggcgagatctttatccattgttactgcactgccga

SEQ ID NO: 4829 - DNA, 312 bp, Gossypium hirsutum
  Clone ID: LIB3083-101-Q1-L1-B12
gtcaggttatggctcttgctaatgttaaaattgttcaggcagctattggtgggtggcattgtttggctgttgatgatgaaggcagagcttatgcctggggtgggaatgaatatgggcagtgtggtgaagagcctgagcggaaagatgatactggtaggcctttgagaagggacattgtgattcctcagcgctgtgcgccaaagcttgtagttcgccaggtagctgctgggggtactcattctgtagtgctgacacatgaaggatatgtttggacctggggtcaaccttggccacccggagacataaaacaaa

SEQ ID NO: 4830 - DNA, 366 bp, Gossypium hirsutum
  Clone ID: LIB3083-101-Q1-L1-B2
gagaactagtctcgagtttttttttttttttttcagtgcttttcttcggatcggccacatctcctgtgtccttacccgcgtcgacaagggtgttgccttcgttcagatggtgtaagagctgctgtaattgtatcacttgagaggaactgttgcctgacttgattttgtaaatcttagtccccctcatagcatggacaacaacagcaatgatgatttcaccttttgtaaggttgggttaccgactgatcaaaatggtgtggaggaaaagaatcttgcagctgatattggtggtattgccattaaagacgaaacctcaaactgcagcgatagtagcaagaatggtgattttccctggaaagataaaca

SEQ ID NO: 4831 - DNA, 383 bp, Gossypium hirsutum
  Clone ID: LIB3083-101-Q1-L1-B4
ctctcccattttgattttttgattttgatcagacggtaaggatgcggttcagaaacatagccgctggccggcctgaagaagctactcatccagatgctcttaaagcagctttagctgagttcatatcaacgttaatcttcgtttttgctggatctggttcaggcatggcttttaataagctgaccgacggcggtgcaacaactgcggctggtctcgttgccgcctctctagctcacggatttgcgcttttcgtcgctgtctcagtcggtgctaacatctccggtggccatgtgaatgccgccgatacattcggtgctttcgttggcgggaacattactctattacgtggtatcctttattggattgctcaactccttggctca

SEQ ID NO: 4832 - DNA, 379 bp, Gossypium hirsutum
  Clone ID: LIB3083-101-Q1-L1-B6
gtatggtattttgatcccatataagcaagcttggcgtgcaaaggaacggggacttgctgctatttatggctcttcagaagaaggatactgcatgcttcccacattttgtgagcaaataaagaaaacaaaccctggaagtattgcagaggtattcaccactggtgcagataaccgtttccagcggctgtttatttcctttcatgcatccatatgtggattcttgagtggatgcttgcctattgttgggcttggtggaatccagcttaaaagcaaataccttggtactttgctttcagcaactgcttttgatgctgatggtggtttatttcctcttgcatttggcattgttgatacagaaaacgatgatagctggatctgg

SEQ ID NO: 4833 - DNA, 332 bp, Gossypium hirsutum
  Clone ID: LIB3083-101-Q1-L1-B7
aaggggggccccgacaagagaatgttgctggagtgaaacttcccaagtttgagtatttcactgaaggtgagaccaagaatgatctgactggtttggccagaggtgggcaacaggttcaacagtgtcgtgctgcttatgtgaaagcaattgaggttctagttgagcttgcttctcttcagacatcattcttgacacttgacgaggcaatcaagactacaaatcgcagggttaatgctttggagaatgttgtgaagccaaggttggagaataccataagttacatcaagggagagttggatgagcttgaaagggaggatttcttcaggttaaag

SEQ ID NO: 4834 - DNA, 374 bp, Gossypium hirsutum
  Clone ID: LIB3083-101-Q1-L1-B8
gcgtaaaaatattttctccggaagcaaagcaactgtgagcggcgttttcctcagatctaaagcccctcgcatcagatccactaaatgcaccatgtcttctactttcagcggcgaagaaacggctcccttcttcggcttcctcggcgccggcgccgctctcgtcttctcctgtatgggagctgcatatgggacggctaagaacggggtgggtgtggcttcaatgggtgtgatcaggcctgagttggggatgaaatccattgatccaaaagtaatagctggtgtttcggggctttatggaatgattattgctgctattattagtactggcataaatccataagccataatctataatatctttgatggctatgctc

SEQ ID NO: 4835 - DNA, 396 bp, Gossypium hirsutum
  Clone ID: LIB3083-101-Q1-L1-B9
taaatatgttaatttcattcaaagagaaaccatacatagatgcaaccggtaaacaaagactagaaattatttaaaaggccatcaaagggcacaatccttcacgtaaaaccagaaaacccacattaaggaagaccttaaggcttagaacccaccacgaagacgaagaacaaggtgaagagtggactccttttgaatattgtaatcagccaaagtccttccatcttccagctgtttcccagcaaaaatcaacctttgctgatctggtggaattccttctttgtcctgaatcttcgctttcacgttatcaatcgtatccgagctctccacttctaaagtaatggtcttaccggtcaaagtcttgacgaagatctgcatcccacctcgaagacgtagaac

SEQ ID NO: 4836 - DNA, 399 bp, Gossypium hirsutum
  Clone ID: LIB3083-101-Q1-L1-C10
tgcaaatatttgacgccattgcttggtttaacgacctcggcggcaacaaactgcgtgcctggctgcaccaatgtggcttgtggcactgcccaagtggacgacgctaaaaaagtagctgcctcagctgatgcaactgtacttgttatgggcatcgatcagagtcaagaaagggaaagctttgacagagttagccttcttttaccaggacaacaaccacttttaataactgaagttgcaaaagctgcaaagggacccgtgattctcgtcataatgtccggtggaggctttgacatatcgtttgcgaaaaacgatgataaaatcacaagcattctttgcgttggttaccccggcgaagcctgaggagccgccattgccgatgtgatatatgggtattataat

SEQ ID NO: 4837 - DNA, 389 bp, Gossypium hirsutum
  Clone ID: LIB3083-101-Q1-L1-C11
cccacatcctcaatgctaactatgatatgaagaaaagtcatatacttgtcactgcagaagatgaatctgggatacacatatgggatcttagaaagcccaaaagtcctgccaaagagcttcctggacatacacactggacatgggctgtcacttgtaaccctgagtatgatgggctaattctgagtgctggcacagactcaactgttaacttgtggcaggctcctatatctgcagaagataaagcaacatctgaaagcataactgaaccactcaatcaacaggccgacccattgcttaattcctacagtgattatgaagacagtgtatatggccttgcttggagttctcgtgagccttggatatttgcttctctatcgtatgatggcagg

SEQ ID NO: 4838 - DNA, 390 bp, Gossypium hirsutum
  Clone ID: LIB3083-101-Q1-L1-C12
cctacttggtttggtgactctcaccactcccacatttggtgcctatgagtcaccaaattatgggaaaccccctactcctgtattcaagcctcccaaggtgaaaccaccaccatatgaacctaagccaccagtgtatgaaccaccaaaaaaggagaagcctgaacctaagccaccggtttatgcacctccaaagaaagagaagcatggacccaaaccaccaatgtatgaacctccaaagaaggagaagcctgagccaaagccaccagtttatacacctccaaagaaagaggagcctaaacctaaaccaccagtatatgaacctccaaagaaggagaaacctgagccaaaaccaccgatttatacacctccaaagaaagagaaacctgaacc

SEQ ID NO: 4839 - DNA, 305 bp, Gossypium hirsutum
  Clone ID: LIB3083-101-Q1-L1-C4
cctttttgttttttgtgaaacatcaaatcgcagagatggagctttcatagatttcgcctcagatctctttctctttgtaaaagaaaattgggtttacttatttatttggatcggattgggttggtttggttttagaaaagaaggaaggcgatgtcaaccccagcaaggaagaggctgatgagagacttcaagaggttacagcaggatccacctgctggtattagtggggctcctcaagataataatatcatgctttggaacgctgttatttttgggcctgacgatactccttgggatggaagcac

SEQ ID NO: 4840 - DNA, 376 bp, Gossypium hirsutum
  Clone ID: LIB3083-101-Q1-L1-C6
gttaaattttcaatgggtctatttgagaacccattagcagataacagcttagttgaccaacttggcagtcaggaacatagagagttggctagagaagcagtgagaaaatcacttgttttgctaaagaatgggcactctgccgatcagccattgcttcccttacctaagaagacatcaaaaatacttgttgctggtagtcatgcagacaatttgggttatcaatgtggtggatggactattgagtggcaagggttcagtggcaacgaccttacaaatggtacaacagtcctaaaagccatcaaaaacacagttgattcaagcacgaatgttgtgtatgaggagaatccggatcccaaattcgtcaagtccaacaact

SEQ ID NO: 4841 - DNA, 224 bp, Gossypium hirsutum
  unsure (1)..(224): unsure at all n locations; Clone ID: LIB3083-101-Q1-L1-C7
gctntgaaggatgctcgcatccctgagtttcttgcatcgctaaatgcacttcaatacagacggatggactttgatgagttctgtgcggctgcattaactgttcaaaagctggaggctcttgatcggtgggaacagcatgcacgttgtgcttacgaaatctttgagaaggaaggaaacagacctattgtcattgaagagctagcttcggagctcggactgagccc

SEQ ID NO: 4842 - DNA, 234 bp, Gossypium hirsutum
  unsure (1)..(234): unsure at all n locations; Clone ID: LIB3083-101-Q1-L1-C8
ggcacnaccancgaaccacatagagggggggctctcatctgcgcaacgcacattgccataactaaaggaccgtcccggcagatctaagccgtgctctcgcgatggcgtttaccgggactcaacagacacgcaaggcttggcagaagaccgatgatcccgtctaaccctcgtcggccgctgggaacccccaccaaacgcctggcttgaaatgccagcatcgcaaaaggacactaa

SEQ ID NO: 4843 - DNA, 392 bp, Gossypium hirsutum
  Clone ID: LIB3083-101-Q1-L1-C9
gtcgaactattgcctttgatggttcagccgtaggtgctgggaactacaccaatgccgaatcttttatgcaatacactgttgacaagaactataccattcacggttgggagttaggaaatgaattgtgcggaagcggggtcggaactcgggtctctgcagaccagtatgcggctgacacagcagctctgcaaagtatagtgcagaagatataccagaatgttgatttgaagccgttaattatcacaccgggagggttctatgactcggattggttcacggaatatattgataagacaaacaagtccctcgatgttgtcactcaccacatatacaaccttggaccatgagttgatgaccatcttgttggaaagattctcgatccatccgttctt

SEQ ID NO: 4844 - DNA, 342 bp, Gossypium hirsutum
  unsure (1)..(342): unsure at all n locations; Clone ID: LIB3083-101-Q1-L1-D10
aaaaataatataaactgggattggttaaaatataaaaacataaaaattaaaatagagggaaatatctagaaaataagacaaaacaacatacacaaataaatgataatataaaaattaacccaatccagtgtaatttttaattgataaaaacattaacccacgttaacttaaaatatatggtaacacttcttaattaccactttagccctgcaaattacttaactccatctcttcttaaccctaaccattaaccccttcttcatctgataaaatgcactgtatttgggaccaatagtctgccctttcaccacatngaacgttgagttatgaatgattgctggt

SEQ ID NO: 4845 - DNA, 390 bp, Gossypium hirsutum
  Clone ID: LIB3083-101-Q1-L1-D11
aaaaagggtgtgtggatcaaattgcctattcagcatgtcaatcttgttgaagctgctgtcaaggaaggattttggtttcaccatgctgagccaaattacttgatgctttgttattggattcctgaaggtacacatattcttcctgcaaatgcttcacaccggataggcatcggtgcatttgtcatgaacgaaaagagagaggttttagtggttcaagagagcactggacggtttcgaggtacgggtgtgtggaagttccctacaggagttgtgaatgagggagaagatatctgcgcagctgcggttcgagaagtcaaagaagagacagcagttgataccaaatttatcgaaatactgtcattcagacaaagtcacatagcattcttcgat

SEQ ID NO: 4846 - DNA, 178 bp, Gossypium hirsutum
  Clone ID: LIB3083-101-Q1-L1-D12
gcagtcggtttgaatatttgaagcttaaagcacgttacgatgcctgacaaaggtcccaaaggaatttactgggagaagatttgggatctttgagcagcaaggaactcgagtcacttgagacacagcttgattcatcattgaagcttaatagatcggcgcggaccaatacatgcttgat

SEQ ID NO: 4847 - DNA, 328 bp, Gossypium hirsutum
  Clone ID: LIB3083-101-Q1-L1-D2
cttcattcttttcaaagggtcctaattcattgtaccagacattctaaagcccgatataagtgcaccaggagtggatatattggctgcatattcaccggtagcttcaccatcgataactacaaccgatccaaggcgagttaaatacaacataatatcaggaacctcaatgtcttgtcctcatgttgctggtgtagctgcatacgttaagacttttcacccgcattggtctccctcagccattaaatctgctcttatgactactgcttttccgatggatgcaccgaggaatcaaagaactgaatttgcttatggatcaagacatataacc

SEQ ID NO: 4848 - DNA, 349 bp, Gossypium hirsutum
  Clone ID: LIB3083-101-Q1-L1-D4
tataagcaccttcccataagcaaaccacaaaggaaagcttggagagagacccaaaaacaatgtctaaggaagtgagtgaagaaggacagggtcgtaaggactatgtggaccctccaccggcacctctgattgatatggctgaactcaagtcatggtctttttacagagccctcatagctgagttcatagccactctcctcttcctctatgtcactgttgctaccgtaattggtcacaagaaacaacaagatgcatgtgatggtgttggtcttttgggtattgcatgggctttcggtggcatgatctttatccttgtttactgcactgccggtatctcaggtggacacat

SEQ ID NO: 4849 - DNA, 378 bp, Gossypium hirsutum
  Clone ID: LIB3083-101-Q1-L1-D6
tagcttttatcttttctccagtctcaaaccctttcttgaatgggatgaaatgaatcacattaaagaaaaaaaagcctgctgaaaaccactaaaagaatggcgactccagacgaaagtcctgcagctaagagatggcttcctctcgaagctaaccccgatgtcatgaaccagtttctttggggtctgggtcttccagagagtgaggcagagagctgcgatgtttatggcttggatgatgaactcctatcaacggttccacagcctgttcttgctgtgctttttctttatccaatgacttctcagactgaagaagagagattgcagcaagataatgagaaaagagatgttagcagtaaggtttatttcatgaaacaaact

SEQ ID NO: 4850 - DNA, 163 bp, Gossypium hirsutum
  Clone ID: LIB3083-101-Q1-L1-D8
agcatattgttttaaacgcgatggtgatgagggcttcgaggccgatttctggctaaaaaagaaatccccggatgcaaatcccgcggggtcccagcttactaagcagccccccctttgtttgatgaatcaaagcccaaaaacagcggatgaatttgctgccagc

SEQ ID NO: 4851 - DNA, 340 bp, Gossypium hirsutum
  Clone ID: LIB3083-101-Q1-L1-D9
gggaaagaaattattttagagtattgagaaggggagtttggcggtttctttaaagcctgcagttttcaatttcctagtccatcaaaatcacaaattgaacaaatgtagctttaatttacaaagaaattcgatttctcaagtttcacacataggtaacacacctactgctgatgttcagggtcagtctcaatttcatgagccaattctcgggtcagcttgtctgcacgatcatcatgtccgcctgcaaatgtgtaaacccggaaagcgaattggaatgccctccacagcattttactgcacactttctttggcgcttcacctttggtcttcgacttttcat

SEQ ID NO: 4852 - DNA, 311 bp, Gossypium hirsutum
  Clone ID: LIB3083-101-Q1-L1-E1
ctggcatcgtgatctttgcagggtgtgcgagaatattcctattgttctatgtggtaacaaggttgatgttaagaacaggcaggttaaggcaaagcaggttacattccacaggaagaagaatctgcaatactacgaaatctcagccaagagcaactacaattttgagaagccgttcttgtaccttgcccggaagcttgcaggtgatcctaatcttcactttgtggagtcgcctgctcttgctccttcttgagtacacatcgactttgctgcacagcaacaacatgaagctgagcttgcagcagcagctagcc

SEQ ID NO: 4853 - DNA, 325 bp, Gossypium hirsutum
  Clone ID: LIB3083-101-Q1-L1-E10
gtcctaactcataatacctttgcgtagagtatcttaggagggaacttacttaccttaacaagctaaaagctcgaaaggttgctcttggcgaggataaacgaaccttagttcgtgataaaaaggatgccgctgaaaagcatggaaggaagaaaacacaaaattggttaatgcccttggagaagaaaaaaaataaaaccattgatcatttttaaaataaaaagtttcagagaaattggatttgttttcacagcattcatccgggcttattaaaacaatatattgtggggcaattcaagcacttccttttagttttaaccttaagaaa

SEQ ID NO: 4854 - DNA, 419 bp, Gossypium hirsutum
  unsure (1)..(419): unsure at all n locations; Clone ID: LIB3083-101-Q1-L1-E11
ggaaatttttctaggatgatatnatatatacatataaaatgggctcaaaacangcaagatagatacagaatttaagnttatataagactaatatnagcttaaacanctaccatanngatatgaaggtagttggagcagcaagaaaaaaatataaagcaagccaaattaaaactacactcagtagcacaactgaagaaaggcacctattacacctcaaaactacttattatgactagcaaaacagatactgcaaactacagggtttcaagcaatccaaccggtcccaaggtgatttatcatccaacttgaacctctcctgttgctgctcgcgtaagaaaccatcacaattacaagagcaaagagaaggtcatgcgcagaagagtttgagatcaagttgtctttcttgtgatagaatcact

SEQ ID NO: 4855 - DNA, 391 bp, Gossypium hirsutum
  Clone ID: LIB3083-101-Q1-L1-E12
gggtgttcgtttaccgtggatgatctccggcgccaggcaaattctcaagcttcaatcttttattacacgagaaaaggccgatgttgtcccgaaaggccacgtcgcggtttatgtcggggagacactaaggaaaaggttcgtagttccaatcatcgtattgaaccatccttcattcaaggacttgttgaagcgagccgggaaagagttcgggtttgatcaaccgatgggtggtttgccgagaagatgcctttgtgaatctcactttagggttgcattaaaatggagtttgttagttaagagtaacaatcataaattttgaaaaaaattataaaacggatatagagattacttttgtaaaaaaaaaaagtctatccttcacaattttggtttt

SEQ ID NO: 4856 - DNA, 268 bp, Gossypium hirsutum
  unsure (1)..(268): unsure at all n locations; Clone ID: LIB3083-101-Q1-L1-E2
tatgggctcattttttacgatgaaaatttcattgccaaacacactggtcctggtttgctgtcaatggcaaacagtggaccaaacaccaatggttgtcagttttttatcacatgtgcaaaatgcgagtggcttgataataagcatgttgtatttgggagggtgctcggagatagtcttcttgttgttcggaagattgagaatgtggctacaggaccgaacaatangccaaaactaccatgcattatacccgagtgcggggaaatgtaaa

SEQ ID NO: 4857 - DNA, 381 bp, Gossypium hirsutum
  unsure (1)..(381): unsure at all n locations; Clone ID: LIB3083-101-Q1-L1-E3
aaaacccttttttgtttcctggttattctcctcagatgggcaggcccccagagtctattccctcatctacccccaaatatcctcacattatgtctctggtggccaacgaatattttcagcacattttacgtgtgctgaacaccaacgttgatgggaagcagaagattatgtttgcattgacctccatcaagggtatcggaaggcganncgctaacatcgtttgcaagaaggctgatgtcgacatgaacaagagggctggtgaattgactgcacaggagttggacaatctcatgaccattgntgcaaaccccaggcagtttaaaatccctgactggtttttaaataggcagaaggattacaaggacgggaagtattcccaag

SEQ ID NO: 4858 - DNA, 385 bp, Gossypium hirsutum
  Clone ID: LIB3083-101-Q1-L1-E4
gaaaatagattccatttattatcattattattttcttcgagttttgccttcagattcttcctctttgtaagttcaaatctaaaaagccatggcaaatgcagcttctggaatggccgtgcatgatgactgcaagctgaagtttctagagctaaaggctaaaaggacataccgcttcatagtattcaagatcgaggagaaacaaaagcaggttgtcgtggaaaagcttggtgagccaagtcaaagctatgacgatttcactgctagcctccctgccgatgagtgtcgatatgctgtatacgattttgactttgtgactgctgagaattgccagaaaagcaggattttcttcattgcatggtctccggacacatcaagggtgagaagc

SEQ ID NO: 4859 - DNA, 283 bp, Gossypium hirsutum
  unsure (1)..(283): unsure at all n locations; Clone ID: LIB3083-101-Q1-L1-E5
ggggggaaaaaaacacggaggaaaggccaancnagggagaagcaaaaagccnnggnccaagaagaacccangacngaaaaacgcaagggggcccagangctacaggaattacagcaggctaaagctcttgaagaacagtttgaggctagattcaaacaagaagaaaaggcgaaggaagaaatacttactcgagctagtttaatacgaaaggaaagagaagaaattgaaacctcaacaaaattaaaggaggacatgatgaagtcaaaagccgaaaccagtttac

SEQ ID NO: 4860 - DNA, 311 bp, Gossypium hirsutum
  Clone ID: LIB3083-101-Q1-L1-E6
ctttcatgattcaaggtccatcagtgggagaatatcaatcagatcagttaaggatcggtataggcatggttcctgaactcgaagctactcaacaagaacatagcaattcggaaaatgtatcgaaggctgctccagtttcgtatgaaccagatgacctttacatggtgattgggcgtggttcagcagaagagactgccatgacatcttggactccagagattgactacgaaatgaacgcattatctgctgaagccaccagcaggcatgctgatgttgaaataaccggggccaatgataagggtcctgatgct

SEQ ID NO: 4861 - DNA, 338 bp, Gossypium hirsutum
  unsure (1)..(338): unsure at all n locations; Clone ID: LIB3083-101-Q1-L1-E7
ataatcccaatttctcacggggaaaaactcatccgaattggtaagcttgttcaatggagataatgggtttttcgttgctcttcaagttccttctcttgctctctggctttggggtttcaatggcgttacaagaaaccccattggtggctaaaaacttgggtcaaatcagntctaactcggngcctgnggcccnnggagacncgcattatacggagcttgctgaattagtggagaaagctttgntgntacaaagcttagaagagtctgtgggaaagcataatattaccatttttgctcctaagaatgaagctcttgaaaggaatctagaccctgaattc

SEQ ID NO: 4862 - DNA, 383 bp, Gossypium hirsutum
  unsure (1)..(383): unsure at all n locations; Clone ID: LIB3083-101-Q1-L1-E8
anggagngcttagaaggaaccggggaaacngangccgagggtgtactcatctgcgattgggccgagttaacccacgaatgcctcctcaacatcctttccagactcactttcgagcaccgatggtccggtcctatgcttgtctgcaaaccatggttcaacgcctgcaaggatccctctctcaactccgtcttcgatctcgaaactcgcttcgattcctcctccgagtcaacccgctggtggacccccgaattcgaaagacgaatcgactccatgctccgatcggtcatcacctggagcaactgtaacctaacccagatccttacccgtcactgctccgatctctcttttaatttcgccgctcaaaggtgtccaaatctccaagt

SEQ ID NO: 4863 - DNA, 392 bp, Gossypium hirsutum
  Clone ID: LIB3083-101-Q1-L1-E9
gcgtggtggttatgctgctgagcgtgccgaaagccactaacgtcgggaaaacgaaagcttctcaacaagttctctgccatcgcaaccaaatgaaaatgcaatggccaatacaatctgatcccctagtgattatccatgtgatccaagaaactgacctcaactgcaacgatgctgtattagcagaagctaaggcggagcggcgacttgatcgacaacgatcagaggactttaaagaaaaagcaaggcaacttagttatccaaagatttttttcccacctccatgcaaggtaaaagttactgcaactgatgataaaactcgtgaaggagtacaatctaaattctgtgatttggagaaccaaatttatgacaaaggcgactacagagtgggatgc

SEQ ID NO: 4864 - DNA, 383 bp, Gossypium hirsutum
  Clone ID: LIB3083-101-Q1-L1-F1
ctcgagtttttttttttttttttttttaactaaaaatagcggggggaagtttagaagaaacaaacggaatgaagcaatttatcacaacgatgattattttgcggcatgtttgaaagttcaaaatctattgatttacactcaaattcactcacaaacactgagaaacattgaattttcagaggcactcaacccgcgcacacatcctatcgacccggtttcagtttcaaagcaagttctattaatttacaccacaaagcatatgaatcttgaacctaatagtgccaacaactcctcaaatctcaataagatcacctcctccactctacttgagtcgccttggcatttctgtctctggatgacagtggtctgtcgcttttgctccc

SEQ ID NO: 4865 - DNA, 383 bp, Gossypium hirsutum
  Clone ID: LIB3083-101-Q1-L1-F10
aaatgtgctttcattataccaccaccatacggttgccgacagcgcgcagatgatggctgattccgccaacggaggagaactccgactaagcccacggaggtttggtatggcgaacatggtttggacatggtgcgtgggtgcgtggtgcgtggtggtggagaacgtgggtagtggcggttgaatgttggcacatggcggctgaagggaggcagcaaatctaggatttccctctttgctgaaaaatttttgtgggctagggtttttttttttaaatttgggctttgttttattgtaataggttaatggctatgtttgggttctaataggctgaaattggatatttgttttttcggtttattttatttgatgcgcccgggcaaaaa

SEQ ID NO: 4866 - DNA, 389 bp, Gossypium hirsutum
  Clone ID: LIB3083-101-Q1-L1-F11
cagatcagtttagtttgaagaaaagttctgataattggcgtgctttctaattggtaatccaaaagttaaaatgataagaaaaaagataagtaattttccctcgggctcttatacaccttttcctgtttttgttgaggttttgttgggttgcctacctttttactatgtgctgttgtgtttaatattctgcagcatggaattggattgttgtaaagttgtgctgtattttttgttatatggcgacatttttttgaggggtgttggcatgccagaatagtgattggaaaataataaaacacacacaaaaaagtctccttttaagttgctgatcatcatggtaggtttgcttttgtaatctgcatggtgataattttatgttctgttagaaa

SEQ ID NO: 4867 - DNA, 300 bp, Gossypium hirsutum
  Clone ID: LIB3083-101-Q1-L1-F12
gcttatattttttttttttttttttttttctttttttgcgtgcgggttttttgtttatgaactgccggccttccaattttttattaatatcctccaaattaaaatttcaggccatctgataatatttactttcatgaggaaacagaaaaacccccccagaaagaaccattctgtacttaaacaactgccgttctttggaagagcggctaccaaaaaaaactgcttcaagtatcacatggcaatgattctgaggcaggatcacgcccacccccgggaaaataaaaaaaaagcggggggaat

SEQ ID NO: 4868 - DNA, 390 bp, Gossypium hirsutum
  Clone ID: LIB3083-101-Q1-L1-F2
gctgaagcttatggaaggagaatgatggtaggacctaactgatggctgaatagatggaacactggcaagagaatgagcgtgagaagccggtggagatgtccatgccgctgtgtcaatttgtatggatgatgatgatgctatccgagatctaacacatgatagcacagaggacactgagcttgggctggttgaaagcaatggtgtactttctgaagctggtaaatcacctacggtggttcttgcatctcgcttgcaaacagggcaaaatgttctccatgttgtaagccaagaatcaatgcagaaggcatgaaacttgtgatgacatggaagaatcctgagcttctctccaatggtataatcttcaagacatactgcacacgttcttgaagt

SEQ ID NO: 4869 - DNA, 350 bp, Gossypium hirsutum
  Clone ID: LIB3083-101-Q1-L1-F3
aatggactctttattttaataccaaagaacttttcaaaaggcttggtgtcacagtttaattgtcaaaccaaaaaaaaaaaaaaaacaaattaagcataattgcctggttttgatgtttctgtttgtatcactaaaaaaaaaatttcgatagctatttctttccctgtaaagtacctaaatctgtgattcttatttgcatatttccagtttccaattgttttgcatataaataatgattacatcaaaacaaaaaaaaaaaaataatatatgataataatttgggaaaaaaaaaattaaattttaattgcattaaccactctattaaaataaaaaaaaccccttcggggggg

SEQ ID NO: 4870 - DNA, 236 bp, Gossypium hirsutum
  unsure (1)..(236): unsure at all n locations; Clone ID: LIB3083-101-Q1-L1-F4
gntgtttttttctttcatgggttacatatgtnnctcccgggaaggctnnntattatgcagttcaggtggagaaattttttcttaatgtttctgagctgttttttttgaaaaaaaaaaaaaaataaaaaaagaaaaaaaaaaaaaaaataaaaaaaaaaaaaaaaacagaggggagtccgcttggctttttacaaatcgaaatgttaacttaaaaaatcaattccctgggggggggc

SEQ ID NO: 4871 - DNA, 286 bp, Gossypium hirsutum
  Clone ID: LIB3083-101-Q1-L1-F5
agaagacgattgagaccggtccagtagtttagccgagtagaggatgctcattggcttgtgtagatcagctggagagcttacatatttcatttctgtatctcagattatcctagagcgtataccatttttactgtattaacactcaattcagattctgataatctatggacaatcccatcgccatatttgctcctttccttctgaatttatgtacatgaaagatgacactgttgcctttcttttgtaattccaaattattttctcaataataatgctaaatgtaccg

SEQ ID NO: 4872 - DNA, 329 bp, Gossypium hirsutum
  unsure (1)..(329): unsure at all n locations; Clone ID: LIB3083-101-Q1-L1-F6
gaacaagattcttgctcgaaaacctatactctctgatagctctcttcttcgagccgctaggtcgactgtttagcttcaagtctctcttttttgaaagttcctagttaatactggataatgggtaaggagaaggttacatcaacattgttgcattggccatgtngacttggaagtcaaccacaacgggtcacttgatatacaagcttggaggtattgacaagcgtggatcgaaggtttcgagaggaagctgctgagatgaacaaaggtcattaagttgcctgggtgctcgacagttgaagctgagcgtgagcgtggatcaccattgatat

SEQ ID NO: 4873 - DNA, 382 bp, Gossypium hirsutum
  Clone ID: LIB3083-101-Q1-L1-F7
tctccctcatcgccaaggacctcctccacgcgccgtctcggctggtttccctcctttccctcggtgttgcttccggtgaccttatctatttttcccttaaccccaacgctttttctccacctcctcaaaccctgtttcaagaaccgatcctaatgccagagtccagcgccaatcgagagaacccagttcgagaacccatgttgatcgagccccaagtttctcaacaagctaataaaggaaggctcttggagcattatttattgaggaagttcttaggggaagaactgggtgatattcgtagcattcacaacctcatggcgatggaaatccacgtgattttattggattcgggtttcgtgttgtttgatacagtttcaggctt

SEQ ID NO: 4874 - DNA, 231 bp, Gossypium hirsutum
  Clone ID: LIB3083-101-Q1-L1-F8
tccattccttttattctcgctctttcttttttttttctcacacgggaccgcttttcttttttttttcctggtttccatttcttacttttttttgctcctccggttggttccccagaaaaaaaaggtgaaattaaaattaacccaggaaggggaagggggaaaagggggggagggttgggaacctaaccacctggacttttaacctaaaaccggtggccctcaattttcttt

SEQ ID NO: 4875 - DNA, 392 bp, Gossypium hirsutum
  Clone ID: LIB3083-101-Q1-L1-G10
gagagagctttcatttgaaaaaaaaaacgaaaaaagaaagaaaagggagaaaggaaaactagaaaatgaatagaaagagaattcattcagttctgtaattccgttctaaaccgaagaccaaaaagaaagtgtgaaatttgaaatacagaggtcgttgcttccccatttccaaagatgaacggcggcccctctggtttcaataatgctccggtgaccaaaacctttgtaattgcatctgccctcttcaccgtattctttgggatccaaggtcgttctttcaagctcggtttgtcctatcaggatattttcacaaaacttagcatatggaagttaatcacatcagtctttgccttttcatctacaccagaactgatgtttggactttatctact

SEQ ID NO: 4876 - DNA, 215 bp, Gossypium hirsutum
  unsure (1)..(215): unsure at all n locations; Clone ID: LIB3083-101-Q1-L1-G11
taggttnnnntttttttttttgaacaccaatggggagctatgggggcattgcttccgaatttgatctgccaaataccccatagcaacctaacacccagttttatgttttgggttttgctttcaatcctcagccttttaaccttgaactcagttctggcttctcctttagcttgtgctaaagcacctcaagaaaaagaatgggctcttgtgaaatc

SEQ ID NO: 4877 - DNA, 386 bp, Gossypium hirsutum
  Clone ID: LIB3083-101-Q1-L1-G12
ctacaaggttttcattggctttaatggggtcatctagaaatgaaaaccaagaagtgaataccagcatgagaactgtcgagaccatgctgcggttggtgcctatggctttaggggttgctgcacttgttgtcatgctcaaaaactcacagtccaatgactttggctccgtttcatactcagatcttggtgctttcaggtacttggtgcatgctaatggtatttgtgcaggctattcccttctttcagctattatagcagctgtgcctcgtccttctactatgcctagagcttggactttcttcctcctcgatcagattctaacatacataatcttgggagctgctgctgtttcaaccgaggtgctttacttagcaaacaaaagagac

SEQ ID NO: 4878 - DNA, 380 bp, Gossypium hirsutum
  Clone ID: LIB3083-101-Q1-L1-G2
acacgaatgtgtgtatgatgagttcgtaaagaaagcaaaggctcgagcactgaaacgagtagtcggggatcctttcaagacggggatcgaacaaggccctcagatggataatgaccaattcaggaggatcctcaggtacataaggcttgccatggaaggtggacctcctctggattctggaggtgaacaatttggctccaaaggctactatattcaacccactgttttctccaatgttcaggatgacatgttgatagctaaagatgagatatttggtccagcacaatccatctcaaagttcagggatcttgaagaggtggtacaaagggcaaacgcatcttcatatggatcggctgccggagttttcactcagaatatcg

SEQ ID NO: 4879 - DNA, 387 bp, Gossypium hirsutum
  Clone ID: LIB3083-101-Q1-L1-G3
gtgagagtgttaagcggataaatgagatagttaacaggttgaacaagactaaagtggaaaggaaacctgatttgaaagctgagaaagaagcagtttatgcagcggaaaaagccgagagaaagcaacagttgagggaaaaaaaacgccgagaggagatgcaaaggcttgaaaaggaaagacaagcagaaataagaagctacaagggtctgatggtctctgaaaagatgacatcaaacaaacaaattgcagcaacaagcaagtctttccaggaagtagaagaggattttatgtgaaatgtactggtatttcatcgctaattacgattcttctagctgccagaaacttgctttctgtcaaagaaaggtggtttctttttacttctttttc

SEQ ID NO: 4880 - DNA, 213 bp, Gossypium hirsutum
  unsure (1)..(213): unsure at all n locations; Clone ID: LIB3083-101-Q1-L1-G4
ggaagagcttttggtcgtcaagcacttctcagnngaggggcaacttgagttcaaggctgtcctctttgtccccaagagggctccttttgatctctttgatacaaggaagaagcccaacaacattaagctctatgtgagacgtgtctttatcatggacaactgcgaggagttgattcctgaattcctcagctttgttaagggttttgtcgactc

SEQ ID NO: 4881 - DNA, 324 bp, Gossypium hirsutum
  Clone ID: LIB3083-101-Q1-L1-G5
catatgcatttcatgatgatgcacaacacatcagatggcggcatgaacatgacgaagcaccataagatgatgatgcatatgaccttcttttggggcagcgacgccgagattctcttctccggttggccgggaaccagaaccagcatgtacgtcttggccctcatagttgtcttcctgcttgctttcatggtggaggggatttctcactctcggttggtgaaacccggttccacccaccacgtgaccgccggtctggttcagactttgttgcatgctctgagggttggactcgcgtatctggtgatgttggctatcatgtctttc

SEQ ID NO: 4882 - DNA, 315 bp, Gossypium hirsutum
  unsure (1)..(315): unsure at all n locations; Clone ID: LIB3083-101-Q1-L1-G6
caatatatgtcatctgcaggcgttctttggacattgaacgacccacttatacgaatcttaaccgccttgtctctcaggttatctcatctcttaccgcatctttgaggtttgatggagccctgaatgtggatgtgactgagttccagactaacctggtcccatatcccaggatccactttatgctttcttcttatgcccctgtcatttcagctgagaaggcttaccatgagcagctatcggtggctgagataaccaacagtgcttntgaaccctcttcaatgatggccaaatgtgacccacgccatgggaagtaca

SEQ ID NO: 4883 - DNA, 379 bp, Gossypium hirsutum
  Clone ID: LIB3083-101-Q1-L1-G7
gccaattattgatgctttgagtcgaagaaactggaacttgacttatatattgaatacccaccaccatcacgaccacactggtgggaacgcagagttaaaagcaaggtatggtgcaaaggtgattggttctggaatagacaaggataggattcctggaattgacattgttctaaatgatggggaaaagtggatgtttgcaggtcatcaagtgcatgtcatggagacccctggttatacccgaggccatattagcttctattttcctggttctcgagcaatttttactggagacactttgttcagcttatcatgtggcaagcttttagaaggcactccggagcagatgctttcttcccttcagcggatcatgtcactacct

SEQ ID NO: 4884 - DNA, 392 bp, Gossypium hirsutum
  Clone ID: LIB3083-101-Q1-L1-G8
gtttgatatttctcattcaagcagaaaagcccaggaccggacctaaaactcctgagctgattgccataaataatgggaacacaagacaccattcaaagtttataattactctcacagacggcagactctgaaaaacacaaaagcctcaccaccgtctatcaagaacccagttctgtgaacaacatcctcgacaagatggtgatgacttaaaactattaccatcaaaacacacaactaatcgtccaatgatggctgacctactaatgagaagcaatgttttattgtagtaaccataaaatagtttggttggatcaactgaaacccacacggttcacttcccacccttcttggcagcagacttcgtcaccttggctccagatggatctttcttc

SEQ ID NO: 4885 - DNA, 358 bp, Gossypium hirsutum
  Clone ID: LIB3083-101-Q1-L1-G9
gcaagagcttttctttgcattcttcaactcgggtctgccggtgcggtccgaccaatcaccctgggtctttcaggtgcagcctccataggaattcggatagagtttcaagcaaatcggcggcgacgccccatgttaatagacagagggagcgtcagtcgaaggcggcgatgatgttgatgatgtctaacgtatcatcgtcatcgtcgaaatcaagcttgatcaaagcctttctgatgcagatcattagaccttcttccacccacatcgatcttcaaaggaggcgcaatttccaccccaaaccttcaaaggtttagttcactcaacacctctgctaatggagtgaccggttcttgatcat

SEQ ID NO: 4886 - DNA, 361 bp, Gossypium hirsutum
  unsure (1)..(361): unsure at all n locations; Clone ID: LIB3083-101-Q1-L1-H1
ggaaaggcagtggaggaaagtgggtcaagatggataaatatggcttataaggttgagtgcactacaatcttcaatcccacacaatttacgcgcttgaccactacgatttgatgtnttgcttccaagatgggcgttcgcctcctgatgaagaatttgatcaaggaaagcgaggaaaagctaggcaaagttctggatatttatgaggagaggctgtcaaagaacaagtacttggccggtgatttcttcagccttgctgatctgagccacctaccatttactcagtacttggtgggtcaaatgggaagggaatacatgataaccagcaagaagcatgtgagtgcttggtgggatgatattaata

SEQ ID NO: 4887 - DNA, 370 bp, Gossypium hirsutum
  Clone ID: LIB3083-101-Q1-L1-H10
tagcttcctctttttttttttttatggtacttcgcggggttgggtggggtttgtttatagtgatggcgacaaacaagggcgaaggggctaaagatgtatcgaaaacagagacaaaacctatagaggaaatggttttggggtgtatcattgggaacctcaccgacaagaaggacctgtttacaaaagctgataagatacatattaagagctcggatttgcaactggttaaacacttaaacaaggctcggtctagggacaaatatggttcgcttgttactaagaaagaagagtgtgaaaacgatttggttaaccttgatataatacatgttgtagctcatggaacttatggcatagtctaccgaggtgttta

SEQ ID NO: 4888 - DNA, 319 bp, Gossypium hirsutum
  Clone ID: LIB3083-101-Q1-L1-H11
gaaccgcatttagatatcaaagtacctctttcaagagggtgtttggtacgccaaaaaagattacaacttggcaaaacacccagaaatcgatgttccaaatcttcaagtaataaagctgatgcaaagcttcaaatccaaggaatacgttcgtgaaacttttgcttggatgcattattactggtaccttaccaacgatggcattgaatttttaaggacttaccttaatctcccctctgagattgttcctgctactttgaagaagcaaactaggcccggcggtggtcgtaccatgggtccttctgatagccatccacgtggt

SEQ ID NO: 4889 - DNA, 391 bp, Gossypium hirsutum
  Clone ID: LIB3083-101-Q1-L1-H12
catcatcttttgtgttactgggcttgttggaagagagctaaccagaaggctcatctcaaaatctaagtggaagatctatggtgtagctcgacaacctgaaataatacccatcaaaagttctagctaccatttcataccctgtgacctgttagatccatttgaaaccaagcagaagctatcaatactgcatgatgtgactcatgttttttgggtcacttgggcttcccagtatccattggatactgctgagtgttgtgaggaaaacaaggcaatgttgtccaatgtcttgagtgccatcctccccatagcaaaggggatgaagcattttgtccttcaaacagggatgagtcattatgtacccatagctgtgaatgggaaaacaacccatttg

SEQ ID NO: 4890 - DNA, 194 bp, Gossypium hirsutum
  Clone ID: LIB3083-101-Q1-L1-H2
caggccggtttccatgtcgaacgcctgctgggagcttactgcctcagcatggaatccacctgatggtcagatgccaagtgcaaaactgtcggaggaggtgatgatgcttttaacacctttttagtgaaactggggctgggaagcacgtccttcgtgccgtttttgtggttctggaacccattgtttttgataaa

SEQ ID NO: 4891 - DNA, 385 bp, Gossypium hirsutum
  Clone ID: LIB3083-101-Q1-L1-H3
catttatccttacaatggcattgaatctgatgaaaaagaagagttcaactgatttaacatgtagcattcctgagcagcatattgaaccaacgtacaaggaggaaactcgtccaccttctcctgctccaaggtttactgaggcagacgtcctgtcatctgttgtaagaaggctgggtgatctagaagagaagattgagatgctgcaatcaaaacgatttgagatgcctcatgagaaagaggagttgttgaatgctgctatgtatcgtgtggaaatgctagaagcagaactaattgctacaaagaaggctctccatgaagctataattcggcaggacgaactccttgcacgcatacaaagtgaagtagtagtcaaacctgggagaag

SEQ ID NO: 4892 - DNA, 371 bp, Gossypium hirsutum
  Clone ID: LIB3083-101-Q1-L1-H4
gaataatgttttaaatttgaaaagggtaatggtgttgctcgtgctacaaggtctccaatggctttaatggggtcatctagaaatgaaaaccaagaagtgaataccagcatgagaactgtcgagaccatgctgcggttggtgcctatggctttaggggttgctgcacttgttgtcatgctcaaaaactcacagtccaatgactttggctccgtttcatactcagatcttggtgctttcaggtacttggtgcatgctaatggtatttgtgcaggctattcccttctttcagctattatagcagctgtgcctcgtccttctactatgcctagagcttggactttcttcctcctcgatcagatactaacatacat

SEQ ID NO: 4893 - DNA, 378 bp, Gossypium hirsutum
  unsure (1)..(378): unsure at all n locations; Clone ID: LIB3083-101-Q1-L1-H5
gggttatgatttgatgtctgngccaatggcaatcgcattgtctggtcaactgcttcttggtcaacctgtgatggttaaaccttcagaggccgaaaagaatcttgttcagtccaatacttctggtgcaggcgcaggtggtgttgctggaccatatggagctgttgatagaaaactatatgtagggaacttgcattttaatatgacagaaatgcagcttagacagatatttgaaccttttggacctgtggagcttgtgcaactaccacttgaccttgagactgggcagtgcaaaggttttgggtttgtccagtttgctcaactttaacatgcaaaagcagctcaaagtgccttgaacgggaaactggagattgttggtcg

SEQ ID NO: 4894 - DNA, 215 bp, Gossypium hirsutum
  Clone ID: LIB3083-101-Q1-L1-H6
ggacccccggctgagattcgccggagatcttcagggtcaccaaagaatcttgttttactatatggcttttgtcttcaacttgacaatatgtgaagctggtcacacaggtcttgttcgaggaatggcttcgagacatctttgacatgaatatttttgtccacagtatatgcaccacacaggctatacaaagagatttgatggaactgtattattat

SEQ ID NO: 4895 - DNA, 298 bp, Gossypium hirsutum
  Clone ID: LIB3083-101-Q1-L1-H7
gtgcacgcccacatggcagatgtcgaagaacccaagaagcttgaatccgaaatcccctccgaccctccgccgccacccaccgaagccgccgtggaaaaatccgtgactccacctcctcctactgaagaaaagcccgccgactctacggaaaagcctcccgaacccatcgaaaaggcggcagagtcgacggagaagaaaagcacggaggtgtctgttgatcgagatgctgtgcttgctagagttgcgactgagaagcgaattcactaatcaacgcttgggaagaaagtgaaaaaagcaa

SEQ ID NO: 4896 - DNA, 294 bp, Gossypium hirsutum
  unsure (1)..(294): unsure at all n locations; Clone ID: LIB3083-101-Q1-L1-H8
tgcttgtgtgaaatacttccgngcatcctgctggagtttggccgcccccgggagatttgcatcatcaagtctcttccaggtgaccactaagtcaatgaaggtctggttctctatcacaccagaatgatgatgtttctttacttcctcacgatattatttccctttgccctcaaccccatttgtttaagaatatttggtatttttcttaatgttaagttgtggatgttcttgctaaaatttgtagcttgagtcaagattttgttttggttaatgaatattctgagttgcttgttt

SEQ ID NO: 4897 - DNA, 259 bp, Gossypium hirsutum
  unsure (1)..(259): unsure at all n locations; Clone ID: LIB3083-101-Q1-L1-H9
cagagaggttgttctttataaagtctcttcaccattgtttgaacatgaaggtttgtaataaaaatttgtttctatcaccattgctttgcattgctattgcaggagttttgggtcaagctcctagtaatcctcctacgtctacgccggcgccacccacaccaccggnttctactgctcctgcgacgactcaaccaccggctacaccaaccgtcactccggcaccggtttttacttctccttccactttattaccgccccc

SEQ ID NO: 4898 - DNA, 384 bp, Gossypium hirsutum
  unsure (1)..(384): unsure at all n locations; Clone ID: LIB3083-102-Q1-L1-A1
gtaacaggacccgcgagaatcgacaggatcttctcttgaaacacctggtgaaacataagacgggatgtacattggtggaaacaaaacaaaagaacacttatgaatgaaatgactaacatgatcgagcaactgaaagatcagaaggaaaaagaatctacgttacgggaacaagttgagaagctacagattaaggcaaacaaggaagaaaacgagaaggagaatctgatgaaatcggtgaagcaactggagaataaagttgagttgttggagagggcaataaaagagaaggatgaaggtatattaggcttaggagaggagaagagggaggccattaggcaactntgcacgtggatagattaccaccgaagtcgctgcgatgatctg

SEQ ID NO: 4899 - DNA, 380 bp, Gossypium hirsutum
  unsure (1)..(380): unsure at all n locations; Clone ID: LIB3083-102-Q1-L1-A2
aaccaataatanannanacctancctatctacatccatcccttatctccaaccataatatatatactacttcatacacaacttcaacatctcctaccnnnnttaggcctttttttttcaagaccccctttcggaaaacgcattggctttcactcaagttcgagatccattaaataaagcaaaaaatgcacgttacagacgaaaggtagatgttcattggcgaataaagagaatgcaagctatgcaaaaacggatttcactcattttcttagccggaatgtgccctcaatctctttctgacacagggctgagcgctctagaagcgaaataattaccctcgcggggttgatgaacctgcctttttggttggcgtggggtgaa

SEQ ID NO: 4900 - DNA, 388 bp, Gossypium hirsutum
  Clone ID: LIB3083-102-Q1-L1-A3
ctcttggtggctaccctggacctcaaggtccttactattgcggtgttggtgtggacaaagcctatgggcgtgacattgtagattctcattacaaagcatgtttatatgctggggattaatatcagtggcatcaatggagaagtgatgcccggacagtgggaatttcaagttggtccggcggttggcatttctgccggagatgagttgtgggttgcacgttacattttggagaggattacagagactgctggagtggtgctctcctttgatcctaagccaattcagggagactggaatggtgccggcgctcacacaaattacagtacgaagtccatgagaagtgatggaggctacgaggttatcaagaaagcaattgaaaagcttgggc

SEQ ID NO: 4901 - DNA, 332 bp, Gossypium hirsutum
  unsure (1)..(332): unsure at all n locations; Clone ID: LIB3083-102-Q1-L1-A4
ctaatcctatcccccttcttcttccttgtctttttttcataccctctatttcctccacctccttcttattttttacaccacccnnnnttttgaggtccggtattttgtagggatgtgggtcaacatagatggaaccggggttgtgcgaacaaactcctctaaagaaggcaaaagccgtgtggctcttagggcgggcgcgtgtttgttaggtgttgactgcttaggcttgtgtaactccctcgggttgttggggtgccgctgagggtgtaggcttcacaccaggtggctgtgcaaggggttagtgtcttttgggcaactatttctccctgctg

SEQ ID NO: 4902 - DNA, 391 bp, Gossypium hirsutum
  Clone ID: LIB3083-102-Q1-L1-A5
gtgatttccttagtctggtttatgtggggagagttagggatcattgtaggatggagtacttgatattgacgtattattattttagcctttcaccgtatcaccaccatgtaagatgatgggtcctatggagatggcggtgggcggacaattggtgcttaattccttccttataatccatctttgaaccatgttgcttaaaaggatgtttggagctggagactggattgtggtgcttttttattttattttattatttaatattcaagggttttgagaacattaatgttcatagctattattgtacgagattttttttgaaaaattagagtcagtttgcggtcaaacttctacggaaattatatttaatatctggttttggaatattgtgaat

SEQ ID NO: 4903 - DNA, 390 bp, Gossypium hirsutum
  unsure (1)..(390): unsure at all n locations; Clone ID: LIB3083-102-Q1-L1-A6
tagatactttttttcttctttgatctctgtgacctgttgccttgtccattgtgataatctgttttttattttctcatcctatctgctttgcctatcgtcgcctnccaattggtggaaagatacttgagcttacccctgagcagtacattctaaaagttggtgacggagagctagctcaatgcattagcggattcggtgctctcgatgtaccgcctcctcgcggaccactctggatcttgggcgacgtgtttatgggtaagttccatacggttttcgactatggaaacatgcaaattggatttgcagaggctacataaagtaatcacttcaacagttacacccctttggtatgtataatatgcagtgctaagtattactcttataaaaata

SEQ ID NO: 4904 - DNA, 393 bp, Gossypium hirsutum
  Clone ID: LIB3083-102-Q1-L1-A7
actgaactgtgcgacaagcaaaagaaagagatcgccaagtggttcctcctcaatgctcccgcaggcgaaatccagtacgttgccaaagatttaaaatccgttttaataagtgatgacgtctacgatgaggcggcatcggaagcatttcctgtttataacaaatctcacatgatttgcctcgaaatgcctggtagattcggagatgtgctggttacatcatatggggagcttcagggtaatgagtatctagaccccaagactgcccaagttgctatagttgaccatgtcaaacaggtttgtacagaggttagacctgccactgatgaggaacttcccactccatatgttgaggaataccgatgtgctctggaagcagaaatgctgaagtatgtt

SEQ ID NO: 4905 - DNA, 400 bp, Gossypium hirsutum
  unsure (1)..(400): unsure at all n locations; Clone ID: LIB3083-102-Q1-L1-A8
tattctcactatcaccattttttcctacactatttacacttattttcanctttctatttatcaaatcnatcaatttcttcaaccatttcaaatattttcacctattcctncannccagcaccggcaccggcaaagtcgaagaataagaaggctaccaccgttgctgatagccccgatgttaccccagctgataactccaaagcggccaccttgcaaaatgttggtttgtttggagttgctgctctagttattgcactttctttgtgaccatgaaaatggagaaaagaagaagacagtgattttgatggtgatcaagatggcgagtgttttttattttttcaataattatcatttaaaaaatttatgttctgtatgaagattgaattttgagtttgtcttg

SEQ ID NO: 4906 - DNA, 395 bp, Gossypium hirsutum
  Clone ID: LIB3083-102-Q1-L1-B1
tcaagtttctacatcagttgtagagccttacaacagtgtgctgggcactcattcactccttgagcacactgatgtcgctgttcttctggataacgaagcaatatatgaaatctgcaggcgttctttggacattgaacgacccacttatacgaatcttaaccgccttgtctctcaggttatctcatctcttaccgcatctttgaggtttgatggagccctgaatgtggatgtgactgagttccagactaacctggtcccatatcccaggatccactttatgctttcttcttatgcccctgtcatttcagctgagaaggcttaccatgagcagctatcggtggctgagataaccaacagtgcttttgaaccctcttcaatgatggccaaatgtgacc

SEQ ID NO: 4907 - DNA, 341 bp, Gossypium hirsutum
  unsure (1)..(341): unsure at all n locations; Clone ID: LIB3083-102-Q1-L1-B2
gaccgaaagatgctcactnnctctgtgttcccttcccctatggtgtctgacactgttgtcgaaccttacaatgctactctctctgttcaccagcttgnnnnnnnnagatgaatgtatggttttggacaatgaagctttatatgatatttgcttccgtacactgaagctcactactccaagctttggagacttgaaccacttgatttctgccaccatgagtggtgtgacatgctgccttcgtttccctggtcaattaaactcagatctacgcaagcttgccgtcaatctcattccattccctcgcctgcatttctttatggttggctttgctccccttactt

SEQ ID NO: 4908 - DNA, 395 bp, Gossypium hirsutum
  Clone ID: LIB3083-102-Q1-L1-B3
tttttgtggttcgtcgccgagtagagtagctaacccattaatacaggatgctcgatttggggatgagaagatggtcaacccgccgtctccaaatccgcctcctccttcgtctccgtcatcatcttcaaggaaaggagggtgtattcgggccaattttggtaacaaaccagcagtgagagtggaggggtttgattgttttgcactggcttagaacccatttctatcaacaaaagagtacatagataaaacaagaggagctaccaaaacagagaagggaattttgaaattgtaagtgactgaagagaaaaaagcaaagaaccctttgttagtgtaaatatatggataaagggttgtttgtatgtaatgaaaaaagaacttggtgtcttgtaagtatg

SEQ ID NO: 4909 - DNA, 121 bp, Gossypium hirsutum
  Clone ID: LIB3083-102-Q1-L1-B4
attagttgttactatgatgcatggggctgctggtttttaggttgtgtttgtaacatttcttggcgctactttatactatttatttggggatctggaatacaagctatgcacagttcacatt

SEQ ID NO: 4910 - DNA, 394 bp, Gossypium hirsutum
  Clone ID: LIB3083-102-Q1-L1-B5
gaaggttgtttggaggatggaaaggtcgctgcggaagaaatgtctgagaaacacttgggatctcatgcagtaaatcattcgatatggacgttatcatccgattcgagtgcttctcctggccattctcctgaagggaagcagaaagtgtctctatctcaagagagtggagaggcaagtgatccagttctgactggcagggccaacaggtctccactaaagaagacttctaaaggaaaatctccaaagaagggggtaaaagcaagggttcagactcccaaaaaggagaagaatgtgaaagatgatgcgaagataaaagaaaatgatgttaatgtggaaactgccgaggaggaggcttctgaaaagcacatagaacctcatgtttctacctcaaggt

SEQ ID NO: 4911 - DNA, 280 bp, Gossypium hirsutum
  Clone ID: LIB3083-102-Q1-L1-B6
ttgtggactccaagggattgattgataaatctcgaattgactcacttcagaatataaaaaagccctgggctaacgatcatgaaccaatcaagaaacttgtcgatgctgttaatggaatcaaaccaacagtgttgattggaacatcaggagtaggaaggacattaactaaagaagtggaagaggctatggctgctttgaatgaaaaacctattatattctcactttctaatccaacttcacaatctgaatgtactgctgaagaagcatatacatggagtga

SEQ ID NO: 4912 - DNA, 388 bp, Gossypium hirsutum
  Clone ID: LIB3083-102-Q1-L1-B7
ggaggatgttcatgaacctgctccgcctccgcaacctgtgacactagctccagaggaaaaggccccaaaaacggctgcattaaaagctactgaaaagaaaagaaaggctgttgaagtagctaaagaagagccccttgatccaggggctgataaacttcgccagcaaaggcttgtggaagaagccgattataaatcaactactgaactgtcttccaagaaaggtgatgataagactatcgataattttattcccaaatttgaaagtgactttgaggagtatgatgagcttatttctcacaagcttcgcccatatgagaaaagttatgattatattgctctactcaagggtgggatgagattgtcattgacttatttgaaagcaggtgat

SEQ ID NO: 4913 - DNA, 281 bp, Gossypium hirsutum
  unsure (1)..(281): unsure at all n locations; Clone ID: LIB3083-102-Q1-L1-B8
cccaccattgccaccaataagatctccgtcttgccaccaataccaccnaataacattgcaccaatgacattggcaccaataacattgacaccaacaggacaccaatcgaggaaccaatagatccaccaaccgagaaaccaacagatccaccaactgaggtaccaacactgccttgaatcccaaagctaccaacaatcccaccatcttagcctaagcctatcactgttcttccacaagttcccagcaatagcttgccttccattcctttcatgtctccatct

SEQ ID NO: 4914 - DNA, 392 bp, Gossypium hirsutum
  unsure (1)..(392): unsure at all n locations; Clone ID: LIB3083-102-Q1-L1-C1
ctttgcttctttactaactaaaaaggaaaaacattctttgtttaacgcttaagattcctttaacaacaatggctgcctcaatgtctactctaatggttgttctcgtcngtgtattgcgctctcatgggttccgccattgccgccgacgctccggctccgagccccacctctggtgccggctctatctctccttcatttgtctctgtttccgtcgccgccgccgctgtggctctgcttttcggatctagacttcggatctgaatgatgctatctctggtgttcagatgatgctctgtttttcttttatatatgtatttttttctttttgatttgattttgaatttggtttggaattttagtagctgtggtagtggatctagggagtgattata

SEQ ID NO: 4915 - DNA, 323 bp, Gossypium hirsutum
  unsure (1)..(323): unsure at all n locations; Clone ID: LIB3083-102-Q1-L1-C2
ctctctctctctctctcctctctnccccccctttttntnnttttnnnncttggtataacaaatgcaggtgtttgatagaatgactattccaattcgcagagtttggagcggtgtcgccacccgcttcggcgttcgtaaaagtgctcatatgaagcttcgaaaagatataagctcttgcgaatacgaggatgtgcgagtgatgtgggaaatgctgagcagaaacgaagcagaaaccattcgatccccaacaacaagtaaaagaagatgcagaaagagaccattgtggaattgctttgaataggcaaagcgagctcctttttttt

SEQ ID NO: 4916 - DNA, 407 bp, Gossypium hirsutum
  unsure (1)..(407): unsure at all n locations; Clone ID: LIB3083-102-Q1-L1-C3
aaaattcaaaaaagaactagttatttattatcgctcacagtctctttgagaaagcccaataattccctctctcattggctaattttggatattctggctgccctagattttctctctgncgcgtctacctagagaagaagccatggctaatgcaccgtctgtaatggctgtgcatgatgactgcaaactgaagttccttgagttaaaggccaaatgaacataccgctacataggattcaagattgaggagaaacagaagcacgttgttgaggaaaagcttggtgagccaagtcaaagctatgatgatttcacttcaagcctccctgctgactaatgtcagaatgctgtctatgattgcgactctgtgactggtgagaattgccaaaaaagcaggatgttattcattg

SEQ ID NO: 4917 - DNA, 269 bp, Gossypium hirsutum
  Clone ID: LIB3083-102-Q1-L1-C4
catacaagaataaaacagaacatcagccggcaggtcctgttattataaatactaagcgttgtagtagctcaattgttgggaatggctagtcgatgggagcattctaccgtggcttacccaaaggtggatgacctgaatagtgaccgcatggtggctcatgtgccggaggctcataaactggtggtttaggttctggctcttcttcctctggtggcgcataaactggtggcttacgtggttttggctcatatattggtgggttgttggga

SEQ ID NO: 4918 - DNA, 379 bp, Gossypium hirsutum
  unsure (1)..(379): unsure at all n locations; Clone ID: LIB3083-102-Q1-L1-C5
cttattaaaacagaaaatcattggtggaatttcaaatacaaaaaatggcaccacctttgctacctccctctctaaaacaatgaaaancnnnaatgaatagctataacataaatggggtgcgtggatgccgccgaccctctggttgccagcatcagctttggggtagaaattacctgttaggagactggagttaatccgggctccgagcactctgaggctacgcccaacccatacaagctcgccatacagaggaaggtatttagaagagtggatatgaatgcttgtgctataagaagatgatgtattggaggagaagagcatataagctctgttatggtgggaaagatcgccaacagtgggtactatcctttagagagaa

SEQ ID NO: 4919 - DNA, 276 bp, Gossypium hirsutum
  Clone ID: LIB3083-102-Q1-L1-C6
gtctattcaatggcccgggaccatctgccacaagactcgccattgctgctcctccaatgcctgctgccgaggctcgaactctccaactgaatttaccattcatggatagcggccggattataatgatggaacctggccttcctgttgatacagatctcagtttgatgtcaaagagatttcaacattgcttgatgcacttgagaagtactggccatcggtatattgtggcaaatcatcaacctgcttcagtggaaaagggttattttgggctcatga

SEQ ID NO: 4920 - DNA, 386 bp, Gossypium hirsutum
  Clone ID: LIB3083-102-Q1-L1-C7
aaccagtgcttccttctgaaggacttactcgtcaaggaagtggaatcattggcacattcgggcagtctgaggagctacgatgtgttatagttgttattcgccatggtgatagaactcccaagcagaaggtgaaattgaaggttactgaggaaaaattgctaaacctgatgctaaagtacaatgggggaagacccagatctgagacaaaacttaagagtgctgttcaattgcaagatttgttggatgcaacaagaatgcttgtaccccgttacagaccaggtcgtggcagtgacagtgaagcagaagatattgagcatgctgaaaagcttcgtcaagttaaggcagtacttgaggagggagggcatttttctggtatttatagaaag

SEQ ID NO: 4921 - DNA, 282 bp, Gossypium hirsutum
  Clone ID: LIB3083-102-Q1-L1-C8
tggtcatgaagagaagcttccttggtaccgtgggaaggaatggagttacttaaggggaggtcttacaacacttgaccgtgactatggatggatcaacaacatccaccatgatattggaacccatgtcatacaccatttgtttccacaaatcccacattaccatttagtagaggcgactgaggcagcgaggccagttctcggaaaatactatcgagagccggaacaatcagggcctttacctttccacctcatcggaagtttgatgagaagcttgaagaaaga

SEQ ID NO: 4922 - DNA, 371 bp, Gossypium hirsutum
  Clone ID: LIB3083-102-Q1-L1-D1
gagatatatttgtttgaaaagaaaaatggttctgctagagaaactttgggatgatgtagtggccggacctcaaccggaacgtggccttggccggctgaggaagatcacaaccacccccacccttgtccaccaaagatgaggcttcatcaatggcgatgccgacgagtccgacgacacctgggacaccgtcgacgccggtgtcggctcgtagggacaacgtgtggaggagcgtgttcaatccaggtagcaaccttgcaaccaaaggtattggcgctgaagttttcgacaagcctcaacctaactctcctactgtttatgactggctttacagcggggagacccggagcaagcatcaccactgattgggcgat

SEQ ID NO: 4923 - DNA, 266 bp, Gossypium hirsutum
  Clone ID: LIB3083-102-Q1-L1-D2
ggacacaacacttcttttaccagttcatctatcaaagcaacatttactttggtacggctatgataggaagaacggaatgcattctctttgtccagcagtatggtcaattcataggaggtggctattaatgtcaatgctctgtcttaatcctttagcttgttcatttgtagatttgcaatttccaaatggacagtttacatatgtatctggtgaagggctgacgacaagtgctttcttacctatttgtgggggacttcttcaggcac

SEQ ID NO: 4924 - DNA, 393 bp, Gossypium hirsutum
  unsure (1)..(393): unsure at all n locations; Clone ID: LIB3083-102-Q1-L1-D3
ctattttgtttaccatggctcataacattcgtcaccctttcttccttttccaactttttctcatttgtgtctcaccaatgatcggtagccacactgtctcggcnncccgtcgacgtttattcgagacacaaacaaccttatcggagctgccacaattggcttcaaaatacgaaaagcacgaagagtttgaatatgaaaagtcagaatacaaacagccaatgtatcacgaagagtaccccaaacatgagaagcctgaaatgcacaaggaggaaaaaaaaaaaccctgcaaacaacatgaagagtacgagaaagaaaaacctgagttccccaaacaggaaaagcctaaagagcacgagaaacacgaagtcgaatatccgaaaatacccgagtaca

SEQ ID NO: 4925 - DNA, 393 bp, Gossypium hirsutum
  unsure (1)..(393): unsure at all n locations; Clone ID: LIB3083-102-Q1-L1-D5
acacattctttaaccccttcaacaatggcgattacgaagcaacatttgatcccgcttttcgctatctcatttctcttgttttcccagctccattgctnaacaacatcaggcccaaggctccggctcagtctcccgcaccacctggtccaccagacgtcgccaaaatcctgcaaaaagccggccaatactccgtcttcgttcgtcttctcaaatccacccaagtctccgaccgtctcattggcgagctcaaagatacagatgatgggaagaccatttttgcccccactgataaggctttctccgccctcaaatctggtgccttgaattcactcaacgatgaacaaagggttcagctggtgctatttcacgtcgtcccagattatatcccatttt

SEQ ID NO: 4926 - DNA, 283 bp, Gossypium hirsutum
  Clone ID: LIB3083-102-Q1-L1-D6
aaaagctttacattttgcaaaagaagggatttcagcacgaaattgaagttgtttttaaaaaccatggttgccacggctgtgacatcggcgtttttctcagtcacttcttcacctgactcctctgactcgaaaaacaagaagctcggaagcatcaagtcgaagccatcggtttcttctggaagtttgcaagtcaaggcaaatgctcaagcacctccgaaaataaacggtaccgtggcggtgacgacttccgtggaaggttccaagaacgatgacggtgcaagtt

SEQ ID NO: 4927 - DNA, 368 bp, Gossypium hirsutum
  Clone ID: LIB3083-102-Q1-L1-D7
tacaatatatgtttccatggtgcttcacagctacattctttccgttctcttttctgtgttacaggttcttgcacttgcttactacgctatctcttacttccctgtggatctgccgggctgaaatttctcacatcggctcttacctcttcaataactacctgttttggcaggtgacctggccaccttccacctttgtttttgacttgtatacttgttttgagtcattaaagggtcttagttacatgttttgttgcttccatgctgtcattttcttgtattttctgaagaaaaactgcaaaaagtgtaccttttatctgcatcaaaatttggatccattaatagatgaattcacttagttttggttcgtt

SEQ ID NO: 4928 - DNA, 395 bp, Gossypium hirsutum
  unsure (1)..(395): unsure at all n locations; Clone ID: LIB3083-102-Q1-L1-E1
gaggaagctccgatctaaatgagtcagatattggaataataacaccatatcgccagcaggttctcaagatcaagaaagtgctcgaaacctgggacttgctanatntaaaagtttgggcagtgttgaacaatttcagggccaagaaagggaagtcattattgtgtctacggtaagatcaacagtcaaacacaatgagttcgacagaacttactgtctgggatttctgagcaatccaaaaaggtttaatgttgtgattacccgggccaaatcattgctcatcattgtcggaaatccacacatcgtttgtaaggatccttactgggaaaaactgttttggcattgtcatgaaaataactcatatcagggctgccccccaccagaaagggtgaaccatg

SEQ ID NO: 4929 - DNA, 237 bp, Gossypium hirsutum
  Clone ID: LIB3083-102-Q1-L1-E2
gccatcatcatgcagtaatttcatgggatattgtaattatattgttaataaaaaagatggtgagtgggaaatgtgtgtgtgcattcatccatgtagcaatgctgaatctctttgcatgcatagagattctgaatggttatagtttatgttatatcgtttgttctagtgaaattaattttgaatgttgtatgtaatgttaacatcacttggcttgatttatgttttaatgaagcggca

SEQ ID NO: 4930 - DNA, 390 bp, Gossypium hirsutum
  unsure (1)..(390): unsure at all n locations; Clone ID: LIB3083-102-Q1-L1-E3
cagatccaactgagatgggtctcgatgtgttcaaaagccgtgctaactgaatacggttcttttaggcatctgcaaccgggaagcttccttccttcctacctacannnagtctttacttaagtgaaatgtttataggtttcgaaacggcaaactcgggatttccgagttatgccataagacttttatcagtctcgatgatgataaacccgtagtttcgggtatatgtgatttgttatctatagaacctatgtgttgagtgcctttgtgtaggctttatctctttcaacgctaaatgcaactgtgtgtgagggttagacgacacatttagttcgttttcaagattttttttatttaattttctttgaatattgacccttgtgtattgattcg

SEQ ID NO: 4931 - DNA, 274 bp, Gossypium hirsutum
  Clone ID: LIB3083-102-Q1-L1-E4
catccgattcaacgccagaaaagccatcatcttcatctgagccttcaagcgtcctaacctttcattcatcacccagatggcaacttcacttcaactctgtcaaagaaacctcacagcttatggttatagatttctcagcttcttggtgtgggccatgtaaattcatggaacctgttttgaatggcatggctgctaagtttactgaagttcagattgtaaaacttgatgttgatgaactgcctgatgtggcgcaggaatttggggttcaaggaat

SEQ ID NO: 4932 - DNA, 341 bp, Gossypium hirsutum
  unsure (1)..(341): unsure at all n locations; Clone ID: LIB3083-102-Q1-L1-E5
cttcttggtgtcccatttgtattgggaggaactccttctagccagttggttcttactatctagaaatgcctcccaacctgagtcttgctnnnttagtttgttggcagtgtcaaactatttgccggcctagatacggaattcatttttgtgatgtcagatgtatctacagtcagacacagggagaccgacagaacttcctgtgtggtatttttgagccatacaagatggttgaatgtcgtgatcacccgacccaaatgatcgcttatgagtgacggacaatcactcatagctaggatggatccttactgaaaaaatctgttttgtcattggcatgtaaatta

SEQ ID NO: 4933 - DNA, 264 bp, Gossypium hirsutum
  Clone ID: LIB3083-102-Q1-L1-E6
gataacatttgatggggagggaactcactgatgtgcatatggatgataagcccaacggtgttgtgaaatcgaacggtgtggtgaattcaaatggtgctctgagagttttttaagacactgagtcaaaaaactaccaggtcaaggaatgcactgaaaagaactcgattgtccataatggtactgggaatgaagatgtgttgggtggcaaaagctcaaattttggtaccgatatccctgttgagaaaaaccaaacgatcggagatc

SEQ ID NO: 4934 - DNA, 369 bp, Gossypium hirsutum
  Clone ID: LIB3083-102-Q1-L1-E7
aatgaaacaccttaattttgcaatatatattggattgtctcaaatttcctgttatcactctaccggtcaagaatcttttcatgcaaccagaagcacatggaatcaaaactcaaaaggcaggcatgattggtaatcaattgcataacccttacaccacgtatggtacacaattgcctaggataatcccaccacaagctacaccagtatctttcatggaaataaaacataatcaagaatccgataaataaaagtttcaaacgtctatctatccagtcccaatcagcatgcatgatccttaaccattttcaaccacgacaatccaaaaaagtgaagtccgttcatgacaaaagaccgaagctttgaatttag

SEQ ID NO: 4935 - DNA, 283 bp, Gossypium hirsutum
  Clone ID: LIB3083-102-Q1-L1-E8
acatgtggatgctgctagtggagggttcattgctccctttgtttacccgcaactcgaatgggatttccgcctgccgttagtaaaaagcatcaatgtcagtgggcacaagtatggccttgtatatgctggtatcggttgggtcgtgtggagaagcaaggaggatttgccagatgatcttgtgtttcacatcaactaccttggatctgatcagcccacattcaccttaaacttctctaaaagctctagtcaaatcttagctcaatattatcagcttattcggctc

SEQ ID NO: 4936 - DNA, 336 bp, Gossypium hirsutum
  unsure (1)..(336): unsure at all n locations; Clone ID: LIB3083-102-Q1-L1-F1
ggttacagtaatatttggcaacattttagctaccaattgctgctttataccttctctggctgnnncttccttgtgttgagaacaagttcttcagctctctgggttttttttttttaattatcaaacatgtctgctaaatccaaatttgaaactccaagcaaggtttcaccagcaacacctagaggggcaagtaaactaagcaagtgattggctaaatcagagcctgattcgccttctcctttgcaaagtactcgccatttgggggatcgatccctgcgatcatcgcttaattcgaagccgctaaattcgaagccttcgattgatcggaaatcgccg

SEQ ID NO: 4937 - DNA, 271 bp, Gossypium hirsutum
  Clone ID: LIB3083-102-Q1-L1-F2
catttgatggggagggaactcactgatgtgcatatggatgataagcccaacggtgttgtgaaatcgaacggtgtggtggaattcaaatggtgctctgagagttttggaagacactgagtcaaagaactacgaggtcaaggaatgcactgaagagaactcgattgtccataatggtactgtgaatgaagatgtgttgggtgtcaaaagctcaaattttggtaccgatatccctgatgagaaaaacgaaacgatcggagatcagaagttcacc

SEQ ID NO: 4938 - DNA, 394 bp, Gossypium hirsutum
  unsure (1)..(394): unsure at all n locations; Clone ID: LIB3083-102-Q1-L1-F3
acttcgtcttatgtatcccgaacaacgtgaaatccagtgtctgcgacatcccacctagatggctatcaatggcatcaaccttcgtaagaaactcgacctcnntcctaaaatgttcaggcgagttagtgaacaatttaccgctatgttcaggaggaaagctttcttgcattggtacaccggtgaaggtatggacgagatggagttcaccgaggctgagagcaacatgaacgatctcgtgtctgaatatcaacaataccaggacgctaccgctgacgaggaaggcgaatatgaggatgaggaagatttggatgaagaacacatgtgatgaaagcgaaaaccaaacgaagttgtcggtaatgcagcatatacaggtatgtgattcgagctttgtgtt

SEQ ID NO: 4939 - DNA, 250 bp, Gossypium hirsutum
  Clone ID: LIB3083-102-Q1-L1-F4
gaggagtgctgccgggggtcttaatccggttacttcccggaggagctccgccgaaagtaaaacttcagcagctgcaacgaagagccaaccatcaactcaagacactaagaaatcgccgaagccagtccttagaagttccaccatagaacgcctagcaaccgcacggaatactacaaaggtctcttcggctgaattgaaatcgagccagccgaaaaagccaacattgaaggaaatcagttctgcaacaact

SEQ ID NO: 4940 - DNA, 387 bp, Gossypium hirsutum
  unsure (1)..(387): unsure at all n locations; Clone ID: LIB3083-102-Q1-L1-F7
gaaaaaaggttagtggaagctgggaagaaagatggacttgctgcattggaagctttttcctctgttagcgctgctcgcttctttccttttctttttctcntncagattcttccaagtcatctcaaagcggttgtagtctttttcctcacagtcactattggattgcaagcaagcgcattgtgacaccacaagggattatttctggtgctgttgagataaagggagggagtatcgtatcaatagttaagaacaaggattggagtggcaaatttaaacaagtagttgattatggcaatgcagttgtcatgcctggcttgatcgatgtgcatgcacatttagatgatccagggagggcagaatgggaaggatttccttcagggactaaag

SEQ ID NO: 4941 - DNA, 283 bp, Gossypium hirsutum
  Clone ID: LIB3083-102-Q1-L1-F8
ccctttcatggctggaacgaggcaacaagggaacttttttgtgcataaagatgaagagcgatccgtgaacgatttccgaggacagcttaaagaatatttagaatacatgctctttgacccaccttcgcaagcagtttgttggaattggatgaagacgatggaaaagatacacgatacctatccgtacaagaagatgggttatggcatggcagatccggtgcatcagtctatgtcgaatgggggcaagaaaagaaatctgaaatttgtttccgatgacttgaga

SEQ ID NO: 4942 - DNA, 394 bp, Gossypium hirsutum
  unsure (1)..(394): unsure at all n locations; Clone ID: LIB3083-102-Q1-L1-G1
agaaaaatttacaatcatcatcagatctattgttcttagactgatgatgataatgaggctttacgctcttcttctcctattagctttcgcttcgctgcaactccnnnncttcgtccgctgatgttgacgaggtgttctatgattcatttgaagagtcatttgatggacgatggatcgtttctgataaagatgattataaaggcgtgtggaagcattccaagagcgaggggcatgatgactatggtcttctcgtgagtgagatggcaaagaagtatgcaatagtgaaagagcttgatgaggctgtgaatctcaaagaaggtaccactgtgcttcagtttgagactcgcctacagagtggactggaatgtggaggtgcatatttgaaatatcttcg

SEQ ID NO: 4943 - DNA, 276 bp, Gossypium hirsutum
  Clone ID: LIB3083-102-Q1-L1-G2
ttaagaagctatgagaatcctaagaacaagatcactgcagtgcctgctgaagaagaggagatatggggtgctaaattcaaggtggaagggccagctgttgttgctgccacagagtagtcctttgctttctccttctaaatctatggatccatggaattataggagctgcacatgcatagcatatggatcagtctccatatgaaagtacttgtcgagtgggaaatgaaaagaagaaaaagaactgtttggttatgagaaatggtagtcactttctgt

SEQ ID NO: 4944 - DNA, 393 bp, Gossypium hirsutum
  unsure (1)..(393): unsure at all n locations; Clone ID: LIB3083-102-Q1-L1-G3
ctgaatgcaacccggaaggatccgatccgataatactagcgaacactaccgatgtgagccattttggttactttcaaaggtcaagcgtcaaggagttcatnnnnnntgttttctcgaactgttgctaaacgtactccttctggtcagcgccagtccgttcagcacgaagagtacaaggtacatgcttacaacagaaatggactttgtgccttgggatttatggatgatcattatccagttcgaagtgctttttcgcttctcaaccagattctagatgaatatcagaaaaattttggggagtcttggagaaatgcacaagctgatagcactcaaccttggccgtatctgaatgatgctttgaccaaatttcaggaccctgcagaggcggataaa

SEQ ID NO: 4945 - DNA, 288 bp, Gossypium hirsutum
  Clone ID: LIB3083-102-Q1-L1-G4
acttaccagcagatggtaaaatacatatatagcttctcaccattctaatattactatggatcaccaatgcatatacattaagaacacaagttgatactacttataataattgcatccacaaaatgaacagcaaaacagcttcaccagcattcaaagccttgcctctcctcccttctactcacttgttctctaacacttctttcactacatcgatgctgcaagtcgggtcagggatcttttgcttatgttgatacagatcaaatggcctcagatttgctagtaggaacc

SEQ ID NO: 4946 - DNA, 292 bp, Gossypium hirsutum
  unsure (1)..(292): unsure at all n locations; Clone ID: LIB3083-102-Q1-L1-G5
caaatttctttcaatggtcattcccacacttctaatgattacgctctctacgaacggtggcttcctcactcactctacaattaccatttctatttacttcaactnttttgcttcctcagtgaggcagaagacgatcaacattaaatgcacgagcagtcatgaaacacaaaggggctctcgtgcgtacatacaaaaagaacgatgccggcgcaatcatattaagagagaggagccataaaccttggccttcttagtgcatgagccggcatactattaaggactacaaaaagat

SEQ ID NO: 4947 - DNA, 290 bp, Gossypium hirsutum
  Clone ID: LIB3083-102-Q1-L1-G6
cctctctgtctccctctctctgataaattatatataatataatcactccctagatccactaccacagctactaaaattgcaaaccaaattcaaaatcaaatcaaaaagaaaaaaaatacatatataaaagaaaaacagagcatcatctgaacaccagagatagcatcattcagatccgaagtctagatccgaaaagcagagccatagcggcagcggcgacggaaacagagacaaatggcggcgagatagagctggcaccagaggtggggctcggagccggagcgtcggcg

SEQ ID NO: 4948 - DNA, 393 bp, Gossypium hirsutum
  unsure (1)..(393): unsure at all n locations; Clone ID: LIB3083-102-Q1-L1-G7
tgcagtttctgtctctgtgaaagaaaccatgtctcatgaagatcatgatgaagaagttgggaaactggccgtccgccttgcctacgccgtggtacttncnnnnnnctgaaatcnagccttggagctgaacataattgacacaatcttagccgctggtgacggcgcgtttctgtcaccttcccagattgcgagtgcccttccttcaaagaatcctgactcaccagtgctactagatcgaatgctacgcctgttggccagccattccattctcaaatgcgcagtaaaagcaaaggaaaaagaagaaattgaaagactgtacggtgcaggcccactatgcaagttccttgttaagaatcaagatggagggtcgattgcacctctccttttgttgca

SEQ ID NO: 4949 - DNA, 285 bp, Gossypium hirsutum
  unsure (1)..(285): unsure at all n locations; Clone ID: LIB3083-102-Q1-L1-H1
agctacccttttttttcttttcttgagacccttacttcaggggagctagcataacaaagaaacccctttaacgtctcactacctctggtttggcctaacccnnnccggcaatggaaaatataattaacgcccatcggcaaaaaatggggaggacatgaaagcggggaaggggggatttgcagctaaacaaaaaaatgtgagcaaagggggaagaattgggggcccaaatgaatccaaagaaacgcctgccaaaaaaaaagaaaaagggctattgggcaggtaaaa

SEQ ID NO: 4950 - DNA, 277 bp, Gossypium hirsutum
  Clone ID: LIB3083-102-Q1-L1-H2
ctcttatacttttctacttcaccccagctttctgtgatctttctcaatctgggattgtcccttctggatttaattatgctttggttctcaattatggatctgctttttctattttcctaggcttgttttatgtagttttggataagaaagctgggtctttggccgctttgctgtgcttagcttgctgggttggagctagtttcatcgctgcaaaacttggctattctctggcctggaaggttgtgctggtatctcaattgctttgttggacaggaca

SEQ ID NO: 4951 - DNA, 398 bp, Gossypium hirsutum
  unsure (1)..(398): unsure at all n locations; Clone ID: LIB3083-102-Q1-L1-H3
gatcccccnnctgcataattcgcccgaggtcttcaccttctctttcatttgtcgagatgctcaatgactacgtccagcatctctttttctcccttttgaactttctttctcctgattaacgcctccaccnnnnaaggatataccagagtttggatctttcgagaatagatcggatcattcgctgctctcttcgatctcaaggactgccggtggcagcaatagagccagttcccgagagttgcgtgtcctctgtagaggagagaacgatggaggaaagggaaaggtggtggaagatgggattgaaggctatatcggaaggcaaattggctgttttgcttctatccggtggccagtggactcggcttgtaagttcagatcccaagggatgtttcaacatt

SEQ ID NO: 4952 - DNA, 64 bp, Gossypium hirsutum
  Clone ID: LIB3083-102-Q1-L1-H5
cgcaaatgacaatgcggtgcatgcaagcattagtccgggtgcaggccaagagttcaagcctcgt

SEQ ID NO: 4953 - DNA, 287 bp, Gossypium hirsutum
  Clone ID: LIB3083-102-Q1-L1-H6
ctgtatatgaatgtcatagttgctccgatcttgctgctgaaatggctgctgctttggcttctgcttccatcgttttcaaagacaacaaagcatactctcaaaagcttgtccatggtgcccgaacactctttaagtttgctagggatcaaagaggcagatatagtgctggtggttctgaccctgccctcttttataattcctcaagttactgggatgagtttgtttggggtggagcctggttatactatgccactgggaattcatcctatcttcagttagctactcat

SEQ ID NO: 4954 - DNA, 397 bp, Gossypium hirsutum
  unsure (1)..(397): unsure at all n locations; Clone ID: LIB3083-102-Q1-L1-H7
cctgtggtggttatttttaaaaaatggagatgcctctagtttttgaatcaacggctatcgtcgccattgccaatagcttccccttcgcgagtcctgaaactgnnnnnnnccaggttcaacgcctctcattgctaaagaaatcttcaatgcagccaccactcaacccgattttcgtcactcttactcttccttcctcatcctcattctcaaacttgaccgttccatgcacttctctcttatcgatgaccttctcgttcgtctcaaattcgatcaatatcaggtaaccccgactctctttttttacctcatcaaaatctacgccgaagctgatttacccgagaaagctctcaatgtgttctacaaaatgcttgacttcaacgttaagcctttacccaga

SEQ ID NO: 4955 - DNA, 269 bp, Gossypium hirsutum
  Clone ID: LIB3083-102-Q1-L1-H8
gaaagacaaaatattaaagtagaaaccatatactagtgaaaaatacgttactcatagtagaggagattttattgatcatccaaagacactcacaagcttgaaatctggagatttggagaagcaaagtttaggaattcatgatctttttgtagtgcagacattctggtttcatctaaggttatccaagcttctattcctttcccacatttgggtttaaggagaatagttaagtttccaaattgccctatttttccaagtattgcccatga

SEQ ID NO: 4956 - DNA, 241 bp, Gossypium hirsutum
  Clone ID: LIB3083-103-Q1-L1-A10
atagaatggtagaggagaacgtagaaatcctcgaaatcgatgacaggttcgagtttgaccctgaagagtgcgatattggtaaaggtaagtgggtgttcaaccgctctatcaagccattgtacacagatacaagttgtccatacctggacaggcaattttcttgcgtcaaaaatggccggcttgattttgactaccatcactgggagtggcagcctgaggactgcaacctgcctagatttca

SEQ ID NO: 4957 - DNA, 392 bp, Gossypium hirsutum
  Clone ID: LIB3083-103-Q1-L1-A11
ttctaagcttatagtgccatttttatttggttccaataatgcaaactgctccttcaagtaaaacagctcatccacagtcaaagttttagacagggcccttaaagcagccttccgaagagatgaagagcgcagataagccttcacgagtttgaatatcagtatatccaagggcactttcacatcgttatacttttttatccagggatgactcaaagcttgggctgcagtcaatcttttccttgggtccttattcagtaaacgcttcacaaaatccctagcctcagaagatagagatggccaaggtgcttcatcaaaacttggatcagcttttagaacagctccaaaaatcccagactctgttcgagcccaaaatggacggctaccacacaaaa

SEQ ID NO: 4958 - DNA, 379 bp, Gossypium hirsutum
  unsure (1)..(379): unsure at all n locations; Clone ID: LIB3083-103-Q1-L1-A12
aagatccgatcattgtggagacactatttccaaaacacgcaaggacttatttttcggggtgatagcaatgatcgtgaccgtgtggttgaagctagagatgagttgcacaagatggtgaatgaagatgagttgagggatgctgggctgctagtatttgcaaacaagcaagaactttccaatggtatgaatgctgctgagattaccgacaaggttggccttcaatctcttcgncagcgtcactggtatatccagagtacatgcgccacatctggtgaaggactgtacgagggactggactggctctcaaacaacattgcaaacaaagcatagatggcgtaattgacttgtctgtctcagaaaatgccagcccctttcggaa

SEQ ID NO: 4959 - DNA, 371 bp, Gossypium hirsutum
  unsure (1)..(371): unsure at all n locations; Clone ID: LIB3083-103-Q1-L1-A9
aaacccaccgtcaccgctgcccctggcggagcagcagctgctactactactactactactacctccaccacaaccaacggcggaactaccaaatcccacctcattaaccccaccgcccgcctaccctaccgtccacagccccataacagacgtcgcaactaccgtccacggcgcaactactgttgctgctgctgtttctggatcatcctcatagtcctcgtgctcgcccttttagtagccataactggcaccgtcctttacgtnttttaccgggcctcaccgccttaattcaccctcgcttccctcccgtatccaccgcttgaagctcaaaaccgccgccgactcctcctcttcccatctttcaacccttt

SEQ ID NO: 4960 - DNA, 76 bp, Gossypium hirsutum
  Clone ID: LIB3083-103-Q1-L1-B10
aactcttcgtccttctgtaaatttcccttcaaagaaaagaagaagaaaatacccaccactatcaacttacgatgag

SEQ ID NO: 4961 - DNA, 315 bp, Gossypium hirsutum
  unsure (1)..(315): unsure at all n locations; Clone ID: LIB3083-103-Q1-L1-B11
ccttcctgaggctgatgggtttatttttggcttcccaacaagatttggcatgatgtctgcccaattcaaagcatttatggatgcaactggtggtctatggagaactcaacaacttgctggaaaacctgctgggatattctatagcactggatctcaaggtggcggacaagaaactacaccgttgactgcaatcactcagcttgttcaccacgggatgatttttgttcccatcggatacagctttggtgctggcatgtttgagatggagcaagtgaaaggtggaagcccttacggtgcaggaacctatgcntggga

SEQ ID NO: 4962 - DNA, 253 bp, Gossypium hirsutum
  Clone ID: LIB3083-103-Q1-L1-B12
attccttttatatttttcctctccaattttccgtcacttgcccgagaaaatgagagaaatccttcacatccaaggtggccaatgcggcaatcagataggagccaagttctgggaagtcgtatgtgccgaacatggcatcgattcaacgggtcgatatggtggtgactcggagctccagcttgagcgaatcaatgtttactacaacgaaaccagttgtgggccgtttggtcccccgcgcaggtttaaatggatc

SEQ ID NO: 4963 - DNA, 382 bp, Gossypium hirsutum
  Clone ID: LIB3083-103-Q1-L1-B9
acgaagttttaggggtggtggggaagaaaggaagagtaacagaaaccgatctggatcaacttcaatacctgaagatggttttaaaagagactctaagactgcatccacctgcgcccatgctgatcgccagagaagccatctcacacttcaacatcaatggttaccacatttatcccaacacacttatccaaatcaatgtatgggccattgcaagggacccaaagtactgggaaaaccctcaagaattctccccagaaaggtttatcgataacgccgttgacttcaaaggacagcattttgagctgttgccatttggaggtggcagaagagggtgtccggggctgtacatgggaaccgtcacaaccgagcttttactcgcaaa

SEQ ID NO: 4964 - DNA, 319 bp, Gossypium hirsutum
  Clone ID: LIB3083-103-Q1-L1-C10
caccataccggtgatttatatgacttagatttatcaaaccttgatgttaaagacgatgaagctttagccatcaactgtgttggcacattacattcgatcatggatactagtcgggacatcgttatatcgagcttccggcgattaaaaccgagggtaatcaccgtcgtagaagaagaagccgacctcgatatcggtgtcgatggggtcgatttcattaaaggtttccatgaatgtttaagatggttcagggtttattttgaagctttagatgaaagtttcaatagaacaagcaacgaaaagttgttgcttgaacgagccg

SEQ ID NO: 4965 - DNA, 386 bp, Gossypium hirsutum
  Clone ID: LIB3083-103-Q1-L1-C11
atggaatccaccagagtttcttccaatggccgataactccaccccagcctttgtaatttctctgaactaaccatatcttcctcccctccctcagtaaagcttttaggataattgtattgaggaaacatacttctcaacttatcaacaagatcacgtgccttgatcgtgtgagctgtgcatatgtaccttccttcagccgctggcttctcatacaccagaagcagtgcctgagctacatggcgcacatcaactatctttcgaattttgttttccagagagtcatattccccttttaaaagattaatgagaaccttgctactagcattgatggtggactgcagaagtggccccaatatcagtgtaggacaaacagtaacaacatcaag

SEQ ID NO: 4966 - DNA, 255 bp, Gossypium hirsutum
  unsure (1)..(255): unsure at all n locations; Clone ID: LIB3083-103-Q1-L1-C12
ctgaaacggttataattattaccaagacgcagatgattaccctgaaatgtgctgcatgtggatttgtttccgatgttgacatgcgagataagcttacaacattcattcttaaaaacccacctgaggcaaagaagtcaacgaaagacaagaaagcgatgaggagagctgaaaaggagagactcaaggagggtgaggctgctgatgaagagctgaagaagattaaaaaggaggcanaaaagaaaggttcctctacta

SEQ ID NO: 4967 - DNA, 385 bp, Gossypium hirsutum
  Clone ID: LIB3083-103-Q1-L1-C9
ctcgtgccgtgctgtcccactgtcatcaccaaagtctgaagctaccccaccatccgcagtggcggctgcggctaagtcccctgtcaactattcttttgtcgatgttgttcttcgggtcttattatttgccgctactctaacttcagtggtggtcatggctaccagcaaggaaaccgagctggttccagtgccaggcttccctttagttaggatccaactccaagcaaagttcaatcattcacctgccctcgtatatttcatagcagcattatcagtaacaggcttctacagcattatcactacgttggcatcactttcaatcgtccttaaccctacctattccaaaaccttcttgctcttttttgctttcttcgatgtgatattt

SEQ ID NO: 4968 - DNA, 162 bp, Gossypium hirsutum
  Clone ID: LIB3083-103-Q1-L1-D10
gatgggggcagctttcaacaatggaaccctgcaacctacactttgtcacatgttcacattaacagccatggagcaaacctaaggccaatttcaaggttggtccggaatcaacctgactacaatggttgcggctttgaacaagtcataggttgcaaataggac

SEQ ID NO: 4969 - DNA, 375 bp, Gossypium hirsutum
  Clone ID: LIB3083-103-Q1-L1-D11
gaaatttataccgacaaatccagctggtctaattgagtacagggcacatccctactggatgcaaaagtactgcccctctcatgagcgtgatggcactcctcgctgttgtagttgcgaaagaatggagcctgtagatgtaaaatatatatcacttgatgatggtcggaggctgtgcctagagtgtctagattctgcaattatggatactcatgaatgccaacctctctaccttgaaatccaagaattttatgaaggattaaatatgaaagttgaacaacaggttcctctccttctggttgagaggcaagctctaaatgaggccatggagggagaaaagaatggccatcatcacttaccagaaactagaggactctg

SEQ ID NO: 4970 - DNA, 148 bp, Gossypium hirsutum
  Clone ID: LIB3083-103-Q1-L1-D12
gtgaaataggtggcggtcaagggcccgcattgttcccttgtaacatgggagatcaggttggttcaagaatgtcctccctttataccacttcaatgcaacatgaaaacatctctccacatatgtcggccactgcatttgtttaaaaagc

SEQ ID NO: 4971 - DNA, 390 bp, Gossypium hirsutum
  Clone ID: LIB3083-103-Q1-L1-D9
tagcatctgattctaaaatcgttgggaagatttcacgacgagtttcccttgtacattatatgagtcccgacgaatacgaaaagctcagttccgacaagaagctgttgcatcagagatcctccggaactttaatgactgattcttccaatcctttttcaagtccaatgcaaagtaaagggcggaaaggttcacattctatggggcgcactgtcagcacacatggtagtcaacataaaagtactgtctctggaatcaatgaacaatctaagccttcaaaaagaaagcatgatcatgaatctacgggatccatgaaccagcccacacacagtcatgagacaaatccaatttcagggtcctcagagcattctcacaaaagtaaatcgaagaaga

SEQ ID NO: 4972 - DNA, 385 bp, Gossypium hirsutum
  Clone ID: LIB3083-103-Q1-L1-E10
gttcatcgacgcagcctcgttcagattcaactatagaagcgaaatggctggttccagggttgctcatgctaccttgaaaggaccaagtgttgttaaggagatagttatcggaataacacttggcctttgtgctggtgggctttggaagatgcatcactggaatgagcagaggaaagtgagagcattctacgacatgctcgagaaaggtgaaatcagtgtcattgcagaagaataaatgttcttttagtcttgtgaaagtgtggacagcttcagctgtgtttcgttatatgcattctcttcatttggctcttagatagaagatgagcaaaacacaatttggagcttctaagaataatgtcatcattttgggatcttgatttcatat

SEQ ID NO: 4973 - DNA, 271 bp, Gossypium hirsutum
  Clone ID: LIB3083-103-Q1-L1-E11
gcaaaacacttgtcctgtcttttccgctaacactttactgtcctcgcgtcagcttcgttggaggcaatgggttattgcaaggctccttgtgtgtttttactatgcctcttcatcagtttctgccttccccgtcaattgttggctgatgaggttgacaaaaacctgacagctcagctgtttatagatgcttccgaacagtcaagccgtccaatacctcaaacactgtttggaatattctttgaggagatcaaccatgctggtgctggtgggc

SEQ ID NO: 4974 - DNA, 265 bp, Gossypium hirsutum
  Clone ID: LIB3083-103-Q1-L1-E12
agtgacaattggtgtgctttacataaaaaagtgagggaccctgtgggataccgaatatcattcggaaggccaataattacataagccaattacatttgaggagcattatcataggaatcttaccccccgggggagggcttactttacgcgaaccattgcaccaaagacaacgaaagtgtacatatgaaaattacacaaccgttattcataaaagaatctgtaactgaaagattctgacaaacactaatgttctctaaaaacactg

SEQ ID NO: 4975 - DNA, 387 bp, Gossypium hirsutum
  Clone ID: LIB3083-103-Q1-L1-E9
ccgaactcttaagctcactactccaagctttggagatctaaaccacttgatttctgctactatgagcggtgtaacatgctgcctaaggttccccggacagctgaactctgacctccgaaagttggctgtgaacctgatcccgttcccacgtcttcacttctttatggttggttttgcaccacttacatctcgtggttctcagcagtacgtttctctcactgtcccagagctaactcagcagatgtgggatgcgaagaacatgatgtgtgctgctgaccctcgccatggtcgctacctgacagcgtcagccatgttccgaggcaagatgagcaccaaagaggttgatgaacagatgatgaatgtccagaacaagaattcatcttactt

SEQ ID NO: 4976 - DNA, 380 bp, Gossypium hirsutum
  Clone ID: LIB3083-103-Q1-L1-F10
cccaaacgcctcgctctaagaaaaaaacaattatggcaagcaaagaacccgaacacgagcacagagaagatgaagaagctcctgccgccgaggatgaagacactggagctcaagtcgcccctattgtcaagttagaggaagtcgctgtcagtacaggcgaggaaaatgaagatccgatcctcgatctgaagtcgaagctgtatcgatttgataaagaagggaatcaatggaaagagagaggtgctggtactgtgaagctgttgaagcacaaagagacaggaaaagttcgccttgttatgaggcaatctaagactctcaagatctgcgccaatcatctagtgttgccgacaatgacagtgcacgagcacgctgggaatgat

SEQ ID NO: 4977 - DNA, 309 bp, Gossypium hirsutum
  Clone ID: LIB3083-103-Q1-L1-F11
aattcattgctgtgcttcatcaaatcatcctaggtttctttcatctcccaattcgatttttttatttttggatccaacgccgggtctaaatctacaccagatgctcctccgctcggattacagcttcggagccaccgctataatccagttcgaccccacacaaaaagattcatcggcttctccttctcgatccaaggcttccccagctcgctccgcaaagaagcctccccctgactcacccaacccggatgattgctcactcgataacccggatctcggcccttttttgctcaggttagcccgagacac

SEQ ID NO: 4978 - DNA, 352 bp, Gossypium hirsutum
  Clone ID: LIB3083-103-Q1-L1-F9
cggacacgaaattcctctttttccccagatctggacccgtcgccggtcttagcaacctccgatccaatcatttcacctattgatttcaattcattaaacgtgtgacgcgacccactggatcgaagatgccggtggccgcttctgccatctacttcttgaatcttcgcggcgatgtcctcatcaatcgtctctaccgagatgatgtcgggggaaatatggtggatgccttccggatgcacattatgcaaacaaaagaactcggaacttgtcccgtgagacagattggaggttgctctttcttttacatgagaatcagcaacgtatacatcgtaattgttgtcagcagtaatgc

SEQ ID NO: 4979 - DNA, 388 bp, Gossypium hirsutum
  Clone ID: LIB3083-103-Q1-L1-G10
ggcatttcttcctcagaagacccgtcaaacagaaatgaagttcaacattgcaaatccgactactggttgccaaaaaaagctggaaattgatgatgaccagaaacttcgagccttttttgacaagaggatctcacaggaagtcagtggtgatgccctcggtgaggagtttaagggctatgtattcaagatcatgggaggctgtgataaacagggttttccaatgaagcaaggagttctcactcctggacgtgttcgtcttttgcttcacagaggtactccctgcttccgtgggtatggtaggagaaatggagagcgcaggaggaagtcagttcgtggatgcattgttagtcaggatctttcagttttgaacttggttattgtgaaaaag

SEQ ID NO: 4980 - DNA, 209 bp, Gossypium hirsutum
  Clone ID: LIB3083-103-Q1-L1-G11
cccaattcctaaattgtcattaaaaggcaatgagggcatgagaggaggagtttggattttgcaggagtaaacctcatataatcatattattgctgctattgcattaaatagaatagggtaaaatgtttttttttaagctttgcaaagctcactgtcaatcaaagcttacaacagacatgggaaattacaaaagatggcaaatacatgtc

SEQ ID NO: 4981 - DNA, 387 bp, Gossypium hirsutum
  Clone ID: LIB3083-103-Q1-L1-G12
cgcatattcatgttcagcatcaggcgccggtttccggtccaaatggcgtggctccgggagcttccggaggagcgcaattcatgcttacgtctctctatgtcggggatcttgatgttaccgttaccgatgagcagctataccaactgtttagccaggtggctccggtcgcatcagttagggtttgccgggacttggcgagcggccgctctcttggctatggctatgtcaattataacaaccttcgcgatgcggctagggcaatggatctactgaatttcacaccactgaataataagcctatccgaatcatgtattctcagcgtgatcctagtcttcgtaagactggtaccgcaaacatatttatcaagaatctggacaagtctattg

SEQ ID NO: 4982 - DNA, 363 bp, Gossypium hirsutum
  Clone ID: LIB3083-103-Q1-L1-G9
tgcaattcattaatggcaacagtcagaaacaacagtgatgaaccaatgcacacaacttctttcatcatccaccgaaccaaattatgtcatgacctatcttaatcgcagtttccctcaacaccgccaatatctgtgtgctggtgcatggatattgatgcaagggcatcctgaaaacattaacagtggaaacttggcacgggtattgagagaattttcacctgaagaggtgacatccaatatctatacaatggtggatgtattacttcatcacattcacatagagctgcagcatgggcattccttgcaggaccttttactgaaaacttgcgcaaacttgcctttttttgtttggacccatgagct

SEQ ID NO: 4983 - DNA, 307 bp, Gossypium hirsutum
  Clone ID: LIB3083-103-Q1-L1-H10
ataactgttggctttttaagatgaaaacaaaatgatctaaacccgaaatcacccaaaattttccaactttttaaggaaggtgatgagagataaccaacatttggcttgccattgtttactatcaaacaggtcaagcaacggaacacaatccaaatttttggagtcatattcacataaagctaaacatgtgccttccttaattaaatgtcgcgttgttttcaaactaaaaaaatctctaactgggaagatgctaaaaaaccgaatccttcaaatccaatttatacatcggctgccttgaacgggactt

SEQ ID NO: 4984 - DNA, 187 bp, Gossypium hirsutum
  Clone ID: LIB3083-103-Q1-L1-H11
gtctttaaatacggtcttaaccatgttacctaccttattggcagaaaaggctcaatggttgtattgctcatgatgtggatcccatgaattggagtgtggctcctgcattatgcaaaagatggagtccttatgattgtaaaaggaatctcgttggatcgattgtcacaaaaaactgctgcgtttgtgc

SEQ ID NO: 4985 - DNA, 387 bp, Gossypium hirsutum
  unsure (1)..(387): unsure at all n locations; Clone ID: LIB3083-103-Q1-L1-H12
atgtgaaggtccaggagaactgtattgatcttgttggccgtatcgctgatcgaggtgcagagtttgtaccagctagggagtggatgaggatttgttttgagcttcttgagatgcttaaagctcacaagaagggtattcgaagagctactgtcaatacctttggatatattgctaaagccattggcccacaagatgtcctggcaactctattgaacaatctcaaagtgcaggaacgccagaaccgtgtttgcacaactgtggctatcgcaattgttgctgaaacatgttcaccttttacagttttgccagcattgatgaatgagtaccgtgtgccagaacttaatgtgcagaatggtgtcttgaagtctctttccttcctttntgagt

SEQ ID NO: 4986 - DNA, 328 bp, Gossypium hirsutum
  Clone ID: LIB3083-103-Q1-L1-H9
caagcttcttgaaagcttcattttggttcaaaactggaggccgctgctgtgatggctccaccaattgaaactacagtcaagtcctctgactctcactgcgctccacatcctcctttgaatgaaaggatcctttcgtcaatgaccaggaggtccgtcgctgctcacccatggcatgatcttgaaattggacctggagctcctacggttttcaactgcgtgattgaaattgggaaagggagcaaggtgaaatatgaacttgacaagaaactggtttgatcaggttgatcggtgcttattcatcagtggtatctacactatggtcattctc

SEQ ID NO: 4987 - DNA, 418 bp, Gossypium hirsutum
  unsure (1)..(418): unsure at all n locations; Clone ID: LIB3083-104-Q1-L1-A1
tttttattcagagacgcttgtcttttttgttgtcaacgacnnatgtttttgtcattgaggtttgatattagtggtagatgcgatgtttacaaaatctattggaagcttgttttagtgaaacanaaaaaaccacggggatgatgnaattggagggctcttctttattttttatcttttattgttagggagtgattttggatgcttttgcaagtttcaacgctatattataagtatgttgaatcttgcaaggttgaatttttttagcaatggctggtttgtggtgcagcaatgaggaattccttataattgaatggttttaccatgtagcacactggtttttactttttggtgatactattttttaggttgaattgcgtgtatgctgcatgtttagcattcttgaaagatttattaataa

SEQ ID NO: 4988 - DNA, 386 bp, Gossypium hirsutum
  Clone ID: LIB3083-104-Q1-L1-A2
ctgagggctagtatggatcgggttatggaggtaggacagagactgaatacgggtccgggtatgagaggaaaccaagttatggtagatccgaggaagaggaagaaggatataggaagccaagttatggtagatccgaggaagaggcagaaggatataggaagccaagttatggtagatccgaggaagaaggatatggccgcaagaaacatggcgatgacgacagtgatgatgatgatgaagagaagcgtcaccaccaccgctataaggcccaccaccataagcgccatgatgactatgacgactagtcagactggccgttccctctacaaatggaaatctgcagtaatagctattaaataaatgatcgaggcatgccacctttgatc

SEQ ID NO: 4989 - DNA, 392 bp, Gossypium hirsutum
  Clone ID: LIB3083-104-Q1-L1-A3
cctcaagatattccaaaccccgactactttgagcttgagaagcctgactttgagcctattgctgctgttggtattgagatttggacaatgcaagatggcatattgtttgacaatattttgattgccaaaaatgacaaggttgctgagtcatacagggagaccacatggaagcctaagtttgaggttgagaaagaaaaacagaaggctgaggatgagtccactgattcagatggattttcagccgtccagaagaaggtctttgatgtcctttacaaggttgctgatattcctttcttaagtgaatacaagcttcaaatccttgatctcattgagaaggctgagaaacagccaaacatcaccattggtgtcatcgtctccattttggtgattat

SEQ ID NO: 4990 - DNA, 393 bp, Gossypium hirsutum
  Clone ID: LIB3083-104-Q1-L1-A4
tctccacatcgctgttgatctagtgaatgagactaagctagacgatgaaatcaaatcgtggctcgcatttgctgcccagaaagttgttgaagtcaatgcacttgccaaggcattggctggtcaaaaggatgaggccttcttctctgccaatgctgctgctcaggcttcaaggaagtcctccccaagagtgactaacgaggctgttcaaaaggctgctgctgctttgaagggctctgatcaccgtcgtgcaactaatgttagtgctagactcgatgcccagcagaaaaagcttaaccttccaatcctccccaccacaaccattggatccttccctcaaaccttggagctcaggagagttcgtcgtgaattcaaggctaacaagatctctgagga

SEQ ID NO: 4991 - DNA, 403 bp, Gossypium hirsutum
  Clone ID: LIB3083-104-Q1-L1-A5
ttatggtctcctaatgtttatttcttacttttggcaagacttttggatggttttggggttggtttggcagtaactctggtcccagtttacatatctgaaactgcaccacccgaaataagggggttgctaaatacccttccgcagtttactggttccatcggaatgtttttgtcttattgcatggtttttggaatgtcattatcggaattaccgaattggagattgatgcttggagttctttctattccatctcttatatattttatattaaccattttcttcttgcctgagtctccaagatggctcgtaagtaaaggacgaatgattgaggcaaaaaaagttttgcagagactacgtggcaaggaagatgttgctggtgagatggcattgttagtggagggac

SEQ ID NO: 4992 - DNA, 387 bp, Gossypium hirsutum
  Clone ID: LIB3083-104-Q1-L1-A6
gattatctttattcaccagtagtcgtgaggcgccagaggatcgatctccggcgaattttgtccggctacgaaattccttatttttataataatgggagggggaacgcatcgtccgacgatggatctgctgcgatcggagccaatgcagttggggcaactcataatcccgattgagtcagctcatcgttccatttcttatctcggtgatctcggcttctttcaattcaaagaccttaattcagagaagagccctttccagagaacgtatgctacacagatcaagagatgcggggaaatggcacgcaagctacgtttcttcaaggaacagatggtgaaggctggtttatcaccctcgactagatctgcaattagtgatgatgttgattt

SEQ ID NO: 4993 - DNA, 390 bp, Gossypium hirsutum
  Clone ID: LIB3083-104-Q1-L1-A8
agatggggtggaagaagggagtgccagagttcgaagagaccgggccagatgacttcgacccggccaatccctacaaagacccggttgccatgctggaaatgagggagcatatagttcgagagaaatggatcgacatagagaaggcgaagatcctacgagacaaagtcaggtggtgttaccgcatcgaaggagtcaaccatctccagaagtgccgccacctcgttcgcctgtaccttgacgccacccgcggcattggttggggcaaggatggccgccacccgtccctccacggtccgaaggttgaggaggttgagtcagaatgagtggctgctttcagctaaggaagggactgagtttggcctgcagacgtgagggatctgagtaactgtt

SEQ ID NO: 4994 - DNA, 396 bp, Gossypium hirsutum
  Clone ID: LIB3083-104-Q1-L1-B1
ctttaacctactaaaatcggaactcaactcaactgggagaagacagtttcccaaaaccttaaaatccacgaaaaaacataaaaaacagacaccatgtatagagttgctctttcacgtttcagggctctcaagggccgttccggtaatttagcagctgcacgttatgctacttcgagtgccgttgctcctctggacacaccatcagacagcgtttcccttccgccaccactacctgattacgtagcacctagtgaaactaagattaaaaccctatccaatggtgtgagaatagcctcagagcaattaccgactcctgctgcctcgatcggcttattcattaattgtggttccatttacgagacaccaatatcatctggtgcctcccacttgctagag

SEQ ID NO: 4995 - DNA, 380 bp, Gossypium hirsutum
  Clone ID: LIB3083-104-Q1-L1-B2
gtgctttttcaaccatccttgattggtatggaagctgcgggcatccatgagactacatacaattcaataatgaagtgcgatgtggatatcaggaaggacttgtatggtaacattgtccttagtggtggtacaaccatgttcccgggtattgccgacagaatgagcaaggagctttcggcactcgctccgagcagcatgaagatcaaggttgtcgctccacctgagcgaaagtacagtgtctggatcggaggctcgatcttggcttccctcagcaccttccaacaaatgtggattgcaaaggccgagtatgatgaatcaggtccagcgatcgtccacaggaaatgcttctaaatgttattggtatggggataggatgaaag

SEQ ID NO: 4996 - DNA, 371 bp, Gossypium hirsutum
  Clone ID: LIB3083-104-Q1-L1-B3
aacacttccatgtttattcgaataaggagcataagagtacaaaaatcttaaaaatggatagaccatcttttcagttattattcttacaatccaatacacacaaacaaatttagaaaagcacaacaatgtgtaggtgtttgatgagggattactataattcagaaggctatttttgttgtcttaaagactctgcaatcttctttgacagacaataagcagtggactggacagtgatcattggatttacaccaacagcacttggcaaaatacttgcatcacaaacaaacaatccttcagcttcccaactctctccattttcatcaactgcaccttccttttcatttatccccatcctacagcttcccatctgg

SEQ ID NO: 4997 - DNA, 338 bp, Gossypium hirsutum
  Clone ID: LIB3083-104-Q1-L1-B4
ctctccagtcgacctgtgtgactcaggttggccttggttgcaacgtgcaggcaaagtggaatgacctgtgttttattcccaagtttggtttcagttaaaaagtacttgaaaaaatttctcatggatgtatatgggtataagtaaccttttgcacttctttccttagttatatgctaatgtggggtactctgatgttcattggcctcacctccttaagtactgctttctttaccaccataagtagatggaaaagaattggaaggtggctttagccggtgaaatggaattctgataccatcatttgtttggatagagtctagaggtatgtagccggacat

SEQ ID NO: 4998 - DNA, 387 bp, Gossypium hirsutum
  Clone ID: LIB3083-104-Q1-L1-B5
gaattaaacattctctgctatgataaaaaaatggtaataataacaaatgcaaggtacaatgttggtcgtctaatacaatgcttcaaattcattttactctaccagctcaaaaagtccacattccatatttcctcaacatcttatacctgaaccggactgtcaaaattactatcaaggctcctcaaagttcatcatgttcccgaggttgttctttgttcatcaaatctagtttatgttgcaactcctttagcttatcttccagacaaacagctggggtggacagtatcgctacgtattcgcatcggctgggttcgtcaacatcagtgatctcattcttcaaaccacatctcaacttcaccttcatacttctatcagggccattccagc

SEQ ID NO: 4999 - DNA, 303 bp, Gossypium hirsutum
  Clone ID: LIB3083-104-Q1-L1-B6
ccgagtgatgccttctaagatttattggagggatgagttgaaaatgctcggtgggctttggctctcttggtgggaaaggtccctttgaaagacccatgcgggtgagcagctttggctctcatatttttgcattattcctgatggagcttcttcctgcctagctgtgaagcttctcaacttgaagactggagcgctggaccatgtgctagctgtagcctggcttgaaaatgcgtttgctcaagtggtcttaattccagatatgttgctgaagctttcacatctgatgctgtattgaggagaagc

SEQ ID NO: 5000 - DNA, 392 bp, Gossypium hirsutum
  Clone ID: LIB3083-104-Q1-L1-B7
ggttgaggtaaatttcattacagcaactggtccaggccgtttcgttcgtctttacggtgcttccctccgtttgaacacttccagatctgaagaaaaatgcctcccgccgctcctcgatccggagatgcgatcttcgccagcgtagaacgcgtgaatgcagaactattcactttgacttatggagcaatagtgcgtcaattgcttactgacttggaggaggttgaggaggttaacaaacagcttgatcaaatgggctataatataggaattagactaattgatgagtttctagcaaaatcaaatgtgtccagatgtgttgactttaaggagacagcggaaatgattgccaaggtgggtttcaaaatgttccttggggtcactgcatctgtcat

SEQ ID NO: 5001 - DNA, 387 bp, Gossypium hirsutum
  Clone ID: LIB3083-104-Q1-L1-B8
attttgttttccaaagcaagtcaagtattccctgactggtctgcgatggtcagaaaacttcgtgccatggcttacaatgctgaagaccagattagggcacggaagaatgaagagtcatatcttgttcaacttgctggaaggactacccctaagggccttcactgcctctctatgcagctgacagcagaatatttttcccttcaacccgaggaaagggagttccctaaccaaaaaaatttgaatgatccggacctttatcactatgcagtattttctgacaatattctggcttgtgcagtggttattaattccacaatttcatctgcaaaggagccagagaaaattgtttttcatgtggtgaccaattacctcaacctcccagcaatg

SEQ ID NO: 5002 - DNA, 397 bp, Gossypium hirsutum
  unsure (1)..(397): unsure at all n locations; Clone ID: LIB3083-104-Q1-L1-C1
aagtcatttaagacagtaagactgcatggaggactgatgaagaatttgccagagaaatgctggctggagttaaccctgttataatccgtcttcttcaagaatttcctccaacaagcaacctagatcctaaagtatatggtaatcaaaacagtgccataaccaaggaacacattgagcacaacctagagggactaacagtagaagaggcactgagaaccaacaggttattcatattggatcatcatgattcacttatgccgtacctgcggaggataaacactacgacaaccaagacttatgcgtctcgaaccatcttgcttttacgcaatgatggcactttgaagccattggtgattgaattgagtttgccacatccgaacggngatcaattaggtgc

SEQ ID NO: 5003 - DNA, 304 bp, Gossypium hirsutum
  Clone ID: LIB3083-104-Q1-L1-C2
atattaatatatagcgactgatttgattattaaaactacgaaataagataggtgaccaaacatgagtaaaatgacgaataccccaatcattttcctaacccattgggttttctcctcatcccatccccaagttttttaccaacaaaatttgaaacatcctttcctgggtagtccaaagttcatcaaagacattttgctttttttacacgtttaatctttttctcaagaaaaaattaaaaagaacccaaggaggcttttttggattatgctatcaattcatctttctttcggcttcctttttttg

SEQ ID NO: 5004 - DNA, 396 bp, Gossypium hirsutum
  Clone ID: LIB3083-104-Q1-L1-C3
aatacacatcatatacttcattaaaacataaatcaagcgaagtgatgttaacattagatacaacattcaaaattaatttcactagaacaaacgatataacataaactataaccattcagaatctctatgcatgcaaagagattcagcattgctacatggatgaatgcacacacacatttcccactcaccatcttttttattaacaatataattacgatatcccatgaaattactgcatgatgatggcacatgcaccagtgtcatatggcttaaggcttaatgctcgagccagactgagtaaacatggacttcggccattcaggcattttaacccactcagggtactctgcctttctcaggtttcttctcctcttctttttcatgctttgggaactc

SEQ ID NO: 5005 - DNA, 379 bp, Gossypium hirsutum
  Clone ID: LIB3083-104-Q1-L1-C4
gcagcaatttgtctctcaaaggcttctctaatccttgtgctcgtcgctgtttgtgctcttatgggttcagccatcgctgctgaatccccagcaccgagtcccacctcaggaaccggctccatctccccctcattcgtctctgttttctttgccgctgtcacggctctgctttttggctctactcacaggatctgaagggtgttggctattgatggtgtagagagggtgtttgatttctcatttatatagatttgattctgggggggtgaaatttatatggaagtttagtatatctaagaagtcctatatatataaatatgcgagaatcgagagaggtagtttttgtatctactgtacagattattcatggtggatgatg

SEQ ID NO: 5006 - DNA, 385 bp, Gossypium hirsutum
  Clone ID: LIB3083-104-Q1-L1-C5
atgcacaacgttctagacatttctcctgaactatatacatataaataacctaaaaacaaaccccagctcatgggagcgctgtaataaagaattctctatgatctaattctaaaatcaacaagatatttaaaatcaaagcttagaaaaaaaatcaaaccaataaaagattttttttttttttttagatatggaagggaaaaatagtctaggatgatgtgggagcctgcctcgccaaataacttgcctaagccattctctttccacatcaacgaatcagtggaagcattctataatctttgtgtattttgcaccttattccgacatatgcattaagccaataactttgcaggaagagtaacatcagaatccttttccggctccaaaa

SEQ ID NO: 5007 - DNA, 291 bp, Gossypium hirsutum
  unsure (1)..(291): unsure at all n locations; Clone ID: LIB3083-104-Q1-L1-C6
attatgtttaaggtgatgaagaatttataatgccaactgaagttgtttctgaagataacatagcaccagaaggatttggtaaagatattcctgagacaacggtccatcctgtgccgccagtgcctagcaagacggtaagattttcgactgtaaatatcgaagagatgggtgcaacgaatgagaaatatcagtcgcctaggattcctgaaatagagatctcaactccacctccaaataatggaatggacaaggaaccaatgcatagcangaagaaatggaacaacgaggaga

SEQ ID NO: 5008 - DNA, 391 bp, Gossypium hirsutum
  Clone ID: LIB3083-104-Q1-L1-C7
ggattggttcctctgcagctcacattgtgttggcaatagtttgctgtggccatgtttgttgtgtccgggaccatggcacaggatattgctccttctcctgcaatggctaccggagcaggctctgctttgccggtttccgctgtcttcttatgctcttccatgttggtctctttaattgctctcttggtgcattgaattcaaagcttttcaagactttatgacattggctacccttaatttcactctcactggtgatgaggggagtagcctctaatcttctccgagataatatttgggtgttatcaattttcaatttctctaaagttttagatatctctatatatatcatgttacattagtgacataaatttgattttgtaatgtaattggt

SEQ ID NO: 5009 - DNA, 388 bp, Gossypium hirsutum
  Clone ID: LIB3083-104-Q1-L1-C8
gaaatgttgtgatctctgtacctcttccagctcttcgggaggcaccaaatgtcaggcagattgatggtgaatggaggtatgatcccagaaattccatcttagaatggtccatacttctgattgataactctaaccgcagtggatctatggagtttgtggtgcctccagcagactcatcagtgttcttcccaatatctgttagattttcagccactagtttatacagtgacctgaaggttgtgaacattattcccctgagaggtggagctactcccaagttctcgcagaggacaaatttgagtacagagaattaccaagttgtgtgaatgttaatatcaatattccaagtgtactaataataggttgcgacactttttggtgaactttg

SEQ ID NO: 5010 - DNA, 384 bp, Gossypium hirsutum
  Clone ID: LIB3083-104-Q1-L1-D1
cagatccttagtaagtgagactccatttacctttatccaatagccatggattctgcaactcgaagaagaagtcaaggaggcctcttcgaaggtctctacagagtcatcatgcgacgtaactctgtatacgtcacctttgtcatcgccggcgcttttctcggagaacgcgctgtggattatggagttcataggctctgggaatacaacaatgtcgggaaacgatatgaagacattccagtgctaggacagcgacaatcagaggaatgaaatcattatgccctttctggatgttttgaagaagtcattgaggattgggccagagcatatatctaattaggtagctatgctcattgttgcaataaactgttaattgtttttggttct

SEQ ID NO: 5011 - DNA, 286 bp, Gossypium hirsutum
  Clone ID: LIB3083-104-Q1-L1-D2
tttcgatggtattgatagacattatctatatgccaatcggaacacagttttgtttgatattaacatgaaaggtctagatggtatacaaggccctgtatatgtcggcacggggtgtgttttcagaaggcaagctctttatggttatgaacctccaaagggacctaagcgcccgaaaatggtaacctgtggttgctgcccttgttttggacgccgcagaaaggacaaaaagcactctaaggatggtggaaatgcaaatggtctaagcctagaagcagccaaagatgac

SEQ ID NO: 5012 - DNA, 357 bp, Gossypium hirsutum
  Clone ID: LIB3083-104-Q1-L1-D3
aaaagagaataaggacagggtggttgtttttttttaaatgatggaggcgccccattttttttttattttttttatgatgaacttaatgacagattttatgaaaatgggaaaaaaaagaaaagaaaagaaaagggttgcttgagaaaatctaagtacaagaagaagaagcaaacccaaatcacattcacacagataaaaaatgaaatgaaaaccaaagaggacatagtagcatactgtctttaatcgaagaattcccaagggaacttcggtggggctgagttattagcggttgatgaagatgtaaatgtcgaggtgaccggcaatgttgccggggatgaatcgaatgtttcccatttc

SEQ ID NO: 5013 - DNA, 373 bp, Gossypium hirsutum
  Clone ID: LIB3083-104-Q1-L1-D4
gtaaattttaggaccgactaatgaatcctgttctgatggacaagattgagaagcttaagcatgagctgaaccagagtctatcagcggctccaaattacacaatccttaaatataaacttgacatgttgaaggaggtttcgacagccaagagtctctccaaggctgctacaatgaagcaggaagttagtaagaaattaagtgaaatcatgggtcggcctgagataaaggagaagcttgaagcattagaagctgaggttcaaagttctggttcatcaagctttattgatttagatgaaggggtgaaggacaaaatactgaagttgaagagcgagatagaattggaaatgattagtgctctggagtctttgagttt

SEQ ID NO: 5014 - DNA, 389 bp, Gossypium hirsutum
  Clone ID: LIB3083-104-Q1-L1-D5
tgataatttatcagaaggttgcaataaaaagggagattgtttggatgaagtaataggagacattgggaaagaagcatttttgacgaaggaattcgtgccttaccttctgtttgggctactccttgctactgtcgagacgatttcacccactgtcactttggccaccatgtatctactggacaacccatcggctttgcaacaattaacagaggagcatgaggaaattctaaagaacagagaagatgccaattctggacttgtatgggaggaatacaaatccatgacgttcactcgttacgtgattaatgaaacacttaggttagaaaatgttcttcctgggatgttgaggaaagttatagctgacattcacgtcgatgaatatacaatac

SEQ ID NO: 5015 - DNA, 309 bp, Gossypium hirsutum
  Clone ID: LIB3083-104-Q1-L1-D6
gttatgattactacaaatacacctacccttgcactcctggagtttcttaccatggccggggtgccttgcctatctattggaactacaactatggagaaacaggagacgcattgaaggtggacttattgaaccaccctgaatacatagaaaacaatgcaaccttagctttccaggcagcaatctggagatggatgacaccggtgaagaaacaccaaccgtcggcccacgatgtgtttgtcggcaactggaaaccgaccaagaacgacacgttggccaagcgggtcctggggttcggagctacccataatg

SEQ ID NO: 5016 - DNA, 391 bp, Gossypium hirsutum
  Clone ID: LIB3083-104-Q1-L1-D7
tgctgcggtatacaaagatcccagcgatgcttgtgctggaattgctggagactcctataaacgttggttggagcttgaaaatcgaaccaatgatattacaatcataattgtacagatcaaaggcctatcaaattcgggtgttggcacaactgatagtgaactacattccagaccctgccaaattggcggttccatgaatcaaagcactgccattgttccaccactgatgcatcagaggcctttggaatcggatgtaggttagccgaaaagagcaagcagaagtttttggcatacaagattctcatggcgaatgatttcagcgcgccaaggacatcttgctaatgtaacacaatgaaatttgtcaaggtgaaggtactttagctctgatctt

SEQ ID NO: 5017 - DNA, 382 bp, Gossypium hirsutum
  Clone ID: LIB3083-104-Q1-L1-D8
aatatgattattgctatacttcccatgtcagctgagtggaattggaacccagcaactgttggtttaatacagtcatcctttttctggggttatctcctcactcagattgctggtggcatatgggcagacactgtaggtgggaagacggttttaggctttggtgtagtttggtggtccattgctactgctcttactcctgttgcagctaaattggggttgccatttctacttgtcgttcgtgctttcatgggaattggcgagggtgttgccatgcctgccatgaataatattttatccaaatgggttcctgttgctgaaaggagtagatcattagcattggtgtatagtggaatgtatcttggctcagttactggtttggcat

SEQ ID NO: 5018 - DNA, 396 bp, Gossypium hirsutum
  Clone ID: LIB3083-104-Q1-L1-E1
cggaaaactcaccgtaaattcatcatgtgtacattggagaaacgcggcaacgtctttattttaacatttaccggcgaagaccagcaccggtttaatcccaatctcatcggctcccttctcagccttctctctcaggtcaaggctgaagccactcgtggctcagctcttattacccaagcccaaggtaagttcttctccaacggcttcgatctcgactgggctcaagccgccggatctgaacaaggagccgcggaacggttacaccacatggtggctttgtttaagcccgtcaccgcggctcttctgttcctcccgatgcccaccgtcgccgccatcaccggtcacgccgctgccgctggatttctcctcgcgttgtctcacgattacctgatcatg

SEQ ID NO: 5019 - DNA, 370 bp, Gossypium hirsutum
  Clone ID: LIB3083-104-Q1-L1-E2
aatctatcttatcgtctaaaccaagtccttcgatgggcgctcggttctgttgaaattttctttagtcatcattgcccagcatggtatggtttcaagggaggaaagctaaaatggcttgaacgattcgcatatgtcaacacaaccatctaccccttcacatctttaccacttctcgcctattgtaccctaccggcaatctgtttacttaccgataaatttatcatgccaccgataagcacctttgcaagtctattcttcattgccttgtttctttcaatctttgcaactggtattctcgagcttaaggggagtggagtaagcattgaagaatggtggaagaatgaaccattttgggtcatcggtggcattt

SEQ ID NO: 5020 - DNA, 393 bp, Gossypium hirsutum
  Clone ID: LIB3083-104-Q1-L1-E3
cacgtcgtttctctctattccacgccattgttcttctggttaactcgttttgaggaggttattgtttgatctagggaagaaatggttgtttctgggccaattacgcctggacaggtgtcttttcttttaggaattcttcctgttcgttgcatggatatattcagagttcctagaatacaagagatctgcatctcattctaaagtccatgcagacaataatctggttgaatcaggagatgagaaaattaaagaagatgaccgggctcttttgcttgaaggaggtctcactagatcaacatctgctaaagtccatagttcaaccatcaaaacaaacttgattaggtttttgactatggaagactcttttctgttggaaaatcgagcaattttgag

SEQ ID NO: 5021 - DNA, 396 bp, Gossypium hirsutum
  Clone ID: LIB3083-104-Q1-L1-E4
ccacacctatagatctcccccccaaaaaaaaaaaaaaaaagaaaaacaaacacctaaagtaacagatgcaagagagcgcaaaataagggcagagagagctccgtggcttgcaatggataccgtcgattcttagatctcttaaccctagccatttttcttttttatcatgtatagattctcaagatttttttctcccgagattctttcttattttcttttttttttcaagaatcttggtagccactgatcggagcttcactatgctttacttttcgaaactctattggctttatttttttttgtctgcaatctgattgagcattgtttctaacgaagatatcaacgtttaggtttcatttgattcagttctggctggttttctgattttacctgcat

SEQ ID NO: 5022 - DNA, 353 bp, Gossypium hirsutum
  Clone ID: LIB3083-104-Q1-L1-E5
gggtgggttatgaaaacaaaggttatgacacattaagaaaacttttgcaatatcatccaacgtgtatattaaccatacatttcatacacataattttcaagatacacaaatcctaattatacacacaagcagcatgacctccaagcattactgcagtaagtataaagtaatatttcttacattaaggctccacaatgatcttaccagtggcatgaccatcaatgctcttagcccatgctttctcagccttacttaggggatactttgaatcgattaccgtcttaagctttccgtctttcaataagttaaccagataatcgaggttctcctttttaggtgacataaagagtggt

SEQ ID NO: 5023 - DNA, 392 bp, Gossypium hirsutum
  Clone ID: LIB3083-104-Q1-L1-E6
gtttaatgtaacaattgaagatattcaaatacaacatggatatgaatgcacacaaggagatccctcaaccagttctgaattacatgcagatgctgatcgtggctccaaggatgttgaggaagaaacaatgcagcagcttaaaactgcaacatttgagagtgagactagtgaccaaccaatgaaaaaccatctatcattatcttcagagcttaatgatattgaggaagataaagttccggatacaccgacttccatcgacagtctccatctgttgcacaagaaattgttattgcttgacagaaaagaatccggaaccgaagattccttggatggaagtgttttcagtgacattgagggtggtgatggggtactgactgttgacaagttgaaat

SEQ ID NO: 5024 - DNA, 391 bp, Gossypium hirsutum
  Clone ID: LIB3083-104-Q1-L1-E7
ctttcatgtttcttttcgattcgttgtctgaaacggctgagttcgcgaggagatgggttccgttttgtaagaagcataatgttgagcccagggcgccggagttttatttcaatgagaagattgattatttgaaggacaaggtccatcctagctttgttaaagaacggagagccatgaaaagggaatatgaagaatttaaagtaaggatcaatgcattagtagcaaaagctcagaagaaaccagaagaaggatgggtgatgcaagatggcaccccatggcccggaaataacactcgtgatcatcctggaatgattcaggtctatctaggaagtgccggtgcactcgatgtggatggcaaagagctgcctcgacttgtctatgtttctcgtga

SEQ ID NO: 5025 - DNA, 392 bp, Gossypium hirsutum
  Clone ID: LIB3083-104-Q1-L1-E8
cacacagttaacctcaccactcccttgcacttaagctggaaataatccataaaaaataaataaaacccaccgaaaattttgaagctttagacctgttgctttcgaacaaaccccagaaaaaagatgcaagcttggttctcagggagcagtagtgtaggtgatgggcagggaaaagaaggatcatcgcttttagctgattggaaccttatgcagctgcaagagaatcagaagatggctctgcgtttgggttcgatcttgagtctgctatgaggtctgccaatgatactgtctctggtaccttcaacgtcgtttcaaaaggtgtgagagatattcccggaaacttccaatccgccacgagtagtgtcccttcaggaaaagcacttctctatttt

SEQ ID NO: 5026 - DNA, 397 bp, Gossypium hirsutum
  Clone ID: LIB3083-104-Q1-L1-F1
atcagttatcccattaaccctaaacgaaaatcagctgagaaaaaaccatttatttttcttcagctctaagcgacaagaacaatggctgacttcaagaaagccactgctttgattctcacagtggctttgcttgtgaatctcgctttaatggttgatgctgatggtgatgatgataagaagattcgagtcaggaaacataagggtgagaaggagtgtatacaagggtgggaatgttcctactggtcgaaatattgttgcaaccaaacgatttcagatgtcttccaggtttatcaatttgaggacctgtttgctaaaaggaattcgccggtggctcatgctgttggattttgggattaccattcttttattttggctgcttccatttatgagcctttgg

SEQ ID NO: 5027 - DNA, 394 bp, Gossypium hirsutum
  Clone ID: LIB3083-104-Q1-L1-F2
ttttaatgtctcttctcgaatctcagaagctcccttgctttgctcttccaccaaaggccacccttagatctcccaagttccatgatctccaccattccttctggctccaaagaggttgggaatctgaaaaagcctttcacgcctccaaaggaggtgcctgttcagatcacccactccatgccgcctcacaagattgagatctttaaatctttggagggctgggctgagaacaacattctgactcacctcaaaccagttgagaaatgttggcaacccgccgactttcttccagatcctaattctgatggatttcatgagcaagtcaaagagcttagggaaagggcaaaggagatcccagatgattactttgtagttttggttggtgatatgatca

SEQ ID NO: 5028 - DNA, 397 bp, Gossypium hirsutum
  Clone ID: LIB3083-104-Q1-L1-F3
ccatcggttccacgagggccggttcagttgataagaagatcaactcatcgggaggattaactcgcaacctttcgtggttggcagtggaggagaatgatcagcaagagcaagagatggtagcaacagtgtgcatgagatgccacatgttggtgatgctttgcaagtcatcacctgcatgccctaactgcaaattcatgcacccaccagaccaaggccctccgaaactattcaagcaggggcttagcctcttgtgctagtaaggacaatcaagttttttatgtttaggataacaaattcaccccaacgtgtgttgattaaatctgtatttcttaattcgtcttgaaaagctaaatagtggtgctttaaaggttttagctgatttttatatatatacata

SEQ ID NO: 5029 - DNA, 385 bp, Gossypium hirsutum
  Clone ID: LIB3083-104-Q1-L1-F4
aaaatccattgtttttaaaccctttctgctagggtttcagactaaaaatgtgcagccatcagaccaccaccatacggttgccgacagcgcgcagatgatggctgattccgccaacggaggagaactccgactaagcccacggaggtttggtatggcgaacatggtttggacatggtgcgtgggtgcgtggtgcgtggtggtggagaacgtgggtagtggcggttgaatgttggcacatggcggctgaagggaggcagcaaatctaggatttccctctttgctgaaaaatttttgtgggctagggtttttttttttaaatttgggctttgttttattgtaataggttaatggctatgtttgggttctaataggctgaaattggata

SEQ ID NO: 5030 - DNA, 387 bp, Gossypium hirsutum
  Clone ID: LIB3083-104-Q1-L1-F5
cattcacctttgtggatattttcatcgtgacctaaagcgagagaatttgttggtttctagagacataatcaaaattgctgattttggtcttgcacgtgaaatcagttcacatcctccatacacagaatatgtctcaacacgctggtatcgtgcgcctgaaatacttcttcaatcatacctgtatacttcaaaagttgatatgtgggcgatgggtgctataatggccgagttgttcaccttacgtcctctttttcctggtgccagtgaagcagatgaaatctacaaaatctgcagtgtattaggtactccaactaagtatacgtggtctgacgggcttaaccttgcaagatctataaactaccaattcccaaaggtccctggtgtgca

SEQ ID NO: 5031 - DNA, 391 bp, Gossypium hirsutum
  Clone ID: LIB3083-104-Q1-L1-F6
cggcacgttctttttgctagctaagctactgtgggagttattgttcttcagaacagcttctgcagtagctaataataacgttatatattatataaattttatacatcctttttaccctacgactccatatataagcaagtaaaaataaatatggctcgctctgtttcttcctttaagttccttggtgcttctgtttttgatgctctttatgtctccatatcaaggagaggttactcaggtgcaccgccggcggcagtgacggctagctttggtaggcctggagcgatggggaaagtggaacgaagatatgcgatgaaagagtcgtcgtcgtcggagacaagggcttattcttcagcttgggcgcctgaccctgttacggggtattaccggc

SEQ ID NO: 5032 - DNA, 391 bp, Gossypium hirsutum
  Clone ID: LIB3083-104-Q1-L1-F7
cggtatcctattacgaggaacaaggcttttcttctgcagccattcaaagttatcattctggtaacgcaggtgaatctgatgatagctgccacaggtccgagccgtctttgcagaggaactttacggttagaccatcagaagaaagtgaaggtttcggaaacagaagaccacatcctgaggagttcgaagggaatgaggatacagttgcaggtgaagatcaaaactggttgggtttggaaggtgttacacgagtgaactcactcatccaacttcctagattttccgaggaaaggccgaacccttaaagattttgtgttgtctggaaagaaactggactgttttttagtgcagcctacattagatccaagggaacggaacttgtttgtgaatc

SEQ ID NO: 5033 - DNA, 398 bp, Gossypium hirsutum
  Clone ID: LIB3083-104-Q1-L1-F8
tgaacctattccaccggtttatgcacctccaaagaaagagaagcatggacccaaaccaccaatgtatgaacctccaaagaaggagaagcctgagccaaagccaccagtttatacacctccaaagaaagaggagcctaaacctaaaccaccagtatatgaacctccaaagaaggagaaacctgagccaaaaccaccgatttatacacctccaaagaaagagaaacctgaacccaaaccacccgtatatgaacctccaaagaaggagaagcccgagccaaagccaccggtttatacacctgcaaagaaagagaaacctgaacccaaaccaccagtgtatgaaccttcaaaaaaacctccaatgtacgaacctaagccaccaaaaccaccggtttatacac

SEQ ID NO: 5034 - DNA, 310 bp, Gossypium hirsutum
  Clone ID: LIB3083-104-Q1-L1-G1
caaaaaatttattttttttatacaaaacgcaatatgggggggggggaacgatgtattggggaaggggaaaaaaaaagaacaagaataagaataaaagagagagatagagagctagagagagcgatagagagagagcgacagagagcgagtaacatacatttccttgagaagatgattggaggggagtataaggatgtattgatcttcaaacagggtgaggaaaacgatgcataatataaaatagattagggggaagtcatatggaatgagacatttatacatggcaataaagaatgaattatatgatgta

SEQ ID NO: 5035 - DNA, 396 bp, Gossypium hirsutum
  Clone ID: LIB3083-104-Q1-L1-G2
aaagaccctgtgtttagcatattgttcgtagcattgggttttggtcaaggaagaagaaggagaaagataagtaatgtttttgagaatgatggaatctggggttcctgtttgccacacttgtggtgaacatgttgggttgaatgttaatggtgaaccctttgtggcttgccatgaatgtaatttccctatttgtaagagttgttttgagtatgatcttaaggaacgacgaaaagcttgcttgcgttgtggtagtccgtatgatgaaaacctgttggacgatgtcgagaaggccaccggcgatcaatcgacaatggctgcacatttgagcaagtctcaggatgttggaattcatgcaagacatatcagcagtgtgtctacattggatagtgaaatgac

SEQ ID NO: 5036 - DNA, 354 bp, Gossypium hirsutum
  unsure (1)..(354): unsure at all n locations; Clone ID: LIB3083-104-Q1-L1-G3
tggaagcattggattggagaagagagagaaagtaatgcgaaattggttaaagcacgggtttctatttactcccataagggctgctttcatctacttgaaagtcttctgccttttcgtttacttctctcgggtaatcattcaatgctacctcttccctttaatcttctttctactttcatcctttccctaaggattagggttactacataatatatttgtaccgataaaagtatgagacccctatattaaaaatttgattgtattttacttattctattcaaataatactaaattagttcatataaaaaaaaaaaaaaaaacaaaaaaaaaaaaaaaaaaaanncctcgaggggg

SEQ ID NO: 5037 - DNA, 395 bp, Gossypium hirsutum
  Clone ID: LIB3083-104-Q1-L1-G4
cttctttatccctcatcaacaatgtcgccaccgtctcttctcggcccaccggagctccgccaccccactcctccaaagcctgaaaccactgtcgccaccaccaccactaaagttccaagcgatccattcatggatctaatgttggctaatttcaataaagccaaaaacacaccttcgatgggattcaccgaaaataattcagccacttatttagccaccggcaacccttgccttgacttttttttccatgtggtacctaattccccacccgattccattagagaaatgttgggtcgagcttggaattttgatccattgatgactctgaagctaatttgtaacttacgtggtgttcgtggtacagggaaatccgacaaggaagggttttatacggc

SEQ ID NO: 5038 - DNA, 393 bp, Gossypium hirsutum
  Clone ID: LIB3083-104-Q1-L1-G5
cttttgtttgctgagctctctcccccaacatcaccatggcagatagggtataccccaaacaagcgacaaatggcaccgccgccacatccaacccttcttttccggccactaaagcacaacaatacggagccacccgccctgtctaccgtccacaacccgaacgccaccgctaccgccgctcttgctgttcttgctgcctttggaccaccatagctatcctcgttctcatcctcatagccgccgtagcttctgctatattgtacgttctttaccgccctcaccgtcctactttcactgtttcctccctcaaaatctcggcacttaacgtaacctcagcttccaagctgatcaccaacatcaacctaaacgtcacagccaaaaacccaaacaaga

SEQ ID NO: 5039 - DNA, 395 bp, Gossypium hirsutum
  Clone ID: LIB3083-104-Q1-L1-G6
cttctgtttctaaagatgatccgtatggtggccagcaggatcgggtgcaacaaaatcctccaccgcctgtgaatcaatccagtgcagtgcctacaaagccctcacctccaccagttacagcatggcgtcctcaggcaatgccaccgcctccacttttcatgagcagcagtggaggttctggctctaattattcaggttccgagaacccacttccaccaccttcacctggtattgtgttaggtttctccaagaacagatttacctatgaagaattagcaagggcaacagatggcttctcagatactaaccttcttggacaaggtggtttcgggtatgtgcaccgtggagtactccccaacgggaagcaagtagcagtcaagcaactgaaggctgga

SEQ ID NO: 5040 - DNA, 391 bp, Gossypium hirsutum
  Clone ID: LIB3083-104-Q1-L1-G7
cttgctggttttgttgctgttgagatcaccggtgggcctgaaattccattccatcctggaagagaggacaagcctcacccaccacctgagggtcgtcttcccaatgctactgagggagctgatcacttgaggcaggtgtttagtaatcaaatgggtcttagcgaccaggacattgttgctctttctggtggccacaccctgggaaggtgccacaaggagaggtctggatttgagggaccatggactaccaaccctcttatcttcgacaactcttacttcaaggagctcttgactggagagaaggacggcctgttacagttgccaactgacaaagttctcctttccgaccctgttttccgtccattggttgagaaatatgcggctgatgagg

SEQ ID NO: 5041 - DNA, 367 bp, Gossypium hirsutum
  Clone ID: LIB3083-104-Q1-L1-G8
gcaagtaaagtgcaaaaacaatttaatggcaggctataagaacaaacatcaaaagcaacaggtagatataatgcatgtctgtggtagtatatatacactagagatcaaacatctcccgaatatcacatattcagcttcgacgaagtagcataaatatgaacttaaataaatggagctccgcaatccaccaaggaacatagtagtactatgctctgtcaactaattcaataggctgctgcatataaatgtaggagttgttgccaaggtttcttcacatgtggatacatgtatagttctataaaccatgattgtatcaaaaatattttaataccgttttgaaagaactgactataactttttacaaaca

SEQ ID NO: 5042 - DNA, 361 bp, Gossypium hirsutum
  Clone ID: LIB3083-104-Q1-L1-H1
ggcaaccgttaccttagtggattacgatagaaccaaagagttgaagcaattcgacgacacaaaagctggtgttaaaggactcgtcgacgccggaatacttaacatccccaagattttcgttcgaccatccgaggaccttgccgccgacgaactgaattccagtcagaaaaccattgaagtcccgatcatagatgtaagcaacatcggagacagtatccggcgacaggagatcgtaaacgaagttaagattgcatcaggggaatggggtttcttccaagtgataaaccatgggatcccattaagtgttttggatgaaatgattgaaggcatacgtttgtttaatgaacaagatttggagctg

SEQ ID NO: 5043 - DNA, 395 bp, Gossypium hirsutum
  Clone ID: LIB3083-104-Q1-L1-H2
tttggtaatgcgatacaaccagaaacaggcgctgagaaagaaaccatgtctcaagaagatcaagaggaagaagttgggaaactggccgtccgcctagccaacgccgtggtacttccaatggtcttgaaatcagccttggagctgaacataattgacacaatcttagccgctggtgacggcgcgtttctgtcaccttcccagattgcgagtgcccttccttcaaagaatcctgacgcaccagtgctactagatcgaatgctacgcctgttggccagccattccattctcaaatgcgcagtaaaagcaaaggaaaaagaagaaattgaaagactgtacggtgcaggcccactatgcaagttccttgttaagaatcaagatggagggtcgattgcacc

SEQ ID NO: 5044 - DNA, 395 bp, Gossypium hirsutum
  Clone ID: LIB3083-104-Q1-L1-H3
gaaaaccctagctttacctttttgttctttgagaaacatcaaatcgcagagatggatctttcatagatttcacctcacatctctttctctttgtaaaagaaaattgggtttacttatttatttgggtcggattgggttggtttggttttagaaaagaaggaaggcgatgtcaaccccagcaaggaagaggctgatgagagacttcaagaggttacagcaggatccacctgctggtattagtggggctcctcaagataataatatcatgctttggaacgctgttatttttgggcctgacgatactccttgggatggaggcacgttcaagttgactttgcagtttacagaggattatgcaaataagcctccaactgtccgtttcgtctcacgaatgt

SEQ ID NO: 5045 - DNA, 143 bp, Gossypium hirsutum
  unsure (1)..(143): unsure at all n locations; Clone ID: LIB3083-104-Q1-L1-H4
gcccccggctgcgagaattcggcttgaggaacaccttttctttcccccaccgcccgacacnaaacgggaagtttcttatttacatggggcaggccaaacaccacacatctttttctctctgtaaaagaaaattgtgtaacact

SEQ ID NO: 5046 - DNA, 386 bp, Gossypium hirsutum
  Clone ID: LIB3083-104-Q1-L1-H5
ggaatgggtagtatcgagacattgtacgacagtttatcaagggtacagatgggctttctggggcttttgctgaatgcctttgtggaagcccaaacttatatcaggaaggaggagggaaaccatggaacagtgtcaactttatatgtgcacatgatggttttactttggctgatctagttacctataacaacaaacacaacttagcaaatggggaagacaacaatgatggagaaagtcataactatagctggaactgtggacacgtatatgaaattggcacggaggatagaatttgtccagcttgatggcttgaattggaaacactaccattgtcagtatccattagatacatgttatgatttacaaaccactcccccccccccccc

SEQ ID NO: 5047 - DNA, 363 bp, Gossypium hirsutum
  Clone ID: LIB3083-104-Q1-L1-H6
tggaaagaagctttgttatgttcaatttccacagagatttgatggtattgatcgtcatgatcgatatgctaatcgaaacgtcgtcttcttcgatatcaacatgttgggattagatgggcttcaagggcctgtatatgtaggcacagggtgtgttttcaacaggcaggcattgtatggctacgatccaccagtctctgagaaacgaccgaagattacatgtgaatggctgccctcttggtgttgctggtgttgcagaagttctaggaagaaatcaaagaagaaaggcgaaaagaagggcttactcggaggtcttttataccggaaaaagaagaagaagattattggccaaaactattttaaaaa

SEQ ID NO: 5048 - DNA, 390 bp, Gossypium hirsutum
  Clone ID: LIB3083-104-Q1-L1-H7
aaatagactttgaggaagctgctagcctgggcctatcatttctgcttctgttgggataaaacataaactcaaattgctccggcgccgacaataaagggggacaacatcactggcattctcaaaaaaggcggccaatacaccactttcatcaagctattgaaagccacacacgtggctgatcaactaaacagccagctaagcacaccggaccctaacgacaggttaacggagaaagcgccgagtgacagctcgaacttcggactcaaaccctggacgatgaactcactgtccgacaaagagaacactgaacgggttcaattccatatactcccgacgatgatgaaaacgaaccagactgaaacagcgagtcaccctttgagaacccaagct

SEQ ID NO: 5049 - DNA, 301 bp, Gossypium hirsutum
  Clone ID: LIB3083-105-Q1-L1-A1
aaatactctgcaacttgcagattatttaagtaccaagaactggtttcggctacatcgaatttcttggctgaaaacttgattgggaaaggaggcagcagtcaggtttacaagggttgccttcgagacggcaaggaactcgcggtgaaaatcctaaagccttcagaagaagtgttgaaggagtttgttatggaaatcgagatcattactacattacatcataagaacattatatccctcttgggattctgctatgaggataataaccttctcttggtttatgatttcttatcaagaggaagcc

SEQ ID NO: 5050 - DNA, 294 bp, Gossypium hirsutum
  Clone ID: LIB3083-105-Q1-L1-A10
attttctctgttcatcagtttctttttatctcttcgaattttcattacagaccctgatcctaaactctcaatcatgtcttccaagcaaggtggcaaagcaaagcctttgaagcaacctaaatctgagaagaaagaatatgacgagcatgatttggctaacattcagaaaaagaaagaagaagagaaggcccttagagagctgagagcaaaggcatcacaaaagggatcatttggtggttctggtcttaagaagagtggcaagaaatgaggttcttaaaaacctgagctaaaccg

SEQ ID NO: 5051 - DNA, 297 bp, Gossypium hirsutum
  Clone ID: LIB3083-105-Q1-L1-A11
gggacctgaagatcatttacatctagagggctttgcattgaatgtctttggaaaggcagacaaacaagatcgtgctggacgagcagacctgaatacggcaaagacattttacgctgccagcattttcttcgagattataaaccagttcggtgaacttcagcctgatcttgagcagaaacagaagtatgcggtttggaaagctgctgatattaggaaagctttgaaagaaggaaggaagcccatcccgggccctccaaatggtgatgaagatttgtcaattccatcagctacatctgg

SEQ ID NO: 5052 - DNA, 300 bp, Gossypium hirsutum
  unsure (1)..(300): unsure at all n locations; Clone ID: LIB3083-105-Q1-L1-A12
ttcgagccacaatcccaggctaaccacttttaagntttgggcaagctggggggcaaaccatggttttgaatggttgccaataaaatgggcaaagttttttactatgtagaaagccttgctactctctgaacacatattatttttcttcatagcttgtaaatggtagacctgttttttgaagatataaaagcgtttttactttgtggtacaacagaaatgcatgatctgaaaatgggaatttccagctctatgaaatgcaatctattgacaaggctatctagaaggatggatttgtaaatg

SEQ ID NO: 5053 - DNA, 302 bp, Gossypium hirsutum
  Clone ID: LIB3083-105-Q1-L1-A2
taggcatggtctcctggagaagcttcgccgggcagatagcagcagctccagctcttcaagcgacgaggaagaaggtgaaggagaagagaagaagaagaagaaaaagaaggagaagaaggggctgaaagaaaagattgaagagaagttagaaggagaaaagaaagaagaggacacctcagttccagtagagaagtgcgatgagccagtagtccagccagagacgccagagaagaaaggtttcctcgagaagatcaaggagaaactccctggacaacacaagaaagctgaagaggccagtagcc

SEQ ID NO: 5054 - DNA, 293 bp, Gossypium hirsutum
  Clone ID: LIB3083-105-Q1-L1-A3
gttcaaccaccttttgacagagcttgtgtatgaggacctaaaagcagctctggaggaagttaaaacgcttggagaagagcttggagatatttatgattacgtagctccgtgttttcctccaagatatgaaatattccagctcatggtaaatctgtatacagagagatttattcaaatgcttagattgcttagtgacagagccaatgaactgacaaacattgagatattaaaggtaactgggtgggtagttgaataccaagaaagtttaatcgggcttggtgttgatgagactc

SEQ ID NO: 5055 - DNA, 300 bp, Gossypium hirsutum
  Clone ID: LIB3083-105-Q1-L1-A4
ctgagaagcttccattgttcattgcttggcagttgctttgtgatactcaatggaaacggttggctggaggaatgtgccatgccagaagcagcaaagctttggattgagccatcccactaaagcgatgtgctgttaaactccatggaaatggcattgcaatctcatggtcgaggtggttcacattctcttctaaggttactttgcttagaaaagcctatttgcatttcggaaataacagttataatcaatgtatttatgtggccgttgaaaataaaggagttttattaacttcagtactgt

SEQ ID NO: 5056 - DNA, 275 bp, Gossypium hirsutum
  Clone ID: LIB3083-105-Q1-L1-A5
gtacatttacgcgggtaacgggtgaccaaccaaaaatgacacgaaggaaaaacggggtcctacttttggttacaccatgaacgttctatacggagattacacttgctggctaggcgatatcgatcccgtgaacatcatgatattccattacctgcattacctagacttactaagcgttgtggcgagaggaagcaaggccacacgaggagctaagctgagcctaacataaagcattcaacccgacccgagctacacctgctgccaatgctacatga

SEQ ID NO: 5057 - DNA, 304 bp, Gossypium hirsutum
  Clone ID: LIB3083-105-Q1-L1-A6
ttttagtagagtttgatggagggaatgggaaagcggaaaagaagaaaaaaaagaaggttttgcttgggaagggaactagtgttattgtggagatgataaaggataggttgatgagtaagggagagggtttagagaaaatagttgaggaatttttatcatttttagatccaaaaagtgcagattttgatgggttgttgaagaaggtgaaggagattttggagagcaatgaaagtagaagaatccccaagacccctaagggtactcgggattttgcgaaagagcaaatgacaataagaaagaaagc

SEQ ID NO: 5058 - DNA, 290 bp, Gossypium hirsutum
  Clone ID: LIB3083-105-Q1-L1-A8
gtggcagatatgtgcctagagctgtgttaatggatcttgagccaggaactatggacagtttacgaacaggtccttatggaaaattgtttagaccagataactttgtgttcggccaaaatggagctggcaataactgggctaagggacattatactgaaggagctgaattgattgattcagttcttgatgttgttcgtaaagaggctgagaattgtgattgtttacaaggttttcaggtttgccattcactgggaggtggaacagggtcagggatggggacattgttgata

SEQ ID NO: 5059 - DNA, 311 bp, Gossypium hirsutum
  unsure (1)..(311): unsure at all n locations; Clone ID: LIB3083-105-Q1-L1-A9
tcgagacnnttgatcgataccctttggcagtgnntctgtgaatnntggatttannatcttcaacttccataagggcctattatatanttggatnngaactcttacttgctggtgaaccttcaagnagtcgagcaagaaaactgttgcacgtttaatagctgcacaggattcactggtggagaccgcgaaagagcaggccagttccattagcaatataattgcacaggccacaaagtaggttatgaccgagagtggttgcggattgccatttgtattgggggtggttntggtgtctcatctgttgtgagaac

SEQ ID NO: 5060 - DNA, 78 bp, Gossypium hirsutum
  Clone ID: LIB3083-105-Q1-L1-B1
tgagaattcctcggtaggcctgtttgtggtatttaatgccgctaatcgtttgatcaggggaggcatccggcctaaaac

SEQ ID NO: 5061 - DNA, 295 bp, Gossypium hirsutum
  Clone ID: LIB3083-105-Q1-L1-B10
gtaatccatgcttatctgcatgtccttcttcttctactaattgctctctacttccacctaccgttttttttttcccatccaccttcctactacaaaatgatgtcgttattgtcgtcaattctccgtcgaaagcccgccgtgcttctccaagtacggctactatcttcgtatggtcctcctcccggaacgacgtcgcagcagaaacgcattgagaaaatcctggtgggcaaccgaggcgagatagcatgcaggatcgtgaggacagctaagcgtctagggattcggacggtagccg

SEQ ID NO: 5062 - DNA, 308 bp, Gossypium hirsutum
  Clone ID: LIB3083-105-Q1-L1-B11
tgcaagtgcttgctttcttttaactcaattggagaagtaagctagcttaaattagctcctttcttgcttctttctctgattccatatacaagcaatgtcggaacccccagtgaaaccggttctccaaaagccacctggatacaaagacccaagctccccggccggtcagcgtcggttcaggccaccgccacggaaaccggttctcccaccttctttccatcccaagaaaagaaagactagttacggtcgtgcttgttgttgctgtttctgcatcttctttttgatcttccttctcctcattctcattt

SEQ ID NO: 5063 - DNA, 292 bp, Gossypium hirsutum
  Clone ID: LIB3083-105-Q1-L1-B12
gcttgtgcttcattagtgtttgaagcaaagaactacagttcttaaataacttattacccatgccaaacccatgtgtggattggccttcaacttggttttttccggtttatttcaactttttggttcttttaagtgggaggaacctattttttggcaggcaaaacctcagaattatgataaaactgatttgccttaggcgtccttttctccttctccaaattttcatttgcaccctgactattttccaaggcagaaatattcaactgattcaaaggccttgatttcttaacag

SEQ ID NO: 5064 - DNA, 297 bp, Gossypium hirsutum
  Clone ID: LIB3083-105-Q1-L1-B2
gttccccagaccacccaaaagccagaagaacaagagccaaggttcattcctgaaacccaaaatggttatggcctttacggccacgagtcaggctcaggctcaggctcaggctcaggctcaagccggcccagtttcaccaccaaagaaacctatgaaccctatgtcacccctgttagattccaccctgatgagccctataacagcatccccgaatcctccaacaataaagacacttactactacaacaagaatgcctacgagtccactaagcagcaaaacttgggcgaggccattttc

SEQ ID NO: 5065 - DNA, 291 bp, Gossypium hirsutum
  Clone ID: LIB3083-105-Q1-L1-B3
cttaaatcgacctccaccctcgccctgcgcaacatcaatagaagctgccagcaaagtcacgtccaccgattctcccacgtttcccttccagagaatactgactttataggagttgataccaaagcttgatcttgctaagaaacatatatcatctcaactccatgtaaatttgccagatatcgaaagtaggccattagttggcaccggccttaatttggaaaggactagggctatttctggtggaattgggccatggatccggaccctaactcctgtttgtctacttgttag

SEQ ID NO: 5066 - DNA, 297 bp, Gossypium hirsutum
  Clone ID: LIB3083-105-Q1-L1-B4
gtgatttcaaagccaaagatgcgcttcgtaatgatcaaaaacacgatcaggtggaggaaggagtttgggatcgatgagcttttggatgaagatcttggtgatgatatggagaaagttgtgttcatgcatggacaagataaggaaggccatcccgtttgttacaacgtttatggcgagttccagaataaagaatcgtaccagaaagcgttttcggatgaggaaaagcgaatgaagttcctgcgatggcgaattcagctcttggagaagagtataaggaagcttgatttcagtcctggt

SEQ ID NO: 5067 - DNA, 300 bp, Gossypium hirsutum
  Clone ID: LIB3083-105-Q1-L1-B5
cttgagtgggctaaaatgcctgaatggccgaagtccatgtttattcaatctggctcggtcactaagccttgaaccatatgacactggtgcatgtgccatcatcatgcagtaatttcatgatatatagtaattatatagttaataaaaaagatggtgagcgggaactgtgtgtgcgcattcctccatgcaccaatggtgaatctctttgcatagagattctgaatggatatagtttatgttatattgtatgttctagtgaaattaattttgaatgttgtatctaatgttaacatcacttgg

SEQ ID NO: 5068 - DNA, 302 bp, Gossypium hirsutum
  Clone ID: LIB3083-105-Q1-L1-B6
tgaagttggatgaagtggggggaaaggatgaagaactcgatctcaatcataagaaattgcaagaacagatcattgaagctgagcagagatacagtttacagctaagcaatttgcaagaggctttgcaagctcaagagacgaaacagaaggaactcactgaagtaaaagaagcatttgatggtctcaatattgagatcgaaaactcgagaaagaggatgcaagagttggagcaagatctgcagagttccgttgaagaggctcggaagtttgaagaactgcacaaacaaagtggttcacatgct

SEQ ID NO: 5069 - DNA, 180 bp, Gossypium hirsutum
  Clone ID: LIB3083-105-Q1-L1-B7
aattaaacttttcttttattttttggacccaaaaataccatcccaattttttggaaacccaaaaaagaattcttaaaaaactcactcccttttttttctaaaacactgaaaaaacctctttctcaatagctatatattttttccccaaaaaaagaaataaaatcaactggcctaactttt

SEQ ID NO: 5070 - DNA, 305 bp, Gossypium hirsutum
  Clone ID: LIB3083-105-Q1-L1-B8
tgttgtgttgttgcttctgctgtcattgagagttttgctgatcttttccgagacaaatataatccctacgataattctattatagttatgatggccaaatttctgagacctgtggccctgagcctcatattatgtgcctcacattcacgtacattctcattgatcaatggctatgctgcaccaatggaggtttacaagatcttggagcaccatgatgatgcaagaactggttctgtactttgtgttggaagtgagtggcaccgttacccgtcatcattttttgttcctgattatattggtgaagt

SEQ ID NO: 5071 - DNA, 290 bp, Gossypium hirsutum
  Clone ID: LIB3083-105-Q1-L1-B9
taagaatgtgaaaagccaatgaggcaaggagttctcactcctggacgtgttcgtcttttgcttcacaaaggtctgtggactttgaaatatttttcagagcattgcactagagctgtgtatactgctccaattaaaacaattagcaaccagaagtatagagatttctatgggaagtttgatgttggccttctcacaggtgatgttagtttgagaccagaggcttcttgtctcatcatgacaactgaattgttaaggtcaatgctttatcgaggtgcagatattattcgtga

SEQ ID NO: 5072 - DNA, 292 bp, Gossypium hirsutum
  Clone ID: LIB3083-105-Q1-L1-C1
gtcggatctaacttggaactgcgtttggtcttcttaccgctattcccgacctatctctaaccccctcaatttctctcaggctccaatccaggtagatattccttgtgttcaagcgtcttcatggcttcaaagcggattttgaaagaacttaaggatttgcagaaggatccaccaacttcctgtagtgcaggtcctgtagcggaagacatgtttcattggcaagcaacaattatgggcccctccgatagcccttttgcaggaggtgtgtttttggttaatattcattttcctc

SEQ ID NO: 5073 - DNA, 300 bp, Gossypium hirsutum
  Clone ID: LIB3083-105-Q1-L1-C10
ttgttttgctttgcttaaaaaatcttgaatctgcactgtcctacttccctcgttatcgtcaatggcttcggacaagaagattaagatcgggattaacggatttggaagaatcggacgtttagttgccagagttgctcttcagaggaacgatgttgaactcgtcgccgttaacgatcccttcatttccaccgattacatgacatacatgttcaaatacgacagcgttcacggtcaatggaagcaccatgatcttaaggtcaaagactctaaaacccttctcttcggcgaaaaacccgtcac

SEQ ID NO: 5074 - DNA, 297 bp, Gossypium hirsutum
  Clone ID: LIB3083-105-Q1-L1-C11
ctgctgggaaggaagtgaagcgggagaagaaggtttatgatttgcccggtcagaagagggatcctcctgaggagagggatccactgcggatattttatgaaacaatgtaccagcaaattccccatagtgaaatggcacaattctgtgaatatacaccaaggcttataaagaaattagagggtatcagggtcaaaagagttgcagctggcttgttgcattcaacatgcattgatgatcttaatttgtctaggtattgcagaaactgggtctttgtttgtgtttggggataaagtggta

SEQ ID NO: 5075 - DNA, 289 bp, Gossypium hirsutum
  Clone ID: LIB3083-105-Q1-L1-C12
ggaacaactcctattgcttctgactctgatcgggcgtaaagtcttcaaccccaagtggaagccttatatcccagacttcaagctggcgtttgagcacttctgcatccatgctggagggcgagcagtgatagatgaactgcaaaagaacctgcagctgtcagcagaacacgtagaggcatccaggatgacattgcacagattcggaaacacctcctcctcatccttgtggtacgagatgagctaccttgaggcaaaagggaggatgaaaaagggagataggatttggcag

SEQ ID NO: 5076 - DNA, 288 bp, Gossypium hirsutum
  Clone ID: LIB3083-105-Q1-L1-C2
ttctacttaatagttttgttgcattgtacccaaaactgatacatgaaacttataattaaagaaaggagagtgctgcacttaaattatgaagtgaacaaaaaatagtgtttggatgccaggaaaattatgaaaaaacaaaatcaagcaacaacttcttgttgtttagtagcaagctcgttctggatatgttgagggacgacatcaaacttggccagttgcatggtgtaggatgcacgacctttcgtcatacctcggagagtgctgacgtattggaacatctccgcaagc

SEQ ID NO: 5077 - DNA, 294 bp, Gossypium hirsutum
  Clone ID: LIB3083-105-Q1-L1-C3
tgcattgggtccctgtggaccggatgatatgctccaacctctggtctgccgagctatcaaaacttgctgccaatgccttcttggcgcagagaatctcttcggttaatgctatgtccgcattgtgtgaggcaaccggtgctgatgtgagccaagtgtctcatgctgttgggaaagacacaagaattggacccaagttcttgaatgcgagtgtgggtttcggtggatcgtgtttccaaaaggatattttgaacctggtctacatctgtgagtgcaatggcctcccagaggttgcaa

SEQ ID NO: 5078 - DNA, 289 bp, Gossypium hirsutum
  Clone ID: LIB3083-105-Q1-L1-C4
ggggttctgccacggaaagaaacaaaaaattttgggtgatctgtgttgaaaaagaaataaaatatggcgactttccagggaactcaacaaaaatgcattgcttgcaccaggactgtttttttgggggttaattgaccggtggttattgggtttttcataagggttgctttcgttgccaccattgcaagggttccctcaagcttagcaactacaacttatttgaaggggtgctatactgcaggccacactatgatcaactttttaagagaactggcagtcttgacaagag

SEQ ID NO: 5079 - DNA, 248 bp, Gossypium hirsutum
  Clone ID: LIB3083-105-Q1-L1-C5
gtttcatacaccgccaaagagggagaggcctgaacccaagccaccgatgtatgaacctccaaagaaacctgcgagggatgaacctaagccaccgaagccaccggctattacacctccaaagaatgaaaaaccataacccaagccaccaatggattatcctcccaggctcataaagaaattagagggaatcagggttaaacaccagtctatgcaccaccaacggacgaaaagccttgacctaaaccacc

SEQ ID NO: 5080 - DNA, 302 bp, Gossypium hirsutum
  Clone ID: LIB3083-105-Q1-L1-C6
atatggcatctggttggggaatcaacggcaccaagggcaggtgctacgatttctgggttgacttcagcgagtgtatgtcccgttgcagagagcccaaggattgtgctctccttcgcgaagactatctcgagtgtctccaccattccaaggagtttcaacgaagaaaccgaatttataaggaggagcaacgtaaactaagagccgcagcacgaaaggacaaggaaggtgaagccggtgttcatcatcatagatagtgagaatttgttgatccttttaaattcccaagaataatagaatgtcat

SEQ ID NO: 5081 - DNA, 290 bp, Gossypium hirsutum
  Clone ID: LIB3083-105-Q1-L1-C7
gcaactatgggagactttgaaggaggcaataacggcttatacgggtctatctccggccactttcttcacggttgttgctctgttgtgggccatttactatgtagtaacgggtctattcgggtcgtccgatgatcaccatcaacgttccagggcttttgaggagcagatggagcttctcccacctccgattcaactaggcgaaatttccgaggaggaacttaaacagtatgatgggtctgatcccaagaagccactccttatggccatcaagggtcagatttatgatgttt

SEQ ID NO: 5082 - DNA, 293 bp, Gossypium hirsutum
  Clone ID: LIB3083-105-Q1-L1-C8
tctagccaaatactactcctggaacggtcttcaatttgttagcaaccccgttagaacccaagctggtcaggatttcggcctcaacgtcactggcctgaacaaccaggttaacgtctcaagcggggttgtcgagactcagattaacaacgcattatatcaaaagaaacctctggcaatttatcaagcggacaaggtgttgttgcctgaagagttttttgaagctaaatccccagcggctgcaccttcaccggcgacaaagaaatcattgacagggtcttaatcgaactcaagag

SEQ ID NO: 5083 - DNA, 297 bp, Gossypium hirsutum
  Clone ID: LIB3083-105-Q1-L1-C9
ttcgagcttaactgcatctgcatatgctgccgctcctggtccaaaagaagttgaaacaaaggatgataacaagggtgatccatatgaagtaggggaagcagaaacttctcatgctttattcatgtctggtcactttgtcttcccccctagcgagcatgagaatttgccattggaacccgagaatagtagtgaacgtgtaggcaaggacgtggtccatgaattaggtgttgtagaagaaggtggtagatctaggacaaaggaagaagaagaagattggtctttgagagggttgaatgt

SEQ ID NO: 5084 - DNA, 293 bp, Gossypium hirsutum
  Clone ID: LIB3083-105-Q1-L1-D1
ctagatgggctgattattgggccaatgtcttgattcctcctcacatggcttctcgctctgatgttgttgatcacttcaagcgcaagttctaccagcgctatatcgatcctgatcttgtggtagaggctatgtcatcaagtgcacaaacagggtcagcaaaaccaacttcatcgtcagcctcatcatcggtagcaaatggtgaagctcgagcgttcagtgcaggctcaacagctagaacttcagggccatcagcaggttcaggttcaaatgcaacttctctgcgctgggatcgg

SEQ ID NO: 5085 - DNA, 302 bp, Gossypium hirsutum
  Clone ID: LIB3083-105-Q1-L1-D10
ttcgaggtttttttttttttttgttttgcaccatctaaatatgaacactcccttttaataatgatgataataatagtaatataataataacaaaatttgatcctaatttatcttaagcatgcaagtgccatgcattattacttaccataagctttacataaatatattcaaaaacagaagagatataattgaaagaaaagaaaaatggttctgctagagaaactttgggatgatgtagtggccggtcctcaaccggaacgtggccttggccggctgaggaagatcaccaccaccccaccctt

SEQ ID NO: 5086 - DNA, 287 bp, Gossypium hirsutum
  Clone ID: LIB3083-105-Q1-L1-D11
ttcgagaacaaaggagaagataatcatggaaccaagagtgggaagaagaacagcaacaagaaaaacaataacaacaacgacaataacaacgaaaacaaggatgggaaaagtgctgctgataaaaggtttaagacactgccaccatctgaatcattgccgagaaatgaaactgtcggcggctatatttttgtctgcaacaacgataccatggaggagaatctcagaagacagctctttggtttgcctccacgttaccgtgattcagtccgggcaataacttcgggcct

SEQ ID NO: 5087 - DNA, 296 bp, Gossypium hirsutum
  Clone ID: LIB3083-105-Q1-L1-D12
taaagtttgatagtactttattttgataaaaataaaatgccgatttctcgaattgcagtcgggtctccggccgaagccggccaagcagatgcactcaaggcggctttagccgagttcatttcagtccttatttttgttttcgccggtgaaggctcgggcatggctttcaacaagttgaccgacgatgactcgtcgacaccagcgggtttagtagctgcggcattggctcacgccttggcgttgtttgtggcggtttcggtcggagctaacatttccggcgggcacgtaaaccccgc

SEQ ID NO: 5088 - DNA, 150 bp, Gossypium hirsutum
  Clone ID: LIB3083-105-Q1-L1-D2
tttgagtcagatgggctcattatagctgcaaggggtggattcctcctaacatggcttatagctatgatgttgacaatcaattgaagcgcaagttataccagcgctatttggaaactgatcttgtggcccaagctatttgattaagagcac

SEQ ID NO: 5089 - DNA, 298 bp, Gossypium hirsutum
  Clone ID: LIB3083-105-Q1-L1-D3
ttcgagttggagtctaccacagagattggaaggctgaaaatcttttacttgattcccaaggaaatttaaagatttcagattttggccttagcgcgttgccataacaaggagttagcctacttcggaccacgtgtggaactcccaactatgtagcaccagaggttcttagtcacaaggggtatgatggtgctgtggcagacgtctggtcttgtggggtcatcctttatgttctgatggcaggttatcttccatttgatgagcttgatctcaccacactatacagtaagattgagagagc

SEQ ID NO: 5090 - DNA, 301 bp, Gossypium hirsutum
  Clone ID: LIB3083-105-Q1-L1-D4
tataatcattatcgttcttcaggcaaacgccacgctattgcttttgtttgcatacacaatcaggaaagggtatggcagccgaggacaatttggacttgtcaactctgcaatctcagcttagtgaaactcatgaactgtggaagcaggagattgaaaatcgtcgaggccaagtagacgtgttacaagccaaaattatggaggtaaaggcttctatacaagggtcggaagaggagtcgaagaaggagttagatgttctttggcgaagggtagaaactaccgcgaccttattgacttacttgaa

SEQ ID NO: 5091 - DNA, 295 bp, Gossypium hirsutum
  Clone ID: LIB3083-105-Q1-L1-D5
gtcacgagcgagtttttttttgttttggtttttttttttgttttggatacaaaaagacactcaatttaacaactagaattgatggataccaacaatcaataaacccgaatgtcaataccgagactgctcaatagcttcctagatgccttttgttccgcacggcaacgtaaccataggcaagaaagcctggtcatagctgcttgactagcaaactgcaacctgccagctaggcttccctcatccaacatcttgctacttaacacatttgtgtcaaagctagcatcatacccatcaa

SEQ ID NO: 5092 - DNA, 309 bp, Gossypium hirsutum
  Clone ID: LIB3083-105-Q1-L1-D6
ataatgaagttgctggcaaggcaacaggttcatcattctcattaaaggggatagattagatatcggcaaacaagacaacaatgacactcagtccaagtttcaactttaaaaccatgaaccagtagaccaagatcagacttgcaaagtcttataaatttttcacaataaactgaaagaaagaagtgttataaagttccaacaattcaaaaccaaaaaagaaagactattcctcgtttcggaataaaataaatcatattccaaaaccaaatactgctcgtatcttattgaaaataaggtctttccaacccc

SEQ ID NO: 5093 - DNA, 291 bp, Gossypium hirsutum
  Clone ID: LIB3083-105-Q1-L1-D7
aagaaatccaagttgggtttcgctgtctacccatcaccccaggtctccacatctgttgttgagccctacaacagtgtcctctcaactcactcccttttggagcacactgatgtggctgttcttcttgacaatgaggctatctatgacatttgcaggcgctctcttgacattgagcgacccacttacaccaatcttaaccgtcttgtctcccaggtgatctcctctttgactgcttcacttaggttcgatggtgccttgaacgtggatgtaacagaattccagaccaacttg

SEQ ID NO: 5094 - DNA, 291 bp, Gossypium hirsutum
  Clone ID: LIB3083-105-Q1-L1-D8
gtactccgatcaagcattgggtgcggcagtttactctcccacccataagtctgctgttttaaatcaattccagcagcagcaaagcatgttatcacctataaacacaaatttttctcctaaaaatattgaacatcctttgttgcaggcttctctatctggtaggatgtctccacgaaacgtagaacctatctcgccaatgagctctcgggtttcaatgttagttcaacgcgagaagcagcaacagttccgcagcctaagctctagggagcttggttctggctcctctgccac

SEQ ID NO: 5095 - DNA, 291 bp, Gossypium hirsutum
  Clone ID: LIB3083-105-Q1-L1-D9
ccttatctctccattctttaggctattgctgccaaaagtctcctcctttctccctcaaatcttcttttctctcaaaacccacaaaaacccagttttcttttgccttcaaaactaccgagaagaggcctttttcgcatatagtctcaatgagcatggaagcaggcattggagtaatgggcacaaagcttggaatgatgagtttctttgaaactgatggcacagttgttccagtgactgtagttggttttagagaaggaaatatagtgacccaagttaagacatcggctactg

SEQ ID NO: 5096 - DNA, 274 bp, Gossypium hirsutum
  Clone ID: LIB3083-105-Q1-L1-E1
gacatggcatgggtcacttgagttcaataagatcaaagatatgcttataaaattccacaaattaactgaaaaaaaagaaagaaagaaggaactgcctttcacaagctaagcctggtagttggaaagaaaataagagataaatacatcaaacccccataatgtcgttatgattagttttacatttagagtgactgtgaagccgaaccttccatttcgaatctgcaggcctttttttgttcgctttatccacagcaacccgacttttgagcagctt

SEQ ID NO: 5097 - DNA, 301 bp, Gossypium hirsutum
  Clone ID: LIB3083-105-Q1-L1-E10
ttcgaggtttgagctagctagcgtcttactcaaatggcaaccaaaacgatgatgttgcaaatattttcacttttcttctttttgttcagtatctgcaactccattttccttggtgctaatggagatgacaatggtggttggcaaactgcccatgccaccttctacggtggtgctgatgctaccggcacaatggggggagcttgtggttatggaaacctgtacagtcaagggtatggaacgagcacagcagctttgagcactgcacttttcaacaatggcttgagctgcggtgcctgctacg

SEQ ID NO: 5098 - DNA, 302 bp, Gossypium hirsutum
  Clone ID: LIB3083-105-Q1-L1-E11
ttcgaggttttttttttttttgttttggtttttttattttttttttttttttttatatatatataaactatttaaataaaatacatatacatttttatcaaagttggaatcccatacccaagcaggaaatcaacattccacattcaatcaatggagttcctggcatagttaaacccttgataaacttgtttattgaaaataacatgaactggaaatatcacccaaagttgccaaaaccaaaaaaaaaaaaaacattgaaaatccaaagcaacatcatagtcgtaaaggtgtagtcgtccctg

SEQ ID NO: 5099 - DNA, 296 bp, Gossypium hirsutum
  Clone ID: LIB3083-105-Q1-L1-E12
agacgaaggttcacaagagtatgctgagtttcttcaccttcctaagagaagattcactgattttggggcggtccggaatgaaattcaggaggaaaccgatagaattactgggaagaccaaacaaatttctcctgttcctattcatctcagtatctactctccaaatgttgtcaacttaaccctgatcgatttgccgggcttgacaaaagttgctatcgagggacagccggaaactatagttgatgacatcgaaacaatggttaggtcttatgttgagaagcctaattgtatcatac

SEQ ID NO: 5100 - DNA, 291 bp, Gossypium hirsutum
  Clone ID: LIB3083-105-Q1-L1-E2
aagtaggcatccagtaccaatgtctctagctgtgagaacttccttaataaacaagtactccagaagctttgaaacgggttcaacacaaggtgggcttttctccaaagcaatggagatcgcttctttaacaacctcagggtggtatgctggagattttagttcctccacgcactgtaatgcttcatctagtagcctaacgctgaaatattcctctaacaatgcccgtgtttttctctgaagatcatctgtattcagccttgcagcctgagttagtggtttctccaccggagc

SEQ ID NO: 5101 - DNA, 310 bp, Gossypium hirsutum
  Clone ID: LIB3083-105-Q1-L1-E3
ggaaaaagtgtggataattgggagcagaaaagaagcaaagtttgtgtaaaaagttgagtaaggaggggtttattggtagggaataggaaaggaaggggcccaattactccattcttttttggagactttaccacccttttgctcaacttcatcataacaccaccaccccttccccttctgccgctgtttctgcaagaaagctagctgcttcactctgggagttttaccaattccttcagcctcctcaacctaaaatgcatagaggtgctaacaacactaatggccgctaccatcaacgccatcacaacaa

SEQ ID NO: 5102 - DNA, 243 bp, Gossypium hirsutum
  Clone ID: LIB3083-105-Q1-L1-E4
gaaggagaggagcccccgggccgcatgtttttatttattttttttgtaaaagctatttaggggttagtttattgttaggagttaaaccattttgtttttatttttgctttttaaaccgattgaaataaacttatataggttttgctccttttttatgaaacttaataagtagcacctaaaattgttatgttatgtaaatacagggcccttttgaatttattaaaaatgtcaagacttttgttt

SEQ ID NO: 5103 - DNA, 298 bp, Gossypium hirsutum
  unsure (1)..(298): unsure at all n locations; Clone ID: LIB3083-105-Q1-L1-E5
ttcggtgtatggagacagatgaaaagggtaatgatacttctgcccctggtgccaacgagacagatgttaatatgcaagatgccaagggtacagccgaggcagctggggtcgaaaatggtgttcctcagtctggagacaagcctggcagatggagactgataccaaagtgaggctcccaagaagaaggtngaagaaaacaaatgtccggtggcagagttggtctacgggcaatggtgtctggtgaccttaaaaagcagttgagaaggagtttgaatggctttcaagatcggttatggaa

SEQ ID NO: 5104 - DNA, 301 bp, Gossypium hirsutum
  Clone ID: LIB3083-105-Q1-L1-E6
tatcaagtggccgtctcgttgggatgcttatttgaagatggaaggatcgaaagttcattggttttcgatcttgaattcccttatggtgatcactttccttgctggtatagttcttgtgatctttttaaggactgttaggcgggatctgactcggtatgaggagcttgacaaggaggctcaagcgcagatgaacgaggagttgtcggggtggaagttagttgtcggggatgttttccgtgccccgtcccatcctgctcttttgtgtattatggtcggtgatggagttcagatccttggtatg

SEQ ID NO: 5105 - DNA, 263 bp, Gossypium hirsutum
  Clone ID: LIB3083-105-Q1-L1-E7
gaagactttttccagaacacagtaccatccctccaggttgcagctgctttgcctcctcctggatcttatctttcaaagttggatcaaactcctcaaaaggttgaagttggtggaaaggtaccacctgaccatgtaaatgcacctgcggctgatattggtctccccggtggtggggttcctcctcagtccgctgaacaacctattcctcctgagtctcttgcactttctggtggcggtattcctccacaatactcagctccagc

SEQ ID NO: 5106 - DNA, 278 bp, Gossypium hirsutum
  Clone ID: LIB3083-105-Q1-L1-E8
ttcgaggtggacaatgtgggaaccaagtcggttccaagttttgggaggttgtttgcgatgagcacggcatagatccaactggaaggtacattggttcctcggatctgcagttggagcgtgttaatgtttactataacgaggcttcatgtggtcgctttgttcctcgtgctgtgctcatggacttggagcctggtacgatggacagtgtccgaactggtccttacggccagattttcaggccagacaactttgtttttggacaatccggtgctggaaac

SEQ ID NO: 5107 - DNA, 287 bp, Gossypium hirsutum
  Clone ID: LIB3083-105-Q1-L1-E9
gatcaatgtccaaaacaagaactcttcgtattttgtggagtggattccgaacaatgttaaatcaagtgtttgcgacatcccaccaaccgggttgacgatgtcatcgacgtttatggggaactcgacgtcgatacaagagatgtttcgacgtgtttcggaacagttcacagtgatgtttaggaggaaagcatttttgcattggtatacaggggaagggatggatgaaatggagtttactgaggctgaaagtaatatgaatgatttggtttctgaatatcaacaatatc

SEQ ID NO: 5108 - DNA, 307 bp, Gossypium hirsutum
  Clone ID: LIB3083-105-Q1-L1-F1
tttcgcttgaaacctggcaatggtttctttgtcgacttggggtcgatacttggttcacaagatcgagtactccttcactctcggctggaagagctataagagagggcaaatcagtgaccgggaattacaagatgcagtttggaaaaatgtgtttcagggaaaattgacttacttacactggagtaaaggagaggcaatggccccaactattggagaacaagggggtactcttctcgtacggaagattccatctgcagacccaggtcgagtttttgttggggatgtcattgtcatgaaggaccctgac

SEQ ID NO: 5109 - DNA, 302 bp, Gossypium hirsutum
  Clone ID: LIB3083-105-Q1-L1-F10
ttcgagggaccgaccaccagcctatcgaggaagcagctcttggaaatattcctaccattgctttttgtgacacagactcaccaatgcgatatgttgacattggtattcctgctaataacaagggaaagcacagcattggttgtcttttctggctgttagctaggatggttcttcagatgcgtggtacaattgctcctggacagaagtgggatgtgatggtggatctatttttctacagggagcctgaggaagctaaacaacaggaagaggaggaagcagttgctgctcctgattatggactc

SEQ ID NO: 5110 - DNA, 288 bp, Gossypium hirsutum
  Clone ID: LIB3083-105-Q1-L1-F11
ttcgagcgagtcttatcaagggggcgttgagatgataagaagggatttactcactggccattggaaaccctatcttgaacgtgcaatcacgatgaaaccatgttatgagggaggaattaatggtggtgaggaggcagctaacatattgcaagagaccgttattggcaagaattatgcttaacacaagttgagtggggatcgaaggatacctgatgctataactcttgtgtatcaactgcaaagggtcctaggcggagatgaaactatccctgaatggtacacacatgc

SEQ ID NO: 5111 - DNA, 298 bp, Gossypium hirsutum
  Clone ID: LIB3083-105-Q1-L1-F12
ggcgagcggaggaaaagtgtcatttaaagtcactcttacctctgatcctaagctccctttcaaagtgtttagcgtgcctgaagcagccccttttacagccgtcttgaaattcgcagccgaggaattcaaagtccctcctcaaaccagtgctatcatcaccaatgatggtgtgggaatcaatcctcagcaaagtgcaggaaatgtgttcctcaaacatggatcggaacttcgcctgattccccgtgacagggtgggagccttttgaaataacaaaaacttcatttgttatctctgagtg

SEQ ID NO: 5112 - DNA, 296 bp, Gossypium hirsutum
  Clone ID: LIB3083-105-Q1-L1-F2
gttgaaagagaggctgaaatcgcacctgagcaacaaatggaagataaaccggcaccggatgcttcccagcccctctcgactataattccaatcccgaaaagcagacttgcaccataccgaaccgtgatcattatgcgattgatcattctcggtcttttcttccattatcgagtaacaaaccccgttgacagtgcttttggactgtggctcacttcagtcatatgtgaaatctggtttgctttttcctgggtgttggatcagttccctaagtggtatcctgttaacagggaaacata

SEQ ID NO: 5113 - DNA, 296 bp, Gossypium hirsutum
  Clone ID: LIB3083-105-Q1-L1-F3
atggaatgtggagcttgaacagcagtggaatttggtagagttaaaaggctttgaatccgagaaagaactgaaggaatcttcagagaaaatatctgaacttaccaacaagttgggggaggtcatggaagaaaagaatcagctgaacaatcaaatgcaggaatatcaggagaagataaatcagctcgaatcagctctaaatcagtcaacaacacagaacttggagctcgcggaagagttgaaggttgctttagagagaagtgctcaccatgaggacagagctaatatgagtcatcaac

SEQ ID NO: 5114 - DNA, 307 bp, Gossypium hirsutum
  Clone ID: LIB3083-105-Q1-L1-F4
ttcgaggtgatatggattttgtttgaaatgctggaataccaccttctaacactagtgtgtcatttgttgatacttgctcttgcattactcttcttgtggtcaaatgctgctaccttcattaacaagtctccaccaagcatccctgaagttcaaattcctaaggacccagttatggagtttgctcaggcactttggtttgagatcaaccgggcttttgctgtcctacgggatattgcatcaggaagagatctcaagaagttcctatctgtgatcgccggcttatgggtcttgtctattgtcggaagtt

SEQ ID NO: 5115 - DNA, 297 bp, Gossypium hirsutum
  Clone ID: LIB3083-105-Q1-L1-F5
ttcgagtttacctctatatcagaaggcgttgtgtggtctgactgctggtgctattggagcctgtgttggcagcccggctgatttggcacttatccgtatgcaggctgatgctactttgcctgttgctcagcgcagaaattacaccaatgcattccatgcactctatcgtattgttgtggatgaaggggttttggctctttggaaaggtgcaggccccaccgtagtcagagccatggctttgaacatgggaatgcttgcctcttatgatcaaagtgttgagttttgcaaggattccct

SEQ ID NO: 5116 - DNA, 300 bp, Gossypium hirsutum
  Clone ID: LIB3083-105-Q1-L1-F6
tagaaacaaggaatcggatgaatctattccagcatcaaatattgtttctgacaaaacttctcttcactcacaaactcctgcatctagaccacttgtaccacctggttttacgagcacagttttggaaaggaatgttggaaccaaaagttcaatgcactcccattcttcacaggttgggagttctgaaattgatggcaacctttcagagtccaaaggcagccttcttataaatgggatttctgatgatcttttgggcaaacattctaagcagtgtgaagaggaaactttgagtgagcagag

SEQ ID NO: 5117 - DNA, 293 bp, Gossypium hirsutum
  Clone ID: LIB3083-105-Q1-L1-F7
actagctgtgctgttgaaatggtgaactctattagtgattccaaagaaatgtccactgattctgaagtaagtgttagcaatgtcgacaaacaggctgagtctaacagcattcctcaaaaggatgctcatgtggtgtcaacttcagagatggcatttgattctcatcatgatgaccaagaagagcccacttctgagcccagtcgaaaactaccagaagctgatatgatgactgtaagtaaaaaagatgcggagacactttgtgacatgcaggttcttgaagctgcaaaagatgt

SEQ ID NO: 5118 - DNA, 290 bp, Gossypium hirsutum
  Clone ID: LIB3083-105-Q1-L1-F8
tccgaagacattattgacgtcgtgcggaaaatagaaaaggagcaaattgatgaacatggtcatgcttggctcaccaaaaatcatatcaaggcagtacttttgaacatgttcttgggcggcgttgacaccagcgcgcttatagtgatctgggcaatggcggagctggcgagaaagccaacatttatgaagaaagctcaggacgaagttcgaggggtggtggggaagaaaggaagagtaacagaaaccgatctggatcaacttcaatacctgaagatggttttaaaagagac

SEQ ID NO: 5119 - DNA, 292 bp, Gossypium hirsutum
  Clone ID: LIB3083-105-Q1-L1-F9
gttcacttgtctttgaatgagagaacagggtctggatttgtgtctcaagacctttacttgcatggttacttcagtgcctcaataaagttacctgctgattatactgctggagttgtggttgctttctatatgtcaaatggtgatatgttcgagaagaaccacgatgaaatagattttgagttcttgggtaacatcagaggcaaagattggaggattcagaccaatatttacggcaatggaagcaccagtgttggcagagaagaaagatacaatctttggttcgacccggctg

SEQ ID NO: 5120 - DNA, 301 bp, Gossypium hirsutum
  unsure (1)..(301): unsure at all n locations; Clone ID: LIB3083-105-Q1-L1-G1
ttcgagtttctacaatgcgattattgtgtttagggtatatttattgtatataaatataaagggaccctttgtcaaacaggggaattgggcgtaatcaagataggattacaagataggagcctaaaaaatcctgaaaattagggccttgccaccttttgaccttttgtcagaagacttgtgttataggatttttgatagacaggattcgacaaaaggacttagtcataacataaataacataaaaatggattgtgcaaaaatccatagntctttttttataacttattctagttattctagt

SEQ ID NO: 5121 - DNA, 298 bp, Gossypium hirsutum
  Clone ID: LIB3083-105-Q1-L1-G10
tttgagtacacaggttccaaaaaccttaggtaggattctttctcttcctgagtataatacatcccctgtcagcagccctggtcagaacttggagcatagttttacaactgcgcatatgagatttgcaggctcggacaaattgcaaatggtgagtgaaaatgatcggtttgtcagccttctaagtatgagggcagagaagaccgatggccagctttgcatttctgaaaacaaaagcgataatgaagttgaaagtgataatgcaatttcaaacaaccttgacactagtgtgaataatgac

SEQ ID NO: 5122 - DNA, 299 bp, Gossypium hirsutum
  Clone ID: LIB3083-105-Q1-L1-G11
tgggagtgccgtttctaatgtgcagtctggaacttttcaagaccaagttggccccattgctgcaatggagaataagctctgttctaacccttttgaagcagacaagaaaatggctgatccttcctctgggattgagatgcataaaccaatccatgcatcggggtttccggtaaatctgatgcatttacctccccagcaaacacaagtaattcatgaggatacccgttacgtgcagccgaacatgcctgggatgcagcccgttacatcatattacccagtctattatccggtgccacagc

SEQ ID NO: 5123 - DNA, 296 bp, Gossypium hirsutum
  Clone ID: LIB3083-105-Q1-L1-G12
tccaagttttgggaggttgtttgcgatgagcacggcatagatccaactggaaggtacattggttcctcggatctgcagttggagcgtgttaatgtttactataacgaggcttcatgtggtcgctttgttcctcgtgctgtgctcatggacttggagcctggtacgatggacagtgtccgaactggtccttacggccagattttcaggccagacaactttgtttttggacaatccggtgctggaaacaactgggccaagggccattacactgaaggagccgagcttatcgatgccgt

SEQ ID NO: 5124 - DNA, 299 bp, Gossypium hirsutum
  Clone ID: LIB3083-105-Q1-L1-G2
taaaacacaccctaaagagacgatgagaaagctgctagcctttgcctttcttttcttcttcttttgggataaaacattagctcaaatagctccggcgccgccgttaaaggtggacaacatcacttccatcctcgaaaaaggtggccaattcaccactttcatcaagctattgaaagccacacaggtggctgatcaactaaacaaccagctaagcacaccggaccctaacgacgggataacggtgtttgcaccgagtgacaacgcgttctccggactcaaacccgggacgttaaactcac

SEQ ID NO: 5125 - DNA, 303 bp, Gossypium hirsutum
  Clone ID: LIB3083-105-Q1-L1-G3
tgtaaagaagaagaaggatgaggtagaggaagctgaagaattagaagagggaaagaaagaaaagaagaaagacaaagaggcaaaggagaagaagaaagaaaaaaagaaggatgaggtagaagaagatgaagaattagaagagggaaagaaagaaaagaagagagacaaagaggcaaaggagaagaagaaagaaatgaagaaggatgaggtagaaggtgaagagaaagaagagaagaaggagaagaagaaagacgaagaggataaagatactaagtacaaggatgaagagaaagaaatcgacga

SEQ ID NO: 5126 - DNA, 293 bp, Gossypium hirsutum
  Clone ID: LIB3083-105-Q1-L1-G4
cccacatccaaagagctgcattgattgaatgtgaaactcaaaagaaaaacaaaatgagtgtaatcgatatattgacaagagtagatgtgatctgcaagaggtacgataaatacgacgtcgaaaagcagcgtgaccaaaatgtctccggcggtgatgcttttgctcgcgcttacgccgcagtcgaagccgacattgaatccgctcttgagaaagtggaacttgcttccaaggagaaaagtaaggcatctgctgttgcagtcaatgctgagattcgtcgaaccaaggctcgattg

SEQ ID NO: 5127 - DNA, 297 bp, Gossypium hirsutum
  Clone ID: LIB3083-105-Q1-L1-G5
ttgagaatgatattagtgatggcctagaccttacttttagcattgatgctgacgaggagaagttgatattgtatgaaaggacacaggtgactgactatgagctgattcccggtgggcggaacattaaagttactgaggagaataaacaccaatatgttgatttagttgctgagcatcgtttgacaactgctattcgtccacaaatcaatgcatttttggaaggattcaatgaattaattcccagggaattaataactatttttaatgacaaggagctggaattactgataagtggtc

SEQ ID NO: 5128 - DNA, 284 bp, Gossypium hirsutum
  Clone ID: LIB3083-105-Q1-L1-G6
ttcgagctagaactcagaaacatacctggatagagttggtcgatcaggaaggtttggtcatcttggattggctgtgaatttgatcacttatgaggaccgctttaacttgtataggattgaacaagaacttgggactgaaattaagcaaattcctccacacatcgatcaggcaatttactgccgatgatatatgcaggatatttcctgctttgcctatggtggtgaacaacgggtcaatggagctgatctatcaaggtgtttgccctggcaaatgggtgtgcgtt

SEQ ID NO: 5129 - DNA, 295 bp, Gossypium hirsutum
  Clone ID: LIB3083-105-Q1-L1-G7
caagaaaccatattccttcttggcaagcaattaaaagcttgccgtcctcaaacagatataacgggatcacccttcaacgagaggagccataagggtgacgatggacccactaccagtggcatcaacttgcaggatttatatcaagcaaagatggacagtatcgctgctgctgctgcttctggcattggaagcagatgtggtgcagagtctgccctggagtcaattaacacaccaagcagcccatatgatagtgaagcaaactctttgagaacacccatcaaattaaaacacaggt

SEQ ID NO: 5130 - DNA, 295 bp, Gossypium hirsutum
  Clone ID: LIB3083-105-Q1-L1-G8
gttcttttccatatctggcaggggaggccacctttggagttctttggaatgattcaggctagacccctaccacgtgatttgtttatatcttatgcaaggtgctataagcatgaatttttgaaagatttctttctttcgactggacaacttcaagaagttgcatttcttttgtggaaggagtcattggaacttggaaaaaatccaatggcaagcaaaggatccccgcttcatggtccacgcataaaactaattgacaaggcccagcatctttttgcagaaaccaaggaacatacct

SEQ ID NO: 5131 - DNA, 303 bp, Gossypium hirsutum
  unsure (1)..(303): unsure at all n locations; Clone ID: LIB3083-105-Q1-L1-G9
cgccttctttttaccttcgatttccatttacttcgctattgctacgtttttgaatttttagtgagcgaaaatgagagagtgcatttcagtccacatcggtcaggctggtattcaagtcggaaatgcctgctgggaactttactgccttgaacatggaatccagcctgatggccagatgccaagtgacaagactgtcggaggaggtgatgatgcttttaacacctttttcagtgaaactggtgctggaaagcacntncctcgtgctgtctttgtggatcttgagcctactgttattgatgaagt

SEQ ID NO: 5132 - DNA, 335 bp, Gossypium hirsutum
  Clone ID: LIB3083-105-Q1-L1-H1
gagaacagaggacccccggctgcatgaattccctttagtttagaagaggattggacaaaattggtgaataaacaccaatcactcaatgaggaagatctattgcgctattgtttttcttcagcatattttgtggccttgcttcacgatagccttgaaattgcttagcatgattaaaggatcagctttgctaatcatgtcaaccatataccattagattgggccttgggagctttcatattgcaaagcacatccatctcagatgtgcaacaaactgactggataactattattatgagcagtgattcatccacactaatttcaatcaccgatatttc

SEQ ID NO: 5133 - DNA, 257 bp, Gossypium hirsutum
  Clone ID: LIB3083-105-Q1-L1-H10
gtagcacatgcggttgggttctgggattaccattccttcattactgctgctgctcagtatcagcctcatggatttggtaccaccggggaaaagctccagaatatgaaggaagtcgctgcttttcttggacatgtcggcagcaaaacttcatgtggctatggagtcgctaccgggggaccattggcttggggtctttgctacaacaaagaaatgagccctaacaaaatatattgcgatgattactataaatacaccta

SEQ ID NO: 5134 - DNA, 300 bp, Gossypium hirsutum
  Clone ID: LIB3083-105-Q1-L1-H11
gaaagccggtgtttgtgaaagtagatcagctaaaaccagggacaaaaggccacaccttagtcgccaaggtattgtcctctaacatggtccttcaaaagggtcgagccgcttctcgaaatctccgccaaacccgcatcgctgagtgccttgtaggagacgagaccggcactgtcctcttcactgctcgtaatgagcaagttgacttgatgaagcccgatgacactgtaattcttcgtaatgcgaagatcgatatgtttaagggttctatgaggctggctgtcgacaaatggggccgcatcg

SEQ ID NO: 5135 - DNA, 302 bp, Gossypium hirsutum
  Clone ID: LIB3083-105-Q1-L1-H12
cagcaaacaaaaacctgggagtgatctccggttttatttagatttcattttggatcagatcttggcttatcttcacatttcggcatcgtcttcggctgccgttcgagttgatgattgggaatccaactggggaaacgacaagttcccggagatggcaagggcgtccgtggcattgtctctggtagcattcattgccttggctttaagctcacttgtctctggttataatctttgtacttccaaatctatctagccaataatataccttctggggtatatatatacatataaatatagctttg

SEQ ID NO: 5136 - DNA, 297 bp, Gossypium hirsutum
  Clone ID: LIB3083-105-Q1-L1-H2
ttcgagttcgaaggaagtatgctgctgggtcagatagatgctcagcatttgcttctcaattacttgatgagcagttgacggcagtcatatatttacaatctgtaatccgtgggtggttggcccggagacatttcaacaacatgcataatttgaaacagtcaaaccgtggaagtgtaaaatctagacgaaagatgggtaggaagatttttgaagcaaaggacatgctccatgaacaacagattcaagttctaccttctgtaatggcagaactccaaagaagggttctcaaggcaaaaa

SEQ ID NO: 5137 - DNA, 118 bp, Gossypium hirsutum
  Clone ID: LIB3083-105-Q1-L1-H3
aattcgagtttaactctaaagctaactacgacaaggtggggggatctaaaccacaatatttcttatactatgacgcgttacaacatgctggctaaggttttacaaccagctgaactgt

SEQ ID NO: 5138 - DNA, 303 bp, Gossypium hirsutum
  Clone ID: LIB3083-105-Q1-L1-H4
ttttaatcgatatggctagctcaatgtgccttaagcttgcatgtgtggcggtgttgtgcatggtggtgggtgcacccctggctcaaggggccgtaacctgtggtcaagtcacaagctccctcgcaccctgcattggttacttgacagggaatggtgctggtggcgttcccccaggttgctgcggcggcataaaatctctcaactccgccgcccaaacaacaccagaccggcaagcagcttgcaaatgcatcaaaagtgcggccgccggcatttctggcatcaactatggtattgcaagcggac

SEQ ID NO: 5139 - DNA, 305 bp, Gossypium hirsutum
  Clone ID: LIB3083-105-Q1-L1-H5
gtgtggtttcatggggaaggttgggaatctggcactacagtttcttaaacaaaagctggatgatgacgaaggatacggtaaaccggcacttgagactgaagtgagtagcaagcaagaggcttatgcaggagctggtaagcactctcttcctgacagtggaattcttatcagcggctgccagaccgaccaaacttcagcggatgccagcccatcagggaatgcaagcaaagcttatggagcacttagcaatgctattcaaaccataattgccgactcagatggctcaattactaataaagagcttg

SEQ ID NO: 5140 - DNA, 323 bp, Gossypium hirsutum
  Clone ID: LIB3083-105-Q1-L1-H6
tggttttgggttctcattgtaactactctcacccttgaactagccattacgagtgcacaaacaccagctgcctcaccttccactacgccaaccaccaccaccactcctccaccttcaacttcaccaccacctacaacttccgcaccgcctccttcaacaacccctccacctacaacttcagcaccatctccttcaacagcaacgcctccaccttccaccacgcccaccgcgccagctcaaccacctgcaacaactccccctcccactgttgcaccagctacaagcccaactgtcccaccgccacaaactccaccacctcaacc

SEQ ID NO: 5141 - DNA, 300 bp, Gossypium hirsutum
  Clone ID: LIB3083-105-Q1-L1-H7
ttcgagcttttctctctctctctctctgtctctctctctctctcgcctcggacgtttgttttcttttcatttctttaggagggtggtcaatatggggtcttcgattttgccagatctcggagctgagatcttgatccccgtttgcgccgctattggaattgtcttttctcttgcacaatggcttcttgtttccaaggtgaagctctccccgggtcgagactcgggttcccccggtaacaacggtgcgggtgggaaaaacggctattccgattacctcattgaagaagaagaaggtcttaa

SEQ ID NO: 5142 - DNA, 290 bp, Gossypium hirsutum
  Clone ID: LIB3083-105-Q1-L1-H8
ggttgtcaaggttcaggaatgaaagtctccatcagacaccttggtccttccatgatccaacagatgcagcacccttgcaatgattgtaagggtactggtgagaccatcaacgataaggaccgttgcccccaatgcaaaggtgagaaagttgttcaggagaagaaagtcttggaggttaatgttgaaaagggtatgcagaacggacagaagattactttccctggagaagcagatgaagcacccgacacagttactggggatattgtatttgtcctccaacagaaagatca

SEQ ID NO: 5143 - DNA, 299 bp, Gossypium hirsutum
  Clone ID: LIB3083-106-Q1-L1-A10
gtttctatttctagttgcactaccaattgtgtagctccagtggccttggtggtccatgaggaattcgatatcgaagagggtttaatgacaactgtccacgcaactacagcaactcacaagactggtgatggccctacaatgaaggactggataggaggtagaggagctgtccaaaatattatccctagttcaactggtgctgcaaaggctgttggaaaagttcttcctgaacttaatggaaagcttactggaatggcattacgtgattgtacacccaacgtcactgttggggatttaac

SEQ ID NO: 5144 - DNA, 389 bp, Gossypium hirsutum
  Clone ID: LIB3083-106-Q1-L1-A11
ggatgattttcggaagtatgttaatactgggcgccgaggcctttacaaccaaatccggtaagaaagtcagcaaggctcccaaaattcagaggttggtgactcctttgaccctgcagaggaagcgttgcagaattgcaaaaaagaagaagagagttgcaaaggccaaggctgatgctgctgagtaccagaagctgcttgcccagaggttgaaggagcagcgtgagcgcaggagtgagagcttagccaagaagagatccaggctctctgctgcttctaagccttccattgcagcttaactgtggtttggcattttggtcagtagttgaatgtttgattctgaaactttttttatttgtcgaggtcattttgattattccaatttttagagt

SEQ ID NO: 5145 - DNA, 229 bp, Gossypium hirsutum
  Clone ID: LIB3083-106-Q1-L1-A12
caggatctctgagcgtgaatgtgaaagtttcaggcctagcatttgattgtttgcaccaagggtaaaaagacaatttgcgtaagagaataaaagaaggaaatatccaacacaataatgttttcaactgccgaacatggatggaaccccggttcttgcatcctcaaatatccattggggctgcaccttcatctgtagaaccaccgtgatcagcagcagtgccctgctcagc

SEQ ID NO: 5146 - DNA, 348 bp, Gossypium hirsutum
  Clone ID: LIB3083-106-Q1-L1-A9
atctaacaaatacttcaatggtttatagagggcagcttcatgtgggttgaaagaacaactctccagcacaaaaagaataaggaaccattacggactccaccacgattctacctcaaacctagccctatgaatacaccaagggttcacaagaatgatctcctagttgtcaaagaaggttctcacagaacattacctatacaaaagattacatggtcacatccgtatcaggagggatcatcaaatcagcggatgaagctgataagaaatatgtttacagcatcattgatggggatctcctgaaatactacaatactctcattggccagatcattgcggttcccacaggac

SEQ ID NO: 5147 - DNA, 199 bp, Gossypium hirsutum
  Clone ID: LIB3083-106-Q1-L1-B10
tcagcccgctggtcggattgttatggagcttttcgcacattgcgctcctcggactgctgagaacttccgtgccctctgtaccggcgagaaaggcgtccgccgcatcggtaagcccctgcactacaaaggctcctctttccatcgtgtgatccctaactttatgtgccaaggaggtgacttcacggccggaaacggtacc

SEQ ID NO: 5148 - DNA, 395 bp, Gossypium hirsutum
  Clone ID: LIB3083-106-Q1-L1-B11
cttctctttactctcatcgcggtggttctcgcttcctgtgtgtccatcagcctccgcctctcctcctcatctctgttcgttggcctcacctcatcatctctgcctcctcttctctatcggtcgaccgtcgtccttaccaagtctgtattttgaagtaaccctaaaaaattagcagccacagtcctattaaggttgttggttatgctgttggaggagggcatgttttacatatggtttgtgatctgaccattgctgcggataatgctattttcggtcaaactggtcccaaggtgggaagttttgatgctggttatggaagtaacataatgtcccgtttggaagttggtggaaatgcgacacccatattttatggaactgaagaagggaacgagggg

SEQ ID NO: 5149 - DNA, 198 bp, Gossypium hirsutum
  Clone ID: LIB3083-106-Q1-L1-B12
ctaacatttgaaattcggtgaggaaggaaacgggcatttccggcacgcaacagggcaactatatgccatctctacagatttagcctcctatatatcaattaaccagcatgtgctgcataagtatgccaatgaacatgttaccttgggatcgtggttcataggcgtggatgtccatcatatagatgatcgaggcctctg

SEQ ID NO: 5150 - DNA, 240 bp, Gossypium hirsutum
  Clone ID: LIB3083-106-Q1-L1-B9
gaaaagatttaacctttggggtcgatagtgggggcacgagttctgcctatcttgcgacctatgcatctatccgagcattgcagccagacctaatcataaatgctggcactgccggctgctttaacgaaaaaggagctgcgatcggtgatgtttttctcgcatctcatgttgcattccatgatagaagaataccaatcccggtttttgatctatacggtgttggtttgcggcagacctact

SEQ ID NO: 5151 - DNA, 367 bp, Gossypium hirsutum
  Clone ID: LIB3083-106-Q1-L1-C11
ctccaaccttctctaaacactcttttgttgtggtccctgggaacagctgagccaagacgcgagtaatggcggtggcaatgagctttcgtagattgtcttcctccatcaagtccccaaccagacctctcttcagtggcagctccctctattatatgtcaacagctgcggcagagaaagagaaagctcgtgctaatcggatacatcagttgaatgctccgctagaggaaatcgatcctgaaattgctaccataatcgaactcgagaaagctaggcaatggaagggactagaacttataccatcagagaattttacatccctatcagtaatgcaagcagtgggctttgttatgatcaacaagtacagtga

SEQ ID NO: 5152 - DNA, 348 bp, Gossypium hirsutum
  Clone ID: LIB3083-106-Q1-L1-C9
tcaacccgctggtttgattgttatggagcttttcgcagattgcggtcctcgcactgctgagaacttccgtgccctctgtaccggcgagaaaggcgtcggccgcagcggtaagcccctccactacaaaggctcctctttccatcgtgtgatccctaactttatgtgccaaggaggtgacttcacggccggaaacggtaccggaggtgaatccatctacggatccaagttcgctgacgagaactttatcaagaagcacactggtcccggtattctcttaatggctaacgctggtcccggaactaacggatcttagttcttcatttgcacggcttaaactgagtggctcga

SEQ ID NO: 5153 - DNA, 275 bp, Gossypium hirsutum
  unsure (1)..(275): unsure at all n locations; Clone ID: LIB3083-106-Q1-L1-D10
tagctacaccttttcgatgaatgacccatcatgggggggggggttgttctagaagctctccagccctcaaacccacaacatctatgcaaggtcaccaaatcatattataacagacccctaccactcctatagtcataacccaacagncacggccgcaatcaacaacaactgaaacttctcattcatcccaaacaaaaaaacacatagnnagctgactacgactggccaaatcttgctatgaaattatgctcactgtaatgaagatagctactagc

SEQ ID NO: 5154 - DNA, 360 bp, Gossypium hirsutum
  Clone ID: LIB3083-106-Q1-L1-D12
cctgatttttatgagagtggtaagagctgtgtttgcagaggtagcacaagcagtggtgtgagcgatgaaagtacgtgtagcagcttaagtagtagtatcaacaaacctcataaggcaaatgatataaggtgggaagccatacaggctgtccgagcgaaagatggtgtgttgggtttgaaccatttcagattactgaagagattaggctgtggggatattggaagtgtctatcttgcagaattaagtggtacaaagtgttattttgcaatgaaggtgatggacaaagcatctttagctagttgtaagaaacttcttcgagctcaaacagagagagaaatactacaatccttggaccatcct

SEQ ID NO: 5155 - DNA, 127 bp, Gossypium hirsutum
  Clone ID: LIB3083-106-Q1-L1-D9
ctacagcatttccaagaagggggaatcctgggggaagggggtgttatggaacctcatgagccttataaagcatgacatgccgcacggttaccgaaaaaaatagaaacagaaccctaccacctccaga

SEQ ID NO: 5156 - DNA, 366 bp, Gossypium hirsutum
  Clone ID: LIB3083-106-Q1-L1-E10
ctacagcattgccaggaatgggggatcatggggcggtgggctgttttggcagctcttgagccttggaatggataacatgggggatggttaccaagttatattggaacagagcccttccactgcttctgtcattgctcaacagtctcgattgctatcatctctcacttgaacttcacaatcattccttaataaaaaatacattgttactttaatacgacaggagaaatctttggatgagattaggtacattggaatgaagatagctactagctctactactgttttgtcagagatggaggctgttcatgcaaatgaggactttgaaaccagcaattttttataattacatgggatttacattaagag

SEQ ID NO: 5157 - DNA, 374 bp, Gossypium hirsutum
  Clone ID: LIB3083-106-Q1-L1-E11
gaaacaaattattttgggtgatctgtgttgagaaagaagataaaatatggcgacattccaaggaactcaacaaaaatgcaatgcatgcaacaagactgtttatctggtggataagttgacggctgataatagggtttttcataaggcttgcttccgttgccaccattgcaagggtaccctcaagcttagcaactacaactcatttgaaggggtgctatactgcaggccacactatgatcaactcttcaagagaactggcagtcttgacaagagttttgaaggaacaccaaaggttgtcaaacctgaaagacatatcgatagtgagagtgcactgaaagagatgaactcatttggtggcaccagagaaaaatgtg

SEQ ID NO: 5158 - DNA, 323 bp, Gossypium hirsutum
  Clone ID: LIB3083-106-Q1-L1-E12
tctctacgttttcggtctcctcttcggccacatcacttacagtcacccttccactctctccgacaagtccgcccaatcttcctccgattctcaactcgttgccaccatctccggcttcctctgcttcccttctcttttctccttctacgactcactcggccgggtcgactcctgccgactctctcctactcacctcaaccacaaacccctcatcggctggttctcctctcgccggaaaactcccctccgtccttcaatgcgtgagttctccgtcactcgttctctttccttcactcccaatctctctcttcctatccaaaacg

SEQ ID NO: 5159 - DNA, 248 bp, Gossypium hirsutum
  Clone ID: LIB3083-106-Q1-L1-F10
catggctcataacttccgtcatcctttcttgggtttcgaacttttactcattactgtctcactaatgatcggtagtcacaccgtctcgtcagcggcttgacatttattccagacacaaacaacctcatcagagctgtcacaattggcttcaaaatacgaaaagcacgaatagtctgaatacaaacagtcaagatatcacgaagagtacccaaaacatgagaagcctgaaatgcacaacgaggaaaaac

SEQ ID NO: 5160 - DNA, 164 bp, Gossypium hirsutum
  unsure (1)..(164): unsure at all n locations; Clone ID: LIB3083-106-Q1-L1-F11
cgcngancctaaaaggnggcagggnnccaaagggagaggccngaaggngcgaggggangaaacgacnacaanaccncgnccagagagaggggcnccncggaaaanngaacangccccgcccccnccngcccaaaanccccnaccaangccccggccaaaaaggc

SEQ ID NO: 5161 - DNA, 397 bp, Gossypium hirsutum
  Clone ID: LIB3083-106-Q1-L1-F12
gacgcgtgtgcagacacttgggatttattacatactcgagaacgtatgatgttctggtgcagatcatctcttctcgagtattcagaacaggtgcaagttggttgcggtaattgcagaagttgatcgaatcctgaggccataagggaagctgattgtacgagacaaagccgaaacgataagcgcaaggtagagcatggctaaatctctacaatgggagatccgaatgatttattcgaaagactgtgaaggattgctttgtgttcgcaagaaattctggcgtcccaccgtggaagaacctataaagcctgccattgtttgaacacgatgcttaacattactcgtggtgttttcacaattaggcataatattttacagattctttttcgattcacaagca

SEQ ID NO: 5162 - DNA, 227 bp, Gossypium hirsutum
  unsure (1)..(227): unsure at all n locations; Clone ID: LIB3083-106-Q1-L1-F9
gaaaaccctaacgctaccgnacggcgccaggggaaacaggaaancgcagagagggacccggcaaagaaancacccgagagcccnnncacaacgaaaaagaaaagagggcccacncannaaccagggncggagcggggcggcacggccccagaaaagaaggagggcgaagaccaccccagcaaggaagaggcggacgagagaccgcaagagcggacagcaggacccac

SEQ ID NO: 5163 - DNA, 280 bp, Gossypium hirsutum
  Clone ID: LIB3083-106-Q1-L1-G10
ctgggggcaaacgctttttaataaaaaaactaacctcttctctcatttgctgaatttatgataaaaaccaaccaggtttatcatatatgcccttttctttctcactcaagtttgctctccccagatcccaagggcctcaaaggatccccagatatgattaatatacacattcagattttcagactatactagggggatcccccacccaattacataccgcacgaggccagcgtgttcttatgcactccaccaacggtgcatgttgaaaaggttcgggttt

SEQ ID NO: 5164 - DNA, 396 bp, Gossypium hirsutum
  Clone ID: LIB3083-106-Q1-L1-G12
cctatttttaaaactggctcttgattcccttgaaggcgggatgtttaaacaggttcattggcaaccgacccacctactttacttaacctctcagtacccggttctgactttttcgaacctgtttcttcacccggattcaacccgacccaagtgaccccacaagctccggcaccgttcccagctccggtggagaagcaatttttcagtgccgagtgttttgcagttatgaaagagatgataagaaaagaagtgaggagtttcatggcggggattgagcaaaatgagctttgtttacaaacagaagctattagaaacgctgttgtttaacgtattggaattagcaaaaactagtttgggaagaaaaaaaaaaaaattgctttttttttctttcctttt

SEQ ID NO: 5165 - DNA, 359 bp, Gossypium hirsutum
  unsure (1)..(359): unsure at all n locations; Clone ID: LIB3083-106-Q1-L1-G9
gtcgnnactttacagcatcagccatgttccgaggcaagaggagcaccaaagaagtggatgaacaaatgatcaatgtccaaaacaagaactcttcctacttcgtcgaatggatcccaaacaacgtgaaatccagtgtctgcgacatcccacctagagggctatcaatggcatcaaccttcgtaggaaactcgacctccatccaggaaatgttcaggcgagttagcgaacaatttaccgctatgttcaggaggaaagctttcttgcattggtacaccggtgaaggtatggacgagatggagttcaccgaggctgaaagcaacatgaacgatctcgtgtccgagtatcaacaataccaagac

SEQ ID NO: 5166 - DNA, 240 bp, Gossypium hirsutum
  Clone ID: LIB3083-107-Q1-L1-A1
ctattctcaatttccccatctttctcgtctttgggtctcgtaagttggtgaatagtgttgtaattagtgccaatggctcggattgggacctctgcagctcacattgtgttggcaatatttgctgtggccatgtttgttgtgtccgggaccatggcacaggatattgctccttctcctgcaatggctaccggagcaggctttgctttgccggtttccgctgtctttttatgctcttccatg

SEQ ID NO: 5167 - DNA, 287 bp, Gossypium hirsutum
  Clone ID: LIB3083-107-Q1-L1-A10
ctaacctcaaggcttaaagctagcaggagcagagctgcggcatttcttcctcagaagacccatcaaacagaaatgaagttcaacattgcaaatccgactactggttgccaaaaaaagctggaaattgatgatgaccagaaacttcgagccttttttgacaagaggatctcacaggaagtcagtggtgatgccctcggtgaggagtttaagggctatgtattcaagatcatgggaggctgtgataaacaaggttttccaatgaagcaaggagttctcactcctgggcg

SEQ ID NO: 5168 - DNA, 286 bp, Gossypium hirsutum
  Clone ID: LIB3083-107-Q1-L1-A11
aaaagacccaaatacaccaaacatgaacaacaccatctctttaactctgcttcacattgcattttgcttcactttagtttcattcactcctatttcagccctggaattgcacggaactggtgccaacatggtcgaaacaacctgccaaaagacacccttttacaatctatgcgtctcggctcttaaatccgaccctcgaagttccggtgccgacgtagcggggctagcgcaaatcggaactgataaactgaaggccaaagccaccgcaacgctgcggcagatcaca

SEQ ID NO: 5169 - DNA, 286 bp, Gossypium hirsutum
  Clone ID: LIB3083-107-Q1-L1-A12
ccaaaatcaacacaagcatacgggtgggcaaaaactagccccaacccaagagcaaaagcctaggcattttaactggcaaagactagcaccagttcaagagcagcaatcgagcaactcaattgcccatttgccaatccatcaacaccaccaatcagcatcggggcccgtcgtagtcaccacgaactgggagacatttgattcctccccagcatcgttgccggtcccctcagcatccacatcaaccgtcaataattcagacccgccaaaattcccttgggacttcttt

SEQ ID NO: 5170 - DNA, 290 bp, Gossypium hirsutum
  Clone ID: LIB3083-107-Q1-L1-A2
ccaaaatcctccctatctacaaggaggtgatatctgagcttaaggctgctggtgcttcctggattcagtttgatgaacccacccttgtcttggaccttgactctcatcaattgcaagctttcactgcagcttatgctgatctggaatctactctctctggtttgaatgttctgatcgagacctactttgccgatcttacttctggtgcatacaagaccctcattgaattgaagggtgtcactgcttatggtttggatttggttcgcggaacaaagaccattgatttgatc

SEQ ID NO: 5171 - DNA, 290 bp, Gossypium hirsutum
  Clone ID: LIB3083-107-Q1-L1-A3
gttcgtctgaggaagagctcaggggttttatctatagctggcagtatcgcatccagcatgaaagcatcccgttgtccgaggagaaacaacttcttagagaaattaaacaactagaggggacccgggaaaaagttattgctaatgctgcgatgagagcaaagattcaggaatcacttggtcagaaagaagccattcaagatcaagttaaacttatgggcgttgatttggatggcgtaaggaaggaacaaaatgcgatctggtctaagagaaagcaaattaaagaaaaagtc

SEQ ID NO: 5172 - DNA, 284 bp, Gossypium hirsutum
  Clone ID: LIB3083-107-Q1-L1-A4
ctaactttgctgctttgttctgttcttctatgttcttcagtttttgcaccaacaatggctcagcctcgttcacctttttgtgaagggaaatgcaaagggaggtgcaataaagcggcggtttgggatcggtgcttcaaatattgcggcatatgttgcgaggagtgtcaatgcgttccgtccggtacttacgggaacaaacacgagtgtccttgctacagagataaggtgaacaacaagggcaaacccaaatgcccttgaaaatgaaatatattcgagttcgggat

SEQ ID NO: 5173 - DNA, 283 bp, Gossypium hirsutum
  Clone ID: LIB3083-107-Q1-L1-A5
gaaagttggaagaagattcacggggtgatcatgaagaaacttctgagaagcgatctaaagctaaaagcataaaatcggtgttcgatatggagctacacctcgagactccattacctttggagtggcaaagatgtttagacattcagtcagggcagatacacttttacaatacaaggacccatacgagaacatcaaaggatccaaggagaagccctgaacccccaagccccgttcacatgagcttagaccttgagctaaacctaccatgcgattcatcagtaag

SEQ ID NO: 5174 - DNA, 297 bp, Gossypium hirsutum
  unsure (1)..(297): unsure at all n locations; Clone ID: LIB3083-107-Q1-L1-A6
ttcaaacttttgaagactacaggttctatgctgtgggagctgagttcccagaagtcaacaacaaagataagactctagtcttccaattttctgtcaagcatgagcaaaagcttgattgtggtggtggctacatgaagttgctcagcggtgacattgaccagaaaaaatttggtggtgaaaccccatacagcatcatgtttgggcctgatatctgcggctatagcactaagaaagtgcatgctattctcacctacaatgggacanaccacttgatcaaaaaggaagttccttgtgaga

SEQ ID NO: 5175 - DNA, 298 bp, Gossypium hirsutum
  Clone ID: LIB3083-107-Q1-L1-A7
tttttcgaggaatatccataaattaccatggaatcaaaaagaccagactcttggttcttaacagggggcaaaaaagagtttccaaacatgagaatcgaaacaaaatcacaactcggttaaaatagaatgtgagatcctgccctacaccttaatggcatacttcctcattgggaagtacatttccttcttcttctccctttcggacttcaaagatgcctgcaaagcaaaataacagatgctcaatgattcgggtagttcctatagaacctgatgctgacacgtattaacagatattact

SEQ ID NO: 5176 - DNA, 289 bp, Gossypium hirsutum
  Clone ID: LIB3083-107-Q1-L1-A8
gaaagttaaaacaaaaagagggaagaaaattctcaatccagaatagggttagggttatccctgatccggataacgatttccacgctcgagtcttccaactgaaaaattaaacatgggcgccaattcgtcaccaacagacttgaccaccgatctcgatgagcagatctcgcagctcatgcagtgtaagccactttcggagcagcaggtcagagcattatgtgataaggcaaaggaaatactgatgaaagaaagcaatgtccagcctgtgagaagcccggtgacaatttgt

SEQ ID NO: 5177 - DNA, 286 bp, Gossypium hirsutum
  Clone ID: LIB3083-107-Q1-L1-A9
cagcagttttccggcattaatggagttctctactacactcctcaaattcttgaagaggcaggtgttgaagtgcttctttcaaacttgggccttggttcagattctgcatcatttcttattagtgcatttacaaccttgctgatgctgccctgtataggtgtagccatgaaactcatggatatatcaggcaggaggcggctgctactcaccacgatcccggtgcttatagtgtcactgatcattctagtttttagtgaacttgtggatttgggcacggttgtgaatg

SEQ ID NO: 5178 - DNA, 290 bp, Gossypium hirsutum
  Clone ID: LIB3083-107-Q1-L1-B1
ctgatattggtgctccatttactggtgatgagaagagagtgagagatgctattgcaatggaggaatgtaattctgtctgtgtagtgaatgagtatgatgatttggggttcatagatttaagaatcaatggaggaagtgtgagatggagttccagaagtaggttgctcaaggggaaaatgcctgatgagccttgctaccccaaattggcattgcataatgggcagttgttttcatcaatgaatgactccatctcagtgttctgtggtcctgattgggttctaacatcaagg

SEQ ID NO: 5179 - DNA, 246 bp, Gossypium hirsutum
  Clone ID: LIB3083-107-Q1-L1-B10
tcgttccttcttggaaacgggcaatgggggtttggaatttattcgaaatcatcctgatattgctcattgagaaagaggaagatatgtaataaccattcgaatgagtccagccatgagccactggtctgttttcaaacatgaaagaaaacattactacattccatacaagaataaaacagaacatcagccggcagttcctcttattataaatgctaatttttctagtaactcaattggcgggaatgg

SEQ ID NO: 5180 - DNA, 239 bp, Gossypium hirsutum
  Clone ID: LIB3083-107-Q1-L1-B11
aaacggttacttcccagaggagcgggaccgaaagaaaaacttcacaaacttaaacgacgagccactcatcaactcaggacacttagaaacatcggaagccagcccttagaagttccaccatagaacgccgagcaaccgctcggaatacttgaaaggtctgatcggttgaattgaaatcgacaccatgcgaataagaccgcatagaacgaaaacaggtattcaacagcccaaaaagctgc

SEQ ID NO: 5181 - DNA, 234 bp, Gossypium hirsutum
  Clone ID: LIB3083-107-Q1-L1-B12
gaacgggacctgtgcaaatcacagggagcaggcaaaattggctgcatccatgtatgacatgaccctcaccatccgacatgatatggctccttctcctgcaacgcctaccggagcaagctatgctatggcagcctccgctgattactaatgctatggcatgacggaatctttaatcgctctcttggtgcatagaatgcaaagctcttcaagactttatgacattgcctaccctta

SEQ ID NO: 5182 - DNA, 302 bp, Gossypium hirsutum
  Clone ID: LIB3083-107-Q1-L1-B2
gtcaaccgtcacttcccaaggcgtcccttgattccgggccgtcacaagcacaactgccgtttccataaacgcttcatgcctttgaatccacgcttccatcagaaacgcttcatttcttacggcaacgacatgatactgtccgacgagagaagttttgacccagagtcacgcggtgttgttcgccagatcgaggccagctggggcagttttgacgatgatggcaccgagtctaagcatcatgtaggttttatgaagccagatcaccatgaccacgagcaccatgatgaagaccatgaccacga

SEQ ID NO: 5183 - DNA, 248 bp, Gossypium hirsutum
  unsure (1)..(248): unsure at all n locations; Clone ID: LIB3083-107-Q1-L1-B3
ttattctttgttaataccaaaaactantacatcgtcggaggtatggaggccggtggacacatatccaaaatcaacaagaaaatacatcacagtagcaaacggataacggtacatccctcaatactcctcctcatccccttcgtctccttcaccagactcagcgccaacttcttcataatctttttccagggcagcgagatcttcacgtgcttaaaaaaactttctttcctcaatgccttaacaaacat

SEQ ID NO: 5184 - DNA, 283 bp, Gossypium hirsutum
  Clone ID: LIB3083-107-Q1-L1-B4
aaagaaccagttcgcgtcctcggtactggagctgcaggacaaatcgggtatgctcttgtacccatgattgctaggggagtcatgttgggtgctgaccagcccgtgatccttcacatgcttgatatcccacctgctgcggaggctttgaatggtgtcaaaatggagttggtggatgctgcatttcctcttctaaagggtgttgttgctacaactgatgctgttgaggcatgcactggagtcaatgttgctgtcatggttggtggtttcccaaggaaggaaggaa

SEQ ID NO: 5185 - DNA, 284 bp, Gossypium hirsutum
  unsure (1)..(284): unsure at all n locations; Clone ID: LIB3083-107-Q1-L1-B5
aaacaatgtaggcagtgtaaggaaactgaagtgcttgggagtcattgcaaagccttcaaatcaaaacatcacaaaggaacttcatatagaagccaaagtaacaatatcagcatgtggggcacttttgacacctcttttaatgcattctagtgggctgaagaatcgaaacatcggtcaaaaccttcatcttcatccggtcctaatggcgtggggttactttcccgactccgattccaagttcaaaggggaaagcttatganggtggaataataacatcagtacat

SEQ ID NO: 5186 - DNA, 265 bp, Gossypium hirsutum
  Clone ID: LIB3083-107-Q1-L1-B6
aaacgccaaaattcaagcgacctttattagaattaattaatattgtgcacttaagaatcagaacaggaaatgaaactagcaaatcatgtctattacaaaaatcttgcttaacttcccctgtttggaactttcagatagcatgcaatttatcaccaatagtacctaaaacctacccgacataaaaccatagcaaaaacataaaagagtgaacacaaacagaagagaacaaccgcactttatataggaagagacgtgaatcaagcat

SEQ ID NO: 5187 - DNA, 198 bp, Gossypium hirsutum
  Clone ID: LIB3083-107-Q1-L1-B7
atgctgcttctattgaggggcggtatctaaaagcctgatgataccctcaccgtgaaaaccatcaccttttaggggggaagttctgataccttcaacaatgtgaacgcccaaatccaagacaaagaacgggtcctaccataccaataagagctcatctttgctggcaaatcattataggacggccgaactcttgctgac

SEQ ID NO: 5188 - DNA, 285 bp, Gossypium hirsutum
  Clone ID: LIB3083-107-Q1-L1-B8
aaattttcagagagaaaaacagaaaaacactcccgaaatggcacgcaagaagatcagagagtacgattccaagagattgttgaaagaacatttcaagaggctttccggtagagatttgccaatcaaatctgcacaaattacggaatcaactgatttcaatcagctagtagagaaggagccatggctttcgtcacagaaactggttgttaaacctgatatgttgttcggtaagcgtgggaagagtggtttggttggcttaaatctggattttgctcaagttattgc

SEQ ID NO: 5189 - DNA, 306 bp, Gossypium hirsutum
  Clone ID: LIB3083-107-Q1-L1-B9
tttattcatagaaaataccaaaaactagtacatcgtccgaggtattcaaccctgaaaacacatatccaaaatcaacaagaaaatacatcacagtagcaaacggataacggtacatccctcaatactcctcctcatccccttcgtctccttcaccagactcagcgccaacttcttcataatctttttccagtgcagcgagatcttcacgtgcctcagaaaactctccttcctccatgccctcaccaacataccagtgcacaaatgcacgcttggcatacatgagatcaaatttatgatcaatgcggg

SEQ ID NO: 5190 - DNA, 297 bp, Gossypium hirsutum
  unsure (1)..(297): unsure at all n locations; Clone ID: LIB3083-107-Q1-L1-C1
actgctcgacaaaaggtatttccagaatttatgatttttttggtgatagaatcaaaatgattcatntcttacagacttaatcctgcttaaatgacgaccgatgaagatgatctatatacatctagtggtaagatgaagaaccccattttcatttttttcaaggatgtcagacatgttttcaaactggacgaactgggatcagagatagcacaaattgctttgcctgcggcactggctttgacagccgaccctattgcttttctggttgacacagcattcattggccaaataggtgct

SEQ ID NO: 5191 - DNA, 284 bp, Gossypium hirsutum
  Clone ID: LIB3083-107-Q1-L1-C10
ggctccttccaaagacacggggtggtgatttggatacgctctaacatttgtccgtacagataattcatactaaagatttaaccggaaaccaaagccatggaaatgtccaacgatctcgataggttgctctttttcgagcaagctcgtaaaatttccgaggctacttacgcttccaatcctatcgatgccgataatttgaccagatgggccggagctttactggagttgtctcagtttcaaagcgttccggattctcagaaaatgattcaagatgctatttcgaa

SEQ ID NO: 5192 - DNA, 271 bp, Gossypium hirsutum
  Clone ID: LIB3083-107-Q1-L1-C11
cctccttggatatggagggggcaggggaggaaatagttctatctcaaacttagcaggtcgaaatatgtggggaaatggaggtcttaaccatgctactaactcaaactctagtcctattgtgggctctggaagtgggaattcaggagtgaattcttttggcagcattggagcactttgggattcctctcctacttcaggtcaaggtggagctgcttttgcttacaacagtggcaatattagatatggaagtggagacattgaggatggatca

SEQ ID NO: 5193 - DNA, 283 bp, Gossypium hirsutum
  Clone ID: LIB3083-107-Q1-L1-C12
gaacagtagatgcagaaattacagggagcaaggtcaaatgctgacattggttgaatacatgatgctactttaccgtgctttactgacaactgcagcttggtaccgtttctttttaaacaaagactatggaagcctcttttcatcactaatgacatggttgtacttaacattcaagctgacatctgttgtttagaaggagcaatccttctttgctgcattgaaagcattatctcgtaaagaggtacattagtgtgcttatgcaacatcgaagcaggtgaatgct

SEQ ID NO: 5194 - DNA, 286 bp, Gossypium hirsutum
  Clone ID: LIB3083-107-Q1-L1-C2
gaacaattcaaggcttgaagtgcatttggagaacagaaggttttcgcggattattcaaaggcaatggtactaattgtgcacgcattgttccaaactcggcggtcaagttcttcagctacgagcaagcttcaaagggaatcctatatctgcatcaacggcaaactggcaatgaagatgctcaactcactcctcttttacgccttggagctggagcatgtgctggaataattgccatgtctgcaacttaccctatggacatggtacgaggcaggatcaccgtacagac

SEQ ID NO: 5195 - DNA, 283 bp, Gossypium hirsutum
  Clone ID: LIB3083-107-Q1-L1-C3
cagcttcagcaaatgtctgacgatcccatgaatcaagtttcccaggtattcgagaagtcactgcagtatgtaaaacgcttcagccgttataaaaatccagattctgttaggcaagttcgagaaattttgagtagatatcagttagctgaattcgagctttgtgttcttggcaacctgtgtcctgaaactgtggaggaagcaatcgctatggtgccttccatcaagactaaaggacgggctcacgacgacgatgccatcgagagaatgctaaatgacttgtccc

SEQ ID NO: 5196 - DNA, 265 bp, Gossypium hirsutum
  Clone ID: LIB3083-107-Q1-L1-C4
gtggaataaccacatgaatccgttatacctgttgggcatttacaagttcccttaacaatttacttccaatacagacaacaaaaatatcaagtttcaacccaaacacaaataaaacatgaaaaagcataacatacagtaaaccatttcaagtctttaacaagcttcaaagaatagaagcttgcataacacggaagcaacaggtaataaaagacatcatacgcacactcaatcacaggtacttcttagtactcatcatcttcaccct

SEQ ID NO: 5197 - DNA, 289 bp, Gossypium hirsutum
  Clone ID: LIB3083-107-Q1-L1-C5
tgctctagctcgcgttttttttttttggtgggttttttgtgggtgggcgcttttttttttttctttttttttttttttttttaatttttttttttaaaccaaaaatctttctatttttttctttgggcttataaattggtgtattacccacaattccttgcttggtaaattcagaattgccaaaaagggctttttttttccccacacggtcaaatttaccgcaaccttgttttattttaatgaaacctttcccaactttgtttaaaaaaaaaaaggtttgctttttccc

SEQ ID NO: 5198 - DNA, 191 bp, Gossypium hirsutum
  Clone ID: LIB3083-107-Q1-L1-C6
cttcctttctattttttaggggggctaatggaaggcgggcgttcctttatttaaatatcattgaccttttaggaatactacacggaaatgcaaaaaaaatatcatctcttttacgaacaaataacatagctttcatagacgaaaactttcattcatctttctacagatgaccaaatggacctaatgccttt

SEQ ID NO: 5199 - DNA, 287 bp, Gossypium hirsutum
  Clone ID: LIB3083-107-Q1-L1-C7
aaagggtaaagcgaatagctgagtgagagctgagctgagctcacgagttggtttttttattcagtgctgagtcgctttaccaacctaacacttttttttttcgattaaatttccatgggtttctaataaacgatccctttctgcttaattatttttcttgatcgtaatcctccattcctcgcttgctgcaatatgcaagagtcttaaccaaaatgccgccggcaatatagaaatgtgtctgcaactttgcatgccctgagttggagaccataatgttttctgagagt

SEQ ID NO: 5200 - DNA, 288 bp, Gossypium hirsutum
  Clone ID: LIB3083-107-Q1-L1-C8
cggagttgccacaattagcttgaaggtacgaaaagcaggaagagtctgaatatgaaaagccggaatacaaacagccaaagtatgacgaagagtacccaaaacatgagaagcctgaaattcacaaggaggaaaaacaaaaaccgtgcaagcaacatgaagagtaccacgagtcacacaaatcgaaggagcacgaagagtaccagaaagaaaaacccgagttccccaaattggaaaagcctaaagagcacgagaaacacaaagtcgaatatccgaaaatacccgagtaca

SEQ ID NO: 5201 - DNA, 290 bp, Gossypium hirsutum
  Clone ID: LIB3083-107-Q1-L1-C9
tgaacctccaaaaaaacctccgatgtatgaacctaagccaccgaagccaccggtttatacacctccaaagaaagaaaaaccagaacccaagccaccaatgtatcaacctcccaacaacccaccaatatatgagccaaaaccacctaagccaccagtttatgcaccaccaaaggaagaaaagccaaaacctaaaccaccagtttatgagcctccggcacatgagccaccatacggtcactatccaggacatccacctttggggaagcctcaatagaatgctcccatcgact

SEQ ID NO: 5202 - DNA, 283 bp, Gossypium hirsutum
  unsure (1)..(283): unsure at all n locations; Clone ID: LIB3083-107-Q1-L1-D1
ctggattccacctcctcccgggcttggcgacggtgtttttgccgcttctttttcagcttgtacctgacttggatttagagggatttagtttccttttcaagacatggaacaagtgtgcttctggtcaaattgctaccttttccgagtgtttttcttccaagaagtactcgattggcggttccttgcccgtggagattttcttttggtttcctttgtcaattgcacttagttctcagtctccttttaacacacaacacangagctggaatgctagttttttctg

SEQ ID NO: 5203 - DNA, 284 bp, Gossypium hirsutum
  Clone ID: LIB3083-107-Q1-L1-D10
gaaaaacaaccgactccacccgggggaaaaatgtatagctggcgctcacaattcgtctgcaacattgacgatggaatcttccatgattattacaaaggctcacccaagcttgaatgaaccgtgtgggatttcaaaaaacatatgagacggtttttcggccaaactcaacactacattggagtcactgcacgaagaagaactcatgcggcttgagaagcttcacacaactggtgaagaattgacaaatttatggcgcctaatgcatacatactatggagatcgct

SEQ ID NO: 5204 - DNA, 304 bp, Gossypium hirsutum
  unsure (1)..(304): unsure at all n locations; Clone ID: LIB3083-107-Q1-L1-D11
aaaaagttggaaggcagaaggcttggcacgtttgcctggaagtccggacancgagctagatagctttgagggcggagaccactccgcnntgctctggagctaatgggtgaaccgcgatgannggagttagaggaacctccgagctgatatnntgtagacctgaaggangatgtaccagagagcanagttaancttgcttgtgaataagatccaaagaatgaattcttcagcggttaacaactcgtaagcatttttcttattatttttggtggtattccaagacgcaatgtgcatggtacagctg

SEQ ID NO: 5205 - DNA, 280 bp, Gossypium hirsutum
  Clone ID: LIB3083-107-Q1-L1-D12
gtgaggttgcctccatattcctaagagcagcattgggtatacccgagggcctgattccagttcaacttctctgggttaatcttgttacggatggaccccctgcaacagctttgggattcaatcctccggacaaggatatcatgaagaagcctcctcggagaagtgatgattcactcatcactgcttggattttattccgctatctggtaattggactttatgttggagtagcaactgttggcgtcttcatcatttggtatacacacagttccttcttgtg

SEQ ID NO: 5206 - DNA, 225 bp, Gossypium hirsutum
  Clone ID: LIB3083-107-Q1-L1-D2
gggatattgaaactcatggggggatcccatacagaggaagcccgaacctaacatgcacagctcgctatgcaagtgtgaacactcaccttggaaacgagcaaagccggaaagatgaagcggaatccattggctatgtgctcttgtatttactgagaggaagccttccttggcaagggttaaaaacgggtactaaaaagcaaaaatatgataggagcactgaaaaga

SEQ ID NO: 5207 - DNA, 156 bp, Gossypium hirsutum
  Clone ID: LIB3083-107-Q1-L1-D3
ttctcgaggacttacaaatgccctaggggggtttcctaaagttagatgaccacattttctgtatctacctaattttttttatattaatctctctccatcaaaaatacttgtcggtcatgttacatctgccaatgttgcaaatatttgctctaaact

SEQ ID NO: 5208 - DNA, 280 bp, Gossypium hirsutum
  Clone ID: LIB3083-107-Q1-L1-D4
cccaaaccaaactagggtgagggttatccctaatccggatgaagatttttttacacgctctattcttgctacttaattatcaaatatgggcgcaccaacagactcagcccttgatctcgatgaacagatctcgcagctcatgcaatgtaagccactttcggagcagcaggtcagagcattatgcgacaaggcaaaggaaatattaatggaagaaagcaatgtccagcctgtaaaagcccctgttacaatttgtggtgatattcatgggcagtttcatgat

SEQ ID NO: 5209 - DNA, 237 bp, Gossypium hirsutum
  Clone ID: LIB3083-107-Q1-L1-D5
ctttatcttttcacttccaggggggtccaggtgtgggatccctacactctcttcctctacctacttttaaaatcaaatacggttttgcatccttaaatcctcactgagataaaccgccaacctacggctctgtgtttgcctcgtgccttataccaccgtaaccgaacaatgagaccggtgccttcgactcctcgccatacatacaccatcggcgaagcaggggggtatctaatcagc

SEQ ID NO: 5210 - DNA, 277 bp, Gossypium hirsutum
  Clone ID: LIB3083-107-Q1-L1-D6
gtggtcgggattccgaacaatgttaaagggggtgtttgcgacatcccaccaaccgggttgacgatgtcatcgacgtttatggggaactcgacgtcgatacaagagatgtttcgacgtgtttcggaacagttcacagtgatgtttaggaggaaagcatttttgcattggtatacaggggaagggatggatgaaatggagtttactgaggctgaaagtaatatgaatgatttggtttctgaatatcagcaatatcaagatgctgtggatgatgaagatg

SEQ ID NO: 5211 - DNA, 287 bp, Gossypium hirsutum
  Clone ID: LIB3083-107-Q1-L1-D7
ttgatgcagaggaattccgatggggacagatatgtggtcttaacattattatacaggtggatgacttggaagaagttagtgaatactatcaaaataggggatgtttcaatgagttgatctctctcatggagagtggtttaggattggaacgtgtacacatggggatctttactgagttgggagttctttatgccagatatcgttatgagaagcttatggagcacattaaattgttctctactcgtctcaatatccccaagctgataagagcctgtgatgagcagcag

SEQ ID NO: 5212 - DNA, 63 bp, Gossypium hirsutum
  Clone ID: LIB3083-107-Q1-L1-D8
cattcttcgatcttcgaacgccgggggcaaaacaccgttttgtttaccggtgacgtcgttttc

SEQ ID NO: 5213 - DNA, 287 bp, Gossypium hirsutum
  Clone ID: LIB3083-107-Q1-L1-D9
ttttatgctgaaatctaccgaggggtttattaaaatattcgaaaaaaaaaaaaacaaaagtatgtaataatttagttttacattgatgcaggtatccaatgtatatattacattatgcatttatagtttagaattatggtcaacttgagccaactgctgcctcaaaacccttctcataaccttattagtagctgttcttggaagagatgggagggccacaacatgagaaaccttgaacaatggattcagattcctctgaaccgctaaattaaaagatattctcaatt

SEQ ID NO: 5214 - DNA, 200 bp, Gossypium hirsutum
  Clone ID: LIB3083-107-Q1-L1-E1
aacttacgaatgccctaggggggagtcgaggcgatgggtatctacatggtctgcctcaactgaatttcattcatcctgatccttatccatcaaaaattcttgacggtgatgatatgcgtgccaacgatgaagattatgcctcggtccaactagctcctgtgcatggcaaacactctatcgaaactcggctagtgagcacc

SEQ ID NO: 5215 - DNA, 232 bp, Gossypium hirsutum
  Clone ID: LIB3083-107-Q1-L1-E10
ataattcacccgaacggtaccggggtaaaaaggtaggttaggagcggttcatccgtacgggtcaaccacccgtcatttctctcggatgggaagttattggtattcactacggattacggtggaatatcaacatagccaatctcaaacccacatcactaccaaccatatggtgagatattcacgatgaaattggacggttctgatttgaagaggacgacccacaattcttatg

SEQ ID NO: 5216 - DNA, 225 bp, Gossypium hirsutum
  Clone ID: LIB3083-107-Q1-L1-E11
gttatgcgctctcattgaatcgggggtcaaccgtgagctagccactactactgcacaaacatcactttccttacattacactatgcccaccaaaaccaccactcctccaccttcaacttcaccaccacctacaacttccgcaccaatgaccttaccaacccctccacctacaactacagcaccatctgcttcatcaagaaacaattcacattgcaccacgcccac

SEQ ID NO: 5217 - DNA, 136 bp, Gossypium hirsutum
  Clone ID: LIB3083-107-Q1-L1-E12
tctttttcaaccacaacttcccattggagggctttttgagggacagcctctctttctatatctgcctaactatttatacatcaatttatcttccgaaaacttatttgtcattcaatttacatatcgcgctcaaaca

SEQ ID NO: 5218 - DNA, 282 bp, Gossypium hirsutum
  Clone ID: LIB3083-107-Q1-L1-E2
gtcaaacagaaatgaccactgggtttcctattctgtgataacctctctttctctatctgtctttctatctatctatcaattcatcttccgaaaacttatttttgattcaatttagatatcgtgaacaaacaaaaatttgtggaaatgagcagccagacgttgcctccggcgtcaacaacccgccgtgattctcaaaaaagaagatcaaatagcactaagaagtctcattccttcaaccatgccaagcccatgtctccttcttccatccctggtgagaggacg

SEQ ID NO: 5219 - DNA, 295 bp, Gossypium hirsutum
  Clone ID: LIB3083-107-Q1-L1-E3
tcgagttttttttttttttttttgactgcaagggggaaaaacatatttatgcaatgccatagaaccttgaaacctaaagaacaactaaaagcgttgataaaagcaattatttttactcgtaagcttccccagcctagtggccagctcacattagcatacgacccacacacatacaaacttaacacatcaacaataactggacaggtgttcggcaccacacttaaaagccaccgcggaggcgaaggaccaggtgcaaagtggattccttctggatgttgtaatctgcaagggtcct

SEQ ID NO: 5220 - DNA, 261 bp, Gossypium hirsutum
  unsure (1)..(261): unsure at all n locations; Clone ID: LIB3083-107-Q1-L1-E4
gaggaactaacaatttattggggtagcagaagaaaatagcagaacacgtaacaggcatcaaaagagttattcttagctcactcttttctcggatcgtttttaatccccaggcattaagaacacaaaactcatcatcagctgatcacagattatttacatacatatttataaaaatataccccaccatcatcgttgtagctaaaaccaatcaataatccggatgacggtaatcactataatcatncctgtcccttgatgcga

SEQ ID NO: 5221 - DNA, 275 bp, Gossypium hirsutum
  Clone ID: LIB3083-107-Q1-L1-E5
aaaatgggcaatcctcgaagagatgaaaagccaactgcctatgcccgtgaagcaagggaatttttaagaacacgccttgtaggaaaacaggtgagtgtacaaatggaatattccaggaaagtccccatggcagatggagctcctgctgcatctgcagattcaagggtaatggattttggctcagtcttcctcctgtcttccatcaagggtgatggagatgaggtttctgcagcaaacgcatctgcagctggcagccagcagcctggcttgaatgt

SEQ ID NO: 5222 - DNA, 115 bp, Gossypium hirsutum
  Clone ID: LIB3083-107-Q1-L1-E6
ttctcgaggccacctcttttctctaagggggcggaaaggcgcttgcctcaaaatcccaattcccggaatattggtaaacctgctattcatccaaatactgtaaatattaattgca

SEQ ID NO: 5223 - DNA, 284 bp, Gossypium hirsutum
  Clone ID: LIB3083-107-Q1-L1-E7
tcgtgcgagttttttttttttttttggggttttttttttgttttgttgtttttttttaaaaaaacaaattattttttgcttcacaattgagttctatgcaaagaatcagttttttttctacatctaatttcaatggggttttacaattttaccgtttaaagacccaaaaagaaaaaaagaattgaatggttcatgaggttgagcttgcctcaatatccggagaccacaactcattggtaactaagctattctcggtttcattccatttaagaatgggcctgcag

SEQ ID NO: 5224 - DNA, 289 bp, Gossypium hirsutum
  Clone ID: LIB3083-107-Q1-L1-E8
tggtgttgctgttgttgcggaggtgtctaggaagaaatcaaagaagaaaggtgaaaagaagggcttactcggaggtcttttatacggaaaaaagaagaagatgatgggcaaaaactatgtgaaaaaagggtctgcaccagtctttgatctcgaagaaatcgaagaagggcttgaaggatacgaagaattgtagaaatcgacattaatgtcgcagaagaatttcgagaaacgattcggacaatcaccggttttcattgcctcaactttgatggaaaatggtggccttcct

SEQ ID NO: 5225 - DNA, 286 bp, Gossypium hirsutum
  Clone ID: LIB3083-107-Q1-L1-E9
ctcgtgccggatatttattttggagctagcattccgataaatggatcaacaactagggaagagaaatggggctgactttcaccaagctttttagccggctttttgccaagaaggagatgcgaattttaatggtgggtcttgatgcagccggtaaaactaccatcttgtacaagctgaagcttggagagattgtcaccactattcccaccatcggatttaatgtggagactgttgaatataagaacatcaggttcaccgtgtgggatgttggtggtcaggacaagat

SEQ ID NO: 5226 - DNA, 201 bp, Gossypium hirsutum
  Clone ID: LIB3083-107-Q1-L1-F1
gacttacaattgccctaggtgtgactcgaggcgatgggtatctacatggtctgccacaacagaattttattcatcctgatcttaatccatcaaaaattcttgttggagatgatatgcctgccaacgttgcagattacggctcgcgccgactagctcctgtggattgcaaacacactatcgacactgggctagcgtgcacct

SEQ ID NO: 5227 - DNA, 283 bp, Gossypium hirsutum
  Clone ID: LIB3083-107-Q1-L1-F10
cagagcatccatggctctaaatgagtactgagagatgtgccagtagatgaaagagtgaccctgactaggtggtcgaagaagcatagagctcgaaacactgggaagagctcagaaattgttgatgattggagaaagaaagttgtagatacttgtacatcaacatgggatgttacagagacaggaaagagcatttccaagatgaaaagagaagaagccaaaatcactgcctgggaaaatctgcagaaggctaaagccgaggcagccataaggaaactagagatga

SEQ ID NO: 5228 - DNA, 290 bp, Gossypium hirsutum
  Clone ID: LIB3083-107-Q1-L1-F11
ttgtggtttttattttttttttttaggtggggagtcactaacaatgcgggaaaaactggacaaataggaaataagagaaacatcagtgttatcgacctcatgatccaaagtatcagagctaacttcaaaggctacttactcatatggagacagcaaccataagtagaaccaatagtccgatactatagaaaataaacatcatagcatattgtggttgctcttacctgataataatttttccaaacttgaatcatgggtaagtaggggatgcttcgttgttgaatttatat

SEQ ID NO: 5229 - DNA, 284 bp, Gossypium hirsutum
  Clone ID: LIB3083-107-Q1-L1-F12
aaaataatggccctctgcaaggcggattctaggttggtcctagcactggccatggcattggtggcagctacggtgcctgtttatgggcagagaactatcaacactccatgcaccccatcggcacttaacatcttcactccttgtatgaacttgcttaccaatagcagtgccaatggtacttcgcccactgcagattgttgcaactcgcttaaaacgctcacatcgagcggcatggactgtttgtgcctcattgtcacccggagtgtcccgttccgtttacctat

SEQ ID NO: 5230 - DNA, 284 bp, Gossypium hirsutum
  Clone ID: LIB3083-107-Q1-L1-F2
ctttcccactgtattttccgggtgttgcttcccaaatgctgatttcaacgccagaaaaaatgagtaacgatgacgcatccgatctcggcgtcgccctccccgccgccgctgccgctttgagtgctgaggaacgcgccggcctggttaatgagcttaagaataagcttcaaaatttagcgggagaacatgctgatgtgctagaaacactatcaccaaatgtcagaaaacgtgttgaggttcttagggagatttagagtgaacatgatgaactggagaagaagttt

SEQ ID NO: 5231 - DNA, 281 bp, Gossypium hirsutum
  Clone ID: LIB3083-107-Q1-L1-F3
gtcgagttcagtaggcaaaggggtttaattaaaacagatgattgtttcctcttataacgttttatgtcttgctacaaatttattgaagaaggatgattctttctgtatatacataaaaaggcaagttttgccgagaatcagatggtattatggcaaaagagaagggtgaaaagatatatataataggtaatgttgttttggtgtgaaaaataaagctgctaagtgctaagttaaatattggtggtcactgctttgcatttctagccagagaaggagagacg

SEQ ID NO: 5232 - DNA, 281 bp, Gossypium hirsutum
  unsure (1)..(281): unsure at all n locations; Clone ID: LIB3083-107-Q1-L1-F4
gctggatcaacttatgtagggggggcgaattgccatttgaaatcanacagcaagcatgaaacagctcaagcttatgttgatgctgctcattgttataagaaaacagctacaaaggaggctatatcttgcttgcagcaagcagtgaacttgttttgtgatattggaaggctaagcatggctgcaaggtattataaggaaattgctgaattatacgagtctgaacagaacattgagcaggccatggatttattttgaaaaggctgctgatttcttccaaaatg

SEQ ID NO: 5233 - DNA, 236 bp, Gossypium hirsutum
  Clone ID: LIB3083-107-Q1-L1-F5
ttcgaggtttcatgcccctcctgaaggggggaattgtgggttgatagaaacttcatatgtatatatacttcaagagtggcacatgatcttgactcaacttgaatactatccgtcacaaagagagaaggaactactaaaattagaacacgagtgtctgggcgactaccaaaaaaaagcagacctagcaaatctgtaaagagctctactatatcacgaactggccatatgtggagctg

SEQ ID NO: 5234 - DNA, 280 bp, Gossypium hirsutum
  Clone ID: LIB3083-107-Q1-L1-F6
tgcacctcttccagcaatgatgactgtgaagcgctggtctcaaaatcccaatgccgcgtcaattggaaaacctgctatacatccagctactgtagatttgaaaggcaaagcatacgagatgctgagacaaaatgcagcaaggtttttgctggatgatatctacagaaatcctggacccctccagtttgatggtccaggtgctgatgctaaggctgtgacattatgtgttgaagaccaggattacatgggccgcatcaagaaactgcaggaataccttgac

SEQ ID NO: 5235 - DNA, 285 bp, Gossypium hirsutum
  unsure (1)..(285): unsure at all n locations; Clone ID: LIB3083-107-Q1-L1-F7
gaaaatctttggtttgtgcttgtggtgcgtcgctctgcttatgcatccaaaaaaacgggtcaacccaattcaaccaacccaatttcctgttctccctccgatctctttcgcaccaattcagagcgattataaggtcataaacttggatcaatggatgggctttttttgattctgcaatgaggttagaagggagaaaatcagtgaaagaatgaagtatctgcaagatttatatcagggtgtaacaaaatcacangcaaagttggtatgcttgatgaaatcatcaat

SEQ ID NO: 5236 - DNA, 290 bp, Gossypium hirsutum
  Clone ID: LIB3083-107-Q1-L1-F8
tagtcgaaggctgctccagtttcgtgtgagccagatgacctttacatggtgattgggcgtggttcagcagaagagactgccatgacatcttggactccagagattgactacgaaatgaacgcgttatctgctgaagccaccagcaggcatgctgatgttgaaataaccggtgccaatgaaaaggggcctgatgctaaaaaacttgggaaatctgaggggaaacttccgaataaagaagttcgttctagagttttcaaatggacctcttgccaagagcaagtctgatgtag

SEQ ID NO: 5237 - DNA, 298 bp, Gossypium hirsutum
  Clone ID: LIB3083-107-Q1-L1-F9
ttcgttccttttactccgatcaccttcttggaccgcggcgcggttatctacccagactctgtctcccttgtccacggtgatgtcaagtatacctggaaacagactcgtcagaggtgcgttcgtctcgcttctgcgcttgcccagctgggaattgcccctcgtcatgtggttgctgtattagccccaaatgttccagcgatgtatgaacttcattttggtgttccgatggctggggctgttctatgtacactcaatatacgtcatgattcctcaatggtggcagtgttattgaagcatt

SEQ ID NO: 5238 - DNA, 291 bp, Gossypium hirsutum
  Clone ID: LIB3083-107-Q1-L1-G1
tcttgagaattgtcaaacagcttcaagggattgcaagtgatgaaatggacaataagcttcttcaactatatgcatatgagaaatcaaggagatctagaagatttgatgttgtttatcatgaaaatgctcgtgttctccttcacgatgagaatatatatcgaattgaatgttcatcaactccaacgtgtctatccatccaacttatggactatggacatgataagcctgaagtgacagctgtttccatggaccctaaatttgctgcatatttgcacaatgacttcctctcag

SEQ ID NO: 5239 - DNA, 281 bp, Gossypium hirsutum
  Clone ID: LIB3083-107-Q1-L1-G10
acatcggtcaggctggtatccgaggcggaaatgcctgctgggagctttactgccttgaacatggaatccagcctgatggccagatgccaagtgacaagactgtcggaggaggtgatgatgcttttaacacctttttcagtgaaactggtgctggaaagcacgtccctcgtgctgtctttgtggatcttgagcctactgttattgatgaagtgaggactggtacttaccgtcagcttttccaccctgagcaactcatcagcggcaaggaagacgctgccaac

SEQ ID NO: 5240 - DNA, 298 bp, Gossypium hirsutum
  Clone ID: LIB3083-107-Q1-L1-G11
tgttttttttttgttaatcacaaatccgttgccgttggagtgaatgaaaatcgttaaaacatctgctaaattggaagaaataaaaataaaaacgaatgaatgttgaagctcttatcatcatctccattctttcttaagctttgcttgtaggacctcatgcgttgtgaagaactagaagcacttcctgtgcacaatagatgggccagattcatcatactctgccttagcaatccacatctgctggaaagtactgagggatgctaagatagagcctccaaatcagacactgtatttcctt

SEQ ID NO: 5241 - DNA, 177 bp, Gossypium hirsutum
  Clone ID: LIB3083-107-Q1-L1-G12
gtaattttcaccctgccatccggggggcatacagacgatggacgcatttcctgcacatgcatgaaatccagtcaatatgaatgtagcccatagaccaatgcgtctaattgcttaattattcggataagaccatagtcactcagaatgaacttggaaaccacatgctttgctgtgata

SEQ ID NO: 5242 - DNA, 296 bp, Gossypium hirsutum
  Clone ID: LIB3083-107-Q1-L1-G2
ttgagagaaacgcaaatggaagaaaagggaaagaagaagaagcaaaaacatgaacaccccaatgataaaaccacaaaaccaacctcagaattctcattcaaaccaagttccgaagtgaaaggtctaagattcggcggccagttcatagttaaatccttcacaatccgacgagcaaagccactggaactactcaagctcctcgatttcaccccaccatcacacaaaccccccaacaacaaaatccctttcccttcaaccacagcttttctgccaaccaatttcaccatcttagctca

SEQ ID NO: 5243 - DNA, 283 bp, Gossypium hirsutum
  Clone ID: LIB3083-107-Q1-L1-G3
cggaaatcacccgaagcaggagggagcgaaattgttgaaattccagtttctccgagagaagccaaggacaacgaacatgcagcttttcaggagctgatgttggcatcctactcagggagacaaaaacccggggaactaaccccgagtcagagcattgttagaagtaagctgtccattgcacacgtaattcatcatggagatggatatacacaagagaacagatggtcaaatcacaaagcagtttccattgccgaaaagctcgaacaagagaacctgagactcg

SEQ ID NO: 5244 - DNA, 140 bp, Gossypium hirsutum
  Clone ID: LIB3083-107-Q1-L1-G4
ttctttagtccacctcttttttttttggggggcttaaagagcagggttcaaacatccaaatccatcacattacaccaacctaccacccctctttctactgtcaatactaattgcgaaccttccgatataccaccacacat

SEQ ID NO: 5245 - DNA, 289 bp, Gossypium hirsutum
  Clone ID: LIB3083-107-Q1-L1-G5
cgaattgcatgctcttttttcttttataagggggcgaatcgtacggtgaaaaggacagaatatctgcgaaatggaatccactgtaacgaatccattgccgaactcgaattccgaccctgtcagaaggaagaagaaaaagaaaacatcagcagcggcggcgacggcgacgttgaagaccaatcagcaccggcagaaccaaaaccagagctacaatcacaccagatggaaatccgaggcgcagcaacaaatctattcttcgaagctgattcaagctttgagtcaagtcaat

SEQ ID NO: 5246 - DNA, 247 bp, Gossypium hirsutum
  Clone ID: LIB3083-107-Q1-L1-G6
ttcttgagtcgagtttttttttttttgggggtttttatttagaaatactcaatttttttatttttttatttgtacatctgaaagcattgctaatggctattagcgtttaaaaaaataaaaatagaaaagataggagcttgaaaaacaaaagtcaccatatttaactggaattgacgggcgcacaaccccatgttcaaacaatgcctgcgaaaaaaggaaaaggaaaagacaagatgaaatacaaagg

SEQ ID NO: 5247 - DNA, 303 bp, Gossypium hirsutum
  Clone ID: LIB3083-107-Q1-L1-G7
tgtttttttagaataaaatatatcccccaaggacatgggaaaattataaggaattcacttcaaaaatgacttatttctaaccctacaataatcttcaaagttcatcattcaaataattcaactgctcccataaaatttacaaagacaacaaacaccaccaaccgtatatgcacatctcaggcaagaatcaatcatataaaatcgaaaagcgaaaaacagtcacatccctcaaacaccaacttcccaatactccccactcctgtctctattcaagcataagcagaacaaaccactcacttattt

SEQ ID NO: 5248 - DNA, 243 bp, Gossypium hirsutum
  Clone ID: LIB3083-107-Q1-L1-G8
aacaccccaatgattaaaccacaaaaccaacctcagaattctcattcaaaccaagtttggcatcctactcacggagacaaaaaccccgggaactaacccccgaatccataacatttgtttgaagtaaacctgtgcatctccacagcaccatgatttttatggacatcacacaaaccccccaacaacaaaatccctttcccttcaaccacagcttttctgccaaccaatttcaccatcttagct

SEQ ID NO: 5249 - DNA, 287 bp, Gossypium hirsutum
  Clone ID: LIB3083-107-Q1-L1-G9
ttgttatctgaaggagcaacctcattgcggttcaccgagtaccagggtgttggcattttcatggctgcttttgcaatcttgattttccttttccttggctcggtagagggtttcagcacaaagagccagccttgcacttatgacaaatctaagatgtgcaaacctgctcttgccactgctatattcagcacagtatctttcttgctcggtgctgtcacttcagtagtttctggctttcttgggatgaaaattgctacctatgctaatgctcgaaccaccctggaggc

SEQ ID NO: 5250 - DNA, 225 bp, Gossypium hirsutum
  Clone ID: LIB3083-107-Q1-L1-H1
ttttctaggttttttttcttttttaaggggggaactacatgggtgcggggtacctaatgtccatttacaagattccttaacaatttactcccaatacagacaacaaaaatatcatgtttcaacccaaacacaaataaaacattaaaaagcttaacatacagtaaaccatttcaagtctttaacatgcttaaaacaataaacacttgcataacacgcaagcaacaa

SEQ ID NO: 5251 - DNA, 255 bp, Gossypium hirsutum
  Clone ID: LIB3083-107-Q1-L1-H10
cttggggggactctctgttggcgtggcagagcggcctacctcttcctcttcctcttcctctacgacaattaaaacaagaaattcaaatctctcaattgtttttttattcacatccatattcattaaaatcttagattagattattaccactttgtgtttttctaattgcgttgaatatggattatgaattaaagaaagattgtcacgatggaattgtcgttaatggcggaagcgatggccttttactctcacatg

SEQ ID NO: 5252 - DNA, 243 bp, Gossypium hirsutum
  Clone ID: LIB3083-107-Q1-L1-H11
tagtctcaaattctcttttattgttggtcaaggtttaaagtgttcgtataatgccacagggcaatctggaaaccctcgtttccgcctgtgcttgcggctcttgcgacaacaaaattgtctgcgagactttaacaaccaccgaaggccactacgacgactgcctccacacggcggagaaacttctcgaagaagaaacccctccggattttccgccagaatcgtttttgttatccaaagacgctg

SEQ ID NO: 5253 - DNA, 251 bp, Gossypium hirsutum
  Clone ID: LIB3083-107-Q1-L1-H12
ggattagacacagtgatgaaacgatggtaagggcaaggcctcgttcacaagttctgacatatagagtctgatatttgatggtcactggattacgttggccatgttaatccttgattatatgcatgttcctagccaaagctgtgcggtcgagcctagaaaagagtgcaggtaaacacaccgcccatccaaactcacccttagttgatgcagtcttctggaactggctgttgaaacctccctatgctgcgtca

SEQ ID NO: 5254 - DNA, 318 bp, Gossypium hirsutum
  unsure (1)..(318): unsure at all n locations; Clone ID: LIB3083-107-Q1-L1-H3
aaaaagaaagggggaaaaaaaaaaaanataaaaaaataaaattaaaaaaaaaaaaaaaaaaaaaaaaaaataaaaaaaataaaaaaaaaaaaattaaaattaaaataaaaataaaaaaaaaaagaaaaaaaaaaataaaaaaaaataaaaaattaaaaataaaaaaatataaattgttaaaataaaaaaaaaaaaaataaaaaataaaaaataaaaaaaaaaaaataaataaataaaaaaaaaaaataaaaaaaaaataaaaaaaataattaaattaatataaaataaaaaaaaataaataaaaataattaaaaaaaa

SEQ ID NO: 5255 - DNA, 278 bp, Gossypium hirsutum
  Clone ID: LIB3083-107-Q1-L1-H4
tcgagtttttttttttttggtgggcttaaatatagaatgtatgtatatatatataaatcagctaaaacctttagagcaccactattttgctttccaagacgaattaagaaatacaaatttaatcaacacacgttggggtggatttgttatcctaaacataaaaaacttgattgtccttactagcacaagaggctaagcccctgcttgaatagtttcggagggccttggtctggtgggtgcatgaatttgcaggtagggcatgcaggtgatgacttgca

SEQ ID NO: 5256 - DNA, 256 bp, Gossypium hirsutum
  Clone ID: LIB3083-107-Q1-L1-H5
gccttctcgatatccgacgagggtatcatgatggacactcgccacgccattaacaatcggcctccgtacaaggagatcggcctcgctgtcgctcttctcgtctttggcacccttgggatcatcctgggtattttcatggccgtcaacaaagtcggcggtgaccgcgcccatgggcttttctttgcaatactcggatccattttgttcattccaggcttctattatacaaggattgcatattatgcatttaagggat

SEQ ID NO: 5257 - DNA, 284 bp, Gossypium hirsutum
  Clone ID: LIB3083-107-Q1-L1-H7
gggctgacaagcatttagatgagctgcaagcaaaaatagctgagggagctgcacctggtcttgcaattttgaagaacaaagctccaagatggcatgaacatttacagtgctggtgtttgaatttccacggtcgggttacagttgcatctgtgaaaaactttcagctggctgcaactgtagatccaagtcaaccaggagggaaaggagatgaagaaaaggttctcctccagtttgggaaagttggggatgatacattcaccatggattacaggtcacccttgtcc

SEQ ID NO: 5258 - DNA, 285 bp, Gossypium hirsutum
  Clone ID: LIB3083-107-Q1-L1-H8
gaatgaatgcaggaacaccggagagaggagcacggagagcccatgcctccatggcgttggttcaactcatcaatggagggtatcatgtaattaccaaagtagccctcaatgttggtgtcaaccagcttgtcttctgcgtcttccgtgatcttcttgccctctctcttcttgcccccctcggctatgttcgtgaaaagaaaagacaagaaaagaaaatggtgacaggggggcttgctccggggctgtcgcgtaaactgaagaggtattggaatgccggactgatac

SEQ ID NO: 5259 - DNA, 288 bp, Gossypium hirsutum
  Clone ID: LIB3083-107-Q1-L1-H9
gaagaaacaagcaaagttgctagaagtaaattgtaaccttaacaatgcagcttccaaattgaagcacaaagattacaagcaggctgcaaaactgtgtactaaggtattggagcttgatagcgggaatgtgaaagcactctacaggagggctcaagcatatattcaacttgttgacttggatttggcggaggctgatatcaaaaaggccttggagatcgaccctgataacagggatgtgaaattggagtaccgagtcttaaaagagaaaatcaaggagtacaacaagag

SEQ ID NO: 5260 - DNA, 227 bp, Gossypium hirsutum
  Clone ID: LIB3083-108-Q1-L1-A1
ttagagtacctacatatgatggggattgtttaccgtgatctaaagcctgaaaacgtgttggttcgatcagatggtcacattatgctcacggatttcgacctttcattgaaatgcgatgagtccacatcaacgccccacattgtttccgatcaaaaaccgccggtaccaggtctgcggaatgactatcctaaagatcatcctcctttcacatcggcttcttgcatcat

SEQ ID NO: 5261 - DNA, 281 bp, Gossypium hirsutum
  unsure (1)..(281): unsure at all n locations; Clone ID: LIB3083-108-Q1-L1-A10
gnttttttttttttttttttttttttttttttttcgggggttttttttttttttttggggttttaaatcaaaaacaaccttattttagggggagcttaaaagtagcagtatgagtttatttttagttttgagtacctgattttggctagtttatatttatcaaatcttattttcctgaacaaatttattttatgttttaggggggaatcctaagtttttctttttgttggcttagtttattaatatatttacaatcggaagaaaattttttgtttcttttc

SEQ ID NO: 5262 - DNA, 350 bp, Gossypium hirsutum
  Clone ID: LIB3083-108-Q1-L1-A11
tgctttctttctagtcatctatgcttctcttctattgcgaccatcttcttctctttatttccaaaatgcagcatctcttgttagatgctcatttcgtgagtgccatcacaagttgggaaaaggggtgaaaatggagaaaattttggagccaattaagaagaatttgaccatgttagaggtaccaagttttgttgatgtatttggtggagggttgaagattgggatggtgaactttgaaggtgatcaagatcttagccaatggagaaaacaaggtgagacgatcccagtccatttcgatcgagttcccgaggctctcaaatggcaagacttgttccctgaatggattgatg

SEQ ID NO: 5263 - DNA, 378 bp, Gossypium hirsutum
  Clone ID: LIB3083-108-Q1-L1-A12
ctcgaaatagccggtcaattcaccctcttcattcgtcgtgtaaagtccactcaagtggccaaccagctgctcggtcagctcaacaattccaacaatggtatgaccgtttttgcaccaacggacaatgctttctccagccttaaatcgggcacattgaattcactcaccgatgaacaaaaagtggagctggtgcaattccacatcgtcccaacatacctcacctcgtctcagttccaaaccattagcaatcctttgagaacccaagctggtgatagtggcgatggcaagttccctctcaatatcaccacttcggggaactccgtgaatataacaacagggttgacaaacaccagtgtttccggcactatttacactgat

SEQ ID NO: 5264 - DNA, 368 bp, Gossypium hirsutum
  Clone ID: LIB3083-108-Q1-L1-A2
taattttctctcttttgctctcatttcctgcaactccgatcgataaaattccatcgttggttggaaagagcaagagaggaaaattaaatcaaagataaaacgattattagcaataaaggacgacaatgaagaactgtgaaagactcgctaatttagctttagcagggttgacgttggcaccacttgttgtgaaggtggaccctaacttgaatgttattttgactgcatgcctcgcagtatatgtgggctgctatcgttctgtcaagccaactccaccattggagacaatgtctaaagagcatgctatgcgttttccgttcattgggagtgcgatgctgttatcacttttcttactgttcaagttctta

SEQ ID NO: 5265 - DNA, 341 bp, Gossypium hirsutum
  Clone ID: LIB3083-108-Q1-L1-A3
gcaggtagggataggagatacatctggaggaagttcaggccgaaatgatcattattgctggatgcgccctgaggacattgattacccccgtcctgtatatgaatgtcatagttgctccgatcttgctgctgaaatggctgctgctttggcttctgcttccatcgttttcaaagacaacaaagcatactctcaaaagcttgtccatggtgcccgaacactctttaagtttgctagggatcaaagaggcagatatagtgctggtggttctgaccctgccctcttttataattcctcaagttactgggatgagtttgtttggggtggagccttgttatactatg

SEQ ID NO: 5266 - DNA, 408 bp, Gossypium hirsutum
  Clone ID: LIB3083-108-Q1-L1-A6
tttcttttttcttatttgtattttgatttgcgagtaaagaaaagaaaatggataagaaaaagattgctgtcccacttgtatgccatggccattcacgtcccgttgtggatctcttttacagtcccgttacccctgatggttttttcctcatcagtgccagcaaagattccagtcctatgctgaggaatggtgaaactggagattggataggaacctttgaaggacacaaaggtgcagtttggagtgtttgcttggatacaaatgccttacgagctgcttccgcttctgctgacttttctgcgaaagtgtgggatgcactaacaagtgatgtcttgcactcatttgaacacaagcatatagttcgagcttgtgctttttcagaggatacacaccttctattgactgggg

SEQ ID NO: 5267 - DNA, 373 bp, Gossypium hirsutum
  Clone ID: LIB3083-108-Q1-L1-A7
ggaggattatggtccgaggtggaaatgtgaagtggcgtgcgcttgaggcttgacacaggaaactactcctggggaagtgaggctgtgactcgtaagaccagaattttggatgtggtgtacaatgcgtctaacaatgagttggttcgtacacaaactctggtgaagagtgctattgttcaagtcgatgctgctccattcaagcaatggtatctccagcactatggtgttgacattggccgcaagaagaaagcagcagcagcagccaagaaagaaggagaggaaggtgaaactgctactgaggaagtgaagaagagcaaccatgtcttgaagaagctggagaaacggcagcagagtcgcacacttgacttccata

SEQ ID NO: 5268 - DNA, 236 bp, Gossypium hirsutum
  Clone ID: LIB3083-108-Q1-L1-A8
aaccgaatgcagctcaatttgtgtttgttcattaaacgaacataaaaattttgttcatactcgtttatttaacttaataaacgaacataaacgaacgttatacaaacgattcataaacaacgttctttccatctacacctgtgatacgattttaccgtaccatccgattaaaaaacctcttaaaatccatttgaatacgtctttttcattattataataagagtgtgaattaaact

SEQ ID NO: 5269 - DNA, 342 bp, Gossypium hirsutum
  Clone ID: LIB3083-108-Q1-L1-A9
gttgccggtcgtcggtggaagacacgtggtcattccgacgacgaatgcggaggtatcggaggccgaaatgtccgaaatagaattgatgaaggaaaggtttgctaaacttttgcttggagaagatatgtcaggtggagggaaaggagtttgtactgctctggccatctccaatgccattacaaatctttctgcttctgtgtttggggaactatggaaattagagccattatcaccacaaaggaaaatgatgtggcgtaaagagatggactggcttctgtgtgtaagtgattccatagtggagcttaaaccgtcattgcaagagtttccaggaaggggaacctt

SEQ ID NO: 5270 - DNA, 366 bp, Gossypium hirsutum
  Clone ID: LIB3083-108-Q1-L1-B1
gtggaggttcctagtgcagtttatcaagcttcttcacctgttgaaacgaataaaggaaacttgagcactgtagcaagtggtaatagtggatccgggtcattaaaatcaactttgaagagctcttctctaaatccgaatgctttctataaaggagggggattgtcatcaggtaatctatctcaaggttatccggatccgagatttagctatgatggggttcagtcaccgattccttggttagatatgtcaatgtcttgtaatggacaatccgaacatgctgcaaatggtgggttttcatattcaagcaacctttcatctggcaggaatcagaaccttcatcccttccctcatgtcatgaatttgcac

SEQ ID NO: 5271 - DNA, 406 bp, Gossypium hirsutum
  Clone ID: LIB3083-108-Q1-L1-B10
ttctttttgtagcttctcataacttagctttttgaagggttcttgcagagggtggaagtttgaagctctctcttaaagataggaccgtcgttttggcccttgcacgagtggatttgctggctttttttggttattctgtttcttcacatgcttagaccaacaaagtaatgctggcagtatgggaaagaaaggaagttggttttctgcaattaaaagggttttcataccacactccaaggaaaagctaagtaatgaatcggataaacgaagtggtaaagaaaagaagaagaaaggcctaggaaaattaaggcatggagaaaccaattcctttattcccctctttagagaacccagcagtattgagaaaattcttggggaggctgaaagagagcataaactagtattc

SEQ ID NO: 5272 - DNA, 382 bp, Gossypium hirsutum
  Clone ID: LIB3083-108-Q1-L1-B11
gaactagtccttgtttttttcttttttttttcttggggaaaatctcattgtttagacgctgagaatcaatctcaattctcaggtatttatttttgttgataataatggcgggtcagaggaatagctatgggaagcgggctcattctcagtctgactattctgagaatggatcaaataagaggagaaatgcaggtgatgacagggaacaatttgttattgattcagatgataccgtttataggtatttgtgccctgcaagaaagataggaagcattattggaaggggaggggagattgttaagcaattaagagcagacactaaatcaaagattagaattggtgagacaattcctggttctgatgaacgcgtggttactatcta

SEQ ID NO: 5273 - DNA, 222 bp, Gossypium hirsutum
  Clone ID: LIB3083-108-Q1-L1-B12
aggaatttaaggcaaaggctcaggtttctcatgcacggcgcagatgaccttattgattgctaccatttgaagagtaggaagggtatgagccagctggagttggaggatgaggttcaagatgatttaaaacgtgcaactggagagtttgtcaacgataatgatgacgccaataagctcaaccgcattcttcaacttactggatttagcgatccagtatatgct

SEQ ID NO: 5274 - DNA, 359 bp, Gossypium hirsutum
  Clone ID: LIB3083-108-Q1-L1-B2
catacataatcagcatgaaatgtatttaggtacaatattatatatcataaacattagaacgggtaaaatctgcagactgatgtagtttcatttaatgtaaatatcaatgaaatatgtatagttcatagcattgtttaggaaaattacacactgctaagaataaaatgggtacaaactgttcaaaacttagtcaatagacatgtttcagtccacttacttgcaatgatttcaattctaagaaacacataatatcatcaacaatcaatggaaatgcagctctgtgacacggtggtgctatcggcggtgctgacaaacgggttgatccgaacccaaacaagagagaagacagaagccaacaa

SEQ ID NO: 5275 - DNA, 396 bp, Gossypium hirsutum
  Clone ID: LIB3083-108-Q1-L1-B3
gagaaaaggcgtaaagtggccgactccgactcgccgctcggacatttacgcaacgcaacgcctcattgaacaacgaaagcggcggtggtttagggttttagtagagcaaaaacatagaaaagaaggaagtaggtaggcatggtgaagctcacggccgacttgatttggaagtgtcctcacttcttcaatgccctcaaagagcgagaattggatcttcgaggtaacaaaattgctgtaatcgaaaacttgggtgctaccgaggaccaattcgataccatagatttatctgacaatgagattgtgaagctggacaacttcccttatcttaaacgcttgggtactttacttataaacaacaaccgagttactcgtatcaatcccaatattggggagttc

SEQ ID NO: 5276 - DNA, 348 bp, Gossypium hirsutum
  Clone ID: LIB3083-108-Q1-L1-B4
tcgccccaagcaaagttgttcagtggatgcttcaaattcctggtgcacggggtacattggctgcattgggaaggacaagtttggggaggaaatgaagaagaactcaaaagctgctggtgttaatgttcaatatctcgaggatgaaactgcaccaacaggaacttgtgctgtttgtgttgttggtggtgaaaggtcactcattgcaaatctatcagctgctaactgctataagtctgagcatttgaagaagcctgagaattgggcgttggttgagaaggccaagtacttctatattgctggatttttccttactgtatctccggactccatacagcttgttgctgaaca

SEQ ID NO: 5277 - DNA, 402 bp, Gossypium hirsutum
  Clone ID: LIB3083-108-Q1-L1-B5
tggatttttggtttttggaataattcctcttcgtttggggtatcgtttcatagacaacaatggcctccctcgaaactggctatttgttgggatgattcccacgttacttctcaacatccgtcgccctcatgataaagttgcccaaatcctcagacgaagcaatggtaccttcttttatagaggactttggtttactaacaccagcttcttagccacctccgatcctgagaatgtgcgtcatgtattgagctccagttctgtttatttgaaaggtcctgaatggctgaaacagtttgatatcttcggcgaagcacttttcaattccgacggtgaagcatggaaatgtcaccgcagagttttccatgctttcttgaatcaccctcagttccggcaatcactttc

SEQ ID NO: 5278 - DNA, 380 bp, Gossypium hirsutum
  Clone ID: LIB3083-108-Q1-L1-B6
aagtcacatttttagtagtactgaagtgcaacccggaagggggcgatccgataatactagcgaacactaccgatgtgagccattttggttactttcaaaggtcaagcgtcaaggagttcatcgtcttcgtttctcgaactgttgctaaacgtactccttctggtcagcgccagtccgttcagcacgaagagtacaaggtacatgcttacaacagaaatggactttgtgccttgggatttatggatgatcattatccagttcgaagtgctttttcgcttctcaaccagattctagatgaatatcagaaaaattttggggagtcttggagaaatgcacaagctgatagcactcaaccttggccgtatctgaatgatgctttg

SEQ ID NO: 5279 - DNA, 378 bp, Gossypium hirsutum
  Clone ID: LIB3083-108-Q1-L1-B7
ggaagagctaatggaaaaaagtgaaaagggtaatggtggggctcctgctacaaggtctccaatggctttaatggggtcatctagaaatgaaaaccaagaagtgaataccagcatgagaactgccgagaccatgctgcggttggtgcctatggctttaggggttgctgcacttgttgtcatgctcaaaaactcacagtccaatgactttggctccgtttcatactcagatcttggtgctttcaggtacttggtgcatgctaatggtatttgtgcaggctattcccttctttcagctattatagcagctgtgcctagtccttctactatgcctagagcttggactttcttcctactcgatcagattctaacatacgtaat

SEQ ID NO: 5280 - DNA, 348 bp, Gossypium hirsutum
  Clone ID: LIB3083-108-Q1-L1-B8
gactgcaaaatgcaggggcatatttattcaatgccatagaaccttgaaacctaaagaacaactaaaagcgttgataaaagcaattatttttactcgtaagcttccccagcctagtggccagctcacattagcatacgacccacacacatacaaacttaacacatcaacaataactggacaggtgttcggcaccacacttaaaagccaccgcggaggcgaaggaccaggtgcaaagtggattccttctggatgttgtaatctgcaagggtcctcccatcttcaagttgcttcccagcaaaaatcagcctctgctggtctggggggattccttccttatcctggatcttg

SEQ ID NO: 5281 - DNA, 390 bp, Gossypium hirsutum
  Clone ID: LIB3083-108-Q1-L1-B9
ctttccgagcctgcaccttcctcggaggatgtttactcttctcttgatggccagccaagcctgaaaattgatatgaatgttgattcccaagaacagcatgctactatggatttggaaacaggtggaaacatatctggtaatgtgcctttggttgtggaagacaacggagataatatcacaaagacaccggctcaggatgctggaacaagttctgaggttgttgcagaatctgtaaatcctgacacagtctctaccaaaccggaaagcatcgaagaagcgcttgaaggtgaaggttttaccgatcatgccaagattgacagtacatgtgtcttgggtggagataccgctgaaaaccaaactgcaatggaagaatagctgttttcggctttt

SEQ ID NO: 5282 - DNA, 352 bp, Gossypium hirsutum
  Clone ID: LIB3083-108-Q1-L1-C1
tttttctttttcataaatattaatatcactccgctcatagcataaaaaccgatttttcaaatcttacaacgggaaaaacaaaacaatatcttgtaaggctattcatgttcttatggagcatcataagtaaaagacaagcatttctaacaacaaaaaaatgacacgcaaacatgactaaatttattccataggcataatttgagaaacctcacacgaataagaaagaacaggatacccttccagggtgaacccatcatcttcaaaataaatgatattgcgatagtagcatcaatattcttcaccttccttttcatcatctccaccttcaacaccaactttttcataatccttc

SEQ ID NO: 5283 - DNA, 397 bp, Gossypium hirsutum
  Clone ID: LIB3083-108-Q1-L1-C10
ccaaaattaaaaaatctcaccatcttaccatcaaaagcggatacttttatcttccatccagacaagatattcattaatgaagaagataaatctcctacttacgaaatgcaagagcttgtcaagacaactaggaaggtcatcttcatatagtagcttaagatcgaaatcaactcgagaagatcatcaccgttatatatgggatcatttaagaagaagaacgagtcggaaccaagatggagacaattatgataatgatgatgaacatcaatgttacgaaacggattatgtcgcgagtacgacgaaacgatacgtggttagatcgaaataccttaaacatccattgatgcatgctttaatagagaggcctaaacaaaagcatggagggggaagatcacat

SEQ ID NO: 5284 - DNA, 397 bp, Gossypium hirsutum
  Clone ID: LIB3083-108-Q1-L1-C11
gcgacattccaccaaccgggttgacgatgtcatcggcgtttatggggaactcgacgtcgatacaagagatgcttcgacgtgtttcggaacagttcacagtgatgtttaggaggaaagcatttttgcattggtatacaggggaagggatggatgaaatggagtttactgaggctgaaagtaatatgaatgatttggtttctgaatatcaacaatatcaagatgctgtggttgatgaagatggtgaagggtatgaagatgaagctgaggaaaattgacgggatccttttcaactttttatagtaatggcctagagaaaaaaaatcaaatgtggtgttcattttgatggttttaaataaggaggccatgttttttcatttgtgttgggatttttagtaat

SEQ ID NO: 5285 - DNA, 394 bp, Gossypium hirsutum
  Clone ID: LIB3083-108-Q1-L1-C12
cttgaatttatttttttgaagatggagggtaaagaagaggatgttaagctaggagcaaacaagttctcagagagacaacctattgggacatcagcccagacagacaaggactacaaggagccaccagcagcacccttctttgagcctggtgaactcaaatcatggtctttttacagagctggtattgccgagtttgtagccaccttcttgttcctttacatcaccgtcttgactgtcatgggtgtgtctcagtctaaaaccaaatgtgcaaccgttggtattcaaggcattgcttgggcttttggtggcatgatctttgctcttgtttactgtactgccggcatttcaggtggtcatattaaccctgctgtgacctttggattgtttctagcaa

SEQ ID NO: 5286 - DNA, 397 bp, Gossypium hirsutum
  Clone ID: LIB3083-108-Q1-L1-C2
aggaatctgtatgtcgcattcataaggcaaaggaagaaactgcagatgcagagaaattggtcgactctctaaagtccgagttagaaactatgaaggaagaaaagatccaagctctagataacgagaagcttgcggcttccagcgttcaagttcttttggaagagaagaacaaactcattaatgagttggaaaattctcgggatgaggaagagaagagcaagaaagcaatggaaagcttagcttcggcattacacgaagtttctgcagaagctagggaagctaaagagaagctgttatcgagtgcagccgagcatgaacattacgaggcgcagttagaggatctaagattggtcttgaaagcaaaaaatgataagtatgaaaccatgcttgatgatgc

SEQ ID NO: 5287 - DNA, 374 bp, Gossypium hirsutum
  Clone ID: LIB3083-108-Q1-L1-C3
gaaccacatttacatccaccaaaggagcagctgcccaacatttcttactgcattacaagtccacctccatggcccgaggccatccttcttggtttccaacattatcttgtgatgcttggaacgacagtgatcattccaacttcacttgttccccagatgggaggtggaaatgaggagaaagcaaaggttatccagactctactctttgttgctggtttgaacacattattgcagtcactgtttgggtctagattgcctgctgtgatcggagggtcttatacctttgtcccaacaacaatctcaattattcttgctggtcggttcagtgacagttcagatcctattgagagatttaaaaggataatgcgggcaac

SEQ ID NO: 5288 - DNA, 386 bp, Gossypium hirsutum
  Clone ID: LIB3083-108-Q1-L1-C4
aaatattcctttgtttagccagggcagctcgtaaaatctctgggttacttactcgttcactctctgtttcatcttcatctgtttctactttgttttcatctctagggaaaaacagtggcagaaatggaattgggaaaaggttcagcacagctgcagctcttgaggatctgattgttccaccggttcaaatagcttacactcagaatttaattgatgggaaatttgtagatgccgcatctgggaaaacatttccaacttatgaccctcgtacaggggatgtgattgccaatgttgctgaaagtgatgccgaggatattgaccgagcggttgccgccgctcgcaaggcattcgatgagggaccgtggccgaaaatgactccctatgaa

SEQ ID NO: 5289 - DNA, 387 bp, Gossypium hirsutum
  Clone ID: LIB3083-108-Q1-L1-C5
gaaatgaaacgatggggtcctttcatgaataaacataaaatgttattctcatatgccatttcaagatgcaggcatcgaaatgacaccggcaaataggaaaaataaaaacaaaattcaattagcaagagggttcttaacaatcagaaacttgaaaacaacagtggagaggagatcaggaaagtggaatagctttatttaaattcaggcttttctgggtatgtgcatccagacctttggatgataacgttggatgcatagcaaccagcccttacgcaatcatcaatggacttcccttgaaccaattgtgaaagaaagcctccaacaaaagcatcacctgcaccatttgtatcaacaagcttttccttgggtaacaaaataacagggaat

SEQ ID NO: 5290 - DNA, 363 bp, Gossypium hirsutum
  Clone ID: LIB3083-108-Q1-L1-C6
ctacctgtttactgaaggctaagaatagcctggagaggggcgagcccatgcagatatcgagctctctcatggtgagtcatgtcaaattcatggacaacagaagcagaataggaaacctgaagctgttgatattgatcgttggctacagaggaatgaagcccttggagctgcattcatacatgctgaagaggttggagcatactgacaacggcaatggtattcaaagcttgtcaaagctgatataaatggaaacgatcaggaaggctattcaattaaactacctggagatcctaagctaggagaagggaaacctggaaaccagaaccatgctattatcttgacacgacgggaagctattcaaac

SEQ ID NO: 5291 - DNA, 391 bp, Gossypium hirsutum
  Clone ID: LIB3083-108-Q1-L1-C7
aaacaatgatgcatctcacttgcaccaacatgcctgtggagaaaattgaccatgctcttgagaccattaagtctaatggcattcaaaatgttcttgcccttagaggtgaccctcctcatggtcaggacaagtttgttcaagtcgaaggcggcttctcttgtgccctcgatttggtgaaacatattagagctaaatatggtgacttctttggtataacagttgctggttatccagaggctcatcctgatgctattggaagtaatggtgtagcaacaccggaagcttatcagagtgatcttgcttacttgaagaagaaggttgatgcgggagctgatcttattgttactcaactgttttatgatactgatatctttctcaaattcgtcaatga

SEQ ID NO: 5292 - DNA, 391 bp, Gossypium hirsutum
  Clone ID: LIB3083-108-Q1-L1-C8
gcgtcgtggtactgttccgtaaccttattggccttaatattgatagggtcaatcagggcaaactccgtatcagatgaaccagtgagaggtagccagctccggaaccgaccctgcgatgaaatctatgtcgttggcgaaggtgaaacccttcactccatcagcgacaagtgtggcgatccgtttatcgtcgagcggaacccgcatatccatgaccctgacgatgttttccccggccttgttatcaagatcatcgcttcaactgataggaaattatagaggtagctgcttttacacattatacacacagaaaattttaatattgtatactgggttttggtcttcttttgtttcttagtgaaaagtctttgtaataagttgaagcctgtatact

SEQ ID NO: 5293 - DNA, 356 bp, Gossypium hirsutum
  Clone ID: LIB3083-108-Q1-L1-C9
ggatcattataccactagtggaattaatggccgactgggggtcaaacatggttgacaagtcggctttcgttatgagcgtgttggtacccgtaccggaagctaaaacggcattagtcgaagaaggagggattcccgttttagtggaaatcatcgaagtcggatcgcaaaggcaaaaggaaatcgccgtagcaatcttattacagatttgcgaatatagtgtgctgttccgtactatggtggcccgcgaaggagccattcctcccttagtcgctttgtctcagtccggcaccaatcgcgccaagcaaaaggcggagacattgatagagcttctacggcaaccaagatccggcaacgcc

SEQ ID NO: 5294 - DNA, 392 bp, Gossypium hirsutum
  Clone ID: LIB3083-108-Q1-L1-D1
tggaagtataataaaagccattggaagtaaagcaaaataccatatggggtgaatcaaagaagatgtgggcgattgcaggccctgcgattttggtatcggtctctcagttctcaatcggtttcgtcaccgtcgccttcgccggtcatttgggcgagctcgaactcgctgcggtcaccataacaacgaacgtgatcgaaggcttcgttttcggtatcatgttaggaatgggaagtgcactcgagacactatgcggtcaagccgtcggcgccggccaacacaacatgctcggaatctacctccaacgatcatggatcattaccggaataaccgctttatgtctaacaccatgttacctcctcgccacaccgatactaaacctactccgacaagac

SEQ ID NO: 5295 - DNA, 377 bp, Gossypium hirsutum
  Clone ID: LIB3083-108-Q1-L1-D10
cggattctatcttccatggcttccaatggcgcttctacggaacagggagttagggatgcgacggagaacagtttggaaaagatcaaacggcagctggcctctggctctggtaggaacttgctacaaggtccacttctcaagcgatctgaaaccttgaggaaatggaatgaacgttgggtgatattagaccccacaacagggaaaatggaatacaagactaggaggaatgagccaactgttaagggaatcatgacgttcaatgaaaacagcaccattgccatatctcctgttaactttcatggacttccaaagtacgaaggctgctgtttctatattgggactccccagaaaaatgactactttctttgtgcggagac

SEQ ID NO: 5296 - DNA, 391 bp, Gossypium hirsutum
  Clone ID: LIB3083-108-Q1-L1-D11
ctgaaacttacttcgatcaagctgttaaagcagctcctgatgactgttttgtgctagcatcatatgcaaggtttctttggaatgctgaggaagaagaagatggggaaaattttagtgaagtaccagagccaagctttatccatggagtttcttcaatgcctccacctttgactgctgcttcttaagatccttctctgacatggcttgtatatttagctatttttctgactttttttgttcatatttcctttttctttgtttttaagtagaaatgatatgagtgaattatgtgtagttattgagaactctgttttgccttttctcatccttgttggtaccatataatgtaaaagggaatataaataatatatgaaaaataaatcttccagtg

SEQ ID NO: 5297 - DNA, 406 bp, Gossypium hirsutum
  unsure (1)..(406): unsure at all n locations; Clone ID: LIB3083-108-Q1-L1-D12
cttggatccgttgaaaaaaaaaaaagcttcttcacatgcctaagtcttatacaactttgtttattgtgtctgctttattcaaaaacaccatgtcgaagaaaacaatcctgtcagtggagctgctgtgtccaaagtgcaggcagaaggtaatgcatgtaatttcagagctagtggggataacgtccatcaccctcgatccatcgaaaaatacggtaatggttaccggcgaagctgatccgtttaagatcattaagaaagtcaggaagttccgtaaacacgcatcgatcgtaagtataggggccgcanaagaggagaagaagaaggatgagaataaggatgagaagaaggatagccggaaagatgtagtgatatactcttcaaagacatgccagagatgtgaagtttg

SEQ ID NO: 5298 - DNA, 393 bp, Gossypium hirsutum
  Clone ID: LIB3083-108-Q1-L1-D2
atttggattatatgtcaagactaagtttccttattcatgaaggtattcccgtgaataccttggtaattccatgaaatccaattctttgcctaggaattacataatttcacagcttttccaagccagaaaatccagcaccaagtcagcagattctagtcttgactttggaaatgaagaagtaccggttgaacccaaaacagatcttgggctttccccttcatttatttcctctagtgaaaacctgaatatgagttccgaaagttgttgttcagaaaatgcaaccttcagtactaacagttcacctctgccaattggcagacctttgcaagtagataattctttggtaagtaaaccaagttcacttcctatactcctcagccatagcatggtgtc

SEQ ID NO: 5299 - DNA, 424 bp, Gossypium hirsutum
  Clone ID: LIB3083-108-Q1-L1-D3
ccccggcctgaagaaattcgcctctagctttgctttgtttttcgttaaccatggctcataacacgtcggaccctttcttccttttccaacttttactcattagtgtctcactaatgatcggtagccacaccgtctcgacagcggctcgacgtttattcgagacacaaacaacctcatcggagttgccacaattagcttcaaaatacgaaaagcaggaagagtctgaatatgaaaagccggaatacaaacagccaaagtatgacgaagagtacccaaaacatgagaagcctgaaattcacaaggaggaaaaacaaaaaccgtgcaagcaacatgaagagtaccacgagtcacacaaatcgaaggagcacgaagagtaccagaaagaaaaacccgagttccccaaattggaaaagccctaagagca

SEQ ID NO: 5300 - DNA, 410 bp, Gossypium hirsutum
  unsure (1)..(410): unsure at all n locations; Clone ID: LIB3083-108-Q1-L1-D4
tctaccagaagctttttcatcagagttgcagaagaagtttgctggcgagtacaacagtggcagaattgccaggtaagaaagggcttgaggttcttatccaaggtggggtcattgatgatgttgcgagacatctgcttgagcaatatggaatcccaaagagatacattgaagttcttgataaaaccaggaaataagaagtgataaatggttttgcgagttaaatacatcgatggtgttgagataagatagtacggtataagttagcggcattttttatgtcgaaatctctcggaagatgatcattgtggcgcttgttgcaactgcaaaaggagctttgattttgtttcatcatatnttgtgatacaacagtaatgggaagaacggcttgaaatatcaaaactactatcatc

SEQ ID NO: 5301 - DNA, 383 bp, Gossypium hirsutum
  Clone ID: LIB3083-108-Q1-L1-D5
attaatcattatcgccctttctcgaccaagaatcgtcggggggtacgacaacagcgggtccaagaggttttgcttttaaattccaaggatccttcagttacgccctttgttgatgagatacagagccgaattttgtgccattttcaagctactaaagaccaggaaggtggtgttgacgattccagctacataattcgatcgagttctcaaaatttgtcatcaaggttttcacagagtcaaactcaggatgatgaaggtaaattagaagagaaacagagtcttgaaaacccaaatggctcgaagattctcccatttgaatttgttgcattggaagcatgcctcgaagctgcttgcagctgcttagaaaatgaagcaaagacatt

SEQ ID NO: 5302 - DNA, 388 bp, Gossypium hirsutum
  unsure (1)..(388): unsure at all n locations; Clone ID: LIB3083-108-Q1-L1-D6
gtcgcgttttccggggaacatgttcacttaaagagaggtgttgtcttttggaaggacaggctgtacataagttggttgctctcttggatcacaccaacgcaaaggtggttgaagcagcacttgctgcactttccaccttgttggatgatggtgttgatattgagcaaggtgtgtccgttttgtgcgaggcagagggaattaagcccatacttgacgtgttactcaagaaacaaacagagaatttgaggagaagagccgtttgggttgtagagagacttttaaggaatgatgatatagcctatgaagtttctggagatcaaaatgtgagcactgcacttgttgatgccttccaccatgcggactacaganacccgcagattgcggagcg

SEQ ID NO: 5303 - DNA, 398 bp, Gossypium hirsutum
  unsure (1)..(398): unsure at all n locations; Clone ID: LIB3083-108-Q1-L1-D7
gaatttatatcccgagcgggagaccgagcaagaatcctgcgacgaggaagtatagtcaaaggtggagaacaccgaagctgaaggctttgatcaaataaacggttctacggaaaatgctgacgacggcaaaatctccccatcaaagcagcagcagcagcaacaacaacaaaaaaagaagaagcctctactccgtaaattcgggagcctactgaagaagaaaggaagtaacaacccgaaatagataacgaaaaacccgaaacccgaaatccgtaatggcatgacttttagccttaccagcaagcaggtatagcagataatgtcttgcaagctgaatgtgttttgcttcacttattttgnttggtttttcttctaaaaatgtcctcaaatagaatttaaaa

SEQ ID NO: 5304 - DNA, 374 bp, Gossypium hirsutum
  Clone ID: LIB3083-108-Q1-L1-D8
gacgaaatggcgcatagagtagatcacgagtacgattgccttttcaagatcgtattgatcggcgattctggagttggaaaatcgaatattctctctaggttcacgagaaatgagttttgtttggaatctaaatccactatcggcgtcgagttcgctacgagaactgtccaggtggagggaaagactgtcaaagcacagatatgggatacggctggtcaagagaggtatcgagctatcactagtgcttactacagaggagctgttggtgcacttcttgtctatgacataaccaagaggcaaacctttgataatgtccaaaggtggctacgtgaattaagggaccatgcggattccaacatcgtcctcatgatgac

SEQ ID NO: 5305 - DNA, 397 bp, Gossypium hirsutum
  Clone ID: LIB3083-108-Q1-L1-D9
gaaaactttacttcaatcctactggtatcaataccatgggtcaagtgaacgacctcaagaattcacctggacctggtaaaaaggaactcagacaagctaccaaccaagcccttaacttgcttcaagataactatcccgaatttgtggccaaacaagtgttcatcaacgttccatggtggtacttggctttcaataggatgatcagtcctttcctgactcagagaaccaagagcaagttcgtatttgcaagtccagccaaatctgctgagaccctcttcaaatatattgctccggagcaagtaccagttcaatatggtggactgagcagagagggtgaacaggaatttagcgtggccgatgccgtcacagaggttacaatcaagccagcagcgaagca

SEQ ID NO: 5306 - DNA, 409 bp, Gossypium hirsutum
  Clone ID: LIB3083-108-Q1-L1-E1
tcggcccaaaaaaaaaaggattagagtctcttggaatagtttgatcactgggtatgagcaaaatggtccagctagtgcagctcttcaggttttcttgaggatgatggattgtggaattgaaccagatgaactcacatatgccagtgtggttagtgcttgcgctagcttgtcggcaatcaagtcaggcaagcagattcatgctcgtgttgtgaaatgcaataagttgagggatgatcttgtcctgggaaatgcattggttgatatgtatgcaaaatgcaataaaatcaatgaagctagatgtatttttgataggatgccagttaggaatgtagtgtctgaaacctcaatggtaagtgggtatgcgaaggtagccagtgtgagaactgcgagatcaatgtttgcaaagatg

SEQ ID NO: 5307 - DNA, 103 bp, Gossypium hirsutum
  Clone ID: LIB3083-108-Q1-L1-E10
cctaataaaacattaatcaacttatccctttcattaccaactggacatacaacaaaagaatactacctttgcatccaaagattatttccatattcctacaaaa

SEQ ID NO: 5308 - DNA, 381 bp, Gossypium hirsutum
  Clone ID: LIB3083-108-Q1-L1-E11
aaataaacaaaacccagaacgacaaaaggatcaagaggtataatctatctgaaaacatatgcatataagtttgtgtggaattggtggtgggagaaggagagagtgaatatgattggtgaagcaaaagttgggaatgaagacttgaacttatgctttgagaagctgatgatggttgcagctgggaatagtgagggagttaagatgaatggtgtggggatcactgagtggaaagatatccctgtggagctgctgttgagaatcgtttcactactcgatgatcagactgctatcgttgcttccagtgtctgtagtgggtggagggatgccgtttgcttgggtctcacacaactctgtctctcatggtgtagaaagaacatgaac

SEQ ID NO: 5309 - DNA, 392 bp, Gossypium hirsutum
  Clone ID: LIB3083-108-Q1-L1-E12
caatggtttaggcgttatggcttctcttgtctcctgggcttttcctctctgtttctgcccttactcaaaccaaactaaccgataacccagcggatgagttggtggctgtgcttaatgccaatagaacggcacacaagtcatcatccctcgcagacaacccaggcctggcctgcattgctttgcaatatataaaagcataccaaggtgattgtgaagctgtaggagggtctgatgccaagaagcctcccgactccgaatttgcacaaacttttgccccttactgcggagtcgacgcgtcgaccctctcaccaatcaccggccgttttcttggatgccaatccaaatatgtccagccttccgaagcgttctcaatggtgataaaaaatgaaaag

SEQ ID NO: 5310 - DNA, 293 bp, Gossypium hirsutum
  Clone ID: LIB3083-108-Q1-L1-E2
aaaccacaagccagatatgtttcaattttcaaaattaaaaaaaatatttatatatatatttaaattttctccttcactgtttgatggttttttattgatgacaaagaatttttttttcaattatttacactcgagactggctttaaaccaagtttgagagcagcttcccatacaagatcaatcctatccacatcaattgctccaacttcatggtgactccaaccttctagctgatgaactacacctcctgcatggcatgcatgcaccactcctcgctccattgtatactcaca

SEQ ID NO: 5311 - DNA, 388 bp, Gossypium hirsutum
  unsure (1)..(388): unsure at all n locations; Clone ID: LIB3083-108-Q1-L1-E3
gaacagatttgtaaagccccaatgtttctatatgtgtggtggtttgttaaattatatcaaaattaagtgatttactctagtaggtggctacttcagtatggggttgaggtcactggttcgaatctctgcgtgggtgtggggtagttttattttattaaatgactttgtgtactattcagttgggggagcttgtgttgtaattaaactctactattccattgctcccattttgcatacattcctttgttttttttggcacttctagtgaaaaaaaacacacaaaagataaatatcttaaatttgtttcattatcttttttccctttctctaatctttgntattttcactcggcttttggttttggtcttattcattctattttttttgg

SEQ ID NO: 5312 - DNA, 382 bp, Gossypium hirsutum
  Clone ID: LIB3083-108-Q1-L1-E4
gggaaaatttttgttctatcaaggcgtgaaagagaggggggagattagcaaaacgcacatgaacgatatatgaagctccaggaacaagggaaaactgagcaatcaagaaaagatttagagcgcttaaccatgattaggcaacaaagggcagagactgctaataagagagaagaggagaatgctgcaaaagaacagaagaaagttgaagctcgcagataaaaattggctgaggaacgattatgatcggttaaccatgtggatcttttctctgttttatatatactgaagatactattcatcccattaaaaaaagggttttcaaattgatagttactatgaaattttctgaacttaattgtacttatgatctgcttttggatct

SEQ ID NO: 5313 - DNA, 392 bp, Gossypium hirsutum
  Clone ID: LIB3083-108-Q1-L1-E5
ccaaaaattttacttttgcgagagagaaatagcgaaggtctggattccacctcctcccgtccttggcgacggtgtttttgccgcttctttttcagcttgtacctgacttggatttagagggatttagtttccttttcaagacatggaacaagtgtgcttctggtcaaattgctaccttttccgagtgtttttcttccaagaagtactcgattggcggttccttgcccgtggagattttcttttggtttcctttgtcaattgcacttagttctcagtctccttttaacacacaacacaggagctggaatgctagttttttctgagataggtgttggatttttagcacatttccgcaatgaattgatgatacaacatccagatgaggattttgg

SEQ ID NO: 5314 - DNA, 408 bp, Gossypium hirsutum
  Clone ID: LIB3083-108-Q1-L1-E6
ggaaaatccacttcctgtttcaaaatcatcacttgcggcggagattttgctgagaacaacgacgttattcatgttcctgagcctgagattaagaaatcaaatgacaaaaagggatggagttttagaaagagatctgaacggcatcgggtgcttagcaacactgttatacaagaagctacttctggacttaaggaaagcccggaatctgccggttttaattttcaacagcctgatgcatccattattcctgaagaaacctccaccattgaatacagtgaagagaaacctcaggcgctgacaccaaaggagcacattgaagaagaatctaagtgtgtggcatcaaaaggataccctgaaaaaaaatctcagttgttgattccagagggctcaaaagttcctgaaccccgt

SEQ ID NO: 5315 - DNA, 397 bp, Gossypium hirsutum
  Clone ID: LIB3083-108-Q1-L1-E7
tacctatatgcagccagtgaaactcaaatccatgaagacccgaatgtggctcttttctttctggaaaaggatatgcaccccggggcaacaatgagcctgcatttcactgaaaatacagagaaatcagctttcttaccttatcaaactgcccaaaaaataccgttttcatctgacaagttgccagaaattttcaacaagttttcagtgaaacctggatcactgaaggcagagatgatgaagaacacaattaaggagtgcgaacagccagcgattgaaggagaggaaaaatattgtgcaacctcactggagtcaatgattgactatagcatttccaaactaaggaaaagtgatcaagcagtctcaacagaagtggaaaaacaaacccccatgcaaaagt

SEQ ID NO: 5316 - DNA, 370 bp, Gossypium hirsutum
  Clone ID: LIB3083-108-Q1-L1-E8
gaaagatctaaagtcaccattctcgcctaaaacaatggatttcagagtcatgggtttcgattcaccactgttccataccctccaccacatgatggacctcaacgaagacggcgataacaagaacaaccccaacgccgcgtcaaggacctacgtacgagacgccaaagccatggcggtgacaccggcggacatcaaagaggactcgaagtcgtacatgttcgttgtcgacatgccagggctaaaaccgggggacataaaagtgcaagtggaggaagagaatgtgctgttgataagcggagaacggaagcgagaggaagagaaagaaggggcgaagtatattcggatggaaaggagggtggggaagttgatg

SEQ ID NO: 5317 - DNA, 318 bp, Gossypium hirsutum
  Clone ID: LIB3083-108-Q1-L1-E9
cgtcaaactagccataaccattcacgccttcattctcgactcccttgattttctcaagctacctaatattacattaatcaacttatccctgtcattaccaactgggtctgcaacaaaagaatacttcttttgcatcctttgcttctttccatagtcctccaaatatttttcggtcttcatgctttctccagcagcaccagacggcttgacatcatattcagaacaatcaaccaaaccctcagagttcgctgaattatctgttttatccttaactttcttactactgtaccatgaatcaaagatttgcagcaaagagct

SEQ ID NO: 5318 - DNA, 342 bp, Gossypium hirsutum
  Clone ID: LIB3083-108-Q1-L1-F1
gtctggtcttaagtcgtatggttctctgccgaagcctcggcctatctaaactgatcgagagaaaaacactacacgtgtaacgctcttaacgcctactgaccgatttttactcatatattcgatttttattgagatttattttttgcatgaattttcattgaaaatggaaacatcacctttaatatttagaatttgtgatatattcggtatttactttccttttggacaaagatccctgcttattggatagcttgctttaagataaaccttggggctcatatttattaaatagggcctgtgattggtgatcatcatcattagaaaaagtagacaaaaagaaat

SEQ ID NO: 5319 - DNA, 358 bp, Gossypium hirsutum
  Clone ID: LIB3083-108-Q1-L1-F10
cttggatcgtatccgaaagcttgctgataattgtactgggctccaagggttcttggttttcagtgctgttggaggtggtactggttcaggtcttgggtctcttctccttgagcgtctctctgttgactatggaaaaaagtcgaagcttggtttcactgtctatccttcacctcaggtttctacatctgttgtagagccttacaacagtgtgctgtccacacattcactccttgagcacactgatgtttctgtgcttctcgacaatgaagcgatatatgacatctgcaggcgttcccttgacattgaaaggcccacttataccaatcttaaccgcctcgtctctcaggttatatcatct

SEQ ID NO: 5320 - DNA, 384 bp, Gossypium hirsutum
  Clone ID: LIB3083-108-Q1-L1-F11
catggacctcctggaaccggaaaaactacaacagtcggggaaattgtactacaagaagtgaagcgaggatcaaagatacttgcttgtgctgcttcaaatattgctgttgacaacattgttgagcgacttgccactcacagagtaaagatggtcagattggggcatcctgctcgattattacctcaagttttggacagtgctcttgatgcaaaggtactacgaggagataatagctctcttgcaaatgacattagaaaggaaatgaaggcactaaatgggaaattattgaaaaccaaagacagaaatacaaggagagagatccagaaggagcttagaactctttcaaaagaagagcgtaaaaggcagcagcttgctgttactgat

SEQ ID NO: 5321 - DNA, 377 bp, Gossypium hirsutum
  unsure (1)..(377): unsure at all n locations; Clone ID: LIB3083-108-Q1-L1-F12
ctctcattgtaactactctcacccttcgggtagccattacgagtgcacaaacaccagctgcctcaccttccagtacgccaaccaccaccaccaccactccaccttcaacttcgccaccacctacaacttccgcaccacctccttcaacaacccctccacctacaacttcagcaccacctccttcaacagcaacgcctccaccttccaccacgcccatcgcgccagctcaaccacctgcaacaactccccctcccactgttgcaccagctacaagcccaaccgtnccaccgncacaaactccaccacctcaaccacctcaaactcctccaaccacagctccagctcaaccgccagcattgccaccaccatcaccacca

SEQ ID NO: 5322 - DNA, 396 bp, Gossypium hirsutum
  Clone ID: LIB3083-108-Q1-L1-F2
cagtaatgtttaggacagtgatggagtatcagttgaggggaatcatgaatcaaaggaagaagatagcttcgagaaccatcaaatccgagaggatgttaaccagaatacccctgctgatgcagttttgtatttagaggaatcattggctaacttcgaggaggagaggctatccattcttgagcaactgaaggtcttggaagagcaattgatttcattgaatgatgaagaagaacaacaacattttgaggatataaaatcagttgagtatttgtacgaagagaatggtaatggcttccatgagattcataatttcggccatgaaacaaatggggttgccaatggtcatttcaagggagtgaatgggaagcatcaccaagacaaaataattcccgtggc

SEQ ID NO: 5323 - DNA, 293 bp, Gossypium hirsutum
  Clone ID: LIB3083-108-Q1-L1-F3
gtaactgtttctatggcatcggaagctcaagataatcgggcaaatgtgtcttcatgtctgggtgaattggatgaagttgcaggatcttctgcagcagatgggcctgtttcttgtgattcagaggcattgatgctttcttctgtattaacttcaaattgtcagttccctgaactgactaatggtatcgtttgttgcacattaaatactgaggacccagaaattccttgcaatgaagatgtgttctccaaacagctgtgcccgtcagttgtttcctcaacacaatacgttttcaa

SEQ ID NO: 5324 - DNA, 393 bp, Gossypium hirsutum
  Clone ID: LIB3083-108-Q1-L1-F4
actccctttcttttttttctgcatctgcttttatttctggacagctcaaaattaataattataaatcaaatcaagtctctttcttccttatcctttcgatctgctaatcaagtcatttcaagattctttttctgaacaagaaaaagaaaaatagtaggacaatgccgtccttggaggatgagctgtttccgtcgacgccagggaagttcaaggtcgacagagcacacaatatgaaccgtcaattccatcgttgcttcgcttcaaccagcaccatgtttttatgggctcttttcttgatcgcattgacggcgtcgtatttgcgcttccagagtttcgttgattctggtagccgatatttcagtgcttcatggggtggtatccaatgggaaaaac

SEQ ID NO: 5325 - DNA, 407 bp, Gossypium hirsutum
  Clone ID: LIB3083-108-Q1-L1-F5
tgcacatttattcatcgatacgtgaaatccaaccctcgggaagttgaaaatgctacatggatgctaacagtattccattgttttggtcagtatttctgcctacactttgaagccttccagttgggaatggctccagtttacatggcatttatccgtttcatgggtgacgagacggaagctaggaactatagctacagccttgaagtcggagcaaacggacggaaacttatatgggaaagcgccccacgtagcatccgtgatagtcaccggaaagtcagggacagccatgatggtctaattatccaacgaaacatggcacttttcttctccggtggggatagaaaggagctgaaactgagggttactggacgaatatggaagggacaacaaaattcagatgccaacat

SEQ ID NO: 5326 - DNA, 356 bp, Gossypium hirsutum
  Clone ID: LIB3083-108-Q1-L1-F6
ttatctttttgtttcaatcattgttctcttatccgccggtgttgtctcaggttcgggttcggtcgggattaactacggtcgtgtagcaaacaacttaccgtcaccggaaaaagtcgtggaactattgaaatcacaaggaataaacaaagtgaagctttacgacaccgacgcgacggttttgacggcgttagcggattccggtataaccgtggtcgtcgcacttcctaatgaactactttcatccaccgctgctgatcagtcgtttgcagacaactgggttgaagcaaacataacaaagttttacccaaagacaaaaatcgaagccatagctgtcggtaacgaagtgtttgtcgatc

SEQ ID NO: 5327 - DNA, 399 bp, Gossypium hirsutum
  Clone ID: LIB3083-108-Q1-L1-F7
cttccagtgcttatttttttgggttcgctgtcgaagcctcgtcctatctaaactgatcatacgtataaaaccttcccttgaaaccctttgatacctcacgatcccattctaattcgatctttgctttagcttgagattcttcaggtgctgcaaggagaatgtggctgatgctgcataaatggaagcaggaatacctttgcaactataaatctatcacatatcttttggggattaatgatacgttcttgatggtgaacccaagaatccaacatcgtcctaccatctgctataggcctataaagccatctgatttagagaccttagaacgaatccacagtgacgtattttctatcaagtatgagtctgagtttttccaaaaggtcgtgaatggatgtgatg

SEQ ID NO: 5328 - DNA, 146 bp, Gossypium hirsutum
  Clone ID: LIB3083-108-Q1-L1-F8
gttgcatcagactaaatatgcggtggtgggggtaatggactagagcatgcggattaattctccaagcgcttctgatgaatgcaactatatcgcaacatccccattactccatacttggatttcgacgcttctcgaatcactgacat

SEQ ID NO: 5329 - DNA, 340 bp, Gossypium hirsutum
  Clone ID: LIB3083-108-Q1-L1-F9
tgtctattctcttcctttttgccctcttctccatgcaagatccatgctagagagtacttcagcaaattcccaagagttaacatcaatgagaaagagacaacaaccagagagcaaaagcacgagaccttcgttccccagaccacccaaaagccagaagaacaagagccaaggttcattcctgaaacccaaaatggttatggcctttacggccacgagtcaggctcaggctcaggctcaggctcaggctcaagccggcccagtttcaccaccaaagaaacctatgaaccctatgtcaccccttgtagaatcccacctgatgagccctataaacagcatcccg

SEQ ID NO: 5330 - DNA, 418 bp, Gossypium hirsutum
  Clone ID: LIB3083-108-Q1-L1-G11
cccaaacatgagaagcctgaaatgcacaaggagaaaaaaaaaaaaaccctgcaaacaacatgaagagtacgagaaagaaaaacctgagttccccaaacaggaaaagcctaaagagcacgagaaacacgaagtcgaatatccgaaaatacccgagtacaaggaaaaacaagatgaggataagaaacataaacatgaagagtaccacgagtcatacgaatcgaaggagcacgaagagtacgagaaagaaaaacccgagttccctaaatgggaaaaatctaaagagcacgagaaacacgaagttgaatatccgaaaatacacgagtacaaagaaaaacaagatgagggtaaggaacataaacatgagtttccaaagcatgaaaaaaaaaaaaaaaaaaaactcgacggcacgagggggggc

SEQ ID NO: 5331 - DNA, 356 bp, Gossypium hirsutum
  Clone ID: LIB3083-108-Q1-L1-G12
agaaagctgaaaaggatgtagtagctttgaagcaacagcttgatgctgctatgaagaaaaatgcagcacttgaagatcgagttggtcatctggatggggcactcaaggaatgcgttagacaacttaggcaagcaagggaagagcaagagcggaaaatccatgaagctgtttccaagaaatgtcatgagtgggaatcttccaagtctgagcttgagagtcagcttctgaatctcaaggcccaacttgaaaccgccaaaagtgacgctgctgcctcagttgatcctgaccttcaactgaagcttgatgcatgtgagaaagaaaattcaagccttaaacttcagcttcattctcgagct

SEQ ID NO: 5332 - DNA, 413 bp, Gossypium hirsutum
  Clone ID: LIB3083-108-Q1-L1-G4
aaattaaattccttcatttttttttactatttatatgctgattttgttcctctcttggcttcaaatcgtttactttggttccattgtttgagttgaagttagcaaatttctgggtttaaaaaagaaagaaagaaattcaccattttcttttaatctatttcttaatgattattactattccattttcacatgctttggattctactttaaccgtgtagaaatcatcatcatcacaagaatttgcattcttcaccctattgggcctttgctttttatcatttctctctggtcggcgagtgaaaaaaaaaagcagggtcttcaagaagtattcaactaagcaaagaagtgagcttggaagcagaggattttgaggattttaaaaacgagcttaaaaaccatagatgttaaagaag

SEQ ID NO: 5333 - DNA, 420 bp, Gossypium hirsutum
  unsure (1)..(420): unsure at all n locations; Clone ID: LIB3083-108-Q1-L1-G5
tcggccacgaaagtttttttttttttttttttttttnncgcgtaaatattcaaaagcgtgacatccgattacaaagatcaggtcctcgcttctatttttaagcattacactgtttcaatcaangtcaaggtgctaggagagtgagaattnagttgattcatctttgcacctctaactcagttaatggtccatctaattctaaagtgtccgacaacanaacaaaacaacacaaagcaaaanaatagaaggaaaaaactttcttgaaactgcatattgaaagaaaagctcacgtattcagctcagctacaaatacttagcgcttcttcttgcttgctttcaaaccactggattttgatggggtaaccatcaggtagatgaatagacccacaattgatatcacagagacttgagatccatact

SEQ ID NO: 5334 - DNA, 371 bp, Gossypium hirsutum
  Clone ID: LIB3083-108-Q1-L1-G6
tctagggaagttgttagctctgacacaatcgataatgttaaggcgcaaaattcaagataaggaagggatccctccagaccagcagaggctgatatttgctggaaagcagctagaggatgggaggacccttgcagattacaacatccagaaggagtccaccctccacttggttctccgtctccgtggcgggatgcaaattttcgtgaagaccctgactggaaagaccatcaccctggaagttgagagctcagacacgattgataatgttaaggccaagatccaggataaggaaggaattcctccagaccagcagaggctgatttttgctgggaagcaacttgaagatgggaggacccttgcagattacaaca

SEQ ID NO: 5335 - DNA, 315 bp, Gossypium hirsutum
  Clone ID: LIB3083-108-Q1-L1-G7
cgaggtttcaacattactcatctctttcgacgacggaggaggctaattttgctgcggcaatggcagggacccgacaatgcgggatattatatttggccaatcctcttgacgcctgttcggatttgagtaataaagcagacaaagggtccaatattacttccctctttgcgctggttattcgaggagggtgcatttctgatgactaagcagggagagtgcacaaagcaagataccaacccgctatcgactatgacaatgatgatggtttctcggttgcaatggcaaggaatgctggtggcataaatatacatgctg

SEQ ID NO: 5336 - DNA, 322 bp, Gossypium hirsutum
  Clone ID: LIB3083-108-Q1-L1-G8
catctttgttagctttcatttttattcacttcaagcgggttacacagtttacagccatagaagcaacaacaatgtggagatcaatcataactttcattctcttcgcctttcttttcttccctatttcagcgacgaagataacactctacaacaaatgctcacatccagtatggccagggattcaacccagcgccggcaagccaattttagcccgcggtgggttcaaactcccaccaaacaaagcctactccatgaatctacctccgttatggtccggtcggttctggggtcgacacggttgttcctttgacgcctcgggtca

SEQ ID NO: 5337 - DNA, 394 bp, Gossypium hirsutum
  Clone ID: LIB3083-108-Q1-L1-G9
tcagtcttttgtttgtgacaatgggactggaatgggcggggctggatttgctggagatgatgctccaagagctgtattccctagcattgttggtcgcccacgtcacactggtgtgatggtcggtatgggccaaaaggatgcttatgtgggagatgaagctcaatcgaaaagaggtattttgactttaaagtacccaattgagcatggtattgttagcaattgggatgacatggagaaaatctggcatcataccttctacaatgagcttcgagttgcccctgaggaacatccggttctcctcacagaagctcctcttaacccaaaggccaatcgtgaaaaaatgactcacaatatgtttgagacattcaatgcccctgctatgtatgttgctatc

SEQ ID NO: 5338 - DNA, 392 bp, Gossypium hirsutum
  unsure (1)..(392): unsure at all n locations; Clone ID: LIB3083-108-Q1-L1-H1
ccaaccatggtttccactgataaaactgctgtcccactggggcaccaaagtctgaagctaccccaccatccgcagtggcggctgcggctaagtcccctgtcaactattcttttgtcgatgttgttcttcgggtcttattatttgccgctactctaacttcagtggtggtcatggctaccagcaaggaaaccgagctggttccagcgccaggcttccctttagttatgatccaactccaagcaaagttcaatcattcacctgccctcgtatatttcatagcagcattatcagtaacaggcttctacagcattatcactacgttggcatcactttcaatcgtccttaaccctacctattccaaaaacctctngctcttttttgctttcttcgat

SEQ ID NO: 5339 - DNA, 331 bp, Gossypium hirsutum
  Clone ID: LIB3083-108-Q1-L1-H11
attcgtccaatctctaaatgcttaccaacttattctgatgtcaatgaatgatcgatcaaaaataaaatcacatttacattgcacttgacaatggataggtcattattcgcactagctccaccaaactgtttcacaaagtagcaccatgaacaagtccgaacatagcagttgttcactcggattttatttcatcactgtcccgaaaacatagcacttgttctttttgttcaaccttccaatgccgatgctccggatataatctcaatcaattcagtggtaattgatgcttgacgggttctgttatatgtaagagttaaagcgatcaagcatg

SEQ ID NO: 5340 - DNA, 324 bp, Gossypium hirsutum
  Clone ID: LIB3083-108-Q1-L1-H12
gaacaacatgaggccgtcgaagttgttcagcagcacaaggactaggtgaccggaggatggtttctttggtaaaatcatagctatttttctgggccatttatatttgtttgatagtgaactgtggattaatatgcctcagaatttcgttttctttttccgaagttgttgcaatgctgaactgttcggtgtttcttaaatatgctaggcattttttccctttactaaattatgtgtttagtaggagcaaaccatttggaaatccaacaattttatcagatgttttgtcttctatttatgaaaaaccagttcaagtttgcgttgttg

SEQ ID NO: 5341 - DNA, 404 bp, Gossypium hirsutum
  unsure (1)..(404): unsure at all n locations; Clone ID: LIB3083-108-Q1-L1-H2
cgagccctcctctgctttttttaaacgagnncttttgcaaccaaaaagtgcgtgtgttctcttaaaagcgaaagaagaacgcgcccatcgtttcaanaattttnttccaccccatctcgagaaatgctttttcggctgatggaganagttaaanaatttctccatttcttcagccaaaagtccgtttggctgataatttcccattttaacctgccttctcccccaaaaagtttcttttctctggttctttggaggagctctatacccattttttcacattttcactttcaaaattttggcttactgctttcgattagaattttccctgaaaattctggattactactttgctttactctactctgcggctgtggtttggggattgagaatcgagataaaagaaa

SEQ ID NO: 5342 - DNA, 413 bp, Gossypium hirsutum
  Clone ID: LIB3083-108-Q1-L1-H3
aaaaaagaggggacccccgggcctggggaatttcggcccaagtccaaatctattccaccaccacggttgagggcattacggggttcgtaccgaaggacagcgcattcaaggctcttacgaagccttcattgtcaaatctaactgatgatcagttcaaatcagtgctcctttaccatgccttgccacgatactatgcccttgcggacttcaatgacctaagtgagaaaggccctattagtacacttgctggtggccaatacactttgcaattcaacgatgagtctggtaccgtccgcctcgattccggatggagcaaaacaaaagtcactagcgcagtacatacgtccaagccagtcgcagtctatcaaatcgataaagtccttcttccggaggccattttcgggaccgacata

SEQ ID NO: 5343 - DNA, 377 bp, Gossypium hirsutum
  Clone ID: LIB3083-108-Q1-L1-H4
aggtttcatcaaagcctgcgtgggtgtaagcagtacaccgcacatcctccaccgattccaattccatggctgctaccgtccccgcccccaagtgggctcagaagaccgtaactcttcctccccttcggcggggctgccatctcgttacgtctcagatattgaaggaaattaggccagatttatcagaatttaagtgtggccttgctcatctattcctgcaacacacgagtgcttctcttactatcaatgaaaattatgactcggacgttcgtgacgacaccgagacgttcctcaacaaaatagttcctgagggaagatctgcgccttggaagcatacgcttgaaggccctgatgacatgccagcccatatcaaatca

SEQ ID NO: 5344 - DNA, 367 bp, Gossypium hirsutum
  Clone ID: LIB3083-108-Q1-L1-H5
acagagcccccggctgaggaattcgatcgaggagggacttttttaacttggaaaagaaattgggacagggggccatttttgtgacttcaacactgatggaacaagggggtgtccctccttcttcaagccctgcagctttgctcaaagaagccattcatgtaattagctgggggtatgaagacaaaacccaatggggaagcgagcttggctggatttacggctcgagtacagaagatatcttaacacgattcaagatgcattgccgaggatggagatcaatatactgcatgccaaagttgcctgcattcaacggttcagctcccatcaatctatcggatcgactaatccaagttcttcgatgggcact

SEQ ID NO: 5345 - DNA, 397 bp, Gossypium hirsutum
  Clone ID: LIB3083-108-Q1-L1-H6
gaaaaacctcattatccaaaatccaaagccaatctcaaaagacccatcaaaaaagaaaaaaataacaaatctcaattttctcaaccctttttccttgtggaagagtaggaaaaaaaaataaaaacatgcaagaagaccctcaagccaagtccttggaacctattgaagattatccaagaagtgatatggtgtttgggtggataaagcccaaacaagataaaaagagcagcaagtgtcttgtttacattcttgttattatggtcatccaaggatccatcctcttggttttagccaacatttttttacgtgcccgaacacctgatttcgagatcggctccgtcaaagttagaaacctcaagtatggtaattcatcggttccatcttttaacttcacact

SEQ ID NO: 5346 - DNA, 410 bp, Gossypium hirsutum
  Clone ID: LIB3083-108-Q1-L1-H7
ccccctgttgttaactcgttgtgattgtgaagctttctttaaaagaatcctagttaactcgacgcgtttacccagaaagaggtgaagatgtcaactcctgcaaggaagagattgatgagggattttaagaggttgcagcaagatcctcctgcaggaattagtggtgcacctcaagataacaacattatgctttggaatgctgttatatttggacctgatgacaccccatgggatggaggtacgtttaagctgactcttcagtttacggaggattatccaaacaaaccaccaactgttcgttttgtatcccgaatgttccatccaaatatttatgctgatggtagcatctgtttggacattctacaaaatcagtggagtccaatttatgatgtagctgcaatactgacatt

SEQ ID NO: 5347 - DNA, 354 bp, Gossypium hirsutum
  Clone ID: LIB3083-108-Q1-L1-H8
agttgaattagctgctgagatgttgtatggtcttatacatgtacgttacatattaactagcaagggaatgtctgctatgttggagaagtacaaaagctacgattttgggagatgccctagagtttattgctgtggacaatcttgtcttccagttggtcagtcagatattcctcgtgccagtaccgtgaaaatctactgtgcaaagtgtgaagatgtatattatcctcggtccaagtatcaaggcaatatcgatggagcatacttcggggcgacatttccacatctatttctgatgacgtatggacacctaaagccacaaaaggcaacgcaaaactacatccccagagtatttgg

SEQ ID NO: 5348 - DNA, 273 bp, Gossypium hirsutum
  Clone ID: LIB3083-108-Q1-L1-H9
tcaaggttgtggacatcgtcgacactttcagacttgaggagcaacctgcttttgacaagaagcagtttgtgaccttcatgaagaggtacatcaagaacttgacacccaaattagagcctgaaaagcaagagtctttcaagaagaacatcgagggggctactaaatttttgatgtcgaagcttaaagatctccaattttttgtgggtgagagcatgcatgatgatggtagcctagtgtttgcatactacaaggacggtgccaccgatccaacct

SEQ ID NO: 5349 - DNA, 367 bp, Gossypium hirsutum
  Clone ID: LIB3083-109-Q1-L1-A1
gaaagaacagctcccgagcaaccagcgccgccctatttgccacaaaaccctagcgtacatactccacagacattgtcgtttactctcggcatccatggatatcgaggctgagatccgtgcactgcagcttgactctgctgaagataataatgccacgctcattcctgaagatgcaaaaccagaagaagttgaaatgacagataaggtggaggaaggtatgacagatgaggttgatactaaatctcagccagtcgaggctgagccaaaagtgaaagacaaggaagtagctgatatggattgtgcagaagtaccagatgaaatggaatcacaaaagaagcgccacttgaatgtggtctttattggtcat

SEQ ID NO: 5350 - DNA, 363 bp, Gossypium hirsutum
  unsure (1)..(363): unsure at all n locations; Clone ID: LIB3083-109-Q1-L1-A10
tctacttcacttctccaatagaaaaagaaaaaaccctagcggctacactcttccctcactttctaaactaacagaagaaaacaatcacggaaatggagttttctcaagccgacttcgatcgccttttagtcgccgaacacacccgtaaaacctctgaagtcaactacgccaaggaccctcttgatgctgagaatttaaccaaatggggaggggctttactcgaattagctcaatttcagactgtttcagatgcaaagcagatgataaatgatgcaatttcgaaattggatgaggcgttgatgataaatccatccaagcacgaaacttttgtggtgcatgggaaacgctctntccactactgca

SEQ ID NO: 5351 - DNA, 362 bp, Gossypium hirsutum
  Clone ID: LIB3083-109-Q1-L1-A11
ccgagttggagattgatgcttggagttctttctattccttccctcgcatattttgggttaactgtattctacttgcctgaatcaccaagatggctagtaagtaaagggcgaatgaatgaggcgaaagcagttttgcaaaggctacgtggcagggaagacgttgctggtgagatggctttgttagttgagggactgggtgttggaggtgaaacatcaatagaggagtacataattggcccagcaaatgacgacattgaagacgaagatatatctgctgataaagatagaatcaagttatatggacctgaagcaggtcagtcctgggtggccagaccagtcactggacatggtagcagtatagg

SEQ ID NO: 5352 - DNA, 360 bp, Gossypium hirsutum
  Clone ID: LIB3083-109-Q1-L1-A12
cacagtggaaggtttagtgaatcaaatccagggactatcaaccactgcctccgatgttttatcgctgcaaaatttgcttaaacaagctgatgactcgctccatgccgagtccactcggttgtttccttttctcgaccaactcgacccttccaagcactctctgggttacctctatttcctggaggcatgcactgctggtccagttacaaaagagcaagctggttcatatgtgttaatgattgccagatttattacttcatgcattgctgagcaaattcgattggcgcctgataagtttataaccgtgtgtaagaggttcaaagaccaagttcttttgctcgaggagcccttgcgtggggt

SEQ ID NO: 5353 - DNA, 387 bp, Gossypium hirsutum
  unsure (1)..(387): unsure at all n locations; Clone ID: LIB3083-109-Q1-L1-A2
aagggataaactggaggagaatataaanntgccacggcccatattggnnggatcaagaaacaaaaagnnttaagcttgtctcntttaaaagaaaatnncagttagcccgcttaaaacaaacgatgtataacccgccatggcactttaatcannccgtacctctcgnnactgaagaaagtnncgttgatccctttaagcccnnctttgccatttcttagtacgaaccacnccaagggtagactcggacacacaaaaacactcagtttcaaggggttggagaaanntattttattggaaggcttatcacttagttttgagaagagccaaggtggttcccgatagaagcttcgattggctttatacatnagaggagaaatatgctgcacc

SEQ ID NO: 5354 - DNA, 357 bp, Gossypium hirsutum
  Clone ID: LIB3083-109-Q1-L1-A3
gttcaatgtacacctttgtgttcctttggactcctgctttgagccccaatgatgaagagatccctcacggttttatttttgccacattcatgttggcttctatgctgggaagctcccttgcatctcgattgatggctcgctcatcacccagggtagaaagctacatgcagattgttttcgtgatttcctctgcctctctcctgcttcccattataactaatttgttggtgcctccttcaaaggagaaaggcggaagcatctcatttgctggctgtcttcagcttcttggcttctgtacttttgaggcatgtgtagggatattctggccatccattatgaaaatgagatcccagtaca

SEQ ID NO: 5355 - DNA, 361 bp, Gossypium hirsutum
  Clone ID: LIB3083-109-Q1-L1-A4
ctcaagggtattccataatgttttctgacatgttccctttcatgttagcatctcagggatctttggacgaactgaacaagcttctgaaggagcctgtacccatgaaccgtttcagacccaacatccttgttgacggctgtgaaccgttctctgaagacctatggactgagattaaaataagccaattttcatttcaaggtgtgagactatgctcccgctgtaagggggcctacaatcaatcaagaaaccgcaattgctggtccagagccgaatgaaactcttatgaaatacaggtccgataaggtcttgcgaccggacaagaaacaacaaggaaagatctattttgggcagaacatggttt

SEQ ID NO: 5356 - DNA, 364 bp, Gossypium hirsutum
  Clone ID: LIB3083-109-Q1-L1-A5
gttttatatatatttgttgaaattggaatggggcaaatggattactatgagaatgactttgaggctactatgctcaaagatactgctgcctactactcaaggaaagctgcaaattggatcgtagatgattcttgtccggattacatgttgaaatctgaggaatgtttaaaatgtgagaaggatagggtctcccattacttgcattctagtagtgagccaaaactgctcgagaaagttcaacatgagttgttatctgtatgggaaacccgacttctcgataaagagcactccggctgccatgcattgctcagagacgacaaggtggatgatttgtcaagaatgtttagactcttttctaaaattc

SEQ ID NO: 5357 - DNA, 363 bp, Gossypium hirsutum
  Clone ID: LIB3083-109-Q1-L1-A6
ggaaacatttgggccaagggccattacactgaaggagccgagcttatcgatgccgttcttgatgttgtgaggaaagaagctgagaactgtgactgcctgcaaggtttccaggtatgccactcattgggtgggggaactggttccggtatgggtacattgcttatctcgaagatcagagaggagtaccccgataggatgatgcttacgttctccgtgttcccctcgccaaaggtttccgatacggttggtcgagccatacaatgctactctttcggttcatcagcttgttgagaatgctgatgagtgcatggttcttgataatgaggctttaatatgatatctgcttcaggactcttaaattga

SEQ ID NO: 5358 - DNA, 320 bp, Gossypium hirsutum
  unsure (1)..(320): unsure at all n locations; Clone ID: LIB3083-109-Q1-L1-A7
tggcataacntgaatcctttgccgggaaaaatgatatctccggcggccacacggaagcattaggaccttgaactcctctgacaatcccaaagcttggatttttgatgattatcgtttgacagaagacattcctgtccctggcaggtgatcttccctcactagacccttcagccccaatctggtcatcttctttccttacttgctctactcctcttagaggcgaactcactgtatcgctagcgaattcagacaatgcttaatgcaacacgctcccgaaaacggatgacgactggatcatccagtgcatctgggtccaaagc

SEQ ID NO: 5359 - DNA, 361 bp, Gossypium hirsutum
  Clone ID: LIB3083-109-Q1-L1-A8
gaagaaagcatttttgattcactgggtgcggttagatcaatattcttcagttgatgaggcctataatgatggcatgaaacgattggaaactttagtatctagagtacatgatatagatcccccaaagctgcctgcaggttcaatcaagttgtatactcgtctttttggcccaaaattggagatttcaagcatgacaagtgatgcatacacagaggctgtgttgcgggctaaagagcacattctggctggtgatattttccagattgtattaagtcagcgttttgaacgtagaacatttgctgacccatttgaaatatacagagccctcaggattgttaatccaagcccatacatgacatat

SEQ ID NO: 5360 - DNA, 363 bp, Gossypium hirsutum
  Clone ID: LIB3083-109-Q1-L1-B1
cgatcctagttgccgccatcctcgtaacggctttttacggcggcgcggcgacatcggcgcacgcaccggcagctgatccagcgatggccatgtcgccgtccgccatggcaccgacgccggactgtatgacgaacttgctcaacttatcggattgtttgacgtacgtggaggccggaagcaacttgacgaagccggacaagccttgctgtccggaattggctgggctagtggaaagtagccctcaatgcttgtgctatttgatggataagaatgcgacggcgaactatgggatcaacattgacatggaaagagctcttaagctgcctaatgtttgccatgtcaaaacccctcctgttagtcttt

SEQ ID NO: 5361 - DNA, 362 bp, Gossypium hirsutum
  Clone ID: LIB3083-109-Q1-L1-B10
caaaatcaagtttcttggtgtttctcgacatttttgtgaatctcatagtttgtataagcctttactctggtgctgtacaggaagatagaaaggtttacattgcatacttgggatcacttcctgatggagactacattgcttcatctcaccattgcaatatgcttcaagcactttctaaacacagctctgtggaaaattacttaatccgaagttacaaaaggagcttcaatggatttgcagctaagctaactaatgaagaggcaaagaaactttcaagctttaaaggagtggtttcggtttttccaagtaaagtttaccacctgcatacaacaagatcatgggatttcttgggactcaatcaa

SEQ ID NO: 5362 - DNA, 359 bp, Gossypium hirsutum
  Clone ID: LIB3083-109-Q1-L1-B11
tcgtgtttttttttttttttttttttttttttgttttttttttttttttttttttttttttttttttttttgggaaacaatcaaatctggcttaaattatgaacataaaacttcctaaccactgctttactatacacatacaacattttcatctccttgtttaagatagatacatacaaaagccccccccctacctttaacggtccacattaatcgaaacgaaaattgttgcggaaaccaatgctaaaacttgcctctcctcctgtatgagtttcaatgtaatcccagagcatggattcttctaacaagtgacaaaaaacaagcatttttttctttccattcttcactaccctccttcc

SEQ ID NO: 5363 - DNA, 338 bp, Gossypium hirsutum
  Clone ID: LIB3083-109-Q1-L1-B12
ctgaggaggaggaggcaccaaagcccaaaccaaagaatcctcttgatttgctgcctccaagtaagatggtactggatgactggaagaggctttactctaacacaaagaccaatttccgagaggttgcaattaaaggattctgggacatgtatgatcccgagggatactcactgtggttttgtgactacaagtacaatgaggagaatacagtttcatttgtcacaatgaacaaggttggaggattcctgcagagaatggatttggcccgcaagtatgcatttgggaagatgttggtgatcggtgctaaccctccattcaaggggaaaggactatggctt

SEQ ID NO: 5364 - DNA, 366 bp, Gossypium hirsutum
  Clone ID: LIB3083-109-Q1-L1-B2
acttaataaaaatccaaaggaaagtagaacattagaaacttaacagtaatatttgcaaaaattcccaactcatcatcgccaaaaaacaaaacacaccaaccaaaaaacaggttatggaagagattcaaactgtagttgtgaaataatacagatgatgaccaaatgatatgtgtgttaaaataaataaacagccgtacggaagaagtaaaattcacccataggtatgtatccaagaaaatgaaagaatataattctttttccccccaaaggaaagctgagttttcaattcaaatagatctcacttatgctcctgagtgcgacactggggtagtttcaaattgaccatccttaaatacatggatatac

SEQ ID NO: 5365 - DNA, 304 bp, Gossypium hirsutum
  Clone ID: LIB3083-109-Q1-L1-B3
agattgggggtggtttttttttttaagacaaagaaaattttcatatttggatatttttattaaaaaaatggtttttttattatacaacaacaaatttttgccaactccaattttgtccccctgcttccttggctgtttgcttccataaactaccctgggttatctatttatttggtttttcggggggcaaacacttcttttcagtccttaataaattgcttcaaaagacatctgcttggtttatttgcttcagttgattcactcattcgagctctgtaaatattggtttattataagcattttg

SEQ ID NO: 5366 - DNA, 365 bp, Gossypium hirsutum
  Clone ID: LIB3083-109-Q1-L1-B4
cttttgtcggctgatgggatcccttaccataagtcttgcttcaaatgcagtcattgcaaagggacactaaagttgggtaattactcctcgatggaaggtgtcgtttattgcaagcctcatttcgagcaactgttcaaggagtcggggaatttcaacaagaatttccagtcacctgcaaggtcagctgagaagttaactcccgagctgacaagatcacctagcaaagccgccagcatgttttccgggacacaagaaaaatgtgctacttgtggcaaaactgcttatccactcgagaaggtaacagtggaaggacagtcgtaccacaagtcatgtttcaaatgctctcatggtggctgccctataac

SEQ ID NO: 5367 - DNA, 354 bp, Gossypium hirsutum
  Clone ID: LIB3083-109-Q1-L1-B5
cttaagcagaatgctcgaagagaaagacaggctgcaccttgcctttattgaagagacaaggaagatgcaaaggcttgctcgagacaatgttcgaaggattttggaagaacaggaaaagctgaatcatgaactggaaacaaagaaaaggaagatcgacaactggaccagggaactgaataaacgtgagacgctaactgagcgcgaaaggcaaaaacttgatgaagagaagaaaaagaacaatgaaagaaataattcacttcagctagcttccatggagcagaaaaaggctgatgagaatgtgttaagattggttgaagagcaaaaagagggagaaagaagaggccctgaaaaaga

SEQ ID NO: 5368 - DNA, 341 bp, Gossypium hirsutum
  Clone ID: LIB3083-109-Q1-L1-B6
gggggataaggcttggtccgcaattaccaaccttgtggtttttgctcaaaccatttgacaattttatttaaattagataaagacgaggacaacaaattggcaaacgataccaaaactacaccgaaaagaaaaaacacaaataggaagccaaatgtgctttgggagagaacctcaaatgatgttcatctttaattctcgacatgacataaatccctaacaactttatcatcctagcacttgtgtttacttgttttgtgtacttggttcaatcaacttggtggtaagtgttggagaagtttcaccagtgttttgaaattttcaatagaactaccattgggttt

SEQ ID NO: 5369 - DNA, 361 bp, Gossypium hirsutum
  Clone ID: LIB3083-109-Q1-L1-B7
aaccaatcttgtgccatatcctcggatccatttcatgctctcttcttatgcgcctgttatctcagctgagaaagcataccatgaacagatatcagttcctgagatcacaaacgctgtgtttgagccctcaagcatgatggccaagtgcgatccaaggcatggcaagtacatggcttgctgcctgatgtatcgaggagatgtggtgcccaaggatgtgaacgctgctgttgctaccatcaaaacgaagaggaccgtgcagtttgttgactggtgcccaactggtttcaaatgcggtattaactatcagcccccagctgttgtccctggaggagatcttgctaaggtgcagcgagctgtttgt

SEQ ID NO: 5370 - DNA, 359 bp, Gossypium hirsutum
  Clone ID: LIB3083-109-Q1-L1-B8
gaaggttagaccactaaaatgctttcagaatctggaggcaatgctgaagaaagatcattctagtccaagcagccgtagcaattcatctcgatctactaacagcatttgaatgaatggctggtgttttatcttgcaaagcttataattctgcaaaatttattcagtttattggctaaaagattgagcgtataaccaggagcatacttgaaaaaaaaatgtttgatgtctttaagatttgttctcccttctgccttgtgggctgaaaactacattttgttccactccatttgtttgtaacttctactgtacattatgtatgctatcataagctgcataaaagaaaagtatgttatcgtaat

SEQ ID NO: 5371 - DNA, 360 bp, Gossypium hirsutum
  Clone ID: LIB3083-109-Q1-L1-B9
cttatcagccaagaatgacctcaagaacaagcaggagaaagaattagcagagaaactagcggaatgtcaagaaaccatattccttcttggcaagcaattaaaagctttccgtcctcagacagatataatgggatcacccttcaacgagaggagccaaaagggtgacgatgaacccactaccagtggcatcaacttgcaggatttatatcaggcaaagatggacagtatcgctgctgctgctgcttctggcattggaagcagaggtggtgcggagtctcccatggagtcagttaacacaccaagcagcccatatgatagtgaagcaaactctttgagaacacccatcaaatcaaaacacag

SEQ ID NO: 5372 - DNA, 276 bp, Gossypium hirsutum
  Clone ID: LIB3083-109-Q1-L1-C1
ctaatttgttgatactcacaccaatcgcctgagcacgacgcgtactagaatgaaaatacctccttttctccataagggaaaagcctagagggcacgagttacatttagccgaatattcgtcctttcctgtgtggaacgggcaactcactgaggataacgcccatctacttgagatccgctagcatgattattaacaggataagatacctgagaagggctttatctactgagccgattaaaatgcctcaatgggctatgtgcatgtctactcagagt

SEQ ID NO: 5373 - DNA, 362 bp, Gossypium hirsutum
  Clone ID: LIB3083-109-Q1-L1-C10
tggagctccgcagttccttctttgtctgcttcctgataggaaaaactctgatctttatgggccatggaagcggaagaatctttctgagtatggcatcgtgactcagtgtatggcaccagctagggtgaacgatcaataccttacaaatcttcttctgaagatcaatgctaagcttggaggtcttaattcaatgctaactattgagcaaacaccttcaatccctatgatttcaaaggttccaactatcatccttggaatggatgtatctcatggttctcctgggcagtctgatgtgccttcaatagctgcggtggttagctccaggcaatggccattgatttcccgctatagggcatcagtcc

SEQ ID NO: 5374 - DNA, 361 bp, Gossypium hirsutum
  Clone ID: LIB3083-109-Q1-L1-C11
aagaaggtgaactatccccaaatggggattttgaggaagacaattttgctgattatggagaagctagtttggagattgctcttaaggtgaaggaaggtgcagcaaacagacaataccagagacatggagaggaggaagtgtgccgtggggaggctgggggagagaatgatgctgatgctgatgatgaaggtgatgaaagtgctcagaggacatcagaggatagtgagaatgcttctgagaatggtgaggtttttggaagtgattctggcgaaggtgaatcgagggaggagcaagaggaagatattgatcatgatgaacatgataataaagtggagagtgaaggggaggctgaagggatggc

SEQ ID NO: 5375 - DNA, 361 bp, Gossypium hirsutum
  Clone ID: LIB3083-109-Q1-L1-C12
attccttcttatttcctctcctaagtttcgactcaaaacattcacaaacaaagaactttaaatacttgtctagctcattctctcttttccatcatttcttttaacatggagacgatcactcaaaatggtcaccacaaggggtctttggagagcttttgcactgcttcaaagggtgccggtggagccgttgatcctttgaattggggtgttgcagctgagtcactcaaggggagtcatttggatgaagtgaaacgcatggtggctgaatacaggaacccattggtgaagcttggtggggagaccttgacaatttctcaagttgcaaccattgctacacgtgacttgggtgtcaaggttgagc

SEQ ID NO: 5376 - DNA, 355 bp, Gossypium hirsutum
  Clone ID: LIB3083-109-Q1-L1-C2
gtctccaatcccaatcaatattatgttggccatcagtcactcaatctttgtcaatggtgattgcaccaacttcgagatcgatccatcattcggatacgaagcttctgagctctaccctcaagtgaaatacaccactgtggaagaaggcctcagtcgttttgtttgagaaagctagaaatcaaatcagatcattgttgttattaaactgataccagtaataattcaaaaactgtcactgagagatttgtgcagaggacttggggattctgtgtgtatgcatgtgtgtgtttatgtcataaatttctcgttactatcattcaacataatgccaaacatgctattcttcttgtgtcgt

SEQ ID NO: 5377 - DNA, 192 bp, Gossypium hirsutum
  unsure (1)..(192): unsure at all n locations; Clone ID: LIB3083-109-Q1-L1-C3
agactagcttatataaacaccattgtctatcctttcacatcccttccactcattgcctattgttcactaccagcaatctgtcttctcacaggaaaatttatcataccaacgctctcaaacctggcaagtgttctctttcttggccttttcctttccattatcgtgactgctngtctcgagctccgatggagt

SEQ ID NO: 5378 - DNA, 354 bp, Gossypium hirsutum
  Clone ID: LIB3083-109-Q1-L1-C4
attaaagatgaggaaagcaaaaatcctcccgaagtgaacaagcaactcaatgatgagaagcagtctatgatcaaagaactgaattcgtatgtagctatgaggaaaacatacatgaatacccttggtaacaagaaaattgaactctttgatatgggagctggagtcagtgaacctacagctgatgaaaatgttaaaatggcatcatcaatgtcaaaccaagagcttgttgatcatgggatgaagacaatggatgagactgatcaggccattgaacgctcaaaaaaggttgttgaacaaaaaaattgaagtaggaactcaaactgctggtactctaaaaggacaaactgatcaaat

SEQ ID NO: 5379 - DNA, 303 bp, Gossypium hirsutum
  Clone ID: LIB3083-109-Q1-L1-C5
ccgcctctcctcatcgctatcttccctctcttcagcttcatctacctcttcatcctccacatcatcaactatgaatccatcattctcatattcatcttgcccctcgtcgtcttcttcgtcgtcgtcgtcgtcagggtcgcggccattgagtgtgtctccctcaatgggctctccatcttcatcgagttccaactcctcttcttcgtcagataccacgttcttgcccatagttcagaaaagagaaccaatgcagagaaaatcagagaaagaaagacttcaatctgcgagtgggattgaaaccac

SEQ ID NO: 5380 - DNA, 278 bp, Gossypium hirsutum
  Clone ID: LIB3083-109-Q1-L1-C6
agccgaactactcgtcaaatctattgcagtccatatagagtcttgaacaaagcttcgaagagtcgaagttcacacaatagaataagcaaaaacacacgataaaagcaaacaaatcattgggtagcaaaatgcaagccctccactcaaacattacttatttagtactcatcttcatcttcctcatcaccctcgcctgactcagcaccgacttctttataatacttctcaagagcagcaaggtgctcacgagctatcgagaattattcttctttcatacc

SEQ ID NO: 5381 - DNA, 358 bp, Gossypium hirsutum
  Clone ID: LIB3083-109-Q1-L1-C7
tttatgtctggacaatatcttgaatattgtgatacgcaagagtgatgaagacgagcatatggagaccagtgatgattttatcaggcacatgcaagaacaatttaaagaaaaagctcgcaaatctgagtcagtttattatgcagccacagatgtggtgattctgagattcatggttgaggcaagctgggctcctatgttggctgcgttcagtgtgcctcttgaccaaagtgatgatgaagcagtaacagcattgtgtattgaaggcttccgctgtgcaatacatgtcactgctgtgatgtccatgaagactcatagagatgcatttctgacttcattagctaagtttacttcactccac

SEQ ID NO: 5382 - DNA, 363 bp, Gossypium hirsutum
  Clone ID: LIB3083-109-Q1-L1-C8
cgaggatgaccagtgggaggtcgaacgcagataccgtgatttctgtactctctatcgtcgcttgaaatcaatattctctgaacaaggttggaatcttcctcctccctggtcatccgtagaaacagaatctagaaagttatttgggaatgcgtctcccaatgttattgctgaaagaagtgttcttattcaagaatgcctacgttccatcatatgttctaggttctcttctaaccctcccggtgcattgatttggtttttgtcacctcaagatgcatttcctggcatccctccatcaaatatccatttgtctcagagtacatatttttcaagagggcaaggcacagaaaatatttctcctttagg

SEQ ID NO: 5383 - DNA, 355 bp, Gossypium hirsutum
  Clone ID: LIB3083-109-Q1-L1-C9
cttttgtcggctgatgggatcccttaccataagtcttgcttcaaatgcagtcattgcaaagggacactaaagttgggtaattactcctcgatggaaggtgtcgtttattgcaagcctcatttcgagcaactgttcaaggagtcggggaatttcaacaagaatttccagtcacctgcaaggtcagctgagaagttaactcccgagctgacaagatcacctagcaaagccgccagcatgttttccgggacacaagaaaaatgtgctacttgtggcaaaactgcttatccactcgagaaggtaacagtggaaggacagtcgtaccacaagtcatgtttcaaatgctctcatggtggct

SEQ ID NO: 5384 - DNA, 359 bp, Gossypium hirsutum
  Clone ID: LIB3083-109-Q1-L1-D1
tttaaagatgaagttcttggaagcagcactccgatactatgacatatctcaaattgagaagcgacaaataggagatgaaacaattgatgaggatgcactggagcaagctctatctgctgctgtaacatgtacaatattagctgctgcaggtcctcaacgctctcgtgttcttgccaccctttacaaggatgaacggtgctccaagctgaagatttatccgatattacaaaaggtttatttggagagaatattaagaaaacctgaaattgatgcattttctgaagaactgaaaccacatcagaaagcactgcttcctgataattatactgtgctggaccgtgccataatagagcataatc

SEQ ID NO: 5385 - DNA, 262 bp, Gossypium hirsutum
  Clone ID: LIB3083-109-Q1-L1-D10
cattggcctccgaatgtagaggattcaagccttgcttttggttgggaaccggatgatcgtagaagtcataaatcatcttctaggagaaagaaaaaatcttcacaaagtaagggagatgaatccactgagtctaatgattctagctctgagagggaacccgaagagggagttccttagaaaaagccccaaaaggagtcattacccttaagaaagggtggcattcgcaatattaattacctttcttctaagaagaatggggatt

SEQ ID NO: 5386 - DNA, 364 bp, Gossypium hirsutum
  Clone ID: LIB3083-109-Q1-L1-D11
tactactccaagcaagcattttccttacaagtttgtttttcttgtgattaatcgatatggctagctcaatgtcccttaagcttgcatgtgtggcggtgttgtgcatggtggtgggtgcacccctggctcaaggggccgtaacctgtggtcaagtcacaagctccctcgcaccctgcattggttacttgacagggaatggtgctggtggcgttcccccaggttgctgcggcggcataaaatctctcaactccgccgcccaaacaacaccagaccggcaagcagcttgcaaatgcatcaaaagtgcggccgccggcatttctggcatcaactatggtattgcaagcggactcccaggcaagtgcgg

SEQ ID NO: 5387 - DNA, 361 bp, Gossypium hirsutum
  Clone ID: LIB3083-109-Q1-L1-D12
aaaaaacccagtattctgtcatcactatggaggccaaatggctgctatgttttacaatggcagcactaatggcagtgtcaaatggccaggaatcagtgaagccattggtgaagatagttaaaggcaagaaactttgtgataaagggtgggaatgtaaagggtggtcacagttttgttgtaaccaaaccatttctgattatttccgaacttatcaatttgagaaccttttcgctaaacgtaatacaccggtggcacatgcggttgggttctgggattaccattctttcattacggcggcggctcagtatcagcctcatggttttggtaccaccggcggtaagctccagagcatgaaggaatt

SEQ ID NO: 5388 - DNA, 361 bp, Gossypium hirsutum
  Clone ID: LIB3083-109-Q1-L1-D2
aaaaaatttaaaacaccatcctccgacagtcactttacccaaagcaaatgttggtactacagtcaatgaaacagcaaaacacttggaaatagtttaaaaccagaacaagaagaactaccaactctggtttctctaacgattacttttgtcttttttgttgttttctttttttcattttgaatcattttccatactccttttctgctttccaatggcttttcttcttcgggttctctgctaactcccaccatattcgcattcagtggaagatcccaatcttggatttcatcccactattacacagaagattcaataatggatgatcaaggtggtagcaagccgaccgggatccggcagattg

SEQ ID NO: 5389 - DNA, 364 bp, Gossypium hirsutum
  Clone ID: LIB3083-109-Q1-L1-D3
tttttgtttacaacaacaatggctggacacacagtttacaccctctcagaagtgtctcgacacaaatccaagaacgactgttggcttgtcatcgatggccgagttctgaacgtgacaaagttcatggaagaacatccaggaggagaagaggtgttgttggaatcagcagggaaggatgcgacgaaagaattcaacgatatcggacatagcaagtcagctcagaatttgctcctcaagtatcagattggtgttctccagggtcacacttcaaagaataatgaacaggttggttcaaccgaggagcccaaaaagaaagagatgagtgcattcgtgatcaaggatgacctgacgcctaaatatgcgg

SEQ ID NO: 5390 - DNA, 235 bp, Gossypium hirsutum
  Clone ID: LIB3083-109-Q1-L1-D4
gaaaacttgtaacgagcttcgtgggtggagcttgttttcgttgcgtttattattatttttttgatattcccaacacagagaaaggaaggaatggagagcgattcagcgatggtggcatttccattgctgactacgcccatcgaatccaactacagggcatgcaccattccttacagattcccttccgataatcctcgaaaggctacccctactgaaatggcctgaatcgaccttt

SEQ ID NO: 5391 - DNA, 365 bp, Gossypium hirsutum
  Clone ID: LIB3083-109-Q1-L1-D5
ttctcattcaaaggaaaaagaggatccttaagcagaggttgaaagtcccaccagcactgaaccagtttacaaagactcttgataaaaaccttgcaacaagtctgttcaagttgctcctcaagtataggccggaggacaaggcggccaagaaggaacgtctcctgaagaaagcccaagctgaggctgaaggaaaagctcccgaaacaaagaagccaattgttgtaaaatatggactcaaccacgttacctacctcattgagcagaacaaagcacaattggtagttattgctcatgatgtggatcccatagagttggtagtatggctccctgcattgtgcagaaagatggaggttccatactgcatt

SEQ ID NO: 5392 - DNA, 366 bp, Gossypium hirsutum
  Clone ID: LIB3083-109-Q1-L1-D6
aagtaaggtttgccaaaaggtgttattcttggcagctgtagcgttcttgagactgcaggtcagggagcactccctcaactataccagacattgcaatctgccttaaccggcaaggattctgaatcttcttgttctgggagaattatttgggtacattttggagtcaatagtggtgcaagtagatttgctgttgagcgtcaagctgcgaatgaagctactttccgttgccctgatgagatgggatggaaacctcagaaagtacccattattcctgcagatggtggaatttcacgtgtaagagagacttctcttccttgttgaggagattacaaaggccttagcaaagaagggatttgaggtgatgac

SEQ ID NO: 5393 - DNA, 356 bp, Gossypium hirsutum
  Clone ID: LIB3083-109-Q1-L1-D7
ctattctcgagttttttttttttttttttttggatttgaaatcatcaggatattgctcattgagaaagaagaagatatagaataagcattcgaatgagtacagccatgagcaactggtctctcttcaaacatgaaagaaaacattactacattccatacaagaataaaacagaacatcagccggcagttcctcttattataaatactaatttttctagtagctcaattgttgggaatggctagtcgatgggagcattctattgaggcttccccaaaggtggatgtcctggatagtgaccgtatggtggctcatgtgccggaggctcataaactggtggtttaggttttggcttttc

SEQ ID NO: 5394 - DNA, 356 bp, Gossypium hirsutum
  Clone ID: LIB3083-109-Q1-L1-D8
ttctttttgaacccaggcgacgatgaagaaggctatcggtcaaactgttagagagcttaagagagaggttaataagaaagttctcaaagttcctggaatagagcagaaggttcttgatgctaccagtaatgagccatggggtcctcatggatcacttcttgcagatattgcaatggctacaagaaactatcatgagtatcagatgatcatgacagtgatctggaaacgtctaagtgacactggaaagaattggcgtcatgtctacaaggctctgactggtctggagtaccttgttggtcatggatcggagcgtgtcatagatgacataagagaacatgcttattaaatatcggctt

SEQ ID NO: 5395 - DNA, 356 bp, Gossypium hirsutum
  Clone ID: LIB3083-109-Q1-L1-D9
cgctaaacgtctgatcggtcgtcgattctctgacccagcggtgcaagccgatatgaagcattggcctttcaaggttgttgccggccctggtgataagccgatgatcgtcgttaattacaagggtgaagagaagcagttcgctcctgaagaaatttcttccatggtgttagtcaagatgaaggaggttgccgaggcctatatgggtcaaaccgtgaaaaacgctgttatcaccgtgcctgcttatttcaatgattcccaaaggcaagctacaaaagatgccggatccatttccgggcttaatattttaaggattatcaatgagccaacggctgctgcaattgcgtatggcttggaca

SEQ ID NO: 5396 - DNA, 350 bp, Gossypium hirsutum
  Clone ID: LIB3083-109-Q1-L1-E1
agctcttctcagtggtggtgattgttgtaacaatcattgtgtggttacttctaatgggattcttaacaacccaaatactcgttttcatttcatctcagctcttacttgtggcattcatgtttggtaacactgcaaagaccgtatttgaagccatcatattcgtatttgtgatgcaccctttcgatgtcggtgatcgctgtgtaattgacggaatacagatgatcgttgaagagatgaacattctgactaccgtgtttctgagatacgacaacgagaaaatattctatcctaattcagttctagcaaccaaaccgatcagtaacttctataggagtccagagatgagtgat

SEQ ID NO: 5397 - DNA, 366 bp, Gossypium hirsutum
  Clone ID: LIB3083-109-Q1-L1-E10
ggatactccataggcaggatgaagaaaatttaactggtgaaaatggtgccgtatctccaaatgggcagactgtaaagttccagcctttacacaatgagcaccagatgatggaggtgaacacatcaccgaggcgggaacatggcgctcctccttccagtgcattacacagcagtagctcctccagtgagatttcggaagtgactcttccagaagtctcaccagcttcttggcggtcatatctgcaagcagaatcaggggttcccgactctagtctgtcaactgctgctgctcaattaacaactgagacaagtgtgcataaatcacagaaagatgcaattttccgtagcgttcctcaaatgctaggat

SEQ ID NO: 5398 - DNA, 362 bp, Gossypium hirsutum
  Clone ID: LIB3083-109-Q1-L1-E11
ccttatttttgcacaaccatacaagcaaactaaccccatctaggtgtcttcaacattgaaaaatgggaaagagctggctcctcctggcttttatactttggcagataattccaaatgaagcggccatcgctgtgggcggtggtgttggcattggtatcggtaatgcagggggcgttggtggcggaggtgtttggattggtggaggaatcggcagcaacaccccaactccttcagtcccttcagtgtcaaagctgagcagtgcttacactgctctccaagcatggaagtctgcaatcgctgatgacccaatgcgaattttggagacttgggttggctcagatgtgtgttcttataaaggggtg

SEQ ID NO: 5399 - DNA, 368 bp, Gossypium hirsutum
  Clone ID: LIB3083-109-Q1-L1-E12
cacatttagctattgtcatggagtatgctgccggcggtgaactcttcgagagaatatgcagtgcaggtcgatttagtgaagacgaagctaggtttttcttccagcagctaatatctggtgtcagctactgtcattccatgcaaatttgtcacagggatctgaaactagaaaacacactcctggacggaagtccaacaccacgtcttaaaatatgcgactttggttactccaagtctgcagtgctgcattcacaaccaaagtcaactgtaggaacaccagcatatatcgccccggaagtcctatcacgaaaggaatacgatggaaagattgcagatgtttggtcttgtggcgtgacattatacgtgatg

SEQ ID NO: 5400 - DNA, 291 bp, Gossypium hirsutum
  Clone ID: LIB3083-109-Q1-L1-E3
ccatctttcatgacatacagataccatcagaggtgataatatgcaggctcgagaaagcttatattggctcctctacactacgaagagccgcattgggggctcttgcatagacgttgactatcccacaggttgcttatcttcgggaacaattgttaatggtagggcctaaccaaagggggattactctgacgcagaagtttaagacggcgatgacggagaactctactgatgctatgaaggattcgcgggtccttgattatgtcaacatgattagttgtattcaatatagaa

SEQ ID NO: 5401 - DNA, 368 bp, Gossypium hirsutum
  Clone ID: LIB3083-109-Q1-L1-E4
aaatgcatcgtcgatgtctccaacagctacgcagtgcctttcgaggaagatgagaaggacccgagcatatggtttctcgaccacaactaccatgaatcaatgttttcgatgttcaagaggattaatgccaaggagcatgttgttggttggtatagtaccggcccaaagttgcgggaaaatgacctagacattcatagattgttccacaactatgtcccgaatcctgtcttggtcatcatcgatgtccaacctaaggagttgggtatccctactaaggcctactatgatgttgaagaggttaaggagaatgccactcaaaagagccaaaagattttcgttcatgttccttcagaaattgctgctcatga

SEQ ID NO: 5402 - DNA, 382 bp, Gossypium hirsutum
  Clone ID: LIB3083-109-Q1-L1-E5
ttcaatgtctctactttgactcctccattcaatatttacgccaacaccgccagctttgtggccgcagcgaaaggtttttctgcatttatacaacaatattacgccggaattataccttcgattgtgggcaacgatcaacagcagctggtgactcaaatcgggctcagccagtcagcaggattaggagttctccgaacactacttaacgatgtgatcaattcaacagtgcagccatacacattcacagcggcggagctcagcaaccgtacttcagaagtggttaaccggcttgggggatgtggtgtgaaagctgaaggtttgattgtgccattgcaacttggagcagagaatcgaactaccagtaacgtcgtgccgggagatg

SEQ ID NO: 5403 - DNA, 281 bp, Gossypium hirsutum
  Clone ID: LIB3083-109-Q1-L1-E6
cccccggctcggctgaaataattcacgacttttgctttaagctcgccaccttgaatgtgcagagggcccattactgtgagggaggatatgcccttcccggatagtcatcgaccaccgatctttgatcctcgcatttttcctccgatctggtgatagaacccgcgatctcatgcacttaccgcgacatggatcatgaatctgataacacactcctggaccgacttctaacgcattctctatcaatatcccacatgggttcctactactcgcgaaacttacct

SEQ ID NO: 5404 - DNA, 359 bp, Gossypium hirsutum
  Clone ID: LIB3083-109-Q1-L1-E7
ttttcctctccaattttccgtcactttcccgagaaaatgagagaaatccttcacatccaaggtggccaatgcggcaatcagataggagccaagttctgggaagtcgtatgtgccgaacatggcatcgattcaacgggtcgatatggtggtgactcggagctccagcttgagcgaatcaatgtttactacaacgaagccagttgtggccgttttgttccccgcgcagttttaatggatctggaacccggaaccatggatagcgtaagatccggtccttacggacaaattttccgacccgataacttcgttttcggacagtccggtgcgggaaacaattgggctaagggacattacactga

SEQ ID NO: 5405 - DNA, 360 bp, Gossypium hirsutum
  Clone ID: LIB3083-109-Q1-L1-E8
ggcctcaccaaatggagcgactaatactaatcaaaatgatcaaaaaccgaccccggaccagcttgttcgagttgactcagaatgtttatcttccattgtcacaaacctagataaaaacgatccaaaaagtgccaaaaccattgaaacccatcaaagcttgcatcaccatcaccatcatcatcaacaacaaagctttgcaacttatggtgccatggaattggacttctcttcctacaatcatcatcaagcagcagcatctaacggtggaggtgtgtcattgacgttagggttacaacaacatggtgggaataatggggtgagcttagcattctccccaacatcacaaagttcattgtttta

SEQ ID NO: 5406 - DNA, 357 bp, Gossypium hirsutum
  Clone ID: LIB3083-109-Q1-L1-E9
ccaacacaacaccacataccaacgccagctgaagatggagacggaggagaactagaacccttttcaactagaagatgtagatgggccccttgttaagctgcctcctccaactacaaagcttccaagggagaagcatcttccaaagcctaaacctcctacaaattgggaggagtttgctaaaaggaaagaaacgtaaaaaggacaaagttgcatgggatgaacagactggtacatggaaacgtcgctttggttatgatagtgtcaatgatgataaagacatagccatcattgaagccaagatgactgatgagccaggagaggatccttttgctaaaagacaagatgataaaaagaaac

SEQ ID NO: 5407 - DNA, 352 bp, Gossypium hirsutum
  Clone ID: LIB3083-109-Q1-L1-F1
gcaaaacccagggatatgaataatataaccatacttgaaactgggttcaaaccatagtaatatgagtaatctttgtcaaagattggccagaaacctacaactctcatatcatacattattatgattcagaaaacgagtactttaccatcctcaaaatgatatgagcaccaactaaacaaaagtttcactaacttttaccaaacaaataatccgggaagaatactatgagaaatacatgaacaaacaacttcgaagctattctttctccatggttgatgactcaatcctacccttcaagcagcaacctgaccaaagagccacttgcggatctctggaagttttttattgaatg

SEQ ID NO: 5408 - DNA, 349 bp, Gossypium hirsutum
  Clone ID: LIB3083-109-Q1-L1-F10
tcggtgcttgattagatatcttggatgttattctgatgttttgcctaggtttagggtttttgttacaatttcttccaaatacttagcttttatatttggttaatagggaaggaggagatggtgaagaaaagaagcaagaatctggttctttaccaagtggggttgtaggattaggaatgggattacctgacttgaagagcaagaaaaagggaaagcaaaaggtgtcaagtgaatcccatgtcacagaggctcttgataagatgagagaacaaaccagagagactataaaaggattggaatcaatgtcgaaacctggaggagatgattttggagaggatggattgatcga

SEQ ID NO: 5409 - DNA, 367 bp, Gossypium hirsutum
  Clone ID: LIB3083-109-Q1-L1-F11
gtctagtatcagataccagctaaaaaagcatacaatttgctcaaacatgcaaggaaaaatcctgcttgttctcccaccacaaatctgttgaatcaatcgagttgcaaattggcattgagaaacttaccagaagacgtttataagcttaaatgggatgttgtggttgtggacgggccgatcggggacacgccggaagcaccagggaggatgccaactatctacactgccggcatgttggcaagaactggtgggattgggaagaagacgacgactgacgttgtagttcacgatgttcatcggacgattgaaaaatggttttcttgggaattcttctgcgaacaaaactttgtctctgctaaagggaaac

SEQ ID NO: 5410 - DNA, 371 bp, Gossypium hirsutum
  Clone ID: LIB3083-109-Q1-L1-F12
cccaccattgccaccaataagatctccgttcttgccaccaataccaccaataacattgtcaccaatgacattggcaccaataacattgacaccaacaggtacaccaatcgaggaaccaatagatccaccaaccgagaaaccaacagatccaccaactgaggtaccaacactgccttgaatcccaaagctaccaacaatcccaccatcttagcctaagcctatcactgttcttccacaagttcccagcaatagcttgccttccattcctttcatgtctccatctccacctccaccttcaccttcatccagctattgaagacaatttgattcctaattagtatcacatatattactgagaatgaactctgtca

SEQ ID NO: 5411 - DNA, 361 bp, Gossypium hirsutum
  Clone ID: LIB3083-109-Q1-L1-F2
gtttttgtttacaaggacaagccacgctaacggactgcggtggaaatgttgggaacaactgccgaaatagaacaacatttggagaagttttgatgctgggtccgaatttatgattgcaggtttcgcttccaatattgatcttgcatggagagaacgatatcgttacggacccagctgtgagcatagcattgtatgaaaaagcgcgcagctcagacatgaacattattatatacaaggatgctggccattctcttcttgaaggtgaaccatatgatatgattaacagagcttttagtgacataatttcttggctcgatgaacataactgtaatactgcaggctaatcgcaatctctattatt

SEQ ID NO: 5412 - DNA, 281 bp, Gossypium hirsutum
  Clone ID: LIB3083-109-Q1-L1-F3
gagtattgtaaaggcaccgctccaattgctcctatatcaaactactggtacggacacaaccgttgatatggacacacaatatgcaagatccatacatgaacaactgctcttgcatggctgcccactgaaataattaaacctttaagctactctgtgattttgaatgatgtatttgaaattactacttacaacaagctcaaactcatacgattttaaagggatgagtttatctatataatatgaaaacagtggctcagagctgaaggttaacttcgatggca

SEQ ID NO: 5413 - DNA, 373 bp, Gossypium hirsutum
  Clone ID: LIB3083-109-Q1-L1-F4
tattatatctaagaccagcctcaagctggggccaaggggctcctccaatgcaacagcctggttatggttatatgcagcctggggcatatcctggcccatcatcgcagtacaacatgttgcagcctccttatgggggctacccttcccaaccgtcatctggtggatatgcctctggttgggaccagtcatctgtacaaccaaaccagcaaacctctgctgcaagtggttatgattactataaccaacagccttcacagcagcagcagcaaacctctggtgattcggtaactccagctgataacagtggttacaattacagtcaacctccagcttctagctatatgcaaccaggacaaggttattctcagtatgg

SEQ ID NO: 5414 - DNA, 229 bp, Gossypium hirsutum
  unsure (1)..(229): unsure at all n locations; Clone ID: LIB3083-109-Q1-L1-F5
ccgaggcgtgtgtgtcatgtcgtaatgtactttcctattacgctgtgtgtgcnnaccctggggatgcacgcccaagntggaagaaaaaatggtganccggattttcaactcggtnngcagttccggttatagctttttgatcatnggccanntgcttgtgttntaacacacttcactgctnntctggctgnnntctgggattctttgagtttggtgtttcaatgggagc

SEQ ID NO: 5415 - DNA, 372 bp, Gossypium hirsutum
  Clone ID: LIB3083-109-Q1-L1-F6
cggagagtcatgaaaagggaatatgaagaatttaaagtaaggatcaatgcattagtagcaaaagctcagaagaaaccagaagaaggatgggtgatgcaagatggcaccccgtggcccggaaataacactcgtgatcatcctggaatgattcaggtctatctaggaagtgccggtgcacttgatgtggatggcaaagagctgcctcgacttgtctatgtttctcgtgagaaacgacctggttatcagcaccataagaaagccggtgctgagaatgctctggttcgagtttctgcagtgcttactaatgcacccttcatattgaatctggattgtgatcattacatcaacaatagcaaggccatgagggaagcg

SEQ ID NO: 5416 - DNA, 360 bp, Gossypium hirsutum
  Clone ID: LIB3083-109-Q1-L1-F7
taattacggagccatccgccaaatacgtatcggaacgagcaaagaaacccgcggcaccgctttcgtggtctacgaggatatctatgatgccaaaacggcggtggatcatctatcgggtttcaatgtagcgaatcggtacttgatcgtgttgtattaccagcaagctaagatgagcaagaagttcgatcagaagaaaaaggaagaggaaatcgctaagatgcaagagaaatacggtgtttctactaaagataagtgaaatctaaatatatctgtgggcttcgttgttgttattttccccttttgaattgggaatttagggttttgtatgaactattggaattaacgacctaatatgataat

SEQ ID NO: 5417 - DNA, 268 bp, Gossypium hirsutum
  Clone ID: LIB3083-109-Q1-L1-F8
agggggacgaggacgttcttttagacaatattatatatatattataatctaaactacagaatctcaaacagtccaatataaaactcgaaggcatttccaaataccttataattactacaaactttgacataaacacaacgaaaatctcccaagattgatgccaatgaaccccctcgtacagatgccaaatatatgtactttcaaatactgttgtatatggtgacccgtaccggaacctttgatctttgatgctatgtcctgtaatgac

SEQ ID NO: 5418 - DNA, 356 bp, Gossypium hirsutum
  Clone ID: LIB3083-109-Q1-L1-F9
gctacttcatcatcttcttcaaagctttcccttttcttcttgttttccttctggtttgcttccactttagctcgtaattccccttcaccaacaacaaaaatcctcgatgtcttagcttctttgaaacaagctcagcatattctttcctttgatcctcaaatatctaatggtttttccaaaagccaaccccttttcgtcaactcttcttcttcatcgggttctggtttttcgattccacttcattcacggagctctttgctaaaaacccatcatgttgattataaaaacctggtccgatcccgactcgaccgtgattcagcccgagttaacacgctcaccaccgaggtactactcgc

SEQ ID NO: 5419 - DNA, 358 bp, Gossypium hirsutum
  Clone ID: LIB3083-109-Q1-L1-G1
ctttgctgctttgtcctcttcttctatgttcttcagtttttgcaccaacaatggctcagcctcgttcacctttttgtgaagggaaatgcaaagggaggtgcaataaagcggcggtttgggatcggtgcttcaaatattgcggcatatgttgcgaggagtgtcaatgcgttccgtccggtacttacgggaacaaacacgagtgtccttgctacagagataaggtgaacaacaagggcaaacccaaatgcccttgaaaatgaaatatattcgagttcgggatttaatcaagcttaaagatcgaggacgaagaggccatatatatatatatatgcatgttgatgatgatgttattataaaa

SEQ ID NO: 5420 - DNA, 351 bp, Gossypium hirsutum
  unsure (1)..(351): unsure at all n locations; Clone ID: LIB3083-109-Q1-L1-G10
aaaatatctgctttttcttagttttcctttttgtcccttgtttatttgatatttccccctcatggccgccgctgatgtcgagttccggtgcttcgtcggagggctcgcatgggccaccgacgaccgggccctcgaagaagccttcagtgcgtttggtgaaatcgtcgaatcgaagatcattaatgatcgtgagactggaagatcccgaggctttggattcgttactttccgtgacgagaaagctatgagggacgcgatcgaaggaatgaacggtcaaaatcttgatggaaggaacatcaccgtcaacgaagcccaatcgcgcanaagtggaggcggtggcggaggatttgg

SEQ ID NO: 5421 - DNA, 278 bp, Gossypium hirsutum
  Clone ID: LIB3083-109-Q1-L1-G11
catggccggaggaaccgaagcttttcctgatttgggtaaacattgtcaactttcaggttgtcatcaattagattttcttcctttcaaatgccaagcctgtcataaggtgttttgtgtggaacatagatcgtgtaagtctcatgaatgtccggaaccggatcataacagtaggaaggtgattatttgtgaaatctgttcgacgtcgatcgaaataacaggaaaagaagatcaagagaagattattttggacaaacatgagaagtctgggaattgtgatc

SEQ ID NO: 5422 - DNA, 373 bp, Gossypium hirsutum
  unsure (1)..(373): unsure at all n locations; Clone ID: LIB3083-109-Q1-L1-G12
gctagttgaagggtgagagtagttacaatgagagcccaaaacatgaaagccatttcgagtgcacaaacaccagctgcctcaccttccagtacgccaaccaccaccaccaccactccaccttcaacttcgccaccacctacaacttccgcaccacctccttcaacaacccctccacctacaacttcagcaccacctccttcaacagcaacgcctccaccttccaccacgcccatcgcgccagctcaaccacctgcaacaactccccctcccactgttgcaccagctacaagcccaaccgtcccaccgncacaaactccaccacctcaaccacctcaaactcctccaaccacagctccagctcaaccgccagcat

SEQ ID NO: 5423 - DNA, 359 bp, Gossypium hirsutum
  Clone ID: LIB3083-109-Q1-L1-G2
aggtcgcataaaataatattcaaaatatattaaccagctttaaaaccatagatgtcacacgaaaaccatatacagtcattacttacaaattcacattcaaagtccaacaaaatactattatgcacctatcgacttgccggattaatgtccgttcttcgctttggaggaaaagaatctactaaagcctcgagattgtttctccggtgtcggtgtagacgaggaagactcggagcttgacatggtagacctgtgatttgagttgttcgagttgattggtgatctcaaaaggtttgcttcagtatctgaagggctgcatggggtgttaaatgatgactccatgggtgattctgcacacgatc

SEQ ID NO: 5424 - DNA, 368 bp, Gossypium hirsutum
  Clone ID: LIB3083-109-Q1-L1-G3
ctttttagaatttttcttaatcgaaaatgagagagtgcatttcgatccacatcggtcaggccggtatccaggtcggaaacgcttgctgggagctttactgtctcgagcatggaatccagcctgatggtcagatgccaagtgacaaaactgtcggaggaggtgatgatgcttttaacacctttttcagtgaaactggtgctgggaagcacgtccctcgtgccgtcttcgtggatcttgaacccactgttattgatgaagtgagaactggtgcttaccgccagctcttccacccagaacaactcatcagcggcaaggaagacgcagctaacaactttgcccgtggtcactacaccattggcaaggagatt

SEQ ID NO: 5425 - DNA, 375 bp, Gossypium hirsutum
  Clone ID: LIB3083-109-Q1-L1-G4
actaaacaggtttcttatctatggagttgatgaaatcatcagacaatattattcaagacagaacccaacagcagcataaacaagaaccagaaatgcaggcgcaggagggacaacaagaacaaggacatcattttcatgtattggcagttgatgacagtgttatagacaggaagttattggagaaactcctcaaagtatcttcataccaagtgacctgtgtagactctggggataaagctttggaatatcttggtctgttgaataacctggattctgactcaacagcttcttcttcttctccttcttcttcttcttcctcctcctcatcttcttctaactcatcttcttgttcccaatcttcgcaacgagagggac

SEQ ID NO: 5426 - DNA, 366 bp, Gossypium hirsutum
  Clone ID: LIB3083-109-Q1-L1-G5
cagcatgcttttgtttatcaaagtttttgtttgttgaaaaggttggtgaaatgacatttaaataatggtttgctacgcaaataagagctattggttttcattgttatttccctaccatggaatttgttgcttatataatatcagagtaggctttgtggaaggcatatggctagtaggagttattgatgagttgcgaatgcctgaaaatggaagtgatagaaacccgatattagtagacacaaagactcgtgtacgagacactcttcctgctgaaccacaaagcagaaatggaaggttggatattttactggctttctgtataatgcaattattatcaagatttgatatatatacaatgcatcagaa

SEQ ID NO: 5427 - DNA, 379 bp, Gossypium hirsutum
  Clone ID: LIB3083-109-Q1-L1-G6
gtctaatatccgaaaatacccgagtacaaggacaaacaagatgaggataaggaacataaaaatgaagagtaccacgaatcacgtgaatcgaaggagcacgaagaatacgagaaagaaaaacccgggttccccaaacgggaaaagcctaaagagcacgagaaacacgaagtcgaatattcggaaatacccgagtacaaggaaaaggaagataagagtaagaaacataaagatgaagagtgccaggagtcacacgaatcgaaagagcacgaagagtacgagaaagaaaaacccgatttccccaaatgggaaaagcctaaagggcacgagaaacataaagccgaatatccgaaaatacctgagtgcaaggaaaaactagatg

SEQ ID NO: 5428 - DNA, 361 bp, Gossypium hirsutum
  Clone ID: LIB3083-109-Q1-L1-G7
acgtaattagctgtggttatgaagaaaaaactgagtggggcaaagagatcggatggatttatgggtcggtgacggaagatatattaacaggtttcaagatgcattgtagagggtggaaatcggtttattgtgtaccgaaaagaccggcattcaaagggtccgctccaatcaatctctcggatcggttgcaccaagttttgagatgggcacttggttctgtagaaattttccttagtcgtcactgtccactttggtatggttatggtggaaaactgaaatggctcgagaggcttgcttatatcaacaccattgtttaccctttcacctcgatccctttactcgcctattgtactattccagc

SEQ ID NO: 5429 - DNA, 374 bp, Gossypium hirsutum
  unsure (1)..(374): unsure at all n locations; Clone ID: LIB3083-109-Q1-L1-G8
tcttgttggacataaggtttgctgctgatgttctttctgggggtgatttcaatgtaaatgaagagttatctataaaaccgaagtctaaatcagcattcagaaggaagcgggaccacattcagacaaagtctgctgttagagacagtgttgatggccttatctattctttttcacaaaagttggatcccattgattggctgacgtatgagccatacttatgggagaatgagaggcagtcatacctccggcatgctgtgctcttcgggttctttgttcagcttaatcggaagtatacagacaccatacagaagcttgctactaattccgagtcgaatattatgagatngtctgtggttcctcgtttcaaatatctt

SEQ ID NO: 5430 - DNA, 353 bp, Gossypium hirsutum
  Clone ID: LIB3083-109-Q1-L1-G9
gaatgacatatcatgacacagttggcatagttgatcttggtggtggatctgttcaaatggcgtatgccatctccgagaatgctgcttcaagggctccaagtgtaccagctggacaggacaattatgtaaatgaaatgtatctcaagggatcaaaatattacctctatgtatacagttatttgcactatggcttactggcagctcgagcagaaattttgaaggccactgaagattctggcaacccttgcatcttggagggttttgatggtacttataaatatggaggagaagaatataaagcatcggcgccgtcatctggttcaagcatggaagaatgcaggagggtgactctc

SEQ ID NO: 5431 - DNA, 363 bp, Gossypium hirsutum
  Clone ID: LIB3083-109-Q1-L1-H1
tatccgttgttatatccttcacggcgttacctcttgtggatcaaaaccttccatctttatcctctcctcctccttccgccatgacaacgcggccaacaccttcgcccgtccacatcgacctctggcccatcctttccgaatctaaacgcataatcaacgcccactcccgccacttccttgctctctccgtcctcttcctcctccctctttccttctccttctccgccttccccttcatcaatcaactcttttcccaatcctccacccccaccatcgaaacccacctcagtttcctccacaccccttttcaactgcaaaaacccccaacaattcccatcaattacctgctcttcactcttcttt

SEQ ID NO: 5432 - DNA, 368 bp, Gossypium hirsutum
  Clone ID: LIB3083-109-Q1-L1-H11
tgtcttttcattttgttatatagaatacaataatgtcatcaccaccaccaggggggactccggcgccgtcatcaccaccaccatcaacaaacactacgtctccgccgccatcttcagccggagctccgccgccgagtagtcctccttcccaatcgccgccatccaccgcaaatccgccgccaactaccactccttccacaccatcaccaaccgcagcaactccgccgccaactaacactcctacaccaccaccaaccgcagcagctccgccgccaactagtcctccctccccgccatctggtaccccatctccacctccagccaccccatcagcttcttcttcttcaagcaccacttctttccccttc

SEQ ID NO: 5433 - DNA, 338 bp, Gossypium hirsutum
  unsure (1)..(338): unsure at all n locations; Clone ID: LIB3083-109-Q1-L1-H12
gcactaggttttgccgattttttttttnnnanggttttggtttttttttttttgggggggttnnnnaggatcattttgcatttggacgtgatatacaaataaggattaatttgttcggttgccaatctgactcctattacagcctgcgacaattacatattattttcatgtcagcttttggaatttggaacataattacatgaatacaaagactgatccttttgtctcggtttgcagaaaggagcataagcttagacataacttgaaaacaactcaaaaaggacatcttcaacccaaaccaattgtatggtaattgcagagccattgcaataagactt

SEQ ID NO: 5434 - DNA, 353 bp, Gossypium hirsutum
  Clone ID: LIB3083-109-Q1-L1-H2
aaaaacccaaatcatcaccccattttatttattagtcatcttgttaatcacgtttgttgcatctaaaactgaaaaagtaagtagtgccatggacagaaagtctgaaagtgaagcggaaatcaccaagtcaattcactttacattcaagatcttaattacagatgcagttccaatccgatgcagtgcaacaatggaatccccattttggcagagaccctttgtcttggcatgctgaatagcaaactccaatgcttcccctgttgtctcttcatgagaagctcttgcagatccagcatataaaatcgggatcaaaccacgaaagactaagctgtgccttgctggagtatcatcac

SEQ ID NO: 5435 - DNA, 371 bp, Gossypium hirsutum
  unsure (1)..(371): unsure at all n locations; Clone ID: LIB3083-109-Q1-L1-H3
ttgaattcagacctcattggttttcatacttttgattatgctcggcattttctgtcttgctgtagtcgaatgttaggtttagagtatcagtcaaagagaggttatattggactggagtactatggaaggacaattggtataaaaatcatgcctgttggaatccacatggctcagattgagtctgtattgagacttgcggataaggagtggagagtaggggagcttaaacaacaagttgagggaaagactgtattgcttggagttgatgatatggatgtctttaagggtgtcaacttgaagctgctggcaatggagcagatgcttgaacagcacccgaagtggcaggggagagcagttntggtacagatcgc

SEQ ID NO: 5436 - DNA, 329 bp, Gossypium hirsutum
  Clone ID: LIB3083-109-Q1-L1-H4
gcattcagcaattgtcggaatattgcttcaaatcagaacctgagtctcgccattgctacaagtccatagagatgaagtttttcatctcagttttgtttctttttgtcctcttttcttatgcagctgcatatgatcctttggatccaaatggaaatgtaacaatcaaatgggatattgtgtcttggacgcctgatggctatgtggcagtggttacaatgaacaattttcaaatgtatcggcacatcatgagtcctggttggaccttggggtggacatgggctaagaaaagaagtaatatggtccatggtaggggctcaaactactgagca

SEQ ID NO: 5437 - DNA, 366 bp, Gossypium hirsutum
  Clone ID: LIB3083-109-Q1-L1-H5
gaaaaaactgagtggggcaaagagatcggatggatttatgggtcggtgacggaagatatattaacaggtttcaagatgcattgtaaagggtggaaatcggttaattgtggcccaaaaaaaccggctttaaaaggtccccttcaatcaatcttttggatcgggtgcaccaagttttgagatgggcacttggttctgtagaaattttccttagtcgtcactgtccactttggtatggttatggtggaaaactgaaatggctcgagaggcttgcttatatcaacaccattgtttaccctttcacctcgatccctttactcgcctattgtactattccagctgtttgtcttctcaccggcaaattcatca

SEQ ID NO: 5438 - DNA, 367 bp, Gossypium hirsutum
  Clone ID: LIB3083-109-Q1-L1-H6
caaatattggttcataaactcgagtagcttggttgactgtaggtgattagaaggtttcaaatatttgattttgagttttacctcgtaatggtgttgccagttgccattcaatttagctttatcgaatttatctcgcagcagtcttatgagctgttataattaagagaataattattctctcatctgggaaatataactcgtttatttttaacacaaattctcaaaatttcagtgaagggggatttttcaatgccatcatgagctttccacctgattacccaaacagccctccaacaatgaaatttacaacagacgtttggcatcctaatgtttatactgatggcacttgttgcatatcaattcttca

SEQ ID NO: 5439 - DNA, 347 bp, Gossypium hirsutum
  Clone ID: LIB3083-109-Q1-L1-H7
gtgatacttacagtttgactcttacttggttcttctatcttatctgcaaggcacccatggttgaaaacaagatcagagaagaaataaagagacacttatcattgaaacaagtgcagggaatcttgcaaatgccatccaactacgacgagttgagtaagctaacatatcttcatgcagcgttgtgcgaaaccctaaggctatatccaccgattcccgtcgaattaagaacatgtacaaagcaagactttcttccgagcggtcatcgggtggatcaaaacacccgaatcataataggaatacatgcaatgggaaggatggaaagcttatggggagaagattgctatgag

SEQ ID NO: 5440 - DNA, 361 bp, Gossypium hirsutum
  Clone ID: LIB3083-109-Q1-L1-H8
gttgcttacaatacagtacttaatgggttgtgtaagactgggaacactggtcgagctgttaagtttctaaggatgatgaatgaaagaggtttcgaacccaatattagagcatatagcacccttattgactgtctttgtaagaatgggttactaaatgaggctgtcgacctcttctctgaagtgaacgttaagggcattagaccaaatattgttatttacaattgcttaattcatggtatgtgtaattcaggccagcagcatgaggcaaccaagcttttgaatgaaatggtgggtaacaatgtttctcctgatattttcacgtataacatattgattgatgcacattgcaaggaggggacaa

SEQ ID NO: 5441 - DNA, 353 bp, Gossypium hirsutum
  Clone ID: LIB3083-109-Q1-L1-H9
cagaaagagcacccaaaagaaaaaacactgatcaacgaaggatttctagggttttttttcggtatcagcaagcgatggcaatggctgctctcagacgcgaagggaggcgtttcgcccctctgatctctccccgtccaattactgctgtccgatcctctcctatcgttcccactcacgaagatgagggtccgattggtgttcgttatatttcaacccaagtcgttagaaaccggatgaagagtgttaagaatattcagaaaattacaaaggctatgaagatggttgctgcctcaaagttgagagcagttcaaactaaagctgagaattcccgaggcctctggcagccatttact

SEQ ID NO: 5442 - DNA, 261 bp, Gossypium hirsutum
  unsure (1)..(261): unsure at all n locations; Clone ID: LIB3083-110-Q1-L1-A10
ctcgagnttttttttttttttttttttttttttgttttgttttttttttttaagaatttcaatgcttcagcaaataaagtataaacccacaggaatgggaagctaaacaaacctgataataaaaaaataccttttttatttgtgatttgataaaaacaccggtatatattgcctttttttttactaagttgcttcccaatcaaagggctaaaggatccccaattattatatacactttgattttaatatctgggggatccc

SEQ ID NO: 5443 - DNA, 232 bp, Gossypium hirsutum
  Clone ID: LIB3083-110-Q1-L1-A11
acggacgagactgattgagaactatgccattaaaccgcaggagtagagacatagcattcttggtacatacaatggcgtaaggacttgcaggtcagagcgagatttgtctgccgtaacacgacacttgttcgcaacgaagaccttgttttgcgcaccgacatgatgagaaaaaagaatcattaagccaacttctgggcaacctcatagggatctagttattggcgttcatacc

SEQ ID NO: 5444 - DNA, 388 bp, Gossypium hirsutum
  Clone ID: LIB3083-110-Q1-L1-A12
agaacaccaactgcgccaaaaagagaaagcaaaatggcaaatcagaagcaaagcggacccgaacctcctatcaaagtctcaaccatcaattgtatcgatctgtctaatcctgatattggtgaatccgttgctttactaaagcaggcttgcttggattgtggatttttctatgttgtaaatcatgggataagccaggaatttatggatgaagtatttgctcaaagcaagaagtttttttatttgccattaaacgagaaactgaaagttttgaggaatgagaaacatagaggctacactcccatgtttgatgaggttcttgaccctgacaatcaagtgcatggagactacaaagaggggtattacataggcgtggacgtgcctgaaaatg

SEQ ID NO: 5445 - DNA, 364 bp, Gossypium hirsutum
  unsure (1)..(364): unsure at all n locations; Clone ID: LIB3083-110-Q1-L1-A9
gtgagttgggagaaggagaacgtctcaagtgaggcattggaagctgcccgtattgcctgcaacaagtacatggccaagtttgcagggaaggatgctttccatttgagagtgcgggttcatcccttccatgttctgcgtatcaacaagatgctttcatgtgccggtgctgataggcttcagaccggaatgaggggtgcttttgggaaacctcaaggaacatgtgccagagttgacattggtcaggttctgctctctgttcgttgcaaggacagcaacagccatcatgcacaggaggccctccgtcgtgcaaagttcaagtttcctggtcgtcaaaagattattgttagcangaagtggggattta

SEQ ID NO: 5446 - DNA, 388 bp, Gossypium hirsutum
  Clone ID: LIB3083-110-Q1-L1-B10
ggcgtttcagcgcatctctttgccgtcttccaaggtttccttaagatgcttgcaggcattgacaccaactttactgtcactgccaaagcagctgatgatgcagattttggtgagctctacattgtgaaatggactacacttttaatccctccaacaacactcctcatcgtcaacatggttggtgtcgttgccggattctctgatgccctcaacaaagggtacgaagcttggggaccactctttggcaaagtgttcttttccttctgggtcatcctccatctttatccattcctcaaaggtcttatgggacggcaaaacaggacaccaaccattgttgtcctttggtcagtgttgttggcttctgtcttttctcttgtttgggttcgga

SEQ ID NO: 5447 - DNA, 370 bp, Gossypium hirsutum
  Clone ID: LIB3083-110-Q1-L1-B11
gttattatcaacaaaagttctttgattcatatcagaaggtgatgttcttttgaaggtaaaaacaacaccaacatgatgaacatgaagacaaggattctattgcatccccatggaaatatttacaggtactgaaagaaactacgcacaaagtccagatattttacactatgcttattcccattataaaggccaacaagatttgattctagcactgaagtaatggaactcacatattggcaaccagtttctatgaatcactggcgtcagatagggcacccttggtccatcttttaaacatctacaatgctgccttgggctggtacataggaaccatatgacccgcattatgaaccttaatgaaaccaagagc

SEQ ID NO: 5448 - DNA, 375 bp, Gossypium hirsutum
  unsure (1)..(375): unsure at all n locations; Clone ID: LIB3083-110-Q1-L1-B12
agagagcaagcgagttagacgacgaagagattataaacgtgactgattgcatatataaaatcggaaaattttaaataaatcgccttagatctcttagattcaaagtttcagttggcgatggcacaacctttggtgaagaaggacgacgatcgcgatgatgaagcggactactctccatttttggggattgagaagggtgcagtccttcaagaagctagggttttcaatgaccctcagcttgatcctcgaagatgctctcaggttatcacaaaacttctttatctactgaaccaaggagaaacattcactaaggtggaagctacagaagtcttctttgctgtgacaaagctttttcaatcaaaggatatangcttg

SEQ ID NO: 5449 - DNA, 388 bp, Gossypium hirsutum
  Clone ID: LIB3083-110-Q1-L1-B9
ttaggcttgcgcttgttgagaaggggcttcttgacaagcgcaagcctaagcccaccaagctgagagctagcattacgcctgggacggtgctgattttgttggctggtagatttatggggaagagagttgttttcttaaagcaacttccttctgggcttcttttggttactggaccgttcaagattaatggcgttcctttaaggcgtgtgaaccagtcctatgtcattgcgacttccactaaggttgacatctccggagttaacgtagagaagttcgatgacaagtactttgccaaggaagtagacaagaaaaagaagaagagcaaaggggagtttttcgaagctgaaaaagaggataagaagaaactgccagaagacaagaaagaaga

SEQ ID NO: 5450 - DNA, 387 bp, Gossypium hirsutum
  Clone ID: LIB3083-110-Q1-L1-C10
attatgtaatgatcaataaggggcttgattgttcgagagggctaaacaaggcaaaggatattggtgcgagtaagcatcgagaaggaaggttgcaactcgatagttggtctcaattcgcaccagcttgtggaaattctaagaatgctgctaagttatgtacctcgttttctttgccccctaagtataactcaatggctgaagctcgtggatatatatacttgatagtgaaagatcaacatggttgtaggtttttacaacggctattcgatgagggtacccgagaggatgttgaaataatattcaaggagattattgatcatgtagtcgaacttatgatgaacccttttgggaattaccttatgcagaagttattggaagtgtgtaatg

SEQ ID NO: 5451 - DNA, 389 bp, Gossypium hirsutum
  Clone ID: LIB3083-110-Q1-L1-C11
cttcagtttcaatgttcttcgctttgcatttacaaacaagaagatgaacagcaagacaaatggcatggtccacaaacaggcatcccaaagcttgatgccacccgaataaatgaagatgcttcctagtgttctcgcatcaaacaacttctcggctgcttgcttgtgctgctttgcaaagatgccttgagcatactcatagagctccacatcaagcttgttaagtgattgtatccgctggaggaccatttgaggaaccctattacgtgcctccttagtgaagtttgcaggtgagattctcttcaaggaagctatacgtcgacgtgtttgggtctttcgcaagccagaaatgcaaacctcataagtgtccataagtttttccacagtcatat

SEQ ID NO: 5452 - DNA, 260 bp, Gossypium hirsutum
  Clone ID: LIB3083-110-Q1-L1-C12
ctgagagtaatcctcaatatactacggtttatgtcggcaatcttgctccagaggtcactcaagtagaactccactatcacttccatgctcttggtgctggggtgattgaggaggtccgtgtccagcgtgataaaggctttggctttgtgagatacggtactcatgctgaggcagctttggctatttaactggggaacacacactcatttttatgtggcgagcgcattaaatgttcttggggcagcaagcctacaccacct

SEQ ID NO: 5453 - DNA, 188 bp, Gossypium hirsutum
  Clone ID: LIB3083-110-Q1-L1-C9
cgggaatcatgcacaagatcgaagaaacccttcgcatgggagggcacaagagggaagaagacaatcacaagggagaagctcatcacgaaggcggccatggctatggcgctgctgaccacaagggagaagttcatcactaaggcggccatggctatggttatggcgcccctgagcacaagggagaaatt

SEQ ID NO: 5454 - DNA, 388 bp, Gossypium hirsutum
  Clone ID: LIB3083-110-Q1-L1-D10
cctaactccaaaagaattgcttatattcagaatctgggtcctgctatttgccaccagtcagtgtagatcatgagatttgtcatctcggctttgttcctttttgtagttgcagctgcttatgatcctttggatccaaatggaaacttaacaatcaaatgggatattgtgtcttggacacccgatggctacgtggctgttgtgacgatgaacaattttcaaatgtatcggcacataatgagtcctggttggaccttggggtggacatgggctaagaaagaagtgatatggtccatgaatggagctcaaactactgaacaaggtgactgctcccagttcaaaggaaatgtacctcattgttgcaagaaaatacctacggttgtagacttgc

SEQ ID NO: 5455 - DNA, 354 bp, Gossypium hirsutum
  Clone ID: LIB3083-110-Q1-L1-D11
aacggacgggtaattaaattttttttaatcacaaccacttttttcatcttttttcccaaaacacaaatcaaaatttttttaaaaaaaccaaatctttcaaaacagtctcaaaaacatctaatgacaaaaaaaaaattgaaaaaaaaataactctcaaactccccgaaacaactacattaaaccaaaaaccctttgcataggaataatatatcaaaccacccttccccgtaacaaacgacccctaaccctttttttgggatttaaaaacaaacccccatttttttagaacaccatccccctgatacaactaagatccttctctcaaaatactcacatttaaaacacacctttttc

SEQ ID NO: 5456 - DNA, 365 bp, Gossypium hirsutum
  Clone ID: LIB3083-110-Q1-L1-D12
tcgagtttttttttttttttttttattaacatgtcattagtttaaaggttccatatcagaaaaaccaccgaagaaacagaaacagtaaagacctaaccttcccgtatatcaacacatgtattaacaatggaatcaagaaataaaacttgtattaaaaatagagttcaacacggaggattagatgagaagcctattccatagggtgctttatgatttagtcactcctcttcttcttctttctctcacccttctcagctgaatttttcaacatgattatcagaatgcgaacaaatacggcaacgaaatcagtaaaaagtgtgaaagcatgctttacataattcagatcacccaagcgtgccttctca

SEQ ID NO: 5457 - DNA, 350 bp, Gossypium hirsutum
  Clone ID: LIB3083-110-Q1-L1-D9
ctttctttccgttgaagaagtagaagtgaaagaggatatgaagggaaaatgtcaagagaaaaactaagaagagccgcacttcctcctgttcaagagaatattgataaattagagaaagctataaatgagggtaatttctatggagctcagcagatgtacaaatcaataagtgcacgatatgtatctgctgaaagatattctgaggccttggatctgcttgagtcgggtgcatgtctccagttgaagcatggccaggttacttgtggggcagagctcgctgtcttgcttgttgatacacttgtcaaagggaaaatctccttttatgaaaacatctctgtccgtgttaggaa

SEQ ID NO: 5458 - DNA, 365 bp, Gossypium hirsutum
  Clone ID: LIB3083-110-Q1-L1-E10
acaaaaatgacgaaagactaaatgttattcaatatttctgttcttgccaaaggcaagaggagtacacatcaaatacagaaattttagcttaaaaaagcagtagcaccaacattttattgatctttctaactcacggggacattttcacaaacacttttattgattatattaacctcagtgacatttccacaaaaacttgttaaccagctacagtttacaaggcgataatggaggtccacacaaacaatcatttcccacaaatgaagaaacaggaaatttgttcttgggaagctgcccgcacagatggttataactcacattcaatttattgaacccattaatcgccgcaggaaccttgccgtaca

SEQ ID NO: 5459 - DNA, 395 bp, Gossypium hirsutum
  Clone ID: LIB3083-110-Q1-L1-E11
gaggaatgagaagcatgttgagatgggtgagaaaaaatatggatcgcaagaagactagggtttttttcactagcatgtcccctactcatgcaaagggtatagattggggaggtgaacctggtgagaactgttataatcaaacaacaatgattgaagatccgaactattggggttcagatagtagaaaaagtataatgaaggtgattggagaagtgtttagtaaatcaaagtaccccattacattccttaacatcactcaactctcaaattatcgtaaagatgcacacacatcgatttataaaaagcaatggaatccattgacgcccgagcaattggctaacccgattagttatgcggattgtactcattggtgtttgcctggccttcaagatact

SEQ ID NO: 5460 - DNA, 386 bp, Gossypium hirsutum
  Clone ID: LIB3083-110-Q1-L1-E12
cactgataaggctttctccgccctcaaatctggtgccttgaattcactcaacgatgaacaaagggttcagctggtgctatttcacgtcatcccaagttatatcccattatcccaattccaaacagttagcaaccctatgagaacacaagccggagatagcggcgacggtgagtttcctctcaacgtcccctcttcgggaaacacagtggttctaaagacagggctgacgaaaaccagtgttagtgataccatttataccgatggtcagctggctgtttatcgagtcgatcaggtgcttcaacctttgcaagtcttcgctgctaggtcttcagctctggcaccggcaccgggaatgtctaggaaggctgctgacgttgatgggaaat

SEQ ID NO: 5461 - DNA, 389 bp, Gossypium hirsutum
  Clone ID: LIB3083-110-Q1-L1-E9
gacaaattcaaagacatgggaactgttgttatgggaaaggtagaatctggcagtgtgtgtgagggtgattccttattagttatgccaaacaaggctcaagtgaaagttgtagctgtatgttgtgatgaaagtaaggtcaggtgtgcaggacctggtgaaaatttacgggttagattatctgggattgaagaagaggacatattgtcgggttttgtcctgtcaagcattgtaaaaccaatacctgctgtcactgaatttacagcccagctgcagattcttgagttgcttgagaatgctatttttacagctggctataaggctgtcttgcatgttcattccgttgttgaggaatgcgagatagttgaactattacagcaaattgatccaaa

SEQ ID NO: 5462 - DNA, 366 bp, Gossypium hirsutum
  Clone ID: LIB3083-110-Q1-L1-F10
tccgctactactccaccaagagtggtgataagctgacgagcttgaaggactatgtgaccagaatgaaggagggtcagaatgatatctactacatcactggtgagagtaaaaaggcagttgagaactctcccttccttgagaagctgaagaagaagggttatgagggcctttacatggtttatgctattgatgagtatgctgacagacagctcaaagaatttgagggcaaaaagcttgtgtcagctaccaaggaatgtcttaaacttgatgagagtgaggatgagaagaataagaaggaagctttgaaggaaaagtttgagggtctttgcaaggtcatcaaggatgtgctgggtgacaaggttgaaa

SEQ ID NO: 5463 - DNA, 351 bp, Gossypium hirsutum
  Clone ID: LIB3083-110-Q1-L1-F11
accgggcactttattcatagaaaataccaaaaactagtacatcatccgaggtattcaaccctgaaaacacatattcaaaatcaacaagaaaattcattacagtagcaaacggataacgggacatccctcaatactcctcctcatccccttcgtctccttcaccagactcagcgccaacttcttcataatctttttccagtgcagcgagatctttacgtgccttagaaaactcttctttcttcatgccctcaccaacataccagtgcacaaatgcacgcttggcatacatgagatcaaatttatgatcaatgcgggaaaacacttccgcaacgctggttgagttggagatca

SEQ ID NO: 5464 - DNA, 389 bp, Gossypium hirsutum
  Clone ID: LIB3083-110-Q1-L1-F12
aacaagctagtctcatgtctgtcggggttgtaggagaaactgagcatagaaataccgtctctctatccaacgacttcatgaagcagatgtcaaagagctttgctcaagttgtgtgcttggatgatggcaataaagatggcaccgccattgagagaacaagttctgcttctgatggttcgaaagttgcaagggttaaacttgaagatgctatgacggcagctgtctcttctggtcaggcaagttaagaaataagcattctgggtatttcgggcagccttgctttactgtatgtgacacaaacttcttttttgcctttttattttattttgtgagatgttggtgaaattcctttggagtgcattggaagtcgaacaaggtctagtatgggg

SEQ ID NO: 5465 - DNA, 378 bp, Gossypium hirsutum
  unsure (1)..(378): unsure at all n locations; Clone ID: LIB3083-110-Q1-L1-F9
tagccataatcttttctgaccctaccaatttctaaaggcctgttctttttaaggtctggtctagattttttaaaaaagagtgtaatagtcttccaacttttcctataagcttttttagtaaacacatataacccctctatgagtttgtcatttaatataaacatttaactcctctgttcttcatttaaaaaattaggttcttttccttctctttttttcatccctttattcattattttcttatccgattcttttatntaatctcttcttttttcattatcccctattttctctcttttgtaatatcacaaaataatcccatacatttttccctttattataccctttttatatttttttctttcttctttattattt

SEQ ID NO: 5466 - DNA, 328 bp, Gossypium hirsutum
  Clone ID: LIB3083-110-Q1-L1-G10
atatcatacctttatgggtgggagacttaaagtgatgcgagaatgaatgttaccctcattaatgtcctgcaaattacccttccttaagtgagaaaaaaccctccgtaatcgtactatattaacatttcatggacactctccactttcatggctccgcgtaaaattactagagaaagtgccccgatcttatataaaacaatatcccttctagagataattattatgcagctacaagacattggtgacaacataccgagttaacttttatgcaaatatcgaccagatgcaacgattttgattggtgtgttgcataaaccaacataatttt

SEQ ID NO: 5467 - DNA, 388 bp, Gossypium hirsutum
  Clone ID: LIB3083-110-Q1-L1-G11
gaaaaactcatccgaattgttaagcttgttcaatggagataatgggtttttcgttgctcttcaagttccttctcttgctctctggctttggggtttcaatggcgttacaagaaaccccattggtggctaaaaacttgggtcaaatcagttctaactcggtgcttgtggccttgttagactcgcattatacggagcttgctgaattagtggagaaagctttgttgttacaaagcttagaagagtctgtgggaaagcataatattaccatttttgctcctaagaatgaagctcttgaaaggaatctagaccctgaattcaagcggtttttgttggaacctggtaatcttaaatccttacaaactctattgctttatcacattgtgccgac

SEQ ID NO: 5468 - DNA, 239 bp, Gossypium hirsutum
  Clone ID: LIB3083-110-Q1-L1-G12
ggtttttttttttttttttttacaatcacaactggggtagcattttctttattaatatttcagggtttattgcaatggctaattcaacctgttgtttttccacacttgttattttcccctgcagggggtacattaattaacaaaaacaaagagcaccatatcgggtacctatgcaaactcatgattttgataagaaattggaaaaaggatacagtatgacagaaacaaaatgagtagag

SEQ ID NO: 5469 - DNA, 270 bp, Gossypium hirsutum
  Clone ID: LIB3083-110-Q1-L1-G9
gtcatagcttgtggtgttgtcaatccaaaaaactggagagtctcactcttggattgaacggaccaaaaaccctgaaacaaattgtctacaacagccggtgcgcaatccacacaaagtacaagacaaaaaaatcgccttgcatcactccaaacatagctctcaaaaaaaaagatgctatccgcaccagacaaagctacacaagatatacaatgtgttagacaacacatggggcaccgtgcattatataatgcagcaactttctcatatttg

SEQ ID NO: 5470 - DNA, 338 bp, Gossypium hirsutum
  Clone ID: LIB3083-110-Q1-L1-H10
ttaatttttatcatggatcattttcatgatgaattggttaaacttgggggcggtccagtagcttaaatggggtcatatcatcactagtttcgtatgcagaaaatgatgaatgggagacagttggaccaaaaaacaaatctgcagtcactagaactcaaagcttccttccttcagagttgagtgatatttttggaggacagttaagaagtgtggtgaaggcaataggaaataaagcttctgctactgttcaaccatttctattgctgcaccttgatatccatcctgaagcttgtcatactattgaggatgcacttcacttgttctcggctcccaatttt

SEQ ID NO: 5471 - DNA, 396 bp, Gossypium hirsutum
  Clone ID: LIB3083-110-Q1-L1-H11
aaatcataaaatataaattctatacatatcttgtaacttattcttcatatttgatatatatatatatatacattttcaatcaactagttaatgccacctttctcaaatcttaatatactatggtgaattaaatataaatctttttatgcatgtcccggagccataaaaggtgataacatcggtgtagccaccggtaccatagccggaggaatcgcaatcgaaccatcaccgccgccgccacaatggtaatccaaacattccaccggatgttcaagcgctgcttcacacactttctcacttctttgcctcggcttttccggcaaacaattccggcgatcatcaaaagccacaccattcgaactcaaattcccacaaatcccttcttcttcacaaaaa

SEQ ID NO: 5472 - DNA, 384 bp, Gossypium hirsutum
  Clone ID: LIB3083-110-Q1-L1-H12
cataaccaagatgtgaattctttaggcttaatctcagcaagaaaaacagctgaagctattgacatattgaagctcatgtcttcaactttcttggttgccttatgccaagccattgatttgaggcatttggaagagaatttgaagaacactgtgaagaacacagttagccaagtggctaaaagagtcctaacaatgggatccaatggtgaactccacccatcgagattctgtgaaaaggaccttctacgagtcgtcgatcgcgaatatctctatgcctacgccgacgacccttgcagtgcaaattaccccctaatacagaaactgagacaagtactagtagaccatgcattgatgaatggtgacagagaaaaagactccaccact

SEQ ID NO: 5473 - DNA, 390 bp, Gossypium hirsutum
  Clone ID: LIB3083-110-Q1-L1-H9
attccttcttggcaagcaattaaaagctttccgtgctcagacagatataatgggatcacccttcaacgagaggagccaaaagggtgacgatgaacccactaccagtggcatcaacttgcaggatttatatcaggcaaagatggacagtatcgctgctgctgctgcttctggcattggaagcagaggtggtgcggagtctcccatggagtcagttaacacaccaagcagcccatatgatagtgaagcaaactctttgagaacacccatcaaatcaaaacacaggtctacaacatcaatgtcttcatcttcttcttctaccccaactccagataaacattcacgaggctttagcagattcttttcctccaaagggaagaatgataattaaat

SEQ ID NO: 5474 - DNA, 406 bp, Gossypium hirsutum
  Clone ID: LIB3083-111-Q1-L1-A1
ccgttaccaaacagttaaattctccctcactttattttccttttttgtttgtctttccgcctattttttctctgcaatccaagcgagttgtcaactcagtgtctcagatcaccggcgccgattttgaaaccatggaatcgttcaggagtttaaccgtaactcagcgggatcagatattggttgagcaacaagtcttcgacatattcaaaacgttctacaacctgcctccgagttctcaatccttcatgttggagcttcaacgagaaaatcatgtggagtacttaacgaaaggattaacagggctcggtccttctttctgcgtattagatgccaatcgtccttggatttgttattggatacttcattcgattgctttactggacgagtttgtagatcctgaattgga

SEQ ID NO: 5475 - DNA, 397 bp, Gossypium hirsutum
  unsure (1)..(397): unsure at all n locations; Clone ID: LIB3083-111-Q1-L1-A2
attgttttggccttgatggtggtttccgccgcgacggtggttacggcggctgacgagagtgggttagcgaatgagtgcagcaaagatttccagagcgtgatgacttgcttaagctttgctcaaggaaaagcagcgtcgccgtcgaaggagtgctgtaattcagtggcggggattaaagagaataaacccaaatgtttgtgttatattttgcaacaaacacaaacctctggtgctcaaaatctcaaaagcttaggtgttcaagaagataagctgtttcagttaccatcggcttgtcaattgaagaacgctagcgtcagtgattgcccaaagcttcttgggttatctccgagctcaccagacgccgncatcttcaccaactcctgctttaaagcaacga

SEQ ID NO: 5476 - DNA, 413 bp, Gossypium hirsutum
  Clone ID: LIB3083-111-Q1-L1-A3
tctaaccgatgactttgattcagattcaagtcaaaagagccacgagacaagaaagaataatagatggtttaagaaatttttctcgagtttagatgcattgagaattgaggaaatcaacgacccagcaaggcagtggcactgcccagcatgccagggtggtcctggtgccattgactggtatagaggccttcagcctctgatgacacatgccaaaacaaaaggagcaaaaagggtgaaactccatcgtgaacttgctgaactcttggatgaggaattgtgtagaaggggtacttcagttattccttctggtgaagcttttggcaaatggaagggtttaaaagatgaagaaaaagatcatgaaatagtctggccacctatggttatgataatgaacacaaggctggaacaagatg

SEQ ID NO: 5477 - DNA, 357 bp, Gossypium hirsutum
  unsure (1)..(357): unsure at all n locations; Clone ID: LIB3083-111-Q1-L1-A4
ctgaaattttggatttcccttgattctaaattcaaatgattttgctctgacagaattccaaatcatgttctctattctttttcctatgttttggtattttgcatcaatgtagagattcttatggcaatgcggatgttgcgattgaaatgtgtagctcaatgggtgtagaagttacagacatctgcatggagaagcaatcagattgtgctatagtttactcgaatggtgtttcaaatgatgaaacatttcatagtcatcacaatgccatgcagtcgtatacggatggngatcccaagctccaaggtacagatgaaggcactgaagcaaaagaatatgaggtgaaggaatgcactactg

SEQ ID NO: 5478 - DNA, 368 bp, Gossypium hirsutum
  Clone ID: LIB3083-111-Q1-L1-A5
acaaaatacacattgaataaatgccttggtcttcacacagaagaagaagaagaagaggctgagcatctggtagctttctctttgttcctccaaactgtgtgcttagatatgaagacctagtccctgtgatcaaatcttgttgttcattgctgggtttaatttctcacgaaaaagaagatgacacatgataggcaaatcggtgtaacaatggatttctccaagggaagcaaagcatctcttaaatggtcaaccgacaatctggtagacacaggagataccctatacctcatccacgtcaaacccaatcagagcgacgagtctcgtgaccttatttggttcaccagtggctcacctttgattccattatc

SEQ ID NO: 5479 - DNA, 329 bp, Gossypium hirsutum
  Clone ID: LIB3083-111-Q1-L1-A6
caagctcaagctgaatatgagaaagcaaagaagcaggagcaatcatcctccagtacaaaacctagtgagatgcctggtgggtttccaggtggaatgcctggaggaatgccaggtggtttccctggtagtatgccgggtgggatgcctggaaatgttgatttcagtaaaatattgaatgatcctgaattaatggcagcatttagtgatccagaagtcatggctgctcttcaagacgtgatgaagaatcctgctaatcttgcaaagcatcaagcaaatcccaaagtggcacctgtaattgcaaagatgatgagtaaaagtaaatagttcat

SEQ ID NO: 5480 - DNA, 412 bp, Gossypium hirsutum
  Clone ID: LIB3083-111-Q1-L1-A7
ccaccaccaccaccatcaccccccaagcatccttacgaagtgcaagtccccacccccaccgtcaccacccaagcacccctacaagtacaagtcacccccaccacccccaccatcacccctcaagcactcttacaagtacaagtctccaccacctgctcctgcagtttacaaatacaagtctactccaccaccaccaccccattatgtctacacttcaccccctcctgctcaccactactaagccacggctttgaccgcgctccaatccaatgaaaagataatgctgtgatgcacataaagctacaaaaagatagtttgaaaaggatatatctcgagagataaagcaaaagattgggagcctatactagtctccgcgtctgaactgaagaacaataatgatgtagacaaattg

SEQ ID NO: 5481 - DNA, 327 bp, Gossypium hirsutum
  Clone ID: LIB3083-111-Q1-L1-A8
gatcacaaagttgagctattttcaatggaatgacaaaacttatagttggtacaatgaatatataactacacaaaactttcactctaattttattctgtcttgtgcatctccattcttgtttgttcatacatcacataccataatctaaaagaaccacgcaagatgatttttttcaacagttaatgccacacattgtagtgtctggtcctttggttttcatcacaaatggatcaattcggacccaaagcaaggagaagattgaagccaatagcactgaccatataacaacaatggttggtgtcctgttttgtctccccattaaacctt

SEQ ID NO: 5482 - DNA, 411 bp, Gossypium hirsutum
  Clone ID: LIB3083-111-Q1-L1-B1
ctctctttctcgtcaatatggcagcaaatggcgttgtttctgacaagagcttgatcgtcagcttcggtgagatgctgatcgattttgtccccactgtctccggtgtttctctagccgaagctcccggcttcctcaaagcccctggcggtgctccggctaacgtggccattgctgttgctagactcggaggcaaagcgtcatttgtcggaaaacttggggacgacgagttcggtcatatgctggccgatattctcaagcaaaacagtgtctccggtgacgggatcttgtttgaccaaggcgctagaactgctcttgccttcgttacgttacgcgccgacggagagcgtgagttcatgttctataagaatcctagcgccgacatgctgttgaagccggaggagttgaacgttt

SEQ ID NO: 5483 - DNA, 348 bp, Gossypium hirsutum
  unsure (1)..(348): unsure at all n locations; Clone ID: LIB3083-111-Q1-L1-B2
gaactggtattttggtaacaagaagtccatgttgatccccaattgtttgtttcgcgtcgggggttccgctgttttgctttcgaataagtctaaagataggaggcgggctaagtataagcttattcatgtggttcgaacacatcgaggagcagatgataaggcatttaggtgtgtgtatcangaacaggacgatgcanggaagacaggtgtttcactgtctaaagatttgatggccattgccggaggtgcactgaagaccaatatcactactttgggtcctctcgtgctaccaatcagcgagcagcttttgtttttcacaaccttggtggtgaagaaattgttcaatgc

SEQ ID NO: 5484 - DNA, 401 bp, Gossypium hirsutum
  Clone ID: LIB3083-111-Q1-L1-B3
gcatggtcaatatctcgggaagttgaatggtcttcacccgtcaaccacagtaaagcctgagcagctgcatccttttctgcaagtttcttgctgctacaaggctgcccaacaaaatccagcccattaaagatgactgtagatcggaactggttgttctttagttgctttgtcttgtaagtgggtggaaggtaatacccctttagaggccaaaacttaagtgaaagatcccatggaggcagaagctggagaaaatggccgatttggaaagggtgttacctttgtcggctctcgttcaaggtgagtgctattacttcatattttgttgctactggtttagccataagttataaatcaaaattttttttatcgaaactaggagttgacaatagttatagatttat

SEQ ID NO: 5485 - DNA, 396 bp, Gossypium hirsutum
  Clone ID: LIB3083-111-Q1-L1-B4
cgaagatgctgcaaccagtactggggctcccttctagtcggctcgagaacgattccctcatgcacttcaagtctcaacagctgatccaagccacctgcagtttgttatggctgcttctatcctgcgtgctgaaacatttggcattcaaattcctgattgggttaagcatccacagatgttggcagacgctgttgacaaagtgacagtcccagatttccagccgaagaaagatgcgaaaatagtaacagatgagaaggctactactctgtcaactgcatctattgatgatgcagcagttatcaacgaactcatcttcaagctaggactttgcacaaaaaattgcctcaaggattcaagatgaaacctattcaggttgaaaagatgatgatacaaact

SEQ ID NO: 5486 - DNA, 338 bp, Gossypium hirsutum
  Clone ID: LIB3083-111-Q1-L1-B5
atcaccggctttcattgcctcaactgtgatggagaatgggggccttactgaaggaactaattccacatcactgtttaaagaagccattcacgtaattagctgtggttatgaagaaaaaactgagtggggcaaagagatcggatggatttatgggtcggtgacggtggatattctaacaggtttcaagatgcattgtacagggtggaaatctggttattgtgtaccgaaaagacctgcattcaaagggtgcaatccaatcaatctatcatatcgtttgcaccaagatacgagatggtcactaagctctgtataaattatgcttagtcgacactgtacac

SEQ ID NO: 5487 - DNA, 389 bp, Gossypium hirsutum
  Clone ID: LIB3083-111-Q1-L1-B6
tgataatcaaaatgttgcaggaacctgagccagatgaggaagtagaaaatgaagcagatgaaaggctgttgttgagttcatggctgatctcgttgccaagagggataccaaggcaacaccaccaaagaaggagaaaggtttttggttcaggatttgctcgatttgttagccgttccggaccgcaaatacggacgacaagatgtgtgtgtgtgtgtttttttatgccagtcccattactttgtaaattatttgtgagattggtgagcttttctgcaaagttcaaaatcttgattgcttgcaagtgttttcaaattcaagagaagtgaaaaacctacaattgtaaatcttttggcatctattctatagcttccaaattctacttttagtat

SEQ ID NO: 5488 - DNA, 393 bp, Gossypium hirsutum
  Clone ID: LIB3083-111-Q1-L1-B7
ctccccgtaagcaaaccacaaaggaaagcttggagagagacgccaaaaacaatgtctaaggaagttagtgaagaaggacagggtcgtaaggactatgtggaccctccaccggcacctctgattgacatggctgaactcaagtcatggtctttttacagagccctcatagctgagttcatagccactctcctcttcctctatgtcactgttgctactgtaattggtcacaagaaacaacaagatgcatgtgatggtgttggtctcttgggtattgcatgggctttcggtggcatgatctttatccttgtttactgcactgccggtatctcaagtggacacattaaccctgcggtgacttttgggttgtttttggcccgtaaagtgtctttcatt

SEQ ID NO: 5489 - DNA, 265 bp, Gossypium hirsutum
  Clone ID: LIB3083-111-Q1-L1-B8
ccctctcatcccaattcttaaccataaaccaacgtggcatgggggttatactcgaatttttgtgatactctttctctatgctatgttctttcatacattattgctaatctactttcattgtctattgacatggatcaactatattatgctgtttcaacatgtatggaagtcttaaataaatatgcactatgcgttctatattttgaaatgggactactgtttgtgtcaaaaataaacaacattattcctgtaagtgaatctgtct

SEQ ID NO: 5490 - DNA, 409 bp, Gossypium hirsutum
  Clone ID: LIB3083-111-Q1-L1-C1
gtgattctcatattgatattcatcccgctgttaatcatagattgaaggaaggtgagactatccggattaatgtgaagcacaagccatctagtggaaccggtatgctttcagctgcgggattgtctggtagtggaaagcctaagaccttgagccttgctccaccacccagtggtgctggaaaaataaggtctcctctcccaccccctcccaatgaccctgttgctgctcggcttgcctctactagtcaaggtgttggtcaaagagcacccaaagaaaacatgaaacaaaccaacccatcaacatatttttctcaactagagaggaatcaccttccagcaaccggatcaggatctacgaagaccactgcatcaggatgggcagctttctaaatttgcattatcatttattc

SEQ ID NO: 5491 - DNA, 378 bp, Gossypium hirsutum
  unsure (1)..(378): unsure at all n locations; Clone ID: LIB3083-111-Q1-L1-C2
cacaagttggtcgagatgtatgctatgtgcagtttcctcaaagatttgatggcatagataggagtgatcgatatgccaataggaacacagttttctttgatgttaacatgaaaggtcttgatggaatccaagggccagtttatgtgggaacaggttgtgttttcaataggcaagcactttatggctatggtccaccttcaatgccaagttttcccaagtcatcctcctcatcttgctcgtgttgctgcccgggcaagaaggaacctaaagatccatcagagctttatagggatgcaaaacgggaaagactttgatgctgccatctntaaccttannggaatngacaattatgatgagtatgaaagatcaatgttgatc

SEQ ID NO: 5492 - DNA, 333 bp, Gossypium hirsutum
  Clone ID: LIB3083-111-Q1-L1-C3
attattttcgtaacattttgaactcatggaaatgactgcgggttcccttacaatctctccaagaaagcttccatccgaactctactcttactcctatcagaatgatgcaaaaaccccactggtgatgtcagtcctggcttctcttattgagagaacaatggcaagaaacgaaaggatagccaataactgtaaatgggcattggcaaaagattgcaatatgcagagttttcgagtgccaggagacaccagacatgactattcaatcctacctagaaagaatcttccgttacaccaaagccggaccatccttttatgttgtgacatatttatatt

SEQ ID NO: 5493 - DNA, 362 bp, Gossypium hirsutum
  Clone ID: LIB3083-111-Q1-L1-C4
gagggctcaaaggcactattggtgatttcagcaactgagagctgggcgtggtaagccttctcagcagagatgactggagcatacgaggaaagcatgaagtggattcttgggtagggaaccaagttggtttggaattcagtcacatcgacattcaaggcaccatcaaacctcagtgaggcagtcaaggaggaaatgacctgtgagacaagacggttaagattggtgtaggtgggccgctcaatgtcaagagaacgcctgcaaatgtcgtagatagcttcattgtcaaggagaacagccacatcagtgtgctccaaaagggagtgagttgagagaacactgttgtaaggctcaacaacagaagt

SEQ ID NO: 5494 - DNA, 390 bp, Gossypium hirsutum
  Clone ID: LIB3083-111-Q1-L1-C5
attgaagctagctagctccacattatctatggctgcaaaggttcttttgattgctgcctttgatcttgatctcatggctcatggtttagctgcggcagctgatcaaataagaagcgctgccaagattgtccaaaacagtgaagttaattataactattgcgtctatgactcagacatatcaacaggctatagtgaccgtgcatacatgatccttatggttagccaagcccttgtaatggctgcaaacaaatgcttctgctgtggaaagggtttaaacaccatcgatgcaagcgcctgggtcatcatgctttaaataggactgtggtgtgtgaacctgattgcagagatatactcgctggccggatcgtgagaaatgcctaccctaccaaa

SEQ ID NO: 5495 - DNA, 261 bp, Gossypium hirsutum
  Clone ID: LIB3083-111-Q1-L1-C6
cagcttgaattcatttcctggtgaaccgtatcatgtggggagtgggatccccccagcacctgttcctgcaccttcagctgatacaacatcaggtatgaattggtaaatctaagtgaacgaagtaaagccatgttacttggaccgaagtgtgagtgttgaatataagtatgtatgagtttgacatgggcatgctaaattatcccatgttattatgtgtctttagcgggtcatatgctcacatgcatgttcgatgggtacaac

SEQ ID NO: 5496 - DNA, 405 bp, Gossypium hirsutum
  Clone ID: LIB3083-111-Q1-L1-C7
gcctttttcttctgtttgctgagctctctcccccaacatgagcatggcagatagggtataccccaaacaagcgacaaatggcaccgccgccacatccaacccttcttttccggccactaaagcacaacaatacggagccacccgccctgtctaccgtccacaacccgaacgccaccgctaccgccgctcttgctgttcttgctgcctttggaccaccatagctatcctcgttctcatcctcatagccgccgtagcttctgctatattgtacgttctttaccgccctcaccgtcctactttcactgtttcctccctcaaaatctcggcacttaacgtaacctcagcttccaagctgatcaccaacatcaacctaaacgtcacagccaaaaacccaaacaagaaagt

SEQ ID NO: 5497 - DNA, 228 bp, Gossypium hirsutum
  Clone ID: LIB3083-111-Q1-L1-C8
gctgagctctttcccccggcatgtgcatgtcatatagggtataccccaaacaagcgacaaacgggaccaagggcgcatccaacccccaattccccccattaaagcacaactatacagatcctcccgccctgtctaccaaccacaaccctgacaaaaccgttaccgtccctaatttaattcttgctgactaaataccactttagctatcctggttattatccaaatagc

SEQ ID NO: 5498 - DNA, 346 bp, Gossypium hirsutum
  unsure (1)..(346): unsure at all n locations; Clone ID: LIB3083-111-Q1-L1-D1
atcctcttcaaactcaaaacttaaatacaaacatcattcaacagaaattaaaactttattgcaatcaatgggaccaaacccagagttcaaaacattccaaggggaaaccccaaagttgaaattaaacatttacgaaattgaaaaaaagaagcaaaaataaaacttcaatagcaatcattcttggaaattccttggtttccaagcagccttttgctttttctttactcaacagctagtggaacagtcttgacccgattgttatacatccatgcatgcaacatttcaatgtaacgctngcgcccacgttgctcctggtaagctacatgtttcgaaaagccataaactc

SEQ ID NO: 5499 - DNA, 403 bp, Gossypium hirsutum
  unsure (1)..(403): unsure at all n locations; Clone ID: LIB3083-111-Q1-L1-D2
ggcatttcatgggacaatgaggctaacctttgtgggaatgatatgtgctggtttaaccattggcatgtatgcatcgcctctatctgtcataaggacagtgataaagacgaagagtgtggagtacatgccatttttactctcatttttcttgttcctcaatgctggtgtttggtctgcttatgcattgcttgtgaaagatatctacattggagtgccaaatgcaattggttttatcttgggttcagctcagttgatcctctatctcatgtacaataacaaaaaatcagctgaggccgtagaagaagaaaaaagangaggaggaagaggttcaactcatntggtgaaggaggcattgagatgcattcagttgaggacaatctaaacaatcgaagcctaaacaaat

SEQ ID NO: 5500 - DNA, 301 bp, Gossypium hirsutum
  Clone ID: LIB3083-111-Q1-L1-D3
ccgataccaaacagttaaattgttcctcactttattaaccggatgtgtttgtctaaccgcctatttgttctctgcaatccaagcgagttgtcaactcagtgtctaaaatcaccggggccgatttagaaaccatggaatcgtacaggagttgaacctgaactcagcgggatcagatattggtgcgagcaacaagtcttgagacatattcaaaacgtgctacaacctgcctgcgagatctcaatccttcatgttggaacttcaacgagaaaatcatgtggcgtacttaacgaaaggattaaca

SEQ ID NO: 5501 - DNA, 298 bp, Gossypium hirsutum
  Clone ID: LIB3083-111-Q1-L1-D4
gtgggtttacttttcttgatattggcttcactaacaagccgctggggtagccttcctagtgaatactccatagtggaacatgagattgacgcatttctttcggaggaaagggtgttggagatcttccaacagtggaaagaaaagcatcggaaagtgtaccggcacgccgaggaggctgagaaaaggtttgaaaatttcaaggggaatttgaagtatatcctagagaggaatgcaaagagaaaagcaaacaaatgggaacatcatgtgggattgaacaagtttgctgatatgagcaatg

SEQ ID NO: 5502 - DNA, 374 bp, Gossypium hirsutum
  unsure (1)..(374): unsure at all n locations; Clone ID: LIB3083-111-Q1-L1-D5
ttgggttattgtagctagctagctccacattgtctatggggtcaaagcttcttttgattgctgtctttgttcttgatctcattgcttttggtttagctgtggcagctgagcaaagaagaagcactgccaagattgtccaagacagtgaagttaattataactattgtgtctatgactcagacatatcaacaggctatggtgttggtgcatttttgttccttatggttagccaagcccttataatggctgcaagcaaatgcttctgctgtggaaagggtttaaaccccagtggttcaagggcctgngcagtcatccttttcatagtctgctggttgtttttcctgattgctgagatatgctttgctgctgggatc

SEQ ID NO: 5503 - DNA, 396 bp, Gossypium hirsutum
  Clone ID: LIB3083-111-Q1-L1-D6
tctttctttaattttaagctttgggggtctcttttgtctgttaaatgttttcaaccatggcatttgatggtggggtgggtttcaagttgttcatggacagccaagctgatttgtcattggagattaggaagaagaagcttagtggattgcaaaagagagaggcacttgaaaaagaggtttccatgcttcaaaatatgctaaatcaagaagaaaaaatgcatgagattcttacacaatttcagcttcaagaggatggctcttccatctctatcccagatttcctccctccgaaaatgaaggagctattaacagagctggctatggtagaaagtgagatagctcatttagaaacccaaataagccagcttaaacatggtctaaaccaagaacatgaag

SEQ ID NO: 5504 - DNA, 251 bp, Gossypium hirsutum
  Clone ID: LIB3083-111-Q1-L1-D7
ctattgcttgataaaaaacactggtagggaaaaccgaaaccaaaatctcttttctcttcaatgggtgatgcttatgagttaattatgagccgcatcaggagtaaccccttacactgttcctttgtgtattaaggtgaaattaaaaggtaattacacattgtcgccatcaaacatttgtaaatataacatttatgatgttataattcaccgccattgatcaagttcctctctttgttaaattaccatgaatt

SEQ ID NO: 5505 - DNA, 400 bp, Gossypium hirsutum
  Clone ID: LIB3083-111-Q1-L1-D8
ttggtgtttttagttctgttgttctccctatatttgatggtgtttgtgaaaagagagacaaggctctacaaactgagcaggattcaccaactacagaatctcctcattgcgatgcaattacatgggacactgaaacttctgctgtggcattacattgtttagtagatttatttattagtttctatgatgtattgaggccccggctatcagatgtggtatgcatactgacaagatacttaagaagttcaatacagggtcctgcaagcactggggttgcagcattgtctcatttgacaggagagttaggaagcagactttcagaagatgaatggcaagaaatattactagcattaaaagaagcagccatgtctactttgccagggtttaagaagcttttgac

SEQ ID NO: 5506 - DNA, 314 bp, Gossypium hirsutum
  Clone ID: LIB3083-111-Q1-L1-E1
ctgagttggagattgctgctaaagctgcagatgaactaaggaaggaaggcaagaccgttagggttgtctcctttgtttcttgggagctctttgatgagcaatcagatgcctacaaggaaagcgttttaccatctgctgtatcagctagggtgagtattgaggctggatcaacatttgggtgggcgaagattgttggatccaaggggaaggctattggaattgaccggttcggggcaagtgcaccagcaggcaaaatatacaaggagtttggcttgactcctgaggctgttgttgcagctgcaaaagaactttgc

SEQ ID NO: 5507 - DNA, 371 bp, Gossypium hirsutum
  Clone ID: LIB3083-111-Q1-L1-E3
atcaagtcttacagtgaagataatgttcacaagagtatcaaatacggtgtttgggctagtacacctaatgggaacaaaaggttagatgctgcctaccgtgaggccgtggagaatcaagacaattgcccagtgtttctcttcttttcggtgaatgctagtgctcagttctgtggggttgcagaaatggttggacctgttgattttgacaagagtgtggattactggcagcaagataaatggagtgggcaattccctgtcaaatggcatattatcaaagatgttccaaacagtcagctgcgtcacatcatactggaaaataatgataataagcctgcgactaacagtagagatactcaggaggtgaaactgga

SEQ ID NO: 5508 - DNA, 341 bp, Gossypium hirsutum
  unsure (1)..(341): unsure at all n locations; Clone ID: LIB3083-111-Q1-L1-E4
agcttgacttggttttcaattttcacaaggtctatctgatgactgggggaattcattcttgctggagagcttcaagaaacaagcaaaaaggctataatagagagaatgggagagctggagaagctagagtaaagatgattctgcatgaaacagagattagtgcaatttgtgttgaattttctccatttgttgcttttctttttctgtgtgtgatattattaatttgtgtgcaatttgaaaactgaatacatggtgtccctttactcctgttttcctttgctacaatattgactaccaaaaatagagctgtgggacagtttttttnaaaaaaaaaaananaa

SEQ ID NO: 5509 - DNA, 356 bp, Gossypium hirsutum
  Clone ID: LIB3083-111-Q1-L1-E5
gagaattagtgtccacattggtcaagctgggattcgggtggggaattcttgctgggagctctactgtcttgaacatgaaatccatcctgatggaaccatgcccagtgacacctcagtcggtgtagcacacgatgctttcaacactttcttcagcgaaacgggttcaggaaagcatgtaccgagagctgtctttgttgatctggaacccactgttatcgatgaagtgcggactggcccttatcgccaacttttccaccctgagcagcttatttctggcaaggaagatgctgctaataactttgccagaggccactatacaattggaaaggaaatttgtgatctctgccttgatcgag

SEQ ID NO: 5510 - DNA, 265 bp, Gossypium hirsutum
  Clone ID: LIB3083-111-Q1-L1-E6
tctaaatccaatgattcttgagactctttatcatcggcgtgtttgtgattttgccatataatctgccttcgcttccatagggtacttaatttagtgctcattgttgtggggatctgtgaaaatgaatggagctgtgcttgtagctcttgcatcacccattggtaatatgttgcaaggatgggataatgccactattgcacgcgctgttttgtacataaagaatgcgtttaaattgctaagtgcaccaactatataaggtctgatt

SEQ ID NO: 5511 - DNA, 325 bp, Gossypium hirsutum
  Clone ID: LIB3083-111-Q1-L1-E7
cccatactttctgatgatactaatgggaccattgcggcaggcgaatatcttcataaaggggtttatcgtcccaacgtgtacattatatatccctgcaacaacgccatgcattccttcaatacaggaatttatggcgcatcgcataaatgttaatactactcacttattttacggtactggatacaacgctccttttcttatttacaatagactgaacatgatgctgcatatttacttggacctattcagaccatctagtaattctatcttctttgatacattggtaaagaccctctttaacataaaactggaacacatctttact

SEQ ID NO: 5512 - DNA, 355 bp, Gossypium hirsutum
  unsure (1)..(355): unsure at all n locations; Clone ID: LIB3083-111-Q1-L1-E8
cggcacgagttgaagatgtgattgacaattatattggtgtgtttgcatccaagaaaggtgggacaatcanaaactcgattatccacagaaaggaacttcataatcttgcatcagagattgaaaaactcaaatctagaatcaccgacctgaccagaagtttgcagacctatggaataacagcaagaaaagaaggcgaagggtctagaattttatcagagaggcaaaggcagctgagatggtcttattcacatattgtggaagagcatattgttgggtttgaagaaaacataaaggaactgatggtgaagttaattcatgaagaaaaacgttgccgcgttgtgtctatctgtgggat

SEQ ID NO: 5513 - DNA, 288 bp, Gossypium hirsutum
  Clone ID: LIB3083-111-Q1-L1-F1
cttaaaggtcttaaattggcaaacaggtgaaaaacctttcggtggaatgaaagaaaatgggttggattttaaccgaatcaccccaagtcttattatggccggtaaggggcttgaattaaaagggaccgaccttatggaagccaccacttaagcttaaaactttttactgattttagggaaatggatgtagcatgccctaccttattgacaatagatgaaaaggtgaagcctttttacttggaccaattgaaaccatttggttattttatttttaaggattcctttttg

SEQ ID NO: 5514 - DNA, 303 bp, Gossypium hirsutum
  Clone ID: LIB3083-111-Q1-L1-F2
tgaaaaatcagatcttttaaatttcaaagattgaaagaaaagcaaaattgttatatcggtacctttttgagagaattggttgaagacttaacttccgattatttccgatgaggaaaggaagaggagccaccgcggctgccgatgcagcgatgaaaccggcggtagaagccaacggatcggtcaaagaactaaggtacagaggtgttaggaaaagaccatggggaagatttgcagcggagattagagatcccttgaaaaaaactagggtttggctagggaccttcgattcggccgaagaagctg

SEQ ID NO: 5515 - DNA, 407 bp, Gossypium hirsutum
  Clone ID: LIB3083-111-Q1-L1-F3
tggaaaagttcgccttgttatgaggcaatctaagactctcaagatctgcgccaatcattatgtgttggcaacgatgacggtgcaggagcacgcaggaaacgacaaatcgtgcctatggcacgcttctgactttgctgatgatgaactgaaagatgaacttttctgcattcgttttgcgtcagtggaaaattgcaaaagcttcatggaaacgttccgagaagttgctgaatcacaaaaatcaacagaggaaaataaagaggcatctgctgcagctggtctacttgagaagttgagtgttgaggaaaaggaagccaaggataaagtggaagagaaggatgttaaagcaaaggaagaaacggaaacaaaggaggatacaaaaaaagtagatgatagtgagaagaaagatg

SEQ ID NO: 5516 - DNA, 407 bp, Gossypium hirsutum
  Clone ID: LIB3083-111-Q1-L1-F4
tgaagctcttgtttctaactttgctgctttgttctcttctgctatgttcttcagtttttgcaccaacaatggctcagcctcgttcacctttttgtgaagggaaatgcaaagggaggtgcaataaagcggcggtttgggatcggtgcttcaaatattgcggcatatgttgcgaggagtgtcaatgcgttccgtccggtacttacgggaacaaacacgagtgtccttgctacagagataaggtgaacaacaagggcaaacccaaatgcccttgaaaatgaaatatattcgagttcgggatttaatcaagcttaaagatcgaggacgaagaggccatatatatatatatatgcatgttgatgatgatgttattataaaaataaacttgttttgttgctggtattttcctt

SEQ ID NO: 5517 - DNA, 387 bp, Gossypium hirsutum
  Clone ID: LIB3083-111-Q1-L1-F5
gctactaaaatgtgtttattgtgatgttggcaaatttacaagtatgtctctgagctctacacaatgaaaacgatgcaccaaatataattttttttttaataaaaaccataactaaaaagaaacctagtattattactacaactacgtactaaatttcatcatatggaaatgctgttggtaattccacgaccagttacaccagggcctgatgaaggcagcagcagttcgtatggaggaatgcctgcaccggttcggtttttaagtctcatatccttgtttctttcgtttatgatttcctcgatttccccaagttttgcggcgaattggtcaaacatttgtaacactttatgatcattgatccagctgctatgaaattcgttcatttta

SEQ ID NO: 5518 - DNA, 373 bp, Gossypium hirsutum
  Clone ID: LIB3083-111-Q1-L1-F6
ggaatattccaggaaagtccccatggcagatggagctcctgctgcatctgcagattcaagggtaatggattttggctcagtcttcctcctgtctcccatcaagggtgacggtgatgaggtttctgcagcaaacgcatctgcagctggcagccagcagcctggcctgaatgtggccgagttggttgttggacgtggctttggcactgtgataagacatagagattttgaggaaagatcaaactattatgatgcccttctggctgctgaatcccgtgctatttctgggaagaagggaattcattctgcgaaggatcctccagtcatgcacattcaagaccttacaatggcatcagccaagaaagctagggatttc

SEQ ID NO: 5519 - DNA, 363 bp, Gossypium hirsutum
  Clone ID: LIB3083-111-Q1-L1-F7
gtgtgagggaaaaaaaaagtccatttgcatttagtgtacttaagttgttgaatgttacaattacatatgggactcaagaaattgtagcactgctaaaccggctgcccaaacatcgtcttccaatacatgctcctccggggagtgacttatgccgccccgacaccggacaaacagcattccaaccttggttagatgagatatggccatcgcatcatgccctgctccgctcattagcactggaacctcttcatgaatctgccctaccattttgttgacagcactgtaagctgcagattttagccgtgaactcagttcttgatcacaaattactgcatttgcatcatgcttccgttcaatgatgca

SEQ ID NO: 5520 - DNA, 400 bp, Gossypium hirsutum
  Clone ID: LIB3083-111-Q1-L1-F8
tctctctctttctctctctctctctcgcctcggtcgtttgttttcttttcatttctttaggagggtggtcaatatggggtcttcgattttgccagatctcggagctgagatcttgatccccgtttgcgccgttattggaattgtcttttctcttgcacaatggcttcttgtttccaaggtgaagctctccccgggtcgagactcgggttcccccggtaacaacggtgcgggtgggaaaaacggctattccgattacctcattgaagaagaagaaggtcttaatgaccataatgttgttattaagtgtgctgaaattcagaccgccatatctgaaggagcaacctcatttcttttcactgagtaccagtatgttggcattttcatggttgcttttgcaatc

SEQ ID NO: 5521 - DNA, 394 bp, Gossypium hirsutum
  Clone ID: LIB3083-111-Q1-L1-G1
catgctcagaaatgttttagatatgaatgctcgttatggtggtttaaatgctgcattactggaaggagggaagtctgtctgggttatgaatgtagtcccaacaagtggacctaactaccttcccctcattcttgacaggggctatgttggtgtattacatgattggtgtgaagcatttccaacatatcctagaacttatgacatggtccacgcagatggacttctatcccttgagactagtcaacatcggagatgcaccatgcttgatctattcactgagatagatcggttgcttcgtcctgagggttggatactaatccgtgacgccgctcctcttgttgaatcagccagagctctaacgacacggttgaagtgggatgccagaatcatagaa

SEQ ID NO: 5522 - DNA, 394 bp, Gossypium hirsutum
  Clone ID: LIB3083-111-Q1-L1-G2
aagggtttacgtgtcacagtcaaactgactgtccagaaccggcaagccaaagttatggtggttccctctgccgccgctttggtcatcaaggcactgaaagagcctgagagggatcgtaagaagacaaagaatattaaacataatgggaacattagcctcgatgatgtgatagagattgcaaaagtgatgaggcccagatccatggccaaggatttgagaggaaccgtgaaggagattttgggaacttgtgtctccgtcggttgtacggttgatgggaaagaccctaaagacctgcaagaggaaatttctgaaggggaagtcgatgttcccttggagtgaaaaacaaagtgattattatttttgaagtttgtgtttaatgattgctttccctttt

SEQ ID NO: 5523 - DNA, 403 bp, Gossypium hirsutum
  Clone ID: LIB3083-111-Q1-L1-G3
aacacacttgctagtattcctacttggagtggtgactctgaccacgcccacatttggtacctatgagtcaccaaattatgggaaaccccctactcctgtattcaagcctcccaaggtgaaaccaccaccatatgaacctaagccaccagtgtatgaaccaccaaaaaaggagaagcctgaacctaagccaccggtttatgcacctccaaagaaagagaagcatggacccaaaccaccaatgtatgaacctccaaagaaggagaagcctgagccaaagccaccagtttatacacctccaaagaaagaggagcctaaacctaaaccaccagtatatgaacctgcaaagaaagagaaacctgaaccaaaaccaccgatttatacacctgcaaagaaagagaaacct

SEQ ID NO: 5524 - DNA, 402 bp, Gossypium hirsutum
  unsure (1)..(402): unsure at all n locations; Clone ID: LIB3083-111-Q1-L1-G4
gtcgattccgatatccatggctggaaacttccatcaaatggatactcaatcggcggcggaaaaggccgtttcggttatcgggtatgggtacgatttatgtaatgatttaaggttatcggcttgtaaacctggtccttccgggtctagattgattgaacttgactcagtggtgagtcgggaactggtttttccgggtggggttgctgttaaaaacgtgcccaattcgattaaatgcgataagggcgagcgtactangtttcgttccgatgttctttcgttcaatcagatgtcggaaaagttcaaccaagatctctcattatccggcaagataccttcgggtttattcaatgccatgtttgagttcaagggttgctggcaaaaagatgccagttctacaaaatg

SEQ ID NO: 5525 - DNA, 391 bp, Gossypium hirsutum
  unsure (1)..(391): unsure at all n locations; Clone ID: LIB3083-111-Q1-L1-G5
cggcacgagattgaaagaaaagaaaaatggttctgctagagaaactttgggatgatgtagtggccggtcctcaaccggaacgtggccttggccggctgaggaagatcaccaccaccccacccttgtccaccaaagatgaggcttcatcaatggcgatgccgacgagtccgacgacacctgggacaccatcgacgccggtgtcggctcgtagggacaacgtgtggaggagcgtgttcaatccaggtagcaaccttgcaaccaaaggtattggcgctgaagttttcgacaagcctcaacctaactctcctactgtttatgactggctttacagcggngagacccggagcaagcatcaccgttgattaggcggtggctgacggcggcggatggt

SEQ ID NO: 5526 - DNA, 396 bp, Gossypium hirsutum
  unsure (1)..(396): unsure at all n locations; Clone ID: LIB3083-111-Q1-L1-G6
gaatctctgtaagataaaaagggtcattggtgggtgttttgtcttgaattttgattganaggaaataattgtttataaaaaaattgtgtacaaagttacaaaatagcaaaggaaatggaagatgctttgtgaataaataatttcgccatcatttgacttggcaaaagagcatgtttagttggtttccaagtgattaaatttcaagattgaaacagagtaggccccaaggaaaagcttaatttcagtagtttaatgactttgtgcggcctaccgacaagaaacaaagcatatttacgaggaagtatatgattctcaaagagttggggggtgacaacattattggggagggggggttctagaaaacttttgatcaaaaactgacgtatgggtattgat

SEQ ID NO: 5527 - DNA, 328 bp, Gossypium hirsutum
  Clone ID: LIB3083-111-Q1-L1-G7
ctagtctcgagttttttttttttttttttttattaaattaagataaaattcggttcggttcggttcggctcttttctgttctgttttaataatatttgtggttttttttttttttttaagttatgaaccgagaaccgaatgaatacattacattgatattattaatctaatcaaaaaccgaagcgaaggctaaattcgaatcggatttctgctaattttaggcatttttctcagcccttgtagatatcacacatcagcaaacacatggtattctttggaatcaacagctatgagcctcaaagatgcaatcgttgctgcaatggacatg

SEQ ID NO: 5528 - DNA, 403 bp, Gossypium hirsutum
  Clone ID: LIB3083-111-Q1-L1-G8
cttactgctcatatcaccatccacccaatctggtgcggggggtggcagaaatcacagaagaaaatcatccgtgagttcatcaactcgatctccgccgttgattccaaacacccttcggtggctgggtggtggaagaccgtacagctttacaccgaccaaacgggagccaacatttcccgtacggtgctattaggtgaagagaaaaacgatcgtttttactcccacgggaaatccttcacgcgcttatcgatacagtccgttatcaaaagcgctgtaacggcccgtacgaaaccgttacccatcaatcccaaaagcgggttgtacctcttgctcacctccgacgatgtgtacgtcgaagatttttgcggccaagtctgtgggttccattacttcacgttcccct

SEQ ID NO: 5529 - DNA, 400 bp, Gossypium hirsutum
  unsure (1)..(400): unsure at all n locations; Clone ID: LIB3083-111-Q1-L1-H1
caacagtgagaaggaggtgaacattgagcagccagtgcggagaaccaggaagatagcaaaatccggccccctggattatagagtacaagagaagttgcttgcccctcctaggagcctaaaattgtctgggccactagacagaaaaatgcaggagaaactggtgttcaactataagagccccgtaacatctggtcctattgatattgcaattgcacaagagaggttgattctcacaacaaataggagcccaaaactatcagcacctcttacttatgtaagacctccaagcccaaagattcatggtgactactacaaggaaaagacaggtggngactatggtgatcagacattgtgggctgcaatgtttcaggacatgaaacccacttgacttcaccacatg

SEQ ID NO: 5530 - DNA, 346 bp, Gossypium hirsutum
  Clone ID: LIB3083-111-Q1-L1-H2
tttttctatcaacatttatatttattttaacatttatcatccttttctggtatcctttattatataaaattcttccctttttattatatatttcaatatatttttttgccccccctaaaaacctaaaattgtctgtccaaaaaacaaaaaaatgcaggttatactgttgttcaactaaaaaacccccccacatataataaaattgaaaaaccaaaaacaccctatatgttgattctcacaacaaataaaatcccaaaactctcaccacctaaaaaaaaaaaaacacctccccccccgaagaaacataatgactactacaatgaaaagacagccccggactattttt

SEQ ID NO: 5531 - DNA, 404 bp, Gossypium hirsutum
  unsure (1)..(404): unsure at all n locations; Clone ID: LIB3083-111-Q1-L1-H3
ggatcactagcccaatacgggatgaaacacatgcgatcccgtgcggacatctgcaatgccaggattcagacagaacagatggctgaggcatcggcacaagcttgtgtcagcgttcctactggtcgttggagctctcttcagaaagggttcagtgcataaaaataccactggaatcggcaaatattatcggccaaagcttggattatgtttggatttactgtgttttcttatatcccgaatagttcgaatggtgctgcattntgatgattattcatgcggtttcttatttctgaagttatgtcggaacaactctaataccagactgctaaatttatgtaaatatgctttaagatgtgttctataatacacgacgatgtttgtatataaatgatctatgatggaac

SEQ ID NO: 5532 - DNA, 410 bp, Gossypium hirsutum
  Clone ID: LIB3083-111-Q1-L1-H4
gaagattcagttgtgaaatctgaacaaagtcaaattgagaatgcgaaggaagagcagagcatgttaaactccaatctatacgctggcctgcctgaggatgaggtcaaacatgaaactgccagaacaaagaataataaaacgagagtatccaaacatgtatcaaaacctgctgcagcaaatgttcgaacgaagcacactgttccgcagccatttgcccttgcaactgaaaagcgtgcttcatctggacctcgtcctgctgtgtctgaagctaatgctggaactggtttgaacaaatcttctagcataaattgtgcacttcatctaaacacaagaaaacagaatcagcagccccaattggtcttgaggaagcctctgcaacctaataacaagaagcattctgatgatgatga

SEQ ID NO: 5533 - DNA, 377 bp, Gossypium hirsutum
  Clone ID: LIB3083-111-Q1-L1-H5
cttcctttcatcttcttcttatctttctttataatcgccacgaacattgacgtcagccggcgccgccgccgccaccatcaaactctccctctctcccttccctcacccttcttcctcccatccttaccaaattctcaacaacttagtcacttcttctgttgcaagagcccaccacctcaaacaccccaaagccaaggccgataatactacctcttctcttctcagggcttccctatttcctcacagttatgggggctacactatctccctcaaatttggaactgcgcctcaaaccctttctttcattatggacactgggagcagcctctcctgggtcccttgcacctctcgttacctttgtcccaatgcgctttccc

SEQ ID NO: 5534 - DNA, 404 bp, Gossypium hirsutum
  Clone ID: LIB3083-111-Q1-L1-H6
atcacttccatcctcgaaaaaggtggccaattcaccactggcatcaagctattgaaagccacacaggtggctgatcaactaaacaaccagctaagcacaccggaccttaacgacgggttaacggtgtttgcgccgagtgacagcgcgttctccggactcaaacccgggacgttaaactcactttccgacaaagagaagcttcagttggttcagttccatatactcccgacgttaatgtcgacgtcccagtttcaaacggcgagtaaccctttgagaacccaagctggggatgttaaaggtgggaagtttccgcttaatgtaacggcggacggaaaccaagtgaatgtgacgaccggagtggtgaatgcgactgtggagaatagtgtgttttctgaccggaggat

SEQ ID NO: 5535 - DNA, 246 bp, Gossypium hirsutum
  Clone ID: LIB3083-111-Q1-L1-H7
gggattatctttttgaagccttcttccaaattcctcggtcgcgatttttatatgagtggcgagcctcactggcaagaccataaccctcgaggtggaaagctctgataccatccacaatgtacagaccaagatccaagacacggaacggatcccactataccaacagaggcttatctttgttgctccacagctggaggattgccgtaccctcaatgcctacaacatccacaaggaatgcacactcca

SEQ ID NO: 5536 - DNA, 394 bp, Gossypium hirsutum
  Clone ID: LIB3083-111-Q1-L1-H8
cttaaccgccttgtctctcaggttatctcatctcttaccgcatctttgaggtttgatggagccctgaatgtggatgtgactgagttccagactaacctggtcccatatcccaggatccactttatgctttcttcttatgcccctgtcatttcagctgagaaggcttaccatgagcagctatcggtggctgagataaccaacagtgcttttgaaccctcttcaatgatggccaaatgtgacccacgacacgggaagtacatggcttgctgccttatgtaccgaggagatgttgtgcccaaagatgtgaatgcggctgtggccaccattaagaccaaacgcacaatccaatttgtggattggtgccctactggattcaagtgcggtatcaactacc

SEQ ID NO: 5537 - DNA, 395 bp, Gossypium hirsutum
  Clone ID: LIB3083-112-Q1-L1-A1
atcagaataataattatttattgcatttttcaatattaacaaacaaaaaaatgaaatatttttaatcacaatcacaaattacaaacagtaacacaagcatcgcatgcaaaaataaaatccaaaatcaaaatcccccaaaaatagcccagaaaacagcaaatgacgaaaaacccattgccaaagcatgaaatttcaagctcaccgcaccagctgcatcagcacccttaaccggtgttttaggactcgaaaccaaaccaccattctccggaacaaccggcgccggagccggctccggcgctgtcccaaaaatctccaacggcaaaagcaccttatccacctgataaaccgcgatccttcggtcagaaaacacactattctccaccgacgcattcacc

SEQ ID NO: 5538 - DNA, 380 bp, Gossypium hirsutum
  Clone ID: LIB3083-112-Q1-L1-A2
ggttactcaactgtctccttcagttctgaaagctgagggtgtaccagtctatcgggccgtacaacattctggggagtttgttcttacctttccaagggcatatcatgctggatttaattgtggcttcaactgtgcagaggcagtgaatgttgctcctgttgattggctagaacatggtcaacttgcagttgagctctacagtgagcagcatcgcaagacatcactgtcccatgacaagctactcctgggatcagctcggcaagccatccaagctctcagggagttacatgttcttggcagagaaacaccgggaaattcaaggtggaaacatgtatgtgggaaggatgggatacttacgaaggcagttaggatgagaaagc

SEQ ID NO: 5539 - DNA, 393 bp, Gossypium hirsutum
  Clone ID: LIB3083-112-Q1-L1-A3
ggggaatgcatcagttttaggtcaaaatgggcttgaacaagctagccccctggcttctggaggaacattttcaaatggaggagccgatatgaacagatggatgtcacagtttcaatcagaaatgcctggtttagtacaaccctctttggcggagaactggctgaattctcaaggtggctcttccggtcttattgttaagagaacaatcagagtggatattcctgtcgacaagtatcctaactacaattttgttggccgcctccttggtcctaagggcaactctcttaagcgtgtggaggcaaatacggagtgccgtgtccttataagaggtcggggcagtattaaagatcctgctagggaggaaatgatgaaaggaaaacctgggtatgaaca

SEQ ID NO: 5540 - DNA, 399 bp, Gossypium hirsutum
  Clone ID: LIB3083-112-Q1-L1-A4
gttcagcgacagagttggcttcatttctcttacctgtatcaaataccacccaaacatcgacgtcttctacactcttctctggtaagttcatcgaaagatcaaatcaagatccctgccaaaatgaacgacgctgatgtatccaagcagatccagcagatggtgagattcatccgccaggaagcggaggaaaaggctaacgagatctctgtttccgctgaagaggagttcaacatcgaaaagcttcaattggtggaagcggagaagaagaagattaggcaggagtacgagaagaaggagaagcaagttgaaatccgaaagaaaattgagtattcgatgcagcttaatgcatctaggatcaaggtccttcatgctcaagatgatgtggttaatgctatgaaa

SEQ ID NO: 5541 - DNA, 140 bp, Gossypium hirsutum
  Clone ID: LIB3083-112-Q1-L1-A5
ggaaacttagaaggggcgattaattgactgggaaaaaaaaatatccattttaataacactgaaaaagttttgggcttttagatcacaaccccaaacagcagggaatttgagattataaaaacaacctcatgccttatctt

SEQ ID NO: 5542 - DNA, 392 bp, Gossypium hirsutum
  Clone ID: LIB3083-112-Q1-L1-A7
atagcctaggacaggaggatctctcaggtgatggcttcaaagcggatcttgaaggagctcaaggatctccagaaagatcctcctacctcttgcagcgcaggccctgttgctgaagacatgtttcattggcaagcaactattatgggtcctcctgacagtccttatgctggtggagtgtttctagtcaccattcatttccctccggactatccatttaaaccaccaaaggttgcattcaggacaaaggtctttcacccaaatattaacagcaacggtagcatttgccttgatattttgaaggagcagtgtagccctgccctcaccatatccaaggtattgctatctatctgctcactattgacggatccgaatcctgatgacccattggtgcc

SEQ ID NO: 5543 - DNA, 393 bp, Gossypium hirsutum
  Clone ID: LIB3083-112-Q1-L1-B1
taatcctagaaattatcctttgctctgcgtatgatacccaaggcttctgcctcatttgctgtcaccggaatttttaatgctttccggatttctgcacttgatgtccggaggaatggattgcattccttctccatctttaatgtactaggaaccgtgggcaatcccttgttgcgaaggtgagctacatgggttgcataagcctgaagtgcatcattcttgagatctatagacaaagcaaatttcgaattactcaaagtatattcatgaccacagtagatatttgtatcatcaggtagtgacatgatccgctgaaaggaagaaagcatctgctccggagtgccttctaaaagcttgccacatgataagctgaacaaagtgtctccagtaaaaatt

SEQ ID NO: 5544 - DNA, 391 bp, Gossypium hirsutum
  Clone ID: LIB3083-112-Q1-L1-B2
ggaaagttgaggatgttgatgaggagaaagagaaggaagaaaagaaaaagaagaagattaaggaggtgtcgcacgagtggtctttggtgaacaaacagaagcccatctggatgaggaagcctgaggagattaccaaggaggaatatgctgctttctacaagagccttacaaatgactgggaagagcatttggccgtcaagcacttctcagttgaggggcaactttagttcaaggctgtcctctttgtccccaagagggctccttttgatctctttgacacaaggaagaagcccaacaacattaagctctatgtgagacgtgtctttatcatggacaactgcgaggagttgattcctgaattcctcaactttgttaagggtattgtcgactc

SEQ ID NO: 5545 - DNA, 398 bp, Gossypium hirsutum
  Clone ID: LIB3083-112-Q1-L1-B3
atttgatctttctcttccaaaatcaattccaaaaagagagaaaatcccaccaaaaaaatggcgaattctaatgacaacaacaacgacgagcaccatgaatcgagtcctcttttgagcaaacaagtggcagaccaagatttgaaggaaaaacctagtggtaaaaaggcaaaagaagctgccgccgaggtgccagctcatccggtagttgctaccggagatgggtttgggtggacggctgatgggttgccgttggtccaccggagtgtcgtcagagaacccttgggtcgatctcaatggaactcatctctccttgcttgtcttggccgtaacgatgaattttgcagcagcgacattgaagtctgtctccttggaagcttggtcccttgtgtgctatatgg

SEQ ID NO: 5546 - DNA, 398 bp, Gossypium hirsutum
  Clone ID: LIB3083-112-Q1-L1-B4
cagaaaactagagccgcaatattggatgcagaggagctggttaatgtacaaactcggaaagagaaacagaatgtttccttttcacagaaggagaagcggaaaagagaacttggtcaggctagtagggggaagaattatgttgaagaagagaagaggttgctccgggaaagtggcatctattctggttttgatacttgatttgtgtaactaggaacgagctttctcatcatgtatgggatgtagttgttctcttgcgctagatacttggttgtaacatctatttttgtggttttcagaaaaacaggttccgtattgttgtattataaagataattatctttcaagacagttacaaaaaactgtgaatctagtggcatttgtttggtatgtgggattaat

SEQ ID NO: 5547 - DNA, 397 bp, Gossypium hirsutum
  unsure (1)..(397): unsure at all n locations; Clone ID: LIB3083-112-Q1-L1-B5
aaagtacgaaacttgaaaagcggatatggtagtggcgtgtccgcttctcattccaagcttgttcagttatcggcataagctcaactctcgactgcccgcagagaacttactgatggcaggctgattgattcgcattcaaggaacaagggatatatgcttgaaagatgatctgaagttcatcctctaaattcataaattttgggtggattcatttatatttctgtggtgcagggattgctgtaagcagtgatgaaacaaccgaatattctgtacagaaatgcctctntcattttcagaaaaaatctttatggacaattcaatcataaaattgcctgtaccttgcccaacttacatcatcatcaaagtcatgttagtctgttgagggccaaaataccat

SEQ ID NO: 5548 - DNA, 399 bp, Gossypium hirsutum
  Clone ID: LIB3083-112-Q1-L1-B6
agaagatcgaggcatcgtttgacacctggaactgtcaaatttgcagcttttcatgttctctcactggagggaagcaaaggattaacagttctagaacttgcagataagattcagaaatctggacttcgggaccttacaacgagcaagacgccagaggcttctatttcagttgctttgacaagggatgcaaagctttttgaaagaatagctccttcaacttattgtgtacgacctgcctataggaaagatcctgctgatgcagaggccatactagcaacagcaaggaaaaagattcggcaatttgagaatggatttttaggtgtagaagatgctgatgaagttgaaagagatgaagtggaaagagatgatgttgagagagatgaagactctgaatgtgat

SEQ ID NO: 5549 - DNA, 392 bp, Gossypium hirsutum
  Clone ID: LIB3083-112-Q1-L1-B7
aactggttgatatggaatgttgttaccttacagttgagttcttccgaaagcttcctcaagacgtggataagggtggcagtgctacgcaatctatatttgaccgatacaatgactcctacctgaggagaattggaagtacagttttgtcttacgtaaatatggtctgcgctactttgcgccactcgattccaaagtccattgtttattgtcaagtccgtgaagctaaaagaagccttcttgactttttctacacggaattgggtaaactggagcaaaaacgattatcggcattactgaatgaggatccagcaatcatggaacgccgatccgctcttgcgaagagactggaattatataggagtgcacaagctgaaatcgatacagtcgcttgg

SEQ ID NO: 5550 - DNA, 382 bp, Gossypium hirsutum
  unsure (1)..(382): unsure at all n locations; Clone ID: LIB3083-112-Q1-L1-B8
aaatcccaacttcaaacaccttaattgctacgattttgtttgaagaaagaataattaaggggaaaaatatgcctagattgttatgactttcgttttgttggaaaatgaccggacatacctggccgcacgatcgagcttccttccgatatcaaccctccagcaatcgtcgtcgcagcagtaaaaatatattacatctgttagggaagagagaagtctctcctagaacaaaatatgtaccaaagaagcagtggggagaagcacctaaacgaattgtctattcttcaccttggactgaacccattagagatgccagacgtggtattctgtcatgggctgaggaagagttgctgcatttatcangcaaatattgtcctctggtacc

SEQ ID NO: 5551 - DNA, 376 bp, Gossypium hirsutum
  Clone ID: LIB3083-112-Q1-L1-C1
agccgaactactcgtcaaatctattgcagtccatatagagtcttgaacaaagcttcgaagagtcgaagttcacacaatagaataagcaaaaacacacgataaaagcaaacaaatcattgggtagcaaaatgcaagccctccactcaaacattacttatttagtactcatcttcatcttcctcatcaccctcgcctgactcagcaccgacttcttcataatccttctcaagtgcagcaaggtcctcacgagcttccgagaattctccttcttccataccctcacccacgtaccagtgaacaaaggcacgcttggcatacatgagatcaaacttgtggtcaatgcgggagaacacctcagcaacgctggttgagttgg

SEQ ID NO: 5552 - DNA, 392 bp, Gossypium hirsutum
  Clone ID: LIB3083-112-Q1-L1-C2
gttatgtgcttggcagctgcaaataagctgatattattttgatttgggttcctaaatcgttgggaggagggactgtaaaaaagcataggttccccatgcagatcctcccgtttcgaggaggcgcacttgtgtgcttcattgcttccttgttatttgttgccagtttttgcaatgccgatgctaaaacagtcgaggttgtcggggctggtgagtgtgcacattgtgcagagaataacttggagattagccaggctttctcagggctacgagtaaacatagactgcaagcccgaaaatgggaagaacttcaaaacacgaggatcaggggagcttgataaacaaggcaattttaaagtatccgttccagaggatttggttgaaaatggggaactg

SEQ ID NO: 5553 - DNA, 394 bp, Gossypium hirsutum
  Clone ID: LIB3083-112-Q1-L1-C3
atttttagttagcaggtttattttttatttcaaatgctaaaatttatttttattatcgaatttatttatttttaatcatgtaatattaaaaagttatatataagttttttttttcatctaagcaatctggaatgcaatccaaaatttcgaataatattttcagtttgttaagagccccccgcggtcttgatcttagcagagaaacgagttcgttaccatttcattattgctagccaaatcgtaccggcgccttctcataatcttatttgccggtgcatggacgctccgtggatccatctctagtgcacgatttcattcataactaatggcttcgtggttcaaagtcgccgaagatttatttgaagttgtagatcgaagagcaaagctggttgct

SEQ ID NO: 5554 - DNA, 378 bp, Gossypium hirsutum
  Clone ID: LIB3083-112-Q1-L1-C4
aacacaaacacagatatcttattgaaaaagaacacagataggacaatgtctcaaaatatcagaactgatataaataaacaaaggtgaatggtgaagtctatagctgaagccccccaaagtgagcttggctgaatggttattgaagaaggttaaatgctgtgcaaagagaaaccaccctttccttgaaatgaaaccatccatcctcttcactaccttctggaattaaaacttgttttatttttcatcaattcttgttatgagtttctggaaatcgtgagtctttaatggaatcaacaaaaccactcctgagaagtctctcaacatacttgccgaggatatccacctccaaattcaccttttgcccaatttccttcaaag

SEQ ID NO: 5555 - DNA, 394 bp, Gossypium hirsutum
  Clone ID: LIB3083-112-Q1-L1-C5
gtcaaggaacatgaggagaaaggtgcagtcttgtgatgcaccctcatccttggattggaggaactatggagttgtgactgctgtcaaggaccaaggttcttgtggaagttgttgggcattctcatcaactggagccatggaaggaatcaatgccttagttactggagacctaattagcctttcagaacaagaacttgtagattgtgataccagcaactatgggtgtgaaggaggatacatggactatgctttcgaatgggttataaacaatggcgggatcgatagcgaaagcgactacccctacactggtgtggatggcacatgtaacaccaccaaggaggaaaccaaggttgtatctattgatggctatcaagatgtagagcaatcagatagt

SEQ ID NO: 5556 - DNA, 389 bp, Gossypium hirsutum
  Clone ID: LIB3083-112-Q1-L1-C7
ctggcatgattcaggttttccttggatatagcggtgctcatgacatcgaaggaaatgaacttccccgactggtttacgtctctagagagaagagacctggctaccaacaccacaaaaaggctggtgctgaaaatgctttggttagggtgtctgcagttcttacaaatgctcccttcatcctcaatcttgattgtgaccactatgttaacaatagcaaggcagttagggaggcaatgtgcttcttgatggacccacaagtcggtcgagatgtctgctatgtgcagtttcctcaaagatttgatggcatagataggagtgatcgatatgccaatcggaacacagttttctttgatgttaacatgaaaggtcttgatgggatccaagggcct

SEQ ID NO: 5557 - DNA, 396 bp, Gossypium hirsutum
  Clone ID: LIB3083-112-Q1-L1-D1
aaaatttggggctctttacttaccttgttcttgcttcttgatcggaatgttagatttggtacgggtcgtgcgtgtacactgatgccattttcacactatttagacctaaagccagtaattcggatcaccggcggccaagccttgattcttcgagacggagtatagatgtcggggccactcgatcgattcgctcggccttgctttgaggggttttatggtagtgatgagaggagagagaggaaatctgatttcgagaactcagaggatgaaaggcgcacaccaattggatccttgaaaaagaaagcaataagtgcatctgctagatttaagcattctcttaaaaagaagagtaatagaaggaaaagtgatggccgtgtcagctctgtatccattgag

SEQ ID NO: 5558 - DNA, 313 bp, Gossypium hirsutum
  Clone ID: LIB3083-112-Q1-L1-D2
aattaaggagcatcggtattgcactctaccttagcatccttggtgttggaagcttcttaagtagctttctcatctctgtaattgagacagtaactggtaaagatggcagagatagctggtttgcagataatcttaacagggcacatcttgattacttttattggctgcttgctgcacttagtgcccttggattggctctctatgtatattctgcaagatcttatatttatgctaggcgaagcacgtcgtaaatagcttctagcccatgttcctgggatacctaagaaatgaataaaatatatcatttcaacat

SEQ ID NO: 5559 - DNA, 398 bp, Gossypium hirsutum
  Clone ID: LIB3083-112-Q1-L1-D3
ggaaaggtccaactagttgaaggcatgcttactgaagcgtacacaatgttttcagaggctttttcaatacttcaacaggtcactggaccaatgcaccgggaggttgccaattgttgtcggtaccttgctatggttctgtatcatgcaggagatatggctggggcgataatgcaacagcacaaagaactaattataaatgaacgttgcttgggtttggaccaccctgatactgctcatagttatggcaatatggcccttttttaccatggcctgaaccatacagagctagctctacgacacatgtccagggcactgcttttgctaagcctatcttctggcccagatcatactgatgttgctgcaactttcataaatgttgctatgatgtatcaagatat

SEQ ID NO: 5560 - DNA, 386 bp, Gossypium hirsutum
  Clone ID: LIB3083-112-Q1-L1-D7
aatactccaagcaaccattttccttacaagtttgtttttcttgtgattaatccatatggctagctcaatgtcccttaagcttgcatgtctgttggtgttgtgcatggtgatgggtgcacccctggctcaaggggccataacccgtgctgatggcttagtcggcctcccacgctgccttccttttttgtcagggaatggtgatggtgctgatgccacaggttgctgtgccatcgtcatgaatgccttgggatcgctctgtggtgatacataggaaccgatctagcttgaaatcgggttcggatttgggtggaatttcaaattggtgtgttatggaatcccaacttaatcgtgtttaaaggtgggatccaattgtgtgatacattaca

SEQ ID NO: 5561 - DNA, 318 bp, Gossypium hirsutum
  Clone ID: LIB3083-112-Q1-L1-D8
gagagagatcgatgagagagtgagagagagagagagagagagatagagagagagagagagagagagagagagattttttttttttttttttttttttttttttttttttttttctttttttcttttttttttttcttttctcttttttttttctttttttggttttttgcttcacttctttccctttattttctctttttttttttttttttagatcatatttttattctttgtctaactcctttttaattgcttttttcccattttcctgggattccttaaaaaatgcttttatttttttctttctacattattttt

SEQ ID NO: 5562 - DNA, 383 bp, Gossypium hirsutum
  Clone ID: LIB3083-112-Q1-L1-E1
tcgagtttttttttttcacgacaacgaaaaacgagcttttcctcaacttggttatggaatatgtaccagagagcatgtatagggttttgaaacattacagcagtgctaatcaaagaatgccacttatatatgtgaaattatacacatatcagatattcagggggcttgcatacctccatagtgttgttggagtttgccataaggatctgaagcctcaaaatcttttggttgatcctctgactcaccaagctaaaatttgtgattttggaagcgcaaaagtgcttgtcaaaagtgaagctaacatttcatacatttggtcgcgtttctatcgggccccaaaactcatttttggtgcaactgaatacacaacctccattgatatc

SEQ ID NO: 5563 - DNA, 207 bp, Gossypium hirsutum
  unsure (1)..(207): unsure at all n locations; Clone ID: LIB3083-112-Q1-L1-E2
ggggggggccgcggggggaggaacgaggaagagggagacaagaaaagcgggcangggaggggaacggggggggggaaagggaaggggggggggggaacggggggagcaaaaccggcgaggggggggagggaacggacggacggaagggggacagaagggcggggaaggaaggggggaaacaagcgggagggaagagaagggggggag

SEQ ID NO: 5564 - DNA, 389 bp, Gossypium hirsutum
  Clone ID: LIB3083-112-Q1-L1-E3
gggtggcactcatgtgaatgttggagacccttttaattacctatgtgcagccagtgaaactcaaatccatgaagacccgaatgtggctcttttctttctggaaaaggatatgcaccccggggcaacaatgagcctgcatttcactgaaaatacagagaaatcagctttcttaccttatcaaactgcccaaaaaataccgttttcatctgacaagttgccagaaattttcaacaagttttcagtgaaacctggatcactgaaggcagagatgatgaagaacacaattaaggagtgcgaacagccagcgattgaaggagaagaaaaatattgtgcaacctcactggagtcaatgattgactatagcatttccaaactaaggaaagttgatc

SEQ ID NO: 5565 - DNA, 388 bp, Gossypium hirsutum
  Clone ID: LIB3083-112-Q1-L1-E7
ctccaacctctggtctgccgagctatcaaaacttgctgccaatgccttcttggcgcagagaatctcttcggttaatgctatgtccgcattgtgtgaggccaccggtgctgatgtgagccaagtggctcatgctgttgggaaagacacaagaattggacccaagttcttgaatgcgagtgtgggtttcggtggatcgtgtttccaaaaggatattttgaacctggtctacatctgtgagtgcaatggcctcccagaggttgcaaactactggaaacaagtcattaagattaatgactaccagaaaactcggtttgtgaaccggattgtttcctcaatgtttaacacagtttcagggaagaagattgccattctcgggtttgctttcaag

SEQ ID NO: 5566 - DNA, 363 bp, Gossypium hirsutum
  unsure (1)..(363): unsure at all n locations; Clone ID: LIB3083-112-Q1-L1-E8
gtggaaacagcagctgtcgattgagggttttctttggtggaaaaagcaaagccatggcgatgaacggtggtcttagatcggcttcgaagtttctgacttcgtcctctcaatcacttctccacaagtctggcaatagagggtttcattcaactggagtgaagagaatggggggagggcatgggcatgatgaaccgtattacctccatgctaaacatatgtacaacttggataggatgaaaaatcagaagctgacaatgtctcttggagttttgacagccttcagcattggtgtgtttgttcctatctatgctgtcattttccagcaaaaaaagactgcatctggntgatttttattttttatgc

SEQ ID NO: 5567 - DNA, 386 bp, Gossypium hirsutum
  Clone ID: LIB3083-112-Q1-L1-F1
gttgaattccttaaattcgttgattccaaggtgggtgaatcagggaccaagcttgatcgtcgagtccctccagtcatcaaacaggtctcaaccgaagccatcttggcagcccaaaaggctcccgaggttgctcgtggcgtggcttccgaagtccaccgtgctggagtggtgaacaccgcctcaggattagcaaaatcagtgtacaccaagtatgaacccacagcaaaagagctttatgcgaagtatgaacccaaagctgaacaatgtgcggtttcagcttggcgtaaactcaacatgctcccgctcttccctcaagttgcctcggtcgttgtcccaacagctgcttattgcagcgataagtataacgagacagtggctagcagtgc

SEQ ID NO: 5568 - DNA, 396 bp, Gossypium hirsutum
  Clone ID: LIB3083-112-Q1-L1-F2
gccagttggggtgtggattatattgttttgactagcgtggatcgtgatgacttacctgatggtgggagtggacattttgctaagactgtccaagctatgaagaacctcaagccagacatcatggttgaatgtttaacttctgattttcgaggcgatttgaaagctgtagacactctggtacattcaggattagatgtctttgcacataacattgaaacagtgaaacggctgcaaagaattgtcagggatccacgggccgggtatgagcagagtttgtcagttctaagacatgcaaaggtgagcaaagaaggaatgataacaaagtcttcaataatgcttggccttggtgaaactgatgatgagttaaaagaagccctggctgatctgagggctata

SEQ ID NO: 5569 - DNA, 397 bp, Gossypium hirsutum
  Clone ID: LIB3083-112-Q1-L1-F3
gctctcatatctgtctgatggtacaaatgacaaaatccaagctcggatatatgcaggcgtttgagggcgtctggaggagctattgacgcacccatgtgcttaagagctaataccaactcttcgcacagacggaaatattgccacaggtgatgatggtcaaacccagtgtattatcaatcatcaagcgtggccatgccttataaacctgttgacaaatgatatcaaaaagagcatacaaactgaagctgggatgacaatctcaaatattacaacctgaaataaagagccaatacaggctgtaatagacgctgatattatatctgcactggcacatctgcttgaaagtgctgaatctgatatcaagaaagaagctgcatgagccatctcaaatgccaca

SEQ ID NO: 5570 - DNA, 390 bp, Gossypium hirsutum
  Clone ID: LIB3083-112-Q1-L1-F7
tgtttatgttttttttttttatgaattttgtactgtggggggttttgaatgagaactgaaatacttttgggaaattgaaaatcttcaatcggcggactagatggccaccacggagttgcagatgagtcctcagttggagcagatccatggcgaaatccgcgatcttttccgtgctctttcaaatggcttccagagactggataagatgaaagattccaataggcaaagcaaacagctggaagagcttactggcaagatgagggaatgtaaaagattaatcaaggagtttgatcgtgaaattaaagatgaggaaagcaaaaatcctcccgaagtgaacaagcaactcaatgatgagaagcagtctatgatcaaagaactgaattcgtatgt

SEQ ID NO: 5571 - DNA, 374 bp, Gossypium hirsutum
  Clone ID: LIB3083-112-Q1-L1-F8
acgaaatcggccattccatgtccttaactaacaaatgcaacaactgaaatcagaaataatacaaagattgaaaccataaaacatgcataccaaaatccaaattctaaaatcaccacccaaatcaaaggacaaataaactgaatccaaccacaaccacatgcatctaccccatacatatatatagacagcgagagagggtacaaaggaagatttttgtttattgaaccatcatatattaacattaattactccatcaattttagcatctcatattttaatagccacaccatgagtcttaaggatctggtaactatgagttggttgtctcacaaacagatagctaataaaaacaaggaacaagtacaaggtttatc

SEQ ID NO: 5572 - DNA, 184 bp, Gossypium hirsutum
  Clone ID: LIB3083-112-Q1-L1-G1
ccgccagcagtggttggaggattaacacgagcttgatctggcggaccatctcccttctggaaaaacattctcaaattacaacaagacttcaacagatcgttctcacatttttaatcaaccgtgtctggcaccatacaacactattcgcaagagaactcactggctcatgcacatgattcaccac

SEQ ID NO: 5573 - DNA, 396 bp, Gossypium hirsutum
  Clone ID: LIB3083-112-Q1-L1-G2
ccaatcttcactcccgtcctcacatttcccaacaaaaagcgaaggaaatcattttcatcaatcccccctatcacccttctttatctttcccacggaaacgaagagcaatcagaaaaccttgtgaagagaaaatgagggaaatcttgcatatccaaggaggtcaatgtgggaaccagatcggggctaagttctgggaagtcatatgcgatgagcatggaatcgacaacactggaaagtataacggtgactccgatctccagctggagcgtatcaatgtctactacaatgaagccagtggcggtaggtatgtccctcgcgctgttctcatggatcttgaacctggcactatggactccgtcagatcccgtcttttcggccagatctttcgtcccgata

SEQ ID NO: 5574 - DNA, 382 bp, Gossypium hirsutum
  Clone ID: LIB3083-112-Q1-L1-G7
atgggctcctaatgttcccaccttacttttggcaagacttttggatggattagggattggattggctgtaactctgatcccgatttatatatccgagacagcaccaccagaaataaggggattcttgaatacccttccgctgttttctggttgccttgggatgtttctttcatattgcatggtttttggaatgtcgttaacgacattaccaaattggagattgatgcttggagctctttctattccttccctcgtatacttagcattaactgtattcttcttgcctgaatcaccaagatggctagtaagtaaaggtcgaatgagcgaagcaaggaaagttttgcaaaggatacgtggcagggaagatgtttctggtgagatg

SEQ ID NO: 5575 - DNA, 392 bp, Gossypium hirsutum
  Clone ID: LIB3083-112-Q1-L1-G8
agcaccataagaaagccggtgctgagaatgctctggttcgagtttctgcagtgcttactaatgcacccttcatattgaatctggattgtgatcattacatcaacaatagcaaggccatgagggaagcgatgtgctttttaatggatcctcagtttggaaagaagctttgttatgttcaatttccacagagatttgatggtattgatcgtcatgatcgatatgctaatcgaaatgttgtcttctttgatatcaacatgttgggattagatggacttcaacgccctgtatatgtacgcacagggtgtgttttcaacaggcaagcattgtatggctacgatccaccagtctctgagaaacgaccaacgatgacatgtgattgctggccttcttgg

SEQ ID NO: 5576 - DNA, 391 bp, Gossypium hirsutum
  Clone ID: LIB3083-112-Q1-L1-H1
tcgaggcattctctgttcaaaagaaacttcttatcgagatcaagcagactcagaaacctgatatggcaggcttggtcgaatttctcaaaccactgaatgaagtgatcttgaaggttaatgctatgacggaagggaggcgatctgatttcttcaaccacttgaagagtgctggggacagtctttcagctttagcatggattgcttacacaggcaaagattgtggtatgagcatgcctatcgcacatgtggaagaaagttggcaaatggctgaattttataacaacaaggttcttgtagagtacagaaacaaagatcagatccatgttgaatgggccaaagctttgaaggaactgtatttaccaagtctgagggattatgtcaaaagccatta

SEQ ID NO: 5577 - DNA, 363 bp, Gossypium hirsutum
  Clone ID: LIB3083-112-Q1-L1-H2
gattactcctcttcccgatttcataaaattttaatattctcccactccgaatcgatctatgatttgggcaattcctctgtttttgctgtaaatattattcaaaatcaatttcatcaattatgtttttattgccttcttcgttgatgacttgcaacgtgatattccaaaacctgcgtgtgttcggtcctggcttgaatcctttttcccctttctgcgtcgctcatcattcctctgcttctcgctaatctgtttccctcttctccttgttttcatctctatcatgtaatcatttttctcttcatcttaagctttcgaggggattgtttgttttccaagaataaaaagaaagggatctaactcttt

SEQ ID NO: 5578 - DNA, 397 bp, Gossypium hirsutum
  Clone ID: LIB3083-112-Q1-L1-H3
ggaaaaaaaaaatccacattacattcatcaacagaaaacccaaaaaacccgaagctcgaaaatgggaagctctagattctcggtcagtttcctcgcgatttgcgcaatcctggccatccacgtggcggcttccgcttcgtctcccatgctcgatttcggcggcaaccatttcctctcgattaaatcggagtgcagtggatccatcgcggaatgcctgatgctaagcggggaatattcctcggacttcgacgccgaattcgccatggactccgagatcaacaggcgcattttagcggcgaggcgttacattagctacggtgcgctgaggagaaacacggtgccatgttcgcgacgcggtgcgtcgtattataactgccggccgggagctcaagcaaat

SEQ ID NO: 5579 - DNA, 392 bp, Gossypium hirsutum
  Clone ID: LIB3083-112-Q1-L1-H7
gctagcttctctcttctatggcggtggcttacagccttctttccttgttctttttttccctttatataaattatattaaacaatcttactgaaccatcgtcggagaatcagtccggacggtgattttgccggcggcgagacgaggtttagtgtttttattgttgtcgcaatcgcgttgaaggaaaaccgagagtttttttgaattgatcagcagaaacaggaaatgaatgggaaccgctatggatttagaagtacggcggcggcggcggcggcagcgaaggaatatataaagagacatcactggcatggctccggagagaatcagtgtagttcagctcttgttaagcacttcaaagctcctttctctctgtttgcaagaaaaggtgcaatca

SEQ ID NO: 5580 - DNA, 393 bp, Gossypium hirsutum
  Clone ID: LIB3083-112-Q1-L1-H8
gttttgggctctcattgtaactactctcacccttcaactagccattacgagtgcacaaacaccagctgcctcaccttccagtacgccaaccaccaccaccaccactccaccttcaacttcgccaccacctacaacttccgcaccacctccttcaacaacccctccacctacaacttcagcaccacctccttcaacagcaacgcctgcaccttccaccacgcccatcgcgccagctcaaccacctgcaacaactccccctcccactgttgcaccagctacaagcccaaccgtcccaccgccacaaactccaccacctcaaccacctcaaactcctccaaccacagctccagctcaaccgccagcattgccaccaccatcaccaccaccagtatc

SEQ ID NO: 5581 - DNA, 334 bp, Gossypium hirsutum
  Clone ID: LIB3083-113-Q1-L1-A1
caacagtaccgagctctaacagtacctgagctcacccagcaaatgtgggacgcaaagaacatgatgtgtgctgctgatcctcgtcacggtcgatacttgactgcatctgctatgttccgtggtaaaatgagcaccaaggaagtggatgagcagatgttgaatgtccagaacaagaactcctcatactttgttgagtggatcccgaacaatgtgaaatcgactgtttgtgacatcccacccactgggctgaagatggcatcaacatttattggcaattcaacatccatacaggagatgttcaagcgtgtgaatgagcagttcacaactatgttta

SEQ ID NO: 5582 - DNA, 71 bp, Gossypium hirsutum
  Clone ID: LIB3083-113-Q1-L1-A10
gctgttacaaaaatcgagccagaatttgtcctgtttttcaattgccctgaagaagagatggagaagcgtct

SEQ ID NO: 5583 - DNA, 390 bp, Gossypium hirsutum
  Clone ID: LIB3083-113-Q1-L1-A11
tgacattatggggatgcaacaagaatcacctcaacccttttataatacctaagaattgcatcatttgactgttttcaccagaaaaaatgaaattgttagagtttcttgggcaagttgtatgtcttcttaaggaacttagccgctgtctcatcactccggtaacacaaaactcgcaagagtgtgtttggttccgtgggactccactgaccggatgttggtggcaatggaagcttggatttagcagaagaaccgtaactctctgcagtcatgtatttgaattgctcaatcaggctgtcagtttcagtatgaaataaagggaggatggctttaactgttgttgaaaacttttggatcaaatcagccggaagtccatcaccattggaccaaaat

SEQ ID NO: 5584 - DNA, 162 bp, Gossypium hirsutum
  Clone ID: LIB3083-113-Q1-L1-A12
tttttgcgctttgtttttccccctttcttttacattggctttactaagacgccattggctgttcgctggaataaagagataaaaaaaaaaaggcgtgagaagatcggctcattttcaccattttcagagaaccaaaacaataaatattcttttttttttaaa

SEQ ID NO: 5585 - DNA, 335 bp, Gossypium hirsutum
  Clone ID: LIB3083-113-Q1-L1-A2
caaaacaagtgttcccacggtatatgctgagggtgatgtagccactttccctctgaagttatacaatgagttgagaagggttgaacatgttgaccatgcccggaaatctgccgaacaggctgtaaaggccatcaaggggctcgagaaggggcaatcagtcgacgaatatgactacttaccgtacttctattcccgttcctttgacctagcatggcaattctatggtgacaatgttggggatacagtgctttttggagacaacaacccacaatcaccgaaaccaaagttcggatcttattggatcaaagatggcaaggtggtaggggcattcctag

SEQ ID NO: 5586 - DNA, 375 bp, Gossypium hirsutum
  unsure (1)..(375): unsure at all n locations; Clone ID: LIB3083-113-Q1-L1-A3
cccacatctgaggggaaactattctgcagaatcaatggagaagtttggagagatagcagagaaatgccttgctgacgaggggaagaaccggcctacaatgggggatgttctatggcacttggagtatgtgctgcaacttcataaagcatggattgggtccaacaccacggataattccttctcaagcagtcaggccctgagggatttggaagtgaaagaagctgaaaataagcagtttgatggaaactcttgtttaagggcatcgaactctcattgntagcttgtcttatgacggacaagtgaaaaactggttattggattcctttacaatataaaactacttgtagctggaaattctttttatttttggtggat

SEQ ID NO: 5587 - DNA, 281 bp, Gossypium hirsutum
  Clone ID: LIB3083-113-Q1-L1-A4
ccgacctccgaaagcttgctgtgaacttgattcccttcccccgtcttcactttttcatggtcggatttgctccactgacctcccgcggttctcagcagtaccgagctctaactgtccctgagttgacacaacaaatgtgggatgcaaagaacatgatgtgtgctgctgacccgaggcacggtcgatacctcacagcatcagccatgttccgaggcaagatgagcaccaaagaagtggatgaacaaatgatcaatgtccaaaacaagaactctttctacttc

SEQ ID NO: 5588 - DNA, 312 bp, Gossypium hirsutum
  Clone ID: LIB3083-113-Q1-L1-A5
aaaagttattgttttgcatgggttaacctcagcccatgcaaaaatcaaagtaaacacgtaagcttaaagacatgtttcaagtggaaacctctttttcatatcacccactcgaaataaactttttttttttttaaactttgctgaaagcattcccttcagttcttccgccgttgttgccgccgttgttagagttggttgagttaggaatgacggcgtttacatccgagccaagcttggcaacatcaacgacgacgactgggtggtccgataattgaagcttggggtctgattcttccacttgtttcttgggat

SEQ ID NO: 5589 - DNA, 389 bp, Gossypium hirsutum
  Clone ID: LIB3083-113-Q1-L1-A6
tctcactcgccaatgacctgcgctatgctttcatttcaatagccttttccggctctccatcgcccccctcccatagctctagagattattcctttcttctttctttctcaaacatttattattttctcataatacatataaaaaatcatccttcttttatactcttatctttgtcttatataatctcagggtgctagagcaacaaaaatacgaccatatatcaaagggaaaaaaaaagagattcacgggataatacgatgaccaagttaccttctttgtttctggttttgactttggtttctgtttttggttgggggtttggaaaaaggataccaattctgtcatttgatgaagggtatagccagttgtttggagatgataatctagtt

SEQ ID NO: 5590 - DNA, 394 bp, Gossypium hirsutum
  Clone ID: LIB3083-113-Q1-L1-A7
attttaggctttagagtctgactgagaaagcaattccgattcctcttttgggtttgttgtgtttcgaatcatcgtcttcgcctaactttttctccttcaatttttcagatgtgggctgcttcatgccttgcatcgtgctgtgcggcgtgcgcctgcgatgcgtgccgcacggtggtttcggggataagccggaggtctgcaaggatggcctattgtggactatttgccctttctctgtttgtttcgtggatcctccgtgaggttgccgcccctctcatggagcagctgccttggatcaatcattttcacaaaacacccaacagggaatggtttgaaacagatgcggtgctgagggtcagcttgggaaattttctctttttcactatcctatcat

SEQ ID NO: 5591 - DNA, 199 bp, Gossypium hirsutum
  Clone ID: LIB3083-113-Q1-L1-A8
gcgggatgtggcaagcttacgtgactgcaaccaataaagctctgacatggaatgttgaagattggatccctcccgctgaaaaatacatattgaatttgagttcaaaagaggagctcaaaaaacggcatatacattctgatgctgaatgcgtatggtcgtgggccgctacataggagatcatagactatgctaataaatc

SEQ ID NO: 5592 - DNA, 367 bp, Gossypium hirsutum
  Clone ID: LIB3083-113-Q1-L1-A9
caaaaaccaaatcagggctatttcatgcatattgaagggcgttacccaattctcatatacctaacaaatatttttctctcctagcttttacctttctcatatatgccccttaattacagaactcattcagaactcaacacagattcatgccagcaaaacaacatgccaggaatggagaatacaaactcattcaatgtttttttgcctcctcagcttagctttaacaaacatcgcacctttaattctcctgacagcagttcccttactaatctatcttgtagactcaatcttaacgaatatcactccatgcaaagctctattatatccttcttcttattcttcaaagcaacaaatgtattttccccac

SEQ ID NO: 5593 - DNA, 207 bp, Gossypium hirsutum
  Clone ID: LIB3083-113-Q1-L1-B1
tagaactagagcatccggatgcctgcggctgttcggatccagaacttgtctaaattctatctaatgcaacacccgggtcgttttcgaggaaggggctcgtctatgattctggcgcgttagcttgaaaaacttaactggccgatttatatatcaatgcagtgcccctgcttcattgcttagacaccaaatgcgctttgtcccaaatgt

SEQ ID NO: 5594 - DNA, 141 bp, Gossypium hirsutum
  Clone ID: LIB3083-113-Q1-L1-B10
aaaatgttggtcaaagagtcgggtggttacacctgcgatctttccgaggaattattgctagtattaccctccgacccttttgatcaacttgatgtggaccgcaagatcaccatcattgatttttccacccgcgcgttttta

SEQ ID NO: 5595 - DNA, 390 bp, Gossypium hirsutum
  Clone ID: LIB3083-113-Q1-L1-B11
tcgactccggtaactcctcaaccgaaaccgactgcaactggttggtgtgtaccgaaggccggtattttcgatgctcaattgcaatcgagtctagactatgcatgtggccaaagcatcgattgcagtccgatccaaccgggaggtgcctgtttcgaaccgaacaccatagcgtctcacgctgcttatgccatgaacctttactaccagagttccgccaagaatccgtggaactgtgatttctcgcagacggcaacactaacatcccaaaatcctagttataataattgcatctaccctggtgggagcacttaaaaaagccagacaaaatgtgaattgaaattggaaaaaggaaaaggatggttaaataaaagctgtgggtaccttatattt

SEQ ID NO: 5596 - DNA, 298 bp, Gossypium hirsutum
  Clone ID: LIB3083-113-Q1-L1-B12
caacaatccaagatccactgccaatcaatggacgggcataatttggaagactcaaagcaaagcactgctgatatgtctgttttcgtgcaaactcttcttcaacaaatgcaatccaggtttcaaacaatgtcggagtccatcatcacaaagattgatgaaatgggagaacgtataaatgagctggagcagagcatcaatgacctaaaagcagagatgggaatggagggctctccatcccttttagccccaccaaagcaaaagttagacggagcgaataaaaaggatgactctgcttaaa

SEQ ID NO: 5597 - DNA, 365 bp, Gossypium hirsutum
  Clone ID: LIB3083-113-Q1-L1-B2
ctcaaacctgctctctccctcctcggtttattctaaattcgaaagcgaaagaataaataaaccctaagtttttcttccttctttttccattatatccctttctttttcttccatttcgtttaaaatttcatttttttcataaaaaggaacaaattctgtgcagtgttgacaatcgtatgccccttccccaacaaagttcgatcttttgatgcgacgatcgcatgctcgaaatcgggttgaatccaaatccaaatcgactaccaacccacaaaagatggacccaattaagctccaaatccgatccaatttccgatctaccgctctctttttgcgaaactctcgtcaaaccaagccgatcccttctt

SEQ ID NO: 5598 - DNA, 206 bp, Gossypium hirsutum
  Clone ID: LIB3083-113-Q1-L1-B3
ttttctcacaacaaaactgaaaatgtcttgctgttcaggaaaatgtggttgcggccctattggcaggggtgccagggctggtaccggtgccgtatgttccctgaccttattggagaggcctccacctgaacttttggtcttggtgtggccactcaaaaaaatgcactttgagggatctgaaatggaagttggggttgaggttgatt

SEQ ID NO: 5599 - DNA, 286 bp, Gossypium hirsutum
  Clone ID: LIB3083-113-Q1-L1-B4
cacaaatggggtcttgcgattgtcactgcgagctttaagggacggatgctgacctacctaaagcacgggtggccaatgctggtataagagcctcttgatccctgacgatacagcgacacatcccatttacacttttgggtttgactgggcggcttaggttataacacatgcatgattttgaacactcatgcaagctgtgatggactcattcgaacctacactaatgataggctaccaatgcgcgtgtaagaacctatccgcccctaaagatacagcggccaacaca

SEQ ID NO: 5600 - DNA, 248 bp, Gossypium hirsutum
  Clone ID: LIB3083-113-Q1-L1-B5
ccaaaagcaaaggttcggagacgcccatttcgtttcactctttttttgtgcgtaaaatctacagaaacgaaggcaagagaaagtgaactaaccgaagaagaaaaccatgggaatgccgctagtttccattgcttcagctcccaaaagcgcctttgttcccaattccatctctctaccttcaattaaggtgcgtaatattccatcttcaacagcttccaccggtggggtgtcgatagaatgttcgtcga

SEQ ID NO: 5601 - DNA, 294 bp, Gossypium hirsutum
  Clone ID: LIB3083-113-Q1-L1-B6
gaaatttataccgacaaatccagctggtctaattgagtacagggcacatccctactgtatgcaaaagtgctggccctataatgagcgctatcgcactcctaagctgccgtagaagcgaaagaatggaccctgttgatgtaaaagaaatatcatttgatgaaagtccaaggctgttcctacagtgtcaagactctgcatttattgatactcatcaatgacaacctggttaccgatagaatgaaaaatcatatcaagtgacaaagctgaaaagtgtgctacaagtacctctccatt

SEQ ID NO: 5602 - DNA, 258 bp, Gossypium hirsutum
  Clone ID: LIB3083-113-Q1-L1-B7
aaagatttaagcaaggccacggaagaagaaaaaagggattcgcttaacagccaacattttgtttccttctgctactggctagggtttaaatcaggggttttccttcttcttctcactgcttgaccactattccaccatcaacaaccaatggatagataccagaaagtagagaatccatagcctgaatcacccattaacgagaatgagatccgaatcacttcccaaggtgctattcggaactacatcaactatgctatt

SEQ ID NO: 5603 - DNA, 193 bp, Gossypium hirsutum
  Clone ID: LIB3083-113-Q1-L1-B8
ataggtataatagaggccgcatattatttcatgtaatataataataaaaaaatggagaagctccacattctgccgtacaaatggcagtaacaagttcatgtttgctggcatagcaactgacttgataaaagacagaaaagcactagaatagaaacacaccccatgctatatcaccaggcaatgcctgggaagc

SEQ ID NO: 5604 - DNA, 352 bp, Gossypium hirsutum
  unsure (1)..(352): unsure at all n locations; Clone ID: LIB3083-113-Q1-L1-B9
gatttgggatttatttattaacaggtcatttgggcgtcaaattatcaggctcatgactcgctttattgatnntncctctttcatgttttttaaattatataaaacccctgctttgatggttaatatttttttttgaaggagggggatcaaaaaaaaagaggaactctgtggggggctctataaaaaaaatgaaaaaaaagaagccgacgctaaaacataccgacccatagacatgtgtgtagacccaaaaattctgtgtataatacaaatatgatcctctgaaacataacgcatgacaaaactagcgccattggacctaaactgtgtgataaaaagctggactataaaatca

SEQ ID NO: 5605 - DNA, 289 bp, Gossypium hirsutum
  Clone ID: LIB3083-113-Q1-L1-C1
gatcacaaagttgagctattttcaattgaatgacaaaacttatagttggtcgaatgaatatataactacacaaaactttcactctaattttattctgtcttgtgcatctccattcttgtttgttcatacatcacataccataatctaaaagaaccacgcaagatgattttttttcaacagttaatgccacacattgtagtgtctggtcctttggttttcatcacaaatggatcaattcggacccaaagcaaggagaagattgaagccaatagcactgaccatataacaa

SEQ ID NO: 5606 - DNA, 385 bp, Gossypium hirsutum
  Clone ID: LIB3083-113-Q1-L1-C10
gcagtgttggctttccctttcggcacccatgcggcccctgttctcaacattacccgtcaactatcagacgcttgccccgacaccatgttttccttccttagcacccaacaatcaaacaactcaacttttagcaaaaaccatgataaaattaagccttttaatgtatgggatggattacctgaggggtatagctttagagggaatcctcatgagcccgtcgattatttccttaaggcagttcctgggagttttataaaggctatagatgctgttgtgtctgaaactggtaaaccagttgattgtttgataacagatgcattttatgcatttggggctgatatcgcggacgagctgaatattccttgggtggcggtttggatgtctg

SEQ ID NO: 5607 - DNA, 257 bp, Gossypium hirsutum
  Clone ID: LIB3083-113-Q1-L1-C11
ttcggtcgcgaaaaaccgggactcagattaccggttagatgaatatgattgctggaaggactgttattttggttttagatgtggtgttatttgacaaacgctttatgaaagagcaagtgtcattcctttaacgtggtgttaaccaaggatgcatccacatgtggggttgagggaagcagactatacttattctttgatcgagtgaggcagatagaacatagaatcggggttgcacatccggcttatgataaagaaaa

SEQ ID NO: 5608 - DNA, 374 bp, Gossypium hirsutum
  Clone ID: LIB3083-113-Q1-L1-C12
ccggcttcggagaacgcaagagtcagtatctggatgacattgctatccttactggaggtactgttattagagatgaggttgggctttccttggacaaagctagcaaagaagtcttgggtcatgcctctaaagtggtgcttaccaaggatacaaccaccatcgtgggtgatggaagcacccaggaagcagtgaataaacgagttgtacagattaaaaatctcattgaggctgcagaacaggattatgagaaggaaaaacttaacgaaaggattgctaaattatctggtggtgtggcagtgatacaggttggagctcaaactgaaacagagcttaaagaaaagaaattgagagtagaagatgctcttaatgcaact

SEQ ID NO: 5609 - DNA, 249 bp, Gossypium hirsutum
  Clone ID: LIB3083-113-Q1-L1-C2
gaaaaatgggtttgaaggaggaattcgaggagtatgcggagaaagctaagacccttcccgagaacactaccaacgacgacaaactcattctctatggactcttcaagcaagctactgttggaccagtgaacaccagccgtcctggaatgttcaacatgaaggaaaagtacaagtgggatgcatggaaggctgttgaagggaaaccgaaggaggaagcaatgaacgattatatcactaaggtaaacagct

SEQ ID NO: 5610 - DNA, 271 bp, Gossypium hirsutum
  unsure (1)..(271): unsure at all n locations; Clone ID: LIB3083-113-Q1-L1-C3
aaagaaagacggaggaggatctgattcgtatgcttgaaactcgaggcaggtgaatgctgttaataataacgaaactaataccattggacatagacaatatgatccagaagaaaaacaggaaaagacgaggaattgggccaaaaaagatggaggatccgatttttctgcttcaaacttgaggcaggtgaatgctgttaataataatgaaactaataccgncggaagtagacaatgtgatccataagaaaaaccggaaaagacgaggaattgg

SEQ ID NO: 5611 - DNA, 286 bp, Gossypium hirsutum
  Clone ID: LIB3083-113-Q1-L1-C4
cttaattctagaatctccgccatgagcaacaacggtaacaatagcaacagttccgatcccgatcgccctgtccgtgtttacgccgatgggatctacgatctattccacttcggccacgctcgctccctcgaacaagccaagaaatcgtttcccaatacgtatttgctggttggatgttgcaatgatgaaacagcacacaagtacaagggcaaaactgttatgaccgaatcagaacgttattgatgccttcccattgcaagggggtgatgagtcattctgtgctcat

SEQ ID NO: 5612 - DNA, 342 bp, Gossypium hirsutum
  Clone ID: LIB3083-113-Q1-L1-C5
ggaaggcatccccccagaccagcaaaggttgatcttcgctggtaagcaacttgaggatggccgcacgttggctgattacaacatccagaaggagtccacactccacttagtgcttcgcctccgtggaggaatgcaaatttttgttaagactttgactgggaagaccattacattggaggtagagagttcagataccattgataatgttaaggcaaaaattcaggacaaggagggaattcccccagaccaacagaggctgatttttgctggtaagcaactggaggatggccgtaccctggctgactataacatccagaaggagtccaccctccacttggtgct

SEQ ID NO: 5613 - DNA, 334 bp, Gossypium hirsutum
  Clone ID: LIB3083-113-Q1-L1-C6
gatatttataccggcatatccagctggtctaattgagtacagggcacatccctactggatgcaaaagtactcgcccctgtcatgagcgtgatggcacttcttgctgctgtatgttgcgaaagaatggagcctgtggatgtaaaatatatatcactcgatgatggtccgaggccgtgcctatagtgtctagattctgcaattatagatactcatgaatgccaacctattttccttgaaatccataaattttctgaaggattaaatatgaatgttgaacaacaggttcctctacttctggttgataagcaagctcctaatgaagccatggacggag

SEQ ID NO: 5614 - DNA, 375 bp, Gossypium hirsutum
  Clone ID: LIB3083-113-Q1-L1-C7
ctgccgcatctcagtacctccgcagttcactgagaaatggatgaggaagttaaggctgtggttcctgagtcactcttgaagaaacagaagagggctgaagaatgggagcttgccaaaaagcaggagcttgaagttgcaaagaagaagaaagtcgagaaccgcaagctgatttacactagggctaagcagtatgcaaaggagtacgaggctcaggaaaaagagctgattcaattgaagcgggaggcaaagttgaaaggaggattctatgtagatccaaaagctaaactcttgttcatcatccgaatccgtggtatcaatgccatgcacccgagaacaagaaagatcttgcaactattgcgtttgagacagattttc

SEQ ID NO: 5615 - DNA, 201 bp, Gossypium hirsutum
  Clone ID: LIB3083-113-Q1-L1-C8
ccaatttctgccctccaaacaatgctctcccaaacaatgctggtgggtggtgcaaccctcccctgcaacactttgacctttctcagcctgtcttccaacacattgctcagtacaaagctggaattgtgcctgtttcttacagaagggtaccatgcaggagaaagggagggataaggttcacaatcaacggccactcctact

SEQ ID NO: 5616 - DNA, 307 bp, Gossypium hirsutum
  Clone ID: LIB3083-113-Q1-L1-C9
tcgcaccagagtttttaaacttgacaacagccaaggtatttcgtgttggcttgatggcaacaatggctcataattatatatttgatgaattgaagctttgtaaattcacatgttaacgacagggtcactgtatctttctactttgcggaaaattccaaagggtcactggcaaaaaattggtggcttgaatgtacaaagttccaagctgtaatctgtgatggggttcaattgcactgctctccattgtattatcatgaaatcaaattcactttaaaaactaacatttgagaaacatgagaatttcacg

SEQ ID NO: 5617 - DNA, 379 bp, Gossypium hirsutum
  Clone ID: LIB3083-113-Q1-L1-D1
cgagttgagtcgagcccagacagtgaccatcttctctcacatagagtgggcgataattgcggcacacatgtttgtggtgcacgggtcctcagcgctcgatattggtcctgggtctgcgatgtctgccggatcaggaactctgttgcatgcatggcgttgttgtctatactgccaacatgttaccaaatttacaagatggatagctgcataggtttccaggcgattccgtacttgattacatttgtttactgcaaagctaaggatttactgtgcgctggttagtaaagattcaacttccctcatttctattaacgcttgctgcgatttcattcaaacttttcacattggaactaactattactactgcccaaaaaaagaa

SEQ ID NO: 5618 - DNA, 364 bp, Gossypium hirsutum
  Clone ID: LIB3083-113-Q1-L1-D10
caatcacattctcgacgaatccgtccctgagatcgttacgagtcgtgggtatgcggaagacgtgaggatgagcaatgtcagattattcattggaacgattatcattgtaatcgctctatttgctcagttttacaaaaagaatttccctggaaaccgcgatttcctcattggttgcattgtattgtatatagttttcaatgtaatactccagctgttcagctacagaaaggaaaagaacgcaattatgtttacttaccatcctcctggatccgtcaccagcaccggattggtggtctcttcaaagttgccaagattctatgatctttatacgcttagcatagcgagtgcagatcccaaattaata

SEQ ID NO: 5619 - DNA, 259 bp, Gossypium hirsutum
  Clone ID: LIB3083-113-Q1-L1-D11
cttttcctttttgcatggataacttaactatgcatttttataaagaagtagggcaacatttaacacaaaattcaacttgttttgtatatagtttatgcgcccaaaaaacttacttcatataatttatccaatagagttgagctcttatacaatcattctttttggaagcttttttatttcctttaaccttcaccaatgactttcttacttacatcatactctgtgtcaattgtatcttcattttattctcatcaaatta

SEQ ID NO: 5620 - DNA, 384 bp, Gossypium hirsutum
  Clone ID: LIB3083-113-Q1-L1-D12
cttgaatctatttttttgaagatggagggtaaagaagaagatgttaagctaggagcaaacaagttctcagagagacaacctattgggacatcagcccagacagacaaggactacaaggagccaccagcagcacccttctttgagcctggtgaactcaaatcatggtctttttacagagctggtattgccgagtttgtagccaccttcttgttcctttacatcaccgtcttgactgtcatgggtgtgtctcagtctaaaaccaaatgtgcaaccgttggtattcaaggcattgcttgggcttttggtggcatgatctttgctcttgtttactgtactgccggcatttcaggtggtcatattaaccctgctgtgacctttggattg

SEQ ID NO: 5621 - DNA, 292 bp, Gossypium hirsutum
  unsure (1)..(292): unsure at all n locations; Clone ID: LIB3083-113-Q1-L1-D2
cagatctgggttttcactcatttatagccaatagtacaccattttagctataaatagccaacctctccactctctaaaattgtgccacttcttcctcttcattctctctgtatctctttgagtgacttctttttagttctctctccggttccacctccgttcacttcgaaaaatggcctctcacattgttggatatccccgcatgggacctaagagagagcttanatttgctttggaatctttctgggacaaacaagagcagtgccgagggattgcaaaaggtgcagctgat

SEQ ID NO: 5622 - DNA, 354 bp, Gossypium hirsutum
  Clone ID: LIB3083-113-Q1-L1-D3
tcgagttttttttttttttttttttttttttttttttttttttaagaaataaaaatccagagggcccttacctctctaggcaatgaaacttgttaaatagaaaaaagaaacagacaaattttttgaaaaaacaaagttttgttccgcaagatcagacacaaaacttgactaagatgccttggcaaaccaaagcatctcaaactttaaaaatcctacataaaacaggcaaaaacttcaaaccacatattaccaaagataaaaacactcaatctgctttacccgtaaaaccttttggccttttcacttttttttaacaacaaactttgtgacctttgcacccggtgggtccttttt

SEQ ID NO: 5623 - DNA, 147 bp, Gossypium hirsutum
  Clone ID: LIB3083-113-Q1-L1-D4
gggagaccggttacatctcaatgggacactacgctgattggggaagcaacaaatacaaagggggcccgtatgggtatgcagaggctaacaccgaaagtgaatgtaatgaccaaatccgctagctcacccatacgatgtttaaacccc

SEQ ID NO: 5624 - DNA, 361 bp, Gossypium hirsutum
  Clone ID: LIB3083-113-Q1-L1-D5
acaatactttctttctcttacagagattgagagaaaatcacagacacacatttatatagcacagagatcatcatggctctacactcgtcttgggtcttcgtttttggtattctaggcaacgctggttcattcatggtttacttggctccactgccaacattgtaccaaatattcaagaagaaaacatcagaaggtttccagtcgatcccatacgtggttacgctcttcagtgcgatgctatggatttactatgcactgcttaagaaagatgccattttcctcattaccatcaacacttgctgcgtattcattcaaacttttaacatggtgactaacttttactccggcccaatgaaagaaa

SEQ ID NO: 5625 - DNA, 301 bp, Gossypium hirsutum
  unsure (1)..(301): unsure at all n locations; Clone ID: LIB3083-113-Q1-L1-D6
gaaatgcagaggttcacggctaagattgtggaaatgatgaagcaagagaagttgtatgcatcacaaggaggacccattattttgtcacagattgaaaatgagtatggaaacattgattcagcatatggggctgccgcanaaccctatattaaatgggcagctggtatggctatttcattggatacaggagttccctgggttatgtgccagcaatctgatgctcctgatcccattattaacacctgcnatggattctactgtgaccaattcaccccaaattctattaaaaaaccaaaaatgt

SEQ ID NO: 5626 - DNA, 342 bp, Gossypium hirsutum
  Clone ID: LIB3083-113-Q1-L1-D7
caactgctgaacttgatgccaagatgaagaaatttactgaggatgcaattaaatttaagatggatgatactgctgaattgtatgattttgatgatgataaggatgagaacaagtttgacttcaagaaaattgtaagtgaaaactggattgaaccacctaaaagagagcggaagcggaattactcagaatctgagtacttcaaacaaaccatgcgccagtcagctccagcaaaaccaaaggagcctcgtatttctcgcatgcctcaactgcatgatttcaaatttttaacactcagaggctaagtgagttgtatgaaaaaaaagtcgcttctcatgcaacaca

SEQ ID NO: 5627 - DNA, 131 bp, Gossypium hirsutum
  Clone ID: LIB3083-113-Q1-L1-D8
gaaatgctttttttcacgcctaaatttgctaatttactgaggcaggaaattaattttgcatggctcataccgctcaatagcttgagccatatggtaagtgggtatgggaacactggtgacttctataaaat

SEQ ID NO: 5628 - DNA, 411 bp, Gossypium hirsutum
  unsure (1)..(411): unsure at all n locations; Clone ID: LIB3083-113-Q1-L1-D9
gacgacccacgcgtgcgnccacgcgttcttaagtcagaatttttcttatcctgtgagccaaacttcaacccgtgtaattcaagatgatgctggggagaactcatatctatcacttggacatgcattgccaaaaaattatgcttcatttattgttagagctccgccttccaaacctaaacctgtgcagtagtctcgcaaagctgcaatacctgaagaatctgctcctaaaagctacaatacctcagaaaagagcaatgaatcttcaggtaagaatacttctatatttgttgcgaacttgcctatgatcgcaactgatgaaatgctgaaagaggttttccaaaaatttggaccaattaaacccaatggcattcaagtcagaagctttaaagacaacaaaaactgcttttcgtt

SEQ ID NO: 5629 - DNA, 375 bp, Gossypium hirsutum
  Clone ID: LIB3083-113-Q1-L1-E10
gtcttaggcaccattcagacctagggaaaagcgggtcgcgtatcagaaatatttggaaggcatccacaaacacacttacttgaaaggtgcttacgataagaacacatctggcgccattcctgccgccctagctgcaagtgcacgggcttttaatcggacgagggatctataacatgtctcatgggattggaaaaaacgattgagagctctcactcgcggttagaagacatgttattctttttttggggttcatattagcatgaaagggagcgtttattaagctctaataattgtgcgggttttatgccaaatggagatcttaaaagataccctttggggttatggatttcaggttggtattggaaactcttgaaa

SEQ ID NO: 5630 - DNA, 387 bp, Gossypium hirsutum
  Clone ID: LIB3083-113-Q1-L1-E11
gtcgtctgctgctgctcccctagtctcgacttcgtgtaggaagaaaaagaacgaagaggccaccttccttgaagacttgaaggatcacatcgatgagttcattaatgcttcaatggaagagcacaaaacttgctttaagaagaccatccagaagatgtttgggatgtcgaaagttgtagcagaaaggagtgcggctgaatccaaggaagccaaaaccgtgtcgaaataagattatcttcttacctctttagtaatgtgacttgtggactacatttatatgcattgaggttgtactgaaatgtagcttttggtttggtctaaaccgtgtagcagtgctttcattttgctttggttgcactttcctttacttaaattagtttttgtttt

SEQ ID NO: 5631 - DNA, 384 bp, Gossypium hirsutum
  Clone ID: LIB3083-113-Q1-L1-E12
aagaaaacgaaaaaaagtttcgcttctttgctttctttcgagtaaaaatcaaacgaaaaacaacttaaataatattaaaagattttgattttgatcatcaaattttctgtttctgatccaccagtccagtcagagtgttgaagtattgaagctgtctggtgttttgtttgttttttgaaatctgatgtctccgccgcttcttggcgtggaggaagggggtcagaacaatgtgactttactgggttcttctggctctattgatagtgtgtgccagaataatgctgaattgaaggagcgcaattacatgggcttgtctgattgttcttctattgattgctctgttgtcacccttggttccgacgatagcaacgtaagtttgaatct

SEQ ID NO: 5632 - DNA, 317 bp, Gossypium hirsutum
  Clone ID: LIB3083-113-Q1-L1-E2
ctgctgctcaccatattgtcaaggcattaggaactacaaaaaatcttagtgatgatttgaggaaaatccttatcgatctcgatgcgcacttgtcattgataacttcaaatatcgatagcaagggaggaaagggattcgttgaagttgaggagcgactgaaacgagtagagaggaagattgtgatttgggagtcggatcgaataatgatatgggattctggacccaaggaagctttcgattatctagaagccgtagatgaagttcagacactgatagacagtttacgcggcttatccatgaatgaaaatcagaagcag

SEQ ID NO: 5633 - DNA, 217 bp, Gossypium hirsutum
  Clone ID: LIB3083-113-Q1-L1-E3
ctcttgccaatttacagctgatctttttgcaatgaaccatacagatttcatcatcaccagtactttccaggaaattgcaggaagcaaggacactgttggtcaatacgagagccacactgctttcactcttcctggtctctaccgtgttgtacatggtatcgatgtgtttgatcccaaattcaacattcgttcccctggtgctgatatggagatatac

SEQ ID NO: 5634 - DNA, 361 bp, Gossypium hirsutum
  Clone ID: LIB3083-113-Q1-L1-E4
tgaaagagcaaaggcttcctcctcagactttcattcctcttcaatcagtgcgtgttaagccaatcattgaaaggttgcgcaccttaagtggcacagcgaagcttatctttgatgtgatccaatttgaccctgctttggagaaggcagttctttttgctgttgggaatactctagtttgtgatgatcttgaagaagccaaggttcttagctggactggagagaggtttaaagttgtaactgttgatgggattctactctcaaagtccggcacaatgactggtggtacaagtggtggaatggaagctaggtcgaataaatgggatgataagaaaattgaaggtttgaaaaaaaagaaggaaca

SEQ ID NO: 5635 - DNA, 256 bp, Gossypium hirsutum
  Clone ID: LIB3083-113-Q1-L1-E5
agacacacctcaaaaaggatctagaaaagagaatatctcatccttttattttcatttcgtcttcttttcagctcaaattcatcatcgaaattacttgtagttatcaaaatggggacaataggcaaaactactacggccgctctttttctttgtcttcttctgtttcctattgtcttttccacgcctaatgacagattggttagaattggactcaaaaagagaaagattgaccgaaacaatcggatggctgcacacc

SEQ ID NO: 5636 - DNA, 215 bp, Gossypium hirsutum
  Clone ID: LIB3083-113-Q1-L1-E6
caagcattttccttacaagtttgtttttcttgtgattaatcgatatggctagctcaatgtcccttaagcttgcatgtgtggcggtgttgtgcatggtggtgggtgcacccctggctcaaggggccgtaacctgtggtcaagtcacaagctccctcgcaccctgcattggttacttgacagggaatggtgctggtggcgttcccccaggttgctgc

SEQ ID NO: 5637 - DNA, 325 bp, Gossypium hirsutum
  Clone ID: LIB3083-113-Q1-L1-E7
gaaacctgtattacgcaatccatggctacccttttttcaactgattcttcctcacaaaacatcctcattacgttcaccataatattcctcgcatcatctcttctgccttcctattctgcaatcactgagactgaccaacgccgcccatttaagaagatatacgccttcggcgactccttcaccgacaccggcaacaccgagtcccttaccggccccaaaggctttgtccgcgtttccaacccaccttacggcaccaccttctttcaccaccccaccaacccgtactccgatggccgacttcgcatcgacttcgtggctcattcac

SEQ ID NO: 5638 - DNA, 381 bp, Gossypium hirsutum
  Clone ID: LIB3083-113-Q1-L1-E8
tttctttattcctttgttcatcggagtgaagaaaacaatggggtggtgggataattcatatcacgaagctaagaaactcctcatttcacccaccatgaaacaaccctttcacttgctagcaaccctcctcctcagcctatggcttccccttgctttcctcctcgtcgccaggctatcttatgttaactacaccttaaacgccaccgtgttagacccttcttctacaccttccccaccatcgttccttttctctttctacttgtacaccaatccagctcttctttatttcctcgttgcagctattagcatcgtggctctggttcatggtttgactgggaaagtcagcttcgtaactgagtcaccgagttcttttcatcgacc

SEQ ID NO: 5639 - DNA, 374 bp, Gossypium hirsutum
  Clone ID: LIB3083-113-Q1-L1-E9
acgaaccatactgtagtaccattaatcaggtaacaaattcaaagagagtctacaaccacaagggttcagaaatggctattgttgactatgttgcggttgataccaaaaataaacagcatcttgagaaggttaatattcgttttcgacatccaagaaaccctatcattggtgataaatttagcagcagacatgggcagaaaggtgtctgctctcagttgtggccagatattgatatgccattctcaggagttacaggaatgcgccctgatctcataatcaatcctcatgcatttccttcaagaatgacgatagccatgcttttggaatctgttgctgctaaaggaggaagcttacatgggaaatttgtggatgca

SEQ ID NO: 5640 - DNA, 284 bp, Gossypium hirsutum
  Clone ID: LIB3083-113-Q1-L1-F1
cgaccaagaaaaagatcttctttgtcatggaacatgtccgtgggggtgagctctttgccaaagtttacaaaggcaagctcaaagaacacgtcgctcgtaagtactttcaacagctgatcagcgccgttgatttctgccacagcagaggtgtttcccaccgtgatttgaagcctgagaatctcctgttggacgaaaatgaagatctaaagatctctgattttgggttgtcggctttgcctgagcagcttctcaatgatggtctccttcacactcagtgtgggaca

SEQ ID NO: 5641 - DNA, 401 bp, Gossypium hirsutum
  Clone ID: LIB3083-113-Q1-L1-F11
tcaaaacagagtaggaaaaaaaaagaaaaaaaaggaaaagctaagggtttaaggtttaaagcttttattggtaagtcaattaagcctttcttatttaattttaatgttttagaagctttaaaaaaaatttgttgaaataaagttgaggttttggaagttcataagtttttaagcatggttcatgttgaacaaattgttgaattagggatttaattgaatgaatttcaagttagaattgattaagggattaaattgtaaaagaagctataagttttatgttagagggattaaattgaaagaaacttgagattagggttttactacgaatatttgatggttagggtgaatatgataggaaattgaataaaaataaagtatgaatcgagttataaaagtaaatg

SEQ ID NO: 5642 - DNA, 384 bp, Gossypium hirsutum
  Clone ID: LIB3083-113-Q1-L1-F12
cactgattccagcgagggaaatctggatgtaagcaagaagcaggagatatcagttaaggcaagtcatgatgcaggagatgatgatgagttctctgattcaataaaaacaaggagaaaatacagggatgtagccgatgcagctcaagcagcctttgagtcagctgcctatgcagcagcagctgcaagagcagctgtggaactctctcggtctgattcctatgatcctgatgatcagaacggtcccaatactcgacagaacacagtgtttgacaaacaagaagcaaattctaaagatatggaaaatcatggtagtcaagcagtggagttgaatcataccaagaaggcaccagaaatcaagatgtctagtccttcaagtgaaggatc

SEQ ID NO: 5643 - DNA, 388 bp, Gossypium hirsutum
  Clone ID: LIB3083-113-Q1-L1-F3
cttcaaactcccaggactgcaacaaaagttctttttcttatgcaccacccgcacaagctgatataaatcaagcaccacctgaaaacccaagagcagcttggttacaaaagcagtggattgagtctcgctcacttcagctagaagaacagaaactacaaattcaagttgagatgctagaattggagaaacagcgtttcaagtggcagagatttagtaagaagagggatcgtgagcttgaaaagatgagaatggaaaacgagaggatgaagcttgagaatgagcgaatggcattagagttgaagcgaaaggaactggatgctgattaaaaccatgtgatttttacctcaatcttcttatattcttttacagtggcagggcctggatgcaa

SEQ ID NO: 5644 - DNA, 339 bp, Gossypium hirsutum
  Clone ID: LIB3083-113-Q1-L1-F4
gtttattttttttttttttactgaacaggctaggccaaccataccgtgtgcagataagcaactcatgaatcttaagaaggtcaccttacataattctttttaaccaaacataaactaacagggcatagaaacttatcctgctcttaaaccaaacacaaactaagacaggcataaaaacttatcctcctcttcacatgtagcaaaactaaattaagatttactgcaaaacaacctcgtccatgagaaaatattctcttccagtctagctagattggcgcaattcatgccgaacaaaatctgcttctgggggcactgatttataaacagtaggtcttagct

SEQ ID NO: 5645 - DNA, 327 bp, Gossypium hirsutum
  unsure (1)..(327): unsure at all n locations; Clone ID: LIB3083-113-Q1-L1-F5
cgaagaagaagaagagaaagcccctgactctgtcactgctaaagccaatggcgatgcgggcaagaagggctatgttgggattcacagttcaggattcagagatttccttttgaagccagagctgcttcgagccattgtggactctggatttgagcacccttccgaagttcaacatgaatgcattccccaagctatactgngtatggatgttatntgtcaagctaaatcagggatgggggaagactgcgggtttttgttctatcaacttacaacagatggaccctaccccaggcaggttgttgcccttgtttgtgcatactaggagta

SEQ ID NO: 5646 - DNA, 360 bp, Gossypium hirsutum
  Clone ID: LIB3083-113-Q1-L1-F6
cttgtactggggaaaggacgtgactctgctcatcgattcctggaagactgattcatggctgagttacctcctcactttgcttgcttgttttctcttctcttccttttaccagtacatggaagatcgacgcctccgtttcagatcccttgcttcctccaacccatccccgccttcctccgccggcgcttctgttcctctcctccccaaatcccgccgctccgctaaattcgcaacggccttgctcttcgggatcaattcggctatcggttatctcctgatgttggccatcatgtctttcaacggaggcattttcttggctatggttttggaactggctgttgggtacctgattttaaggtc

SEQ ID NO: 5647 - DNA, 148 bp, Gossypium hirsutum
  Clone ID: LIB3083-113-Q1-L1-F7
ctagtgatccccggcctgatgattcggacaggtggaacttaaaactacagagtctatttggcccaggcggaagcaccctaaaaggatgttttaagggaaataacttaaccagctctagtgtttgataaagtttaaacataagcttatc

SEQ ID NO: 5648 - DNA, 284 bp, Gossypium hirsutum
  Clone ID: LIB3083-113-Q1-L1-F8
gttgtctggttttgctttcactgttaacgggtgggtccagtcttacggatctcgctgtgttaagccaccaatcatctatggtgatgttagccgccccaagccaatgactgttttctggtcatcaactgctcaaagcatgactcaacgcccaatgaagggaatgcttactggccctgttaccattcttaactggtcctttgtcagaaatgatcagcccaaattcgagacttgctaccagattgccttggccatcaaggatgaagtggaggatcttgagaaggccg

SEQ ID NO: 5649 - DNA, 383 bp, Gossypium hirsutum
  Clone ID: LIB3083-113-Q1-L1-F9
ctggttttaaatttgaaaccagttcatagacttatagtgaatgtttagtattaaaattaatcacattttcgtttagtgttttttttagatctcttgataatttgctttctttaggtttcttttttcttttcagtttttggttttttatctttgaagcttcgtcgagccttttattcatctttccacaatgaacgaccttctatcggattcatttgagatccctagaggtcaaggtcaaggatctcatggtggggatatcgaattaggagctcaagcaaatgcagatgaactaggccttcaaaatttctttaaaaaggttcaagagatagataaacaatatgagaagctggacaagctactcaaaaagcttcaggatgcacatg

SEQ ID NO: 5650 - DNA, 392 bp, Gossypium hirsutum
  Clone ID: LIB3083-113-Q1-L1-G1
aaaagatggcaattgagattcctagagtgaaacttggaactcaaggatttgaggtttcaaagctgggatttgggtgtatgagtcttacaggtcacgatcattcagtgtcagatgaagatggcatagccatcattaagcatgcagtcgaaagaggagtcactcacatcgatacagccgacttatatggacccaaaactaacgaaattctggtcggaaaggcattgaagcatctgccacgagagaaggtacagttggctacaaaattcggtgttgaaagcatgggtccagatggtccggttatcaatggcactcctgaatttgttcgttcttcacttgaggctagccttcaacgccttgatgtggattatattgatctttactatataatcaga

SEQ ID NO: 5651 - DNA, 382 bp, Gossypium hirsutum
  Clone ID: LIB3083-113-Q1-L1-G10
ctctggtgaagttgttgcaattaagaaaatgaagaagaaatattactcatgggaagagtgtgtgaatctgagagaagttaagtcactgcggggaatgaatcatccccatattgtgaagcttaaggaggtcattagggaaaatgacattctatactttgtgtttgaatatatggaatgcaacctataccaacttatgaaagacagggaaaagcttttttcagaagttgacattagaaattggtgcttccaagtctttcaaggtcttgcatacatgcaccagcgtggttattttcatcgtgacctaaagcctgagaatttgttggttactaaagatataatcaaaatagctgattttggtcttgctcgtgaaataagctcacgt

SEQ ID NO: 5652 - DNA, 370 bp, Gossypium hirsutum
  Clone ID: LIB3083-113-Q1-L1-G11
tcgagtttttttttttttttttttttttttcctggaaatgccttcaataaaagattgaaaataagctcaagaacacaacatatatatcctcaattaacaaagaaaacatataataatatatgaagggatttattcctcagcacacaaattgttgggataaagagcggctaaacacaccacttaaatgaaaatatgggtggagaatttgagggaggacagacaatgtacagctgatcaagtaaaagacattaccattcattattcctaacccacttcggctcggtggtcagatggatcatttaaaatataaagaccacactgtcatgaaccctagacttttggttttgagccacacattcagagatccaca

SEQ ID NO: 5653 - DNA, 384 bp, Gossypium hirsutum
  Clone ID: LIB3083-113-Q1-L1-G12
ggaaaatcctatttaaaaagcaaaaagattatgcttcgactcttgcaaagaacggactaacagggtcagctgcccaattaatcctcatccttacataccgttactgtataagatagatctcgttgtgaaagatctattactggaaaatttatgagtagagccgaagagtgtgaactgtacaagttaccaattaaatgaaggaatgagctccggtgtatagagaggacctcaccgtttaagaagtaaccatagaaacgatggaacccactatttatttatccatttctatttactcctttattttagttaatatgctttttttgatacctagtatcaatacaatttcttatttcaaggcgaaatgcctagaaaaaaggaaaaatc

SEQ ID NO: 5654 - DNA, 196 bp, Gossypium hirsutum
  Clone ID: LIB3083-113-Q1-L1-G2
aatgcttgtcggaagtttacgttgttagctaaatcttgcgggaaccaaacttttatttgaggggggagcttcggaggcggccaaagttccttgggcttcctttttggtgatgatgagcaccaaagtgcaccaactgtgacaccacctatccagcccccatatgggatagatgttcccgcatagatgcccccagctc

SEQ ID NO: 5655 - DNA, 396 bp, Gossypium hirsutum
  Clone ID: LIB3083-113-Q1-L1-G3
tcttctagcaacactcctgaaagccaaggcattaagaatttcccgcttacaccaccaaggccaaattccgaattgaagcctagtccaaaaccgccattgagcagcaagcaacatcaatttatgtttgacaatatggacactccaacaccgaaatctacaagatcaactacacgacctatgcaaactccacctagtagaatcctacaaggaagcagttcaggattgtcaaaatattcaagaccgagagctagtggagcggattcgccattcgacttgcccttgaaggatgatgacagccttactagctgcccaccattttcagttccaaattacatgacaccaacagtttcagcgaaggccaaagcaagagccaacagcaatttgaaggagatgttc

SEQ ID NO: 5656 - DNA, 321 bp, Gossypium hirsutum
  Clone ID: LIB3083-113-Q1-L1-G4
tctgaaattcataaatgaagtaattaatcgtggggttaccattatcctgtttgtagtgacgaatcttgtctgtgttcctaagaaaagaaaagaaatttgtcaaaatttcggggtcttaaagggtcgtggaaacccataagaactcttgaatggaactggaaaagagatgtaactccagttccttcggaaatggtaagatctttggcgcaagaagaaagtgctgatccgtatcatcttaactagggtctgatttctctatttttttaaagataccgctttctcctacttcgttcgaatagaacatgctggggccaacctttt

SEQ ID NO: 5657 - DNA, 284 bp, Gossypium hirsutum
  Clone ID: LIB3083-113-Q1-L1-G5
ttcagattgaatctccccacttctcttgtattcaattgttttccatcagaattttcaaactcatttgggtgtttatagaaagcttgattctcggttgttatgcatggaagaagtgggagtttgtttgtttgatgtaatagtctcagatatggcattcatggagagcttgtcactgaaattggatagaacaaactggtcagtcttttcaggacttcaattctatggttgttcataaatatcgctctgggttttctataatggatattttttgggtttggtgatat

SEQ ID NO: 5658 - DNA, 84 bp, Gossypium hirsutum
  Clone ID: LIB3083-113-Q1-L1-G6
ttgcctagactaagcctgtctgtgatcctaagaaaagagaagaacaccgtcgagactccggggtccttgagggtcctggaaacc

SEQ ID NO: 5659 - DNA, 74 bp, Gossypium hirsutum
  Clone ID: LIB3083-113-Q1-L1-G7
gttaccatgtctaaaacgtacttatattggtttgcattacatcctccttattaaataaagatttgccttttatt

SEQ ID NO: 5660 - DNA, 272 bp, Gossypium hirsutum
  Clone ID: LIB3083-113-Q1-L1-G8
gaacgttagcggagaaaaggaataggcactaccatgcgctgttggcggcagcggaggaatcggtggcgaggaggttaagagagaaagaagcggaagtggagaaagcgacgcggcggaacgccgagttggaggcatgctcagcgcaactaagcgtagaggttcaggtttggcaagcgaaagccagggcacaggaggcaacagcgacttcgttacaagcacagctccaacaggctatgattggctgtggggctgctgcggtgacacaagatagt

SEQ ID NO: 5661 - DNA, 389 bp, Gossypium hirsutum
  Clone ID: LIB3083-113-Q1-L1-G9
cagtgatgatgatgacgatgagtcatcaactaaaaagggtcggatggacgattcgtatcattttgatgctgatgagcgacgtgaatggagagccaagatcagggaagttatcagtaagcatcctgaaattcaggaggagattgaccctgctgaaaagttgagcaagatgcaaaaactcctggctgattatccgctggttgtagatgatgatgatccaaattggcccgaagatgctgatggctggggtttcaacctgggtcaattttttgataaaatcactatcaagaatgccaagaaggaaaacgatgacgatgatgattatgatagtgagaaagaagtagtgtggcaagacgataactatattcgtccaatcaaatatattaagattg

SEQ ID NO: 5662 - DNA, 282 bp, Gossypium hirsutum
  Clone ID: LIB3083-113-Q1-L1-H1
aaagaaatatttttttaccatatagaagttaaattgaaccaacaaaatcataggagactttttacaaacaagataaatcccttttagaatgacaggaaatcaacagtagtggcaaaaagggaaaataaaataataagaaagggttgtaaaacaccatttagcactccacgccacattgtttaagaactggacctgtttgtttgggcaagaagggatcgatccgtacccaaaccagtgggaaaatcgatggcaaaagtatggaccaaaacacaacaatggggg

SEQ ID NO: 5663 - DNA, 393 bp, Gossypium hirsutum
  Clone ID: LIB3083-113-Q1-L1-H10
aacaactcatatatctatttatatttatttatataggaaaaacaaagaattgcgactcttattacaacacgaaagctgtgaagacatcctcaacaaaaaaaaccaaaacaccaacttagaaaagagacactccgccaaagattaaccaaaaatatcattatcatttactgataatcacatgctatatacttgaaaaactattaagtgaactcgagtcagccatcatgtcttgcaaagaaacgtcaacacacattactcagaagaccacattcttgctgctgggaagatcttttgagtttgcccttgatcatcttggacgactttctgattaggctgccagtactatgatcactatcagaagcacaattccgaatatcaccaggagcaagcatg

SEQ ID NO: 5664 - DNA, 152 bp, Gossypium hirsutum
  Clone ID: LIB3083-113-Q1-L1-H11
aggcaaagaagcaagcaggtttgtttgttgatgtgggttttggttgctgcctttttctcccacaataaggtcattgcagtgacctccactggccttggtgagcagaaaaactactattcagctcctgaccctcatgctggaactcccccttc

SEQ ID NO: 5665 - DNA, 292 bp, Gossypium hirsutum
  Clone ID: LIB3083-113-Q1-L1-H2
agacaaacaaaacctaagaaaaagaccttgttgaaagcaagcaaatatttggcagcaaatagccaattcagaagtttaaaacatagtcaaaacaataaggaaacaaaagcactaaatcagataacaagaacacatttcatcgtctaatgcagaaaactacctgacatttagcaacatcatcaatcttcaaagcaagcaaatatttggcagtaaatagccaattcagaaatttgaaacaaaagcactaaattggataacaataccacatttcatcatccaatgcagaaaacta

SEQ ID NO: 5666 - DNA, 384 bp, Gossypium hirsutum
  Clone ID: LIB3083-113-Q1-L1-H3
gttgagaggatggtgagagtcagcgttttgaatgatgcactgaagagcatgtacaatgccgagaagaggggcaaacgacaggtcatgatcaggccttcctccaaagtgatcattaagttccttttggtcatgcagaagcatggttatattggagagtttgagtatgttgatgatcacagatctggaaaaattgtggttgaattgaacggaaggctgaacaagtgtggggtgattagccctcgtttcgatgttggagttaaagagattgaaggctggactgctaggctacttccttccagacagttcggatacattgtgcttaccacatcagctggtatcatggaccatgaagaagcaagaagaaagaatgttggtggaaaagta

SEQ ID NO: 5667 - DNA, 121 bp, Gossypium hirsutum
  Clone ID: LIB3083-113-Q1-L1-H4
agacatacataacctaagaaaaagaccttgttgaaagcaagctattttttgggggatatttccggcaaagtacttcccaacctcagctaaaacttgggaaaccattgcactcagttaaata

SEQ ID NO: 5668 - DNA, 353 bp, Gossypium hirsutum
  Clone ID: LIB3083-113-Q1-L1-H5
gttgagaggatggtgagagtcagcgttttgaatgatgcactgaagagcatgtacaatgccgagaagaggggcaaacgacaggtcatgatcaggccttcctccaaagtgatcattaagttccttttggtcatgcacaagcatggttatattggagagtttgagtatgttgatgatcacagatctggaaaaattgtggttgaattgaacggaaggctgaacaagtgtggggtgattagccctcgtttcgatgctggagttaaagaagatgaaggctggactgctatgctactttcttccagacagttcggatacattgtgcttaccacatcaacttgtttcatggaccatgaaga

SEQ ID NO: 5669 - DNA, 268 bp, Gossypium hirsutum
  Clone ID: LIB3083-113-Q1-L1-H6
tatgaaattcataaatgaagtaattaatcgtggggttaccattatcctgtttgtagtgacgaatcttgtatgtgttcctaagaaaagaaaagaaatttgtcaaaatttcggggtcttaaagggtcgtggaaacccataagaactcttgaatggaactggaaaagagatgtaactccagttccttcggaaatggtaagatctttggcgcaagaagaaggggctgatccgtatcatcttaaactgggtctgatttctctatttttttaaa

SEQ ID NO: 5670 - DNA, 281 bp, Gossypium hirsutum
  Clone ID: LIB3083-113-Q1-L1-H8
cttcattagaggattctctgtcaaaggaaaatcgaactgtttttctttctgttttaatcggcgaaaaagaaaatgcattcgactcatctgttactcgaagagccaatcaggatggcttcaatcctggagccatcgaaggctagcttttttccggcaatgacgaagatagtgggaactttaagtccaaaatctcgatccattgaagtcatttccggttgccttaaagctggaatgtctgtggctaggttcgatttctcgtggcatgatccggcgtatcatca

SEQ ID NO: 5671 - DNA, 372 bp, Gossypium hirsutum
  Clone ID: LIB3083-113-Q1-L1-H9
gggatatgtccgtggggttaacgtacaagaagaaacacatattccagtgtgccttcattcaaggccgcgtaatcggtactatcttcccagctccatgtgaaaaccttggtagatataatgaagaaagacaacttgtgaaacgctccacggcccagaacataaccgatatagattatgacatatgagaagacatcgtttcaccagcagttagccattcttttgtaggatcaaaatctcaaaggcttagaactgtatgtcttggagaaatggggctttgttatttttctttggtccctttctcggctcgctattacttgtttgattcatggagaggggaaagatttaaagtagttttatacatttttcatcatc

SEQ ID NO: 5672 - DNA, 228 bp, Gossypium hirsutum
  Clone ID: LIB3083-114-Q1-L1-A1
ttttcttatgcagctgcatatgatcctttggatccaaatggaaatgtaacaatcaaatgggatattgtgtcttggacgcctgatggctatgtggcagtggttacaatgaacaattttcaaatgtatcggcgcatcatgagtcctggttggaccttggggtggacatgggctaagaaagaagtaatatggtccatggtaggggctcaaactactgagcaaggtgattgc

SEQ ID NO: 5673 - DNA, 389 bp, Gossypium hirsutum
  Clone ID: LIB3083-114-Q1-L1-A10
ccagaaagtaaaaagaacagagctttgatatcctaagctaatgtcggacgaggagcaccatttcgagtccaaggccgacgccggcgcctccaaaacctatcctcagcaggccggtactatccgtaaaaacggctacatcgtcatcaaaggccgtccttgcaaggttgtcgaagtttccacttccaagactgggaagcacggacatgctaagtgtcactttgttgggatcgacatcttcactgctaagaagctggaagatatcgttccttcttcccacaattgtgatgtgccacacgtcaaccgtactgattaccaattgatcgacatttccgaggatggatttgtgagcttgctgaccgacagcggagacactaaagatgatctaaggc

SEQ ID NO: 5674 - DNA, 370 bp, Gossypium hirsutum
  Clone ID: LIB3083-114-Q1-L1-A11
tgaaaggaagatctgggctagtttgacgtggtagagttgatggcagtaacagaggcagaaaatcctcttgtaggagaaatcacttgcggttcttcactgcagaaattgcaggaaatttgggatgaagttggtgaaagtgacgaagagagagacaagatgcttcttcagatagaacaagaatgcttggatgtatacaagaggaaggttgaacaggctgcaaaatcaagagcgcaacttcttcaggccttgtcagatgctaagcttgagctttctactcttgtatcagctctcggggacaaaagtttcattagcattcctgagacgacattgggaacaatcaatgaacaacttgctgctattgcaccagcac

SEQ ID NO: 5675 - DNA, 384 bp, Gossypium hirsutum
  Clone ID: LIB3083-114-Q1-L1-A12
caaacatacatgatagataaagccaaaggaagaatgagaatccgaatgaaagtaagcttagcattagtagtcgtcgttgggtgcatcgccatcggcacggtagccgtccattttttggaaaatttggattgggttaatagcttttatctcgctgttacatcagtgacaaccgttggttatggtgatttttcttttgaaacgttaacggggaggtgttttgctgtcctgtggttgcttgtaagcacgttagctgttgcgagggctttcctttacttaactgagttgaggattgagaaaagaaatagaaaaattgcgaaatgggttcttcagaagaagatgacactaggagatttggttgctgcagacctcgacaatgatggatcc

SEQ ID NO: 5676 - DNA, 277 bp, Gossypium hirsutum
  Clone ID: LIB3083-114-Q1-L1-A2
ttcttttttttttttttttccttttttttttttattttattattttttttttttttttttttgttgggagagattttatttttttttctttttttttttttttttaaaaaaaaaaaaaccctttttttatcccccccaaattccccaaaaatcccaaaatctgggaaaccccgtttttacctttgttttttctcccctttcccattttttagccccccaatttccccccccatttttccttccccctaatttacccgccaaaaattacaacctcttt

SEQ ID NO: 5677 - DNA, 402 bp, Gossypium hirsutum
  Clone ID: LIB3083-114-Q1-L1-A3
tacagagttgtgcatgaaccagaaagtcgggaaaatgatcaaatagccaatgttaatagtaagtttcaagacatgggattatccagtacagtgaaaggaagttctgttagaatggaagatgcttctacttcaactgattttactggactaccctctttttctcggtcttcatcaattccagattcaggttggaggcctcgtggggtgttggttgcacatctgcaggagcaccgatctgctgtcaataatattgcagtttcaaatgatcacagtttctttgtgagtgcatctgatgattccactgtcaaagtgtgggattcaagaaagttggagaaggatatatcatttaggtcaaggctgacttatcacttggaaggaagccgagcactatgcactgcaatg

SEQ ID NO: 5678 - DNA, 320 bp, Gossypium hirsutum
  Clone ID: LIB3083-114-Q1-L1-A4
tacagagttgtgcatgaaccagaaagtcgggaaaatgatcaaatagccaatgttaatagtaagtttcaagacatgggattatccagtacagtgaaaggaagttctgttagaatggaagatgcttctacttcaactgattttactggactaccctctttttctcggtcttcatcaattccagattcaggttggaggcctcgtggggtgttggttgcacatctgcaggagcaccgatctgctgtcaataatattgcagtttcaaatgatcacagtttctttgtgagtgcatctgatgattccacttgtcaagtgtgggattc

SEQ ID NO: 5679 - DNA, 397 bp, Gossypium hirsutum
  Clone ID: LIB3083-114-Q1-L1-A5
ttttggtgccatggcaaaaactgagaaaattgccttcattcttgaacaagttcgcctctgcttagatcgccaggattatgtccgtgctcaaattctgtcaaggaagattagtcctagagtatttgaggtcgatacctccaaggaaaagaagaaacccaaagaaggtgacaatgttgtggaggagcctcctgctgatataccttcactattggagttgaagcgtatctactatgaactgatgattaggtattactttcataacaatgactaccttgaaatttgccgttgctataaggcaatatacgagattccatccataagagaagatccatctcagtggattccggtcttaagaaaaatctgttggtacttgatcttggccccacatgatccaatg

SEQ ID NO: 5680 - DNA, 407 bp, Gossypium hirsutum
  Clone ID: LIB3083-114-Q1-L1-A6
atcttgaatggatctacttcttttgtacaacttttacagatggttggatctgccaggctgcatgaagttcagagtcatcagaatatgtctcctaatgagaactcaaatgtcagaacaagccaattccagaatcaccaaagagaaaactgtgacaactcaaatggtcctaaaagcttcacaagggaagaccttatgccatcagctaattaccatccatatcttactctaaactcagaagtaagagaaactggacagtttgagacgttaaaagaagaaacaagagtgtctgaggcttccaagacgatagatgaaaacatgataaaaagactaagtccattaacacaagaatctgcatctcaatcaatggatcaaaatgacaaaaccaggtctgtacaggtgacccaaca

SEQ ID NO: 5681 - DNA, 289 bp, Gossypium hirsutum
  Clone ID: LIB3083-114-Q1-L1-A7
gtcaataatagagattaaaatttaagaggatggaaataacattaacgcaatgtctcggacaggaccaaaactgatgctactacttctcagttgtaatattctctaattttttaacccaaaacaaaaacagaatggaaaacaaaaaagatattcatgcaaaattacactcaaaaacacgttcatggtttctaacaagggaaatggtgatttgtcttgagagttttttgggggagaggtggggggactcctgactatagaataaaccacaatggattccaagtgtaaacca

SEQ ID NO: 5682 - DNA, 403 bp, Gossypium hirsutum
  Clone ID: LIB3083-114-Q1-L1-A8
tttttgtttgttcttgaacaatgtaatgaagaaatgggaagaagcaaaaaaacatggccaaagttctgttgttcattgctctatgtgtgcttccagctttggttagtgctacacgcattctgaataaccaattggtggttgaaggctatgtgtactgtgatacttgccgtgctggttttgaaacccctaagactagaaggctagctgatgccatggttaagctggtatgctccgacaggaagaccggcggagttgttttcgagaaggagggatataccgacaaaaccggaaaataccagattcgtgtatccgaggatcacttggatcagatctgtgatgcagttcttgtgaagagcccccaacttggatgtgccacaatgtcccccggtcgtgaacgtgcccg

SEQ ID NO: 5683 - DNA, 383 bp, Gossypium hirsutum
  Clone ID: LIB3083-114-Q1-L1-A9
gtcacttatactttgagctgcttggagaaatgggtggcacctaaaaaggctgaagtgccattgctttttttccctgctaaagctgaagtgatgcctcaaccactcggtgttgttctcattttctcatcttggaatttccctttcacactggcattggacccattgatcggagcaatatctgccggcaacacggttcttttaaaaccatctgatctggcaccggcatgcatgtcgtttctcgtcgagaccatccctaaatacttggacaacaaagccattaaggtcgttgccggtggagcagatatcggtgaacgactgctccagctaaaatgggacaaaatattcttcaccgggagtccacgagtgggtcgcttggttatggc

SEQ ID NO: 5684 - DNA, 397 bp, Gossypium hirsutum
  Clone ID: LIB3083-114-Q1-L1-B1
gggaactggaaaagatcttctctgctattgcattgaagtgctgccctagtactgttagctcatctcggactagatcgcagagtctattattgacttcatccaatgatgaagtggttgttcacggttcacctggtatggagctcaccagtgaacaaactaaggcgaattgtcactgggaaactcttgagcactatcttgagaagtacaaaaactttcattctagattgccagtaatagttgctgaaacgcttcttcgtactgatcctcatattgaattgcctttatggctggttaaaatgttcaaggaaaatcagagggaaaggccttggggaatgactggtccaaagccaagttcagcatccttgtttcgactatatgttgattatggtcgatatac

SEQ ID NO: 5685 - DNA, 386 bp, Gossypium hirsutum
  Clone ID: LIB3083-114-Q1-L1-B11
cagcaacccacttttactatgccctattagtaaagcatttactttttgcaaggcttgctgagcttcttcatgtgacagacatcgcaaaagtaatccgtcgaactctcgccgatagagggcatcgttaaagtatacgattttttaaccctgatgggtttcgcagtcgaccatttgatagccctgttcctgaatatacagaactaatagggcttcgatgagccctagatgtaaaggggttaaaatacctctaagcaattagaagagcgcggaatttgacctccctcaaatggatggatctgggattgattgtggaatccgagcagagagaacccggggcgggcaggaagatacgctaggcggagtagtcgctctggagcaggttcttc

SEQ ID NO: 5686 - DNA, 375 bp, Gossypium hirsutum
  Clone ID: LIB3083-114-Q1-L1-B12
ggcaacccatttttactatgccctattagtaaagcatttactttttgcatggcttgctgagcttcttgcccagacaagcataaaaaataccatcgggcaaacaatctttgatggagggcatacaccaagaatacaaggcatataccccgcctatgtacagagaacaacatgtgccctgtcgtgtaaaataccacccccaactaacaaggatttaattacccttctttggaacccccaaaaaatacctcttagttaccttgggaactcacaagatggcctacctaaccaggattggatttcaaaaagaataaaataaaagagctttcactatcctttggggataggaaaatattttacgcggaacccacaatctgg

SEQ ID NO: 5687 - DNA, 399 bp, Gossypium hirsutum
  Clone ID: LIB3083-114-Q1-L1-B2
aaatcgtccaatcttggttgcagcatctgtatgcagctatggggcttatgtggctgatggttctgaatacagtgggtgctatggtgaggcaatgacagtcaatgctttgaaagaatttcatcgcagaagggttcaggtcctggctgaagcaagtcctgacataatagcatttgaaacagttccgaacaaaatagaagctcaggcttttgctgaactcttagaggaagaacacatcaagattcctgcatggttaactttcaacatcaaaagatggcgtgaatgtacttagcggcgattctttgcttcagtgcgcatcaattgctgaatcttgcaagcaagctgttgctgttggaatcaactgcacgccacctagatttattcatgatctgattttagcaa

SEQ ID NO: 5688 - DNA, 388 bp, Gossypium hirsutum
  Clone ID: LIB3083-114-Q1-L1-B3
ggccaaatataatattatagatcaagaaacaaaaaggcaggcaacatatacaagaaacaaaaaattattaaaaagtcatccgatgatggttggatacccaggtaaactggtcaccttatcaaatcatccaatgtagcaagcaagtcaatcaaaacatatgagaaaacaatccacaaccatgctctgtaatgtatcacacaattggatcccacccttaaacacgattaagttgggattccataacacaccaattcgaaattccacccaaatccgaacccgatttcaagctagatcggttcctatgtatcaccacagagcgatcccaatgcattcatgacaatggcacagcaacctgtggcattaacaccatcaccatttcctgacaaaa

SEQ ID NO: 5689 - DNA, 385 bp, Gossypium hirsutum
  Clone ID: LIB3083-114-Q1-L1-B4
catcttttctttcttttgtaatacagctgctaagggagaaagcaagcaaagcaaacacttgaaactaaattctgcattcaactcttgaggtgcaactaacttactttgccaaatacaaagcaacaaaaaaaggaagtgaagttcttgaggaagagtaatttggagtttttgagagtttgagctttgtaaacagttattcgaccgtgtatataaacaatggatgattatcttgatcagtatttctcatcatcatcatcgtcagatgtgaatgtcaaggaaagatcatattgggtccataatgaacctgatcaaccaaatgaagtgtttcctagttcgcgcttcaatagcatcgagtgtttagctgcacaaaatacgccacctgtag

SEQ ID NO: 5690 - DNA, 393 bp, Gossypium hirsutum
  Clone ID: LIB3083-114-Q1-L1-B6
ggcaagtacctctttgctggagttgtggacggaaggaacatctgggccaatgatcttgctgcttctttcagcactttgaaggagcttgaggctgttgttggcaaagaaaacctggtggtgtccacatcatgctcgcttctccacaccgctgttgatctagtgaatgagactaagctagacgatgaaatcaaatcgtggctcgcatttgctgcccagaaagttgttgaagtcaatgcacttgccaaggcattggctggtcaaaaggatgaagccttcttctctgccaatgctgctgctcaggcttcaaggaagtcctccccaagagtgactaacgaggctgttcaaaaggctgctgctgctttgaaaggctctgatcaccgtcgtgcaactaat

SEQ ID NO: 5691 - DNA, 355 bp, Gossypium hirsutum
  Clone ID: LIB3083-114-Q1-L1-B7
gagagactcaaggaagaaattcaaagactaggccagatccaatcagatggttcttacaaggtcacatttggggtgctatttaatgatgatcgctgtgcaaacatctttgaagcactagttgggacactaagagcagcaaagaaacgaaaagttgttgcatatgatggtgaactactactgcaaggagttcatgacaatgtggaaatcattctcaaagctacaacaccagcagcagcagctcagagtagcaactaatgcagttctaaataaataattgcaattatagttttgcagcaaaagtttgatgatattctatgtaatttttcaatgtttatcatgtttgaaagcttgcttc

SEQ ID NO: 5692 - DNA, 351 bp, Gossypium hirsutum
  Clone ID: LIB3083-114-Q1-L1-B8
gggtgatgcagggggtgctgctgatagggttttgaaccaacttcttactgagatggatggcatgtctgccaagaaaactgttttcatcattggagccaccaaccgacctgatattatagatccagcacttctgcgtccaggtcgtcttgatcagttgatctatattcctctccctgacgaggattctcgccatcagatttttaaggcttgcttgaggaaatcaccaattgcaaaagaggttgacctcagagctcttgccagatatactcaagggtttagtggggctgatatcacagaaatttgccaacgagcatgtaaatatgccataagagaaaacattggaaaggatat

SEQ ID NO: 5693 - DNA, 384 bp, Gossypium hirsutum
  Clone ID: LIB3083-114-Q1-L1-B9
cattgatcttttgatcttctagagacttctcttcctcgttgtgtgtctctgggtttgccctcgtaatggcgtctgctttagaaaccaaagccaaagaagcatacttcgatgaccacttcgaactcgccctcgatctctactcgcaagccatcggaatcaaccctaaaaaggccgagctctacgctgaccgtgctcaagccaacatcaaactcaacaatctccctgacgctgtggcagatgctaacaaagcaattgagttggatccgtccatgtctaaatcctacttgcgtaaagctactgcgtgtatgaagcttgaggagtatcaaactgctaaggctgcgttggagactggggctgctttggcaccagaagactcgagatttt

SEQ ID NO: 5694 - DNA, 412 bp, Gossypium hirsutum
  Clone ID: LIB3083-114-Q1-L1-C1
gaatgaagtagcttcaattgatgtcagcattggcaatatttacatgtctctatgtcgctttgatgaggccatcttctcctaccagaaggcactaacagtgttcaaatcatcaaagggtgacaaccacccttcagttgcctccgtctttgtacgacttgcggatctataccacagaacaggaaagctccgagaatcaaagtcctattgtgaaaatgccctgaggatctttgcaaaacccgtgcctggaaccacagcagaagagatagctggtgggttaaccgaaatttcagccatatatgaatctgttgatgagcctgaggaggctttgaagctcttgcagaaagcaatgaagttgttggaagacaaacccggtcagcaaagcacaattgcaggaattgaagctcgaataggg

SEQ ID NO: 5695 - DNA, 390 bp, Gossypium hirsutum
  Clone ID: LIB3083-114-Q1-L1-C10
ctcattttgatcttagcagagatctagcttgtcaccttttaattatttcaacgccgtatatagccgacgccgtccgataaaatctctcgccgccggtgtatggaaacaccgtgggtacatctctagggcacggttttattacagattcattactcatggcttcgtggcttaaagtcgctgaagatttatttgaagttgtagatcgaagagcaaagctagttgctaatgaactgtcggaggagccacctgattctcaaacacaaggttcttcagcaaaaaaaacaaagccaagggcaaaggcacaaaaaagactttctacaaaaagatctcccaaacctagtgatactataaacaagcaaactagttcagaagtactaaaatctgatataa

SEQ ID NO: 5696 - DNA, 385 bp, Gossypium hirsutum
  Clone ID: LIB3083-114-Q1-L1-C11
tcgacggcggcgtatttagctcgaagagcggcgcaaaaggagagggttcggatcctctaccgccgtgccctgaaagacacactcaactgggccgtccatcgccacctcttctatcaagatgcttctgaccttcgcgagaaattcgaagccaacaagcatgtggaagatcttgatacaatcgacaaaatgatagatgcaggtgaagcaacttataataagtggcggcatcccgatccttatatcgttccttgggctcctggtggttccaagtttactcgaaaccctgtcccaccttctgggatcgagatcgtgtatgattatggtcgagaagaaaatgactaagacatccatcttttcaacttccccagaaataaagttgatgcag

SEQ ID NO: 5697 - DNA, 374 bp, Gossypium hirsutum
  Clone ID: LIB3083-114-Q1-L1-C12
gagagggctatacgccatgcaatacaggaacgcatacctattgtagttgttataaacaaggttgaccggctgataacagaacttaagttgccccccaaggatgcttatcataaactaaggcataccctggaagtaattaataaccatatatctgcagcctctacaaccgctggtaatgtttcagttattgatcctgctgctggaaatgtttgttttgctagtgcaagtgcaggatggtccttcactttgcagtcatttgcaaaattatgtgtcaaactacatggaattccatttgatgctgagaagtttgcatctcgtctttggggtgatatttattatcatcctgataccaaggcttttaaaaggaaaccccc

SEQ ID NO: 5698 - DNA, 408 bp, Gossypium hirsutum
  Clone ID: LIB3083-114-Q1-L1-C2
tgagagagtgcatttcagttcacattggtcaggccggtattcaggtcggaaatgcttgctgggaactttactgtctcgagcatggcattcagcctgatggccaaatgccaagtgataagactgttggtggaggagacgatgctttcaacacctttttcagcgaaactggtgccgggaagcacgtccctcgcgccatctttgttgatctggagcctactgttatcgatgaagtgaggactggtacgtaccgccagttgttccaccctgagcaactcatcagtggcaaagaagatgctgccaacaatttcgctcgtggccattatacaattggcaaagagattgttgatctctgcttggatcgtatccgaaaacttgctgataactgtactgggctccaaggcttcttgg

SEQ ID NO: 5699 - DNA, 420 bp, Gossypium hirsutum
  Clone ID: LIB3083-114-Q1-L1-C3
cgattccggaaaatcgaccaccactggccacctgatctacaagcttggtggtattgacaagcgtgtgattgaaaggtttgagaaagaagctgcggagatgaacaagaggtcattcaagtatgcttgggtgcttgacaagctcaaggctgaacgtgagcgtggtatcaccattgatattgccttgtggaaatttgagacgaccaaatactactgcactgtgattgatgcgcctggacaccgtgactttatcaagaacatgattactggtacctcgcaggctgattgtgctgttttgattattgattccaccactggtggttttgaggctggtatctccaaggatggtcagactcgtgagcatgctttgcttgcttttacccttggtgtcaagcaaatgatttgctgttgcaacaagatgga

SEQ ID NO: 5700 - DNA, 387 bp, Gossypium hirsutum
  Clone ID: LIB3083-114-Q1-L1-C4
gttgcaaggatctctcatggcgctcctttgggatccactgaccttgtggttgatcttggcggttcgtttctttggatggattgcaattccggacacgtgtcttcatcatacaggttggtctcaagctgctcggtcaactgctctagagcaaagttccatgatcttggaagcacgagttgtctattaaacaccaactgttatgtgtccccttacaatggcgtaacaggatcgacttcaatgggggaactagtggaggatgtcatagccgttgattctgttgacccttcatatgtaggccaaagcacaacagtggatcactttctgtttgcttgtgcatcgacgtttcatttacaaggcttatcaagtggggccaagggaatgatgggt

SEQ ID NO: 5701 - DNA, 145 bp, Gossypium hirsutum
  unsure (1)..(145): unsure at all n locations; Clone ID: LIB3083-114-Q1-L1-C5
gagccgggnncgaggggacgcaccacgnggaccgggggagagcgagaggagacagcgngaacggggacgaaaaaaacnncaccggaaggaaggagaacgacangcaccaaggcgggaaccccaacaacgagcgcaaccgccacga

SEQ ID NO: 5702 - DNA, 387 bp, Gossypium hirsutum
  Clone ID: LIB3083-114-Q1-L1-C6
ctttttccttttatatttttcctctccaattttccgtggcgtttcccgagaaaatgagagaaatccttcacatccaaggtggccaatgcggcaatcagataggagccaagttctgggaagtcgtatgtgccgaacatggcatcgattcaacgggtcgatatggtggtgactcggagctccagcttgagcgaatcaatgtttactacaacgaagccagttgtggccgttctgttccccgcgcagttttaatggatctggaacccggaaccatggatagcgtaagatccggtccttacggacaaatttttcgacccgattacttcgtttttggacagtccggtgcgggaaacaattgggcttaaggacattacactgaatgagcggagc

SEQ ID NO: 5703 - DNA, 406 bp, Gossypium hirsutum
  Clone ID: LIB3083-114-Q1-L1-C7
gagcggtgctacaaaatatgcaggggatgatcttcaacttaatgttgatccttatctatcatctgacaaggacaacattcttattttcaaatccaactcttctcttccatctagaggtgccatagattttgtaccaggtatcaggaaaatggtatgtcaagattctggagtatggaagtatgatagaaatggttctgccaattcgactgttgggtctagtagaagttctcatgggttggctaataccttcagtcttgcacctggaagaggggtttacgctaataggctgcagacacgtgttcattcagatcctgcttggcttgaaactggagatgcagtcgcaaatttataccctgaactgcgggaagacgctcaagaccatgcacgatctcgtaacgcatatttt

SEQ ID NO: 5704 - DNA, 406 bp, Gossypium hirsutum
  Clone ID: LIB3083-114-Q1-L1-C8
attagtaacaccctggctctcaacaaggcaccttacaaggaaccaacctacaaagatgggttcccgacatgggtgaaacccggtgacaggaagctgttgcagtcgtcgtcgccagcttctacggcgaatatcgtcgtggcccaagatggttcagggaattataagacgataaaagacgctatatccgctgcttcgaagcggtccggaagtggaaggtatgtgatatacgttaaggcaggcacatacaaggaaaacgttgagataggaagcaagctgaaaaacatcatgatggtgggcgatggtatagggaaaactataatcacagggagcaaaagcgtcggaggaggatccacaacgttcaattcagccaccgttgccgttgttggagatgggttcattgctcgtg

SEQ ID NO: 5705 - DNA, 387 bp, Gossypium hirsutum
  Clone ID: LIB3083-114-Q1-L1-C9
aaaactcttgcaaaatcaataaaactcttccatgcaaggatgcaccaacggctctcaccttctaccatagcaaaaacttgaaagttcaaaacttgaacatccaagatgcacaacaaattcatgtttcttttgaaaaatgcaacggtgttcaagcttctggtcttacggaggcagccccagagagcagccccaacaccgatgggattcatgtcactcgtactcaaaacatatggatcacaaattctgtaataggaacaggtgacgattgtatctccattgtaagtggatccaaaaatgtgcaagccatggacataacttgtggccctggtcatggaatcagtattgggagcttgggatctaaaagttcaaaggcttatgtctcgggtg

SEQ ID NO: 5706 - DNA, 400 bp, Gossypium hirsutum
  Clone ID: LIB3083-114-Q1-L1-D1
gcacgaaaagaagttatcatcatcaagaaaggttgtcatccgtaatattaattacatttcttcgaacaggaatggggataagggcagtgattctgaagataattctgatgaggatgagttcattgatggagattctctcaaacagcaagtagaggaggctgttggatcactagggaaacaacacaagtctacctcacgccatcataagaaatgcaatggaagcaagcatcgaaacactgtgtcctacgacgaagatgaaccgggaactaaaaatccagagggagaaaaacgaagcaatccctgggatactttccaaaacctgctcttgcaagacaaggatttggattcttctgaagtagataaacagcctgcaagattccaagacaaatattttgcagca

SEQ ID NO: 5707 - DNA, 386 bp, Gossypium hirsutum
  Clone ID: LIB3083-114-Q1-L1-D10
cctgcttttgcattatgtcaaaatgatgaagtggcgaaaataataagatcttgtgaattagagatcttaacccttgccacgttatcgactttcaaggttctactaagtggtgtggatgatgctccagctggatgtgcatttgaaaatgttaatgaaaaccttaaagtttatcttaaggttcatggaaccctaaatgcagaagcagaacgcgaaaagattaagaataaaatggatgaaatactgaagcagcaggaaaagctgaagaagatcatcagtgcatcaggatatcaagaaaaagttccatctcacattcaagaagagaatggcacaaagctggcaaaacttctccaagaatttgagtttttcaagaaagaaagcgatcgttt

SEQ ID NO: 5708 - DNA, 306 bp, Gossypium hirsutum
  Clone ID: LIB3083-114-Q1-L1-D11
tggttggcaaactgcccatgccaccttctacggtggtgctgatgctaccggcacaatggggggagcttgtggttatggaaacctgttcagtcaagggtatggaacgagcacagcagctttgagcactgcacttttcaacaatggcttgagctgcggtgcctgctacgagctccggtgcaacaatgatcctcaatggtgcattagtcgaaccataaccgtgacagccaccaacttttgtccacctaactatgctttatctagtgacaatggggggtggtgcaatcccccaacaaaaacactttattt

SEQ ID NO: 5709 - DNA, 350 bp, Gossypium hirsutum
  Clone ID: LIB3083-114-Q1-L1-D12
gtttctgagctagaaaattgcagttctaacagtattaatgatttggatgttaaagaaaaccatgcaagtgcaatcacaatgcctgattcttctctatctattgctgagcagcccaagaaacttgatgatgctaaaggtgaatctgtgagtttaattgttgcagactcccctcaaatagggcaggagccactggaaggcacatctgatctgcagagagaacttgattctgagactggtaatcaagcatacgggctatccccagaagcatcgactgggagccaaatgattgtaccagcatctcaaggaacaccttctagtgacgtactagtgtaagctaaaaagaaaagaac

SEQ ID NO: 5710 - DNA, 411 bp, Gossypium hirsutum
  Clone ID: LIB3083-114-Q1-L1-D2
atagccatggcttcctcaccaaaactcttctctatgtctatcctcttcctttttgccctcttctccatgcaaatccatgctagagagtacttcagcaaattcccaagagttaacatcaatgagaaagagacaacaaccagagagcaaaagcacgagaccttcgttccccagaccacccaaaagccagaagaacaagagccaaggttcattcctgaaacccaaaatggttatggcctttacggccacgagtcaggctcaggctcaggctcaggctcaggctcaagccggcccagtttcaccaccaaagaaacctatgaaccctatgtcacccctgttagattccaccctgatgagccctataacagcatccccgaatcctccaacaataaagacacttactactacaacaag

SEQ ID NO: 5711 - DNA, 400 bp, Gossypium hirsutum
  Clone ID: LIB3083-114-Q1-L1-D3
attaagcttctttctttcataaaacatcgactgaagctgctccaagattaaagaagcttcaatttataatactctgccccttaaactagcaaagcctgatctgctgcataatcgtctaaagaaaaattgatggggataaataagttgctgtgttggtttgcagttttcttctttttgttgggtttctctgcttgcagttcgatttctgatggtgtttttgactctttcacttctactggaaggcacctccttcaagctaagaaagcttgccctgttaactttgagtttctgaactacacaattatcacaagccaatgcaaaggaccaaagtatccacctgaaagttgttgttctgcattcaaggaatttgcttgtccttatgcagaacagatcaacgact

SEQ ID NO: 5712 - DNA, 405 bp, Gossypium hirsutum
  Clone ID: LIB3083-114-Q1-L1-D4
tggtaatcaaattggtggcaagttttgggaagtagtatgtgatgaacatggcattgatgccagtggtaactatgtcggcacttcgcctgttcagcttgaaaggcttaatgtttactataatgaagccagtggtggcagatatgtgcctagagctgtgttaatggatcttgagccaggaactatggacagtttacgaacaggtccttatggaaaattgtttagaccagataactttgtgttcggccaaaatggagctggcaataactgggctaagggacattatactgaaggagctgaattgattgattcagttcttgatgttgttcgtaaagaggctgagaattgtgattgtttacaaggttttcaggtttgccattcactgggaggtggaacaaggtcagggat

SEQ ID NO: 5713 - DNA, 404 bp, Gossypium hirsutum
  Clone ID: LIB3083-114-Q1-L1-D5
cagaaagggtggatggtattctccgaagaaaaggatagccggcctgtgaaattatcttttaggagaggaaaggttgttgacattcagaccgagaataatggtccaaggaggctcaagttcaggcgaggaagattacttggggtcaaccaaaatattaaggctgagcggagaacctttaggacaagagaagttgatggcgacatgaatgacaatgaaccttgtggggaaaaagttgttttgagacaccaggatttgcagggaaagaaagatgaaaagggtttgtttaacaatgtcattgaagaaactgctagtaaactcgttgaaacccggaaaagtaaggttaaggccttggttggtgcatttgaaactgtcatctccctccaagacggcaaaccttcatcaaa

SEQ ID NO: 5714 - DNA, 405 bp, Gossypium hirsutum
  Clone ID: LIB3083-114-Q1-L1-D6
cttacacttgtcacttaactttcccacaccggaaacaagctgaacaaaatgttttgctaaaattgctcttcaagccatcaagcaagctagtgcaatcaaggataaagattataaacaactcacgatttctactatttaccaggatctaaaatgttgcaaatcaattcataacgagtatgctcttagaatgaatcacgtaagtcctacatacacaactacccaacaggataaattccgccctgtttatgtatcttcattggtttttgatggtaaaacttatcgtggcgaagttgccggaagcaagaaagaagcagaacagttagttgcacggattgccatcgagtctcttcttggtactttttcaagagctagttttcacatgtagctttgagctttgtccttgta

SEQ ID NO: 5715 - DNA, 403 bp, Gossypium hirsutum
  Clone ID: LIB3083-114-Q1-L1-D7
ttttagcgctatatgcctatatctccgtgtctgtcactcagctcagcttcgcccctttacagccaaattcctttctcgagcgtttcttttttaactctccagttctcaacgaatccatagaatttcaccaagaagaagaagaagatgtcgtggcaaacatatgtagatgagcacttgatgtgcgaaatcgatggcaaccatctctcctccgccgccatcgtcggccacgatggcagcatttgggcccagagctccaatttccctcagttcaaacaagaagagattaatgccatcatgaatgactttgctgaacctgggtcacttgctccaactggattgtaccttggtggcacaaaatatatggtgatccaaggcgaacccggatatgttattcgagggaaaa

SEQ ID NO: 5716 - DNA, 414 bp, Gossypium hirsutum
  Clone ID: LIB3083-114-Q1-L1-D8
ttttcaacagaaattaaaactttattgcaatcaatgggaccaaacccagagttcaaaacattccaaggggaaaccccaaagttgaaattaaacatttacgaaattgaaaaaaagaagcaaaaataaaacttcaatagcaatcattcttggaaattccttggtttccaagcagccttttgctttttctttactcaacagctagtggaacagtcttgacccgattgttatacatccatgcatgcaacatttcaatgtaacgcttgcgcccacgttgctcctggtaagctacatgtttcgaaaagccataaactccggtgagagtcaatagcttctcggagtaaatctgccatgtatacttctcctgtatgcgtttcaaccctccctgggagatctcatcccaataagatggatccg

SEQ ID NO: 5717 - DNA, 387 bp, Gossypium hirsutum
  Clone ID: LIB3083-114-Q1-L1-D9
attgattttgtgctcctgactggcatatggacaagttgcagtgagcacaaacccgacaccgtcaccctcaccagcaccggcaccgacaccggcatacacaaatatcaaagacttactcgttgggggagggccatattaaaaggtcctgggctaccttgggtcgactaaaataatcgacacgttccaaatccaagccaacaacacgggtgaaggcattaccattttcgtaccgaaagacaacgcattcaagggtcttacgaaggcttcattgtgaaatctaactgaagatcaggtcaaatcagagcttctttaccatgccttgccacgatactatgcccttgcgggctttaaagacctaagtgagaaaagccctatatgtacacttgg

SEQ ID NO: 5718 - DNA, 410 bp, Gossypium hirsutum
  Clone ID: LIB3083-114-Q1-L1-E1
gtaatgttcagcatttcccgggaaaatcattaagaaaaattgggatttagggtttagggatttcacataatttggattctggaaaatgtctcagactggaaaattgatgccgaatatcgaccaacaaagcacgaagatgctcaatctcactgttctccaaagaattgatgctttcattgaagagattttgatcactgctgctcacgtcaccttctacgaattcaacctcgatagtaatcaatggagtcgaaaagatgttgaaggatctctatttgttgttaagaggaatacacaacctcggttccagttcattgtaatgaatcgtcgtaacacagataatttagtggagaatctattgggagatttcgagtacgaggttcaaggtccgtatttgttgtatcgaaatgctg

SEQ ID NO: 5719 - DNA, 349 bp, Gossypium hirsutum
  Clone ID: LIB3083-114-Q1-L1-E10
caaagcagaacaccaggacatcctgagaattttgaaactcctggagttgaagttacaactggtcctcttggtcaaggtattgcaaacgctgtcgggttggctctagccgagaagcacctaggtgctaggttcaacaagcctgacaatgagattgttgaccactacacgtatgctattttaggtgatggttgtcaaatggagggtgttgcgaacgaagcttgttcgcttgccggacactggggacttggaaagcttatagctttctacgatgataatcacatttcgatcgatggtgacactgaaattgcctttaccgagaattgtcaggaaccgtttaaggggcttgggt

SEQ ID NO: 5720 - DNA, 386 bp, Gossypium hirsutum
  Clone ID: LIB3083-114-Q1-L1-E11
gaaatcataatactatgtcattcttagaacttgaaaacttgaaacttgtgattccaaattcattacataaatttacactccaaatccattaaatcacaattcacatttgatataaatatacaaattcacaattcacattactaaaaatcccagcacaaatgaaaaaacatggcctccttatttagaaccatcaaaatgaacaccatatttgatttttttttcctaggccattactatagaaagctgaaaagaattccgtcaattttcctcagcttcatcttcatacccttcaccatcttcatcaaccacagcatcttgatattgttgatattcagaaaccaaatcattcatattactttcagcctcagtaaactccatttcatcca

SEQ ID NO: 5721 - DNA, 355 bp, Gossypium hirsutum
  Clone ID: LIB3083-114-Q1-L1-E12
ctcctttcttccaaatgccgtccacattttaccctgactggcagcctcaaagacgacttgttagggctcattccagcgaccacgaaaatcaccaatagtactactactccaagcaagtattttccttacacgttcgattttcttgagattcatccatacggctagctcaatgtcctttaaacttgcatgagtggaggggacgcccatgctaatgagtgctcccctggcccatgccaccgaaagctgtggagaagtctaacacttttcctacaccctgcactaattccttgagcggtactcatgatccacctgatcttccaatttgttgtaacgacataacatatctttaattcta

SEQ ID NO: 5722 - DNA, 399 bp, Gossypium hirsutum
  Clone ID: LIB3083-114-Q1-L1-E2
tgtcggaggaggtgatgatgcttttaacacctttttcagtgaaactggtgctgggaagcacgtccctcgtgccgtctttgtggatcttgaacccactgttattgatgaagtgagaactggtgcttaccgccagctcttccacccagaacaactcatcagcggcaaggaagacgcagctaacaactttgcccgtggtcactacactattggcaaggagattgttgacctctgtttggaccgcatcaggaaacttgctgataactgcactggtcttcaagggttccttgttttcaacgctgttggtggaggtaccgggtccggtcttggttctctccttttggagcgtttgtctgtcgattatggcaagaaatccaagttgggtttcactgtctacccatc

SEQ ID NO: 5723 - DNA, 384 bp, Gossypium hirsutum
  Clone ID: LIB3083-114-Q1-L1-E3
gaaaatagcagctagggttcctctctccctctccaaaaactgaacgacaaaacaaaagagagatggcagtaatggcggatcaccattccctggctgttgtttttggtgtattaggtaacatcatctcagtcctagtatttctggcaccagtgccaacattctgtcggatttacaaaaagaaatcgactgagagtttccagtcactgccataccaggttgcattgatcatttgcatgctatggctgtattacgcgttgattaaaaagggtgctttgcttctgatcaccatcaactcttttggatgtggtgttgaaactattaatatatctatgttctgggcttatgcttcagagaatagcaggatgtctgctatgaaacttttta

SEQ ID NO: 5724 - DNA, 404 bp, Gossypium hirsutum
  Clone ID: LIB3083-114-Q1-L1-E4
tggcaacatatcttgtcttggttgtagtagctatgctttgtgcaggagccacagctcaatcaggttgcgctagtgtgttgatcggcatgtcaccctgtttgagttacattacagggtcctcatcaaccccatctcaacaatgttgcacacagctagctaatgtcgtgcgttcatcaccgagatgcttgtgccaggtccttaatggtggtggttcatcatttgggatcaacatcaaccagactcaagctttggccttacctgattcatgcaatgttcagactccacctatcagcagttgtaatgctgcttctccagctccagcagactctccggtaggatcacctgaatctggaagcaaaattccaacaggagatggatctagaagtgtaccaactgcacgggag

SEQ ID NO: 5725 - DNA, 398 bp, Gossypium hirsutum
  Clone ID: LIB3083-114-Q1-L1-E5
gtttcctttctcgattttctatttagccaaacaagatgcagatcttcgttaagactctaaccggcaagacgatcactctcgaggtcgagagctccgatacgatcgacaacgtgaaggccaaaatccaagataaggaaggcatccctccagaccagcagcgtctgatcttcgccggaaaacagctcgaagacggccggaccttggccgattacaacatccaaaaggagtcaactctccacctcgtcctccgtctgcgcggtgggatgcaaatcttcgtgaaaaccttgactggcaagacaatcactctcgaggtcgagagctccgacacgatcgacaacgttaaagcgaagatccaagacaaggaaggcatccccccagaccagcaacgtctcatcttt

SEQ ID NO: 5726 - DNA, 218 bp, Gossypium hirsutum
  Clone ID: LIB3083-114-Q1-L1-E7
cttactgttgaatctgctggcgggcatagtttcaattgcatttctggaaagagtttaggaagactcctacaagagattttgtggaggaaaggctgcaactgtttcggccaaaagaattaatagagaatttgggtcccaattgaaggagcatattccgaactttgtggaccatactcaaaaaatcaacaaacttgcttaagagaaggctcacgtttttt

SEQ ID NO: 5727 - DNA, 400 bp, Gossypium hirsutum
  Clone ID: LIB3083-114-Q1-L1-E8
tctgagggtgtcttaataaacgccttcgatttactttcgggttccatttacttctttatttctacgtttttgaatttttagtaagcgaaaatgagagagtgcatttcagttcacatcggtcaggctggtatccaagtcggaaatgcctgctgggagctttactgccttgaacatggaatccagcctgatggccagatgccaagtgacaagactgtcggaggaggtgatgatgcttttaacacctttttcagtgaaactggtgctggaaagcacgtccctcgtgctgtctttgtggatcttgagcctactgttattgatgaagtgaggactggtacttaccgtcagcttttccaccctgagcaactcatcagcggcaaggaagacgctgccaacaacttcg

SEQ ID NO: 5728 - DNA, 386 bp, Gossypium hirsutum
  Clone ID: LIB3083-114-Q1-L1-E9
aaaaaatagatcttatggtggtggtaatcaatcaccaagacccaaattatgaaatttagtcaaaaggaaggttttgagaaagagaaagacaaaggaggggagggttctttatgaatttgattacctgaaatcacttgctttgaggtgttttgggatgggttctgtgttttccttttatgttgtgtgattaaaaatgttggggttgttgaaagcatgtttcttttttgaggaaatatagatcagttatagaaaggatgggttttggtcatcaatctagggaagtagtggaggaaaattcatcaaggaagaagaaagatggagaggaagaagaaacaggatgttgggttaaattaaggtttatcggaagttgcatgtcttcaagatca

SEQ ID NO: 5729 - DNA, 399 bp, Gossypium hirsutum
  Clone ID: LIB3083-114-Q1-L1-F1
gatggattcacctactgtgtagttgctgttgaatctgctggcaggcaagttccaattgcatttctggaaagagttaaggaagacttcaacaagagatatggtggaggaaaggctgcaactgctacggccaaaagtctgaatagagaatttgggtccaaattgaaggagcatatgcagtactgtgtggaccatcctgaagaaatcagcaaacttgctaaagtgaaggctcaggtttctgaagtcaagggtgttatgatggaaaacatcgagaaggtccttgaccgtggtgagaagattgagttgctggtggataaaactgagaaccttcgctcacaggcccaagattttaggcagcagggaacaaagatgagaagaaagatgtggcttcagaatatgaag

SEQ ID NO: 5730 - DNA, 388 bp, Gossypium hirsutum
  Clone ID: LIB3083-114-Q1-L1-F10
tcgaaatgtcattttggataacaaagtgcagcaattggaaaacaagataaagatgcttgaaggagagttgagagaagctgctgccactgaggctgctttgtactcggtagttgccgagcatggaagctccatgagtaaggtgcatgctccagcccgtcgcctttctaggttgtatcttcatgcttgtaaggaaggttcccaattaaggagagggagtgctgctaaaagcgctgtttctggacttgctttggttgcgaaagcatgtggaaatgatgttccaaggttgatgttctggtggtcaaactgtgtcgttttgagagcaattataagtgaaagtactgttggatgcacggaaagaaatggagttgagaaggggaagaaactggca

SEQ ID NO: 5731 - DNA, 357 bp, Gossypium hirsutum
  Clone ID: LIB3083-114-Q1-L1-F11
ccaaggagcctgttgaagagatatgacagttgggatggtggacagcaaagctcggagaaggttaaggaaagtgtttcgaagaaacatgatgctgcgatgagacgagaacgagcccttgcttatgcctatggctatcagcagctacagccacagcaacaactcatgcaaccgcaccccaatggcaaagatgttggagtccaccttaatgatcgcgagaaggcacaatggggttggaactggctcgagcattggatgtcatcgcaaccgtaccacgctcgtcaactaggccataaagaaggttctaacatgacacttgcgacaacaaccgaaccaactaccgtacccgataacatgttt

SEQ ID NO: 5732 - DNA, 324 bp, Gossypium hirsutum
  Clone ID: LIB3083-114-Q1-L1-F12
actgaacaatgataattttattaatcacttggagatattgcatttccaagcaatgaaactttattttttgcaaacaaggggtgggatttttttttttttttgacaacaaaaagatgactgcaagagaagccaaacaaggggggggaaatatatatatatattcttattcttattcttatcattgggggcattttcatcttttgcaatgaaactttatcaagcccttccagagatgatatatcttcatattatcttttcattaaaaagcaatcatcctcatcccattcaaataatgccttttaagtttcctttttcgaacgttac

SEQ ID NO: 5733 - DNA, 77 bp, Gossypium hirsutum
  unsure (1)..(77): unsure at all n locations; Clone ID: LIB3083-114-Q1-L1-F2
aaaacaagccgaacgacaccgacgaccncgagggggggcccggaacggaaggggcccnanagngagccgcnaaacaa

SEQ ID NO: 5734 - DNA, 400 bp, Gossypium hirsutum
  Clone ID: LIB3083-114-Q1-L1-F3
caaaagtgtgggtgaagatataagaaagctagaaaatggagttcatgtagtgtcgggaactcctggtagagtttgtgatatgatcaaacgaagaaccctacgtacaagggctattaaactattgattcttgatgaatctgatgagatgttgagccgagggttcaaagatcaaatttatgatgtttaccgacatcttccaccagaacttcaggtttgtttgatatctgctaccctccctcatgaaatattggaaatgacgagcaaatttatgactgatcctataaggatccttgtgaagcgtgatgaattgactctggagggaattaagcagttttttgtagcagttgaaagggaagagtggaagtttgatacactatgtgatctgtacgacacgttgaca

SEQ ID NO: 5735 - DNA, 200 bp, Gossypium hirsutum
  Clone ID: LIB3083-114-Q1-L1-F4
cggcttaggtcttttttttaacaaatgatttccattactaggatgatttaccagtaacttgtttgggaaatttaggcaggattaggaaaacttttatcatactcagtttgttgcttgttaacttttttttaacttgatatcaacagaggattttcttcagttgtgtgcgggaagatcctttaatttgctattgcttactt

SEQ ID NO: 5736 - DNA, 405 bp, Gossypium hirsutum
  Clone ID: LIB3083-114-Q1-L1-F5
gtaccttcctctgtatactaactatggtctaggtcttacaacatggagtccgcttgcttctggagtgcttactggaaaatacaacaaaggaaatataccatctgacagtcggtttgctttggaaaatttcaaaaatcttgctaaccgttcactaattgatgatgtgttgaggaaagttaatggactgaagccaattgctgatgaacttggtgtaccattagctcaacttgcaatcgcatggtgcgctgcaaatcctaatgtatcatcggttattactggtgctacaaaggaatctcagattcaagagaacatgaaggcacttgatgtaatcgcattgctgactcctgctgtcatggagaagattgagacagtttttcaaagcaagccaaagcgtccagattctta

SEQ ID NO: 5737 - DNA, 400 bp, Gossypium hirsutum
  Clone ID: LIB3083-114-Q1-L1-F6
caacagatgaagtagttgccgaagctccagcagcggaaccagttgccgaagagccaaaggaagcggagcctgcggcggtggtagtcgaggaacctgaagcctcagttgaagttgaaaccaaggaggtggtagaagaaccaaaggctgttactgaggagccagtagtagaggaggctcctaaggaaacaatgccagaaccagttgccgaggagatcaaggaaaccactgaacaaaccgttgaaaccaaagaaactacagagtctagtgaggcagcagcagaagcacccaaagaggaagttaagaaggaagaagaagcaaaaccagctgaagtggaggagaaagttgaaacagaagctgatccagcagagaagactgagtaaataataaagcttttgtgatg

SEQ ID NO: 5738 - DNA, 392 bp, Gossypium hirsutum
  Clone ID: LIB3083-114-Q1-L1-F7
gcaacaaccattctcttctctccagatgcagatctacttgggcggggtgaaattatgatttccaattatatttctcaacaagatgactcgctattgtcagacgtctcaagctgttgaagccttttcaacagccgaagagctgaggaacgcctgccctttaacattagctaaaagctattgcatatgatccatggcaacatgttggtaatccaaatccctttttgtttctgcacaaaccatggcattatgtttttcgatttcaaaatccatccattcattactacaacaattaccgagtagtgagaattttatgaccacccacgctcaaacttttttttttacggcttgcctgttttacttactgataacaatacctacaatctttcttttac

SEQ ID NO: 5739 - DNA, 404 bp, Gossypium hirsutum
  unsure (1)..(404): unsure at all n locations; Clone ID: LIB3083-114-Q1-L1-F8
tctgccttacctttccaccctgatttcaccaatttatcataatacaaccaccctctaccctttagtatatccttctctgcaacaattataaggattctatcacatgccaagcctgcaagatcagcactctcaccatccacaaacggattgataagcggatcatcgcaccctttgtcggtgggacaaacgtataaccaccacttatccactaattctttcctggaccgatcattaagctccggtccaatcgggctcgttccccaaaagttaggatggatcataccgataccaagaatcttcagctnttgacccaaattcgattccttgattcgtaaagccaagtgatgtgcaatattgcccccagcactatcaccagccaaaaacacctgttcgaacccaacata

SEQ ID NO: 5740 - DNA, 374 bp, Gossypium hirsutum
  Clone ID: LIB3083-114-Q1-L1-F9
gtaccttcctctgtatactaactatggtctaggtcttacaacatggagtccgcttgcttctggagtgcttactggaaaatacaacaaaggaaatataccatctgacagtcggtttgctttggaaaatttcaaaaatcttgctaaccgttcactaattgatgatgtgttgaggaaagttaatggactgaagccaattgctgatgaacttggtgtaccattagctcaacttgcaatcgcatggtgcgctgcaaatcctaatgtatcatcgggtattactggtgctacaaaggaatctcagattcaagaaaacatgaaggcacttgatgtaatcgcatggctgactcctgctgtaatgaaaaaaatggaaacagttt

SEQ ID NO: 5741 - DNA, 411 bp, Gossypium hirsutum
  Clone ID: LIB3083-114-Q1-L1-G1
gcaacatggaggcactacccttctgatgcagatctacttgtcaggttcgaaattatgatttccaataatatttctcaacaagaggactgctcattgtcagaggtatcaagcagtagaagccgatacaacagccgtggagctgaggaacgcctgagcttcaacatttgcgaaaagctagtgcagatgatgcatgggaacatgtgggtaatccaaaaccctttaggttctgcacaaagcatggcagttgttattcggtttcaaatccgaccatccatcactacaacaatcaccgagtcgggagaatcttcggaccagccacgctcaaactctatttttcacggcttgcatgttctacttgctgatgacgatactgtcaatcgtgctgtgactggaaagcttcttgagaagttg

SEQ ID NO: 5742 - DNA, 383 bp, Gossypium hirsutum
  Clone ID: LIB3083-114-Q1-L1-G10
acataaaagttttagaatatatataataaatatatatcgtcgagttacagagagtgggggagggggattttactaagagctgaaatgcagctgcagcaaacaaaggcccggaaaaaaacttcccaacataagttctcccatgaccttcaaccaatgtctacaaatcgtcaaacacaaagaaaaaagggaactaacgggagaggaatggagaaaccaagtagaaaaatgaagatgtatccagagtgtatgagaaaacgaccagattgtaaaaatgaacaaaacgtgtgaattagactcggactacatcctggaggcaatcataaaagtgagatatcttaatcttttccttccctgagtagattgcctctgctgctccaccttgc

SEQ ID NO: 5743 - DNA, 386 bp, Gossypium hirsutum
  Clone ID: LIB3083-114-Q1-L1-G11
gacacgaacagcaacaaatttcatttttattccatcgatttcccccgtcaaaagttctgcattcctacgtttgggagtacatgaaatgaaagctatgttgcacacgaatatacattgacggtagctataatccgatactactaccatcaagctacatagcagagcgacgttgcgtgcgaggtcttttcaatccacacaaatacgtcccattcgattgcgtcctaccgcttgtcgcagccatcgataccatcgcgttatcgaacttctcgaacccttggttcaaaggacgaagaatctgctcgaaagtcacggcattgcagcgcttgtcaagccaagccgtgatgtctgcaaaaacaatctcgatgttttcatcaggctctcccgat

SEQ ID NO: 5744 - DNA, 396 bp, Gossypium hirsutum
  Clone ID: LIB3083-114-Q1-L1-G12
tgttttcactttttcttctgtcacttttcttgggaaaaaaatgtctcattcgatgggaaagtgccagaaaattcgtcgaattgtccgcatccgacaaatgctgaagcagtggcgaagaaaagccagcataacggccagcaacaacaccatcaacaacaacggagatgcgccgtctgatgttcctgctggacacgtggcggtctgtgtgggcacaagtctcaggagatttatcgtacgcgcgacgtacctaaatcacccaatcttcaaaaaactcctcgtacaaaccgaagaagagtatggtttcaaaaacatgggaccattaatcatcccatgcgacgagtcgttcttcgaagagattctccgagtcgtatcccgatctgattcttcatcaaactc

SEQ ID NO: 5745 - DNA, 361 bp, Gossypium hirsutum
  Clone ID: LIB3083-114-Q1-L1-G2
aatcatactcacccacggtttatttattttgaagaatcatactcatccactggttgttttttttttttaaacataaaatatcactccgttgatagcataaaagggcattagacaaatcttacaacatgaaaaacagaacaatagcttgtaaggctattcatgttcttatggagcatcataagtaaaagacaagcttttctaacaacaaaaaaatgacaagcaaacacgactctaaatttattccataggcataatttgagaaacctcacacgaataagaaagaacaggataccctcacagggtgaacccatcatcttcaaaataaatgatattgcgatagtagcatcaatattcttcacct

SEQ ID NO: 5746 - DNA, 371 bp, Gossypium hirsutum
  Clone ID: LIB3083-114-Q1-L1-G3
gccacaactcatcctcttaaccataaatcatggttttcatagaaagttttatttctcactcgacaaatgtgttataagaacgaaaaagaggagacacttccaagcaagtttctaaataatacatactaccaataacaaaacaaaagaaaaaatgtgaatttcatttctgatataaccgacacatgaaacaaacaggtttgcattcttaacccaatagctattttctactaagatcatgaaattagaccgattttgcaggccatgttgcttgagctgacatgattatacctacaatcaccccgaacagtccaagtgcactgccaaaaattttaatcacaagaatcttcacaaacagtgaggagttttgtgca

SEQ ID NO: 5747 - DNA, 420 bp, Gossypium hirsutum
  Clone ID: LIB3083-114-Q1-L1-G4
caaaattatccctagtcttacagtgagcgtaacacaaagacccaaaattcttaggtgaccaaaatctggttgtcgaccatagagagcctcatatggcgtctttccatttaaacccgaacaaggagttcgattaattaggtaaccgacagtcaaaatgcactcaccccagaacttgataggaagcgatccttgaaatctaagagcacgcgcaacatttaagatgtgcctatgctttctttcgactctcccattttgttgtggagtgccggtacattaagattagaaaataataccatgttccataaaataattctccatgcaagtaaattcttttccgttgtcacttcgtaccatttttacttgtttatcaaattgtcgattgatcatagtgaagaaatttttgaacactgaaggcacttc

SEQ ID NO: 5748 - DNA, 244 bp, Gossypium hirsutum
  Clone ID: LIB3083-114-Q1-L1-G5
atttaccttccatttccatttacttctatattgctacgtttttggaggaggggtgagcgaaaatgagagagtacctttcagtccacatcttgcaagctggttttcacgtcggaaatgcctgctgcgaactttactgtcttgaacaccggatccatcccgttggccaaaagccaagtcacatgactgatgggggcagggatgttgttcaaaacactttatgtactgaacctagcgctggaaagga

SEQ ID NO: 5749 - DNA, 346 bp, Gossypium hirsutum
  Clone ID: LIB3083-114-Q1-L1-G6
caaaagctattttctgaaatcttccatcttttgatcagagcaaaaacaaccagtattcaatggggaagaaagctgtgttgattggaatcaactatccacgtacaaaggctgaactgaaaggctgcataaacgatgtgaagagaatgtacacatgccttacagagcgctatggattctctgaagaaaacatcaccggcttgatagacaccgctatattttattatcaacctacatggaagaacatgagaggggcttctaatgatcttgagagatcggcctggcctgtggatataatgtttgtgcacaacagatgcttttggacttggcttcctgctaagactggttg

SEQ ID NO: 5750 - DNA, 403 bp, Gossypium hirsutum
  Clone ID: LIB3083-114-Q1-L1-G7
gtttggttggactcggtggtggtcccttgtctttaacatctcagattaaagcgacgtcgttttcttattgtttagtggatcgtgactcagcgggttcgtcgacgttggatttcaactccgggttaccggctgactcagtggttgctccgttaataaggagccgaaaggtggataccttttattacgtcggtctgaccgggcttagcgtaggcggccaacctgttcaactcccgccgggctttttcgagttggaacaatcgggaaacggaggagtgatcgtcgactgcgggacggccataacacggttgcaagcggaggcttacaacgcactccgcgacgcgttcgtgaaattatcgccggacttgccgaccaccggtggggttgcgttgttcgacacgtgcta

SEQ ID NO: 5751 - DNA, 370 bp, Gossypium hirsutum
  Clone ID: LIB3083-114-Q1-L1-G8
ttctctttccccatcttcttcgacaaggcatcgggctgtgcagtttctaagacgggggagtgggggcttttgccttttgccttttgccttttcattaaaggcttcatctttttattcttcttcgatcgtctggtgttttctccgttcgccgcaatacaggatcacgaagccttttttccttcaatgccaactgagcttctgttctggagtggtggcttgctttacttttcacgctgaatggccttcttctgtccacctgtttgtataggcattgatcaaggtctgttcttatcatttaagacaaaatggaatttgtatcgaagaagaaatggaaatcagtgctgccacgtcttttcaaaaacaaatcatc

SEQ ID NO: 5752 - DNA, 386 bp, Gossypium hirsutum
  Clone ID: LIB3083-114-Q1-L1-G9
aaaagttgattacttttttgataacccaaaacacgaaaatgggtgcttctgaatcagttcctcaaaaatcaatccatgaatttacagtcaaggattacaaaaaccaagatgttgaccttagtatgtacaacggaaaagctcttcttgttgttaatgttgcctctaaatgtggactcactgattcaaattatacccagttgactgatctttacaacaaatacaaggaccaaggactggagattttggcattcccatgcaatcagtttttgagccaagaacctggtaccagtcaagatgcacaagaatttgcttgtacaagatacaaggctgaataccctattttccaaaaggttcatgtcaatggtccaaagacagagcctgtctac

SEQ ID NO: 5753 - DNA, 412 bp, Gossypium hirsutum
  Clone ID: LIB3083-114-Q1-L1-H1
cttaaacgtcaaggcagaagataagggcactggaaaatctgagaagatcactatcacaaacgataagggtcgtctgagccaggaggagattgagagaatggttcgtgaggcagaagaattcgcagaggaggacaagaaggtgaaggagaggattgatgctcgcaacagcctggagacctatatctacaacatgaaaaaccagattaatgataaggataagctcgctgacaagcttgaatccgatgagaaggagaaagttgaaaccgcagtgaaagaggcacttgagtggcttgatgacaaccagagtgccgagaaggaagactacgaggagaagctcaaggaggtagaggcagtatgcaacccaatcatcacagcagtgtaccaaagatctggtggagccccaggtggtgga

SEQ ID NO: 5754 - DNA, 409 bp, Gossypium hirsutum
  Clone ID: LIB3083-114-Q1-L1-H10
tttttgcagtgttttatttattgattctcttagttctcgttttcatcggagaagaaaagtcaaaaaacaaaaatttcatggctcggaaattctttgtcggtggcaactggaaatgcaatgggacaactgaggaggttaaaaagatcattacaacattgaatgaagctgaagttccttctgaggatgttgtggaggttgttgtgagccctccatttgttttccttacctttgtgaaaagtctgttgcggtctgatttccatgttgctgctcagaactgttgggttcgcaaaggtggtgcttttaccggagaaattagtgctgagatgcttgttaatctgagcattccatgggttatcatcggtcactctgaaagaagggctctcttgaatgagtccaatgagtttgttgg

SEQ ID NO: 5755 - DNA, 269 bp, Gossypium hirsutum
  Clone ID: LIB3083-114-Q1-L1-H11
gttgcatccatttgccatggacagcagattttagctgctgctggtgttctcaaggggaagaaatgtaccgcatacccagctgtgaaactgaacgtggtgttggccggagcaacttggttagaacctgagcctatagatcgatgcttcactcatggaaatttggttaccggagcagcttggccaggacaccctgagttcatttctcaattaatggatttgctgggtattaaggtttccttctagttgatctgctttacaagctctgtgca

SEQ ID NO: 5756 - DNA, 319 bp, Gossypium hirsutum
  Clone ID: LIB3083-114-Q1-L1-H2
gttaaatcaagtgtttgtgacatcccacccaccgggttaacaatgtcatcaacattcatggggaattcgacgtcgattcaagagatgttccggcgtgtttcggaacaattcaccgttatgttccgtaggaaggcgtttttgcactggtatacaggggaaggaatggatgaaatggagtttacagaagcggaaagtaacatgaatgatctggtttcggagtatcagcaatatcaagatgctgttgcagatgacaatgatgaagattatgaagatgaggcaatggaaaattaaggtgatttttttaaaaaaattcaacttc

SEQ ID NO: 5757 - DNA, 405 bp, Gossypium hirsutum
  Clone ID: LIB3083-114-Q1-L1-H3
cctagctgagatcctctccgactccgaccccacggatcccgatgaatcttctgaaggggagggggggcgaatgttacatacactctggggcctaaaattacggactgggatcagcagcgtaaggtttggctttccaaaaaccctgaattccctaattttgttaatggaaaagctcgaatcttgctcgtcactgggtcgccccctaacccttgtgacaatgctataggagaccattatttattgaaagcgataaacaataagattgattactgtaggcttcatgggattgaaattgtttataacatggctcatttatacaaggaacttgctggttattgggcgaaattgccattgattaggaggttaatgttgtctcataccgaacttgaatggatttggaggatg

SEQ ID NO: 5758 - DNA, 291 bp, Gossypium hirsutum
  Clone ID: LIB3083-114-Q1-L1-H4
gttcaagcttatgttagctaagatcaagaaggctggagtcgtcaggcaagagcttgcaaagcttaaaaaggagaatgcatcttgaagtaattctgaattatgggattttttgctagttttttcatcaatgttccgcgagttctttttgggattgatttcgtttttctattaaacaaagggttaaggtcttttgaggacaccttatttgctgtatgacagattttgtagtgagtttattgctatatattgcttgctcaatgtggttgcttgttgcagtattcttttcctttc

SEQ ID NO: 5759 - DNA, 402 bp, Gossypium hirsutum
  Clone ID: LIB3083-114-Q1-L1-H5
gtttgagaagatattggaactgagttatgccatggcggaggaggggttttggaccgagcaggatctcaagtttactgctgcttggcttcaagacttggttgccgtaggttatcagcagccaaggttgatgacattggaactggacaggccaagggcaaatatcggtcacggggatcgaaaagaatttatccctcagaaattgccatctgttcatttagcagtggaggaaacaggggtggttagttctgagattgggaatttgatacgatggaggaagaattttggaaatatcgtgctaatcatgttctgcaatggtcctgtggaacgtactgccctggagtggagactgctttacgggcggatatttaaaactgtggttatcttttctgcgcagaagaattc

SEQ ID NO: 5760 - DNA, 401 bp, Gossypium hirsutum
  Clone ID: LIB3083-114-Q1-L1-H6
cagaacttcactgtttttacttacactgcccctggagtggccgttacatcaactgctctaaagaaaggaggactttctactggggatgttgctgcattatacaactacaacaatactcaattcgatggcaaagttgaaaccgactgtaacatctcaacagcacttacatacactgagattcttccatccacgaagactattgcatcgttcaaagagcctgattataagtccggcaaggtggtggatcagtatttccatgaccatgctaccgttacaacaacggttggtttggaccatacaccaaacgttgttgtctcggcgaccatagagacacccactattactgtgggtgcacacgcatgttactataccacctctggaaattatacaaagggtactgc

SEQ ID NO: 5761 - DNA, 400 bp, Gossypium hirsutum
  Clone ID: LIB3083-114-Q1-L1-H7
ctccgaattcggtttcctcttttcttttacggtggttgtttgcggtgggtggacaacgatcatgatcgccgatcctaaatcttgtgacgttctgttggttttcgttttatttgcgattatatcctcttccagcgccttggtttccactccctatcctaaggccatttctgatttaaaagaggcagttgtgaagggattgggattccaagccgatgattttaagatttcagggttcgatctcagagatgcccttgtgggccattctgtggcatatgaattcgacattgaaatcgataacaaagtgattccttttaagctcttggaggatgtaaatcgttgggaatatgttgatttgcctatttttagggtggaagagccagctagacccggagttgaaaat

SEQ ID NO: 5762 - DNA, 411 bp, Gossypium hirsutum
  Clone ID: LIB3083-114-Q1-L1-H8
gtctcatcggctgaattgaaatcgagccagccgaaaaagccgacattgaaggaaaacaggtattcaacaactcagaaagctgctcctgctaaggaaaagaaatcaagcacaaacaaagccaaagcttcagatataaaaagtggtacaaataaagaacttcctagtggcgataatgcacaaggaaaaagggagtccaatgaggtcagagtagcattgccaatggaaccagcaccatcctatgcaactcaacctactgacattgttgatgatttcaaggacattcaagaattgcagactaccccaatcgaaaagaccgaaggaaatgcaacttcgaaaccaaacccgtcgggggaagaccaaagctcaaatgccaaaatggttaccgtaaataagccaatgcaattagatcat

SEQ ID NO: 5763 - DNA, 385 bp, Gossypium hirsutum
  Clone ID: LIB3083-114-Q1-L1-H9
gaaggccagaattaaacccaaaatggatagctttgttgattttggagaaagcttgtttgtcaaaaatttctcttgaagatgcaactggcatggtaaggaaaactgggtgcaatttgaaggaaaaactaagagagcatggaggacttgatgttgtctttgaagtggctttggaatgccattctgttttggagggttggttggagcagagttcatcttctcctcttatagaagataaaaaagatgtgcagagcttggtgctgcttttaaaatgtttgaagatcatggaaaatgctgcattcctcagtagcgacaatcagagtcatctgttagaaatgaaagggcaattgaactctcatggatctagaatatcttttacaaagcttgt

SEQ ID NO: 5764 - DNA, 392 bp, Gossypium hirsutum
  Clone ID: LIB3083-116-Q1-L1-A10
gctccaaagaatggatcaggttcaacacccatctgtcatgcagaaggtagcaggccagctccttcgttctagccattctcaagattttcaaggttataatgggtctttcaggagtcctgctctataccaaaggcgtgctgcatatggcaattactccaatgctgcactgcagtatcctgtccgggcttgtggagacctgtctatggttccatcaacagcttcagctatttgcgttcaagcccctgctgagaaaggatttgccagctttgccattgatttcctcatgggtggagtttctgctgctgtatcaaaaacagctgctgcaccaattgagcgtgttaagcttttgattcagaaccaagatgaaatgatcaaaagtggaaggctctctg

SEQ ID NO: 5765 - DNA, 309 bp, Gossypium hirsutum
  Clone ID: LIB3083-116-Q1-L1-A11
cccgcttctttattttctggcatttctgctaaatgcgcctgttcttgcgagaagaatgttgacatttggagaagcaaagctcagaaactgaagatggttcaaccgtatgacgtattcctttcaaatccccatgtttcagcatcaggaaccattggtgctgttttgagtgcaaattttggggagagttcggtcagattagttgaagatgctaaagatattaagcagttatcatatcataatccaactctaaaatcgtaccctctaggggatatatttgcatccatgtcatttacggcccagcacgggaac

SEQ ID NO: 5766 - DNA, 313 bp, Gossypium hirsutum
  Clone ID: LIB3083-116-Q1-L1-A2
gaataccaaacattcatgattcatctatgaatgaagaaatattaagaaactacagtaaaagaaaattaaaaaaaaaaaaacaatgcataaaaacattgaatatagagcatcagatcgacgtgaatagccccatcattcagtttaagcatcagaaaccacactaaactcatcatcttccaatggagctggcaagtttagatctatcaaattgttgtaaaatttgcctgaatttggagtagcagcaagcaaatgggatctcttgtgaccaccgagtgcttgtcccgaaccgaacactctgtaacacaatggacac

SEQ ID NO: 5767 - DNA, 256 bp, Gossypium hirsutum
  Clone ID: LIB3083-116-Q1-L1-A3
tacgttcaaaaccaaacattgataagggagctattaatgaagaagggttaataaactacagtaaaagaaaattaaaaaaaaaaaaacaatgcataaaaacattgaatatatagcatcagatcgacgtgaatagccccataattcaatttaagcataaaaaaccacactaaactcatcatcttccaatggagcttgcaagtttagatctatcaaattgttgtaaaattagcctgaatttgtagtatcatcaagcata

SEQ ID NO: 5768 - DNA, 316 bp, Gossypium hirsutum
  Clone ID: LIB3083-116-Q1-L1-A4
ctcgtgccgccttatgcaaaagtccttacatgctcgttaaagggtggcatcgattatttcatgaccttgtaggtcgagaaggccctttcttggagacaatatgtgtaccatttgcaggccttgccatcttactttggccactcgctgtcattggagcagtgttgggctcaattgtgtctagcatcttccttggtgcctatgctgcggtgattggttaccaggagtcctcgttttggtatgggctttgttatatccgtgcttcgttgtccatatatgatgaatacagcactgatgtccttgacatgcctgaaggatc

SEQ ID NO: 5769 - DNA, 317 bp, Gossypium hirsutum
  Clone ID: LIB3083-116-Q1-L1-A5
attttcttctcttctttttctgtttttttcttcttttcaaggcactgttcttatgatacttttttttttgagaaaaggatggcagatcatgaacggaggacagaagccatgaaaaagcgaagatcgagcagcggtgtagccggcggtagcgatcggaggtttgaaaaagtgcttgaagagatcatggaaggcgaggctgatgatgatggaggcagtgcttttcagtatctgtcgtgtagttgcctggtttgtactacagccaaagctgcatagtttttctttttaacgaagtaaaaacaaaaataaataaatacatg

SEQ ID NO: 5770 - DNA, 320 bp, Gossypium hirsutum
  Clone ID: LIB3083-116-Q1-L1-A6
tgctagagccttctttattttctctaaatctcagtcatccgttgaacaatctctcttataaattatattccaaacccaaatcctttccctcaagcaatttgagtgattctttctttttattgtggtctccagagcttctctgttacatcgtttattttctctcaagaactgaagaaaaaatccgaatagattaaaacttaagaaagatcaaaagatgtttggaagagcacctaagaagagtaataacaccaggtactatgagattctgggtgtttcgaataacgcttcccaggatgatttgaagaaagcttataaataag

SEQ ID NO: 5771 - DNA, 321 bp, Gossypium hirsutum
  Clone ID: LIB3083-116-Q1-L1-A7
tggttttttttttttttttttaaacataaaatatcactccgttgatagcataaaagggcattagacaaatcttacaacatgaaaaacagaacaatagcttgtaaggctattcatgttcttatggagcatcataagtaaaagacaagcatttctaacaacaaaaaaatgacaagcaaacacgactctaaatttattccataggcataatttgagaaacctcacacgaataagaaagaacaggataccctcacagggtgaacccatcatcttcaaaataaatgatattgcgatagtagcatcaatattcttcaccttcctctt

SEQ ID NO: 5772 - DNA, 319 bp, Gossypium hirsutum
  Clone ID: LIB3083-116-Q1-L1-A8
cacagagatttgatggtattgatcgtcatgatcgatatgctaatcgaaatgttgtcttctttgatatcaacatgttgggattagatggacttcaaggccctgtatatgtaggcacagggtgtgttttcaacaggcaggcattgtatggctacgatccaccagtctctgagaaacgaccaaagatgacatgtgattgctggccttcttggtgttgctgttgttgcggaggttctaggaagaaatcaaagaagaaaggtgaaaagaagggcttactcggaggtcttttatacggaaaaaagaagaagatgatgggcaaaaa

SEQ ID NO: 5773 - DNA, 402 bp, Gossypium hirsutum
  Clone ID: LIB3083-116-Q1-L1-A9
tgaaggctgagatagctgttcattcgctatatgagcagctattagcagctcatgtttcttgtctccgtgttgcagcgccaatcgatcagttgcctttgattgacgcacagttagcacaatctcataaccttcttagatcttatgcttcacagcatcaacatggtcattctctatcaccccatgaaagacaggagctcgacaacttcttggcacaatatttgatagttctgtgtactttcaaagaacagcttcaacaacatgtcagagtccatgccgttgaagttgtcatggcttgccgtgaaatcgaaaataacttgcaagctcttactggagtcacattgggtgaaagaactaggtgcacaatgtcagatgatgaggatgatatgcagatggacttttttt

SEQ ID NO: 5774 - DNA, 329 bp, Gossypium hirsutum
  unsure (1)..(329): unsure at all n locations; Clone ID: LIB3083-116-Q1-L1-B1
ttgcactgtgttttttcagaagggtgttaaaacgcggagatatcaggccgaggggggcctagtacaccatctccctcttccttacctttgaaaaacagaacaatagcttgtaaggctattcatgttcttatggagcatcataagacttccgcaccgccttcttcaacaaccccttcacctacaacttcagcaccatctcttattccataggcataatttgagaaaccttacacgaatttgatagaacaggattccctcacagggtgaacccatcattttcaaaataaatgattttgcgatagtagcatcaatattctncacctttcttt

SEQ ID NO: 5775 - DNA, 249 bp, Gossypium hirsutum
  unsure (1)..(249): unsure at all n locations; Clone ID: LIB3083-116-Q1-L1-B11
agtacattttttgttggngttagnagacaaaacttttgggggggtataatattaatggggggggtctctatttagaactgggggtatatttttttttaagaaaagtaaacttggggaatttaaatttgggtgggggaaaatcagggcccttttgcctttttggttgaaaaaaaatctggggaaaaaaaaaaatctcaaaaataatgtaaattaataggggggggggagaaaaaaaaggccgtttttttt

SEQ ID NO: 5776 - DNA, 352 bp, Gossypium hirsutum
  Clone ID: LIB3083-116-Q1-L1-B12
ggaatcttttttggaaaagatagcggagaagatccatggtggtgatttatcgtcatcgttgggggattcctattactactagttatccaatttctctcttatatacatggtttttcttattctttatattagatctttatctttaatttttattttttctcttcttttatttcattttctttttttttaattactgtttttctcttctatatattatttattttttttttatttattttaatttatttatttatttctttctcttttttctttttttcttttatattttttttttttttatttctatttatattttttttatttatattttttctttattttttatattttt

SEQ ID NO: 5777 - DNA, 319 bp, Gossypium hirsutum
  Clone ID: LIB3083-116-Q1-L1-B2
cctgaattcctcagctttgttaagggtattgtcgactcagaggaccttcctttgaacatctcaagagaaatgttgcagcaaaacaagatcttgaaggttatccgcaagaacttggtaaagaagtgcattgagctcttctttgaaatagcagagaacaaggaagattacaacaagttttatgaggcattctcaaagaacctcaagcttggtatccatgaggactctcagaacaggactaaaattgccgaattgctccgctaccactccaccaagagtggtgatgagctgaccagcttgaaggactatgtgaccagaatga

SEQ ID NO: 5778 - DNA, 321 bp, Gossypium hirsutum
  Clone ID: LIB3083-116-Q1-L1-B3
ttttccacagtttagtttttgcagccacaacacagccaaagaaagaagaaaatggcgtcgaacgcggcggttccattctggcgtgcagccggcatgacttatataacctactcgaacatatgcgccaacctcgttaggaactgcttaaaggaaccttacaagactgatgcccttagtcgtgagaaagttcatttctccatctccaagtggacggatggaaagcctgaaaagcctactctccgcacagactcacctgaagaatgagatgcaagtttggtcatggaagtttcgaactggaaggattttaattttttttttagg

SEQ ID NO: 5779 - DNA, 274 bp, Gossypium hirsutum
  Clone ID: LIB3083-116-Q1-L1-B4
gatccatggagggtatgccaggagcacccaacatgcaaatgtattcaagggaggagctaatgaacatgaagaatttcggtggagatgccgacgatgatgaagatgaagacgaggaccaatttccatcgaatttgggaaaagtgttgagagacaaagaaagtaaacaaaccgattggaaacaaaagatcatcaaaggtgtaaaagatgcaggtgaatcattgaagagacatgcaactaaggtgtcttttagggtacatattttttggtatggatt

SEQ ID NO: 5780 - DNA, 319 bp, Gossypium hirsutum
  Clone ID: LIB3083-116-Q1-L1-B5
tggttttgggctctcattgtaactactctcacccttcaactagccattacgagtgcacaaacaccagctgcctcaccttccactacgccaaccaccaccaccactcctccaccttcaacttcaccaccacctacaacttccgcaccgcctccttcaacaacccctccacctacaacttcagcaccatctccttcaacagcaacgcctccaccttccaccacgcccaccgcgccagctcaaccacctgcaacaactccccctcccactgttgcaccagctacaagcccaactgtcccaccggcacaaactccaccacctc

SEQ ID NO: 5781 - DNA, 310 bp, Gossypium hirsutum
  Clone ID: LIB3083-116-Q1-L1-B7
ttcgtctttgggcttgatcgtgccgtcataaactcttaccccaagttccggttcagcaaaaaggaggtgtctacggcggtggaggtgacgggttctagtgctgggaacaccatttgttcgatatgtttgtgtgagtatagagaatcagagatgttgaggatgatgcctgaatgtaggcattgttttcatgtaacttgtattgatgcttggctgaaacttaatgggtcttgtcctgtttgtcggaactcaccgcttccgacaccgatttctacgcctttgtcggaagttgtacctttgtctcattacgatt

SEQ ID NO: 5782 - DNA, 60 bp, Gossypium hirsutum
  Clone ID: LIB3083-116-Q1-L1-B8
tggtacagcaccatggtggtccagtgcggttcgaatgtctccctattcaaggaaggacct

SEQ ID NO: 5783 - DNA, 320 bp, Gossypium hirsutum
  Clone ID: LIB3083-116-Q1-L1-C4
gtgaagcgcctacaagccaggaaacatatatgtggaatgactggtgatggggtcaatgatgctcctgctcttaagaaagcagacattggcatagctgtggctgatgcaaccgacgcagctcgtagtgcttccgacattgtcttgaccgaacctggtcttagtgtcatcatcagtgctgtactaaccagtcgagccatattccagaggatgaaaaactacacaatatatgcagtctccattacaatccgtattgtgctcggtttcatgttattggcattgatatggaagtttgatttccctccattcatggtccttattat

SEQ ID NO: 5784 - DNA, 270 bp, Gossypium hirsutum
  Clone ID: LIB3083-116-Q1-L1-C6
ggggcagtcccccttaattgaaaataaatctccaataaacagaaatcttttttttttaaaatgtcaacaaacctcaaatagaaacgaatccattacaactcaaattctctatgtcaaagataagttgtcctgcaaatagaacaaacgtagttaaaagaccataaaaggctagggatcatcaacttcactttaattgattaaggtctccaagctttgcttcatctccacctatgccttgctatctatgctcattggttcgggttcctttgc

SEQ ID NO: 5785 - DNA, 308 bp, Gossypium hirsutum
  Clone ID: LIB3083-116-Q1-L1-C7
tgtctggctcgggcactaagccttgaaccatatgacactggtgcatgtgccatcatcatgcagtaatttcatggtatatcttaattatatggttaataaaaaaaagatggtgagtgaataatgtgcgtgcattcctccatgcaccaatggtgaatctctttgcatacatagagattctgaatgattatagtttatgttatattttatgttgtagtgaaattaattttgaatgttgtttttaaattttgatgtcacttgtcttgatttatgttttaacgaaacttattttatgtattttactttaatgt

SEQ ID NO: 5786 - DNA, 339 bp, Gossypium hirsutum
  Clone ID: LIB3083-116-Q1-L1-C8
gtttgagctagctagctcttactcaaatggcaaccaaaacgatgatgttgcaaatattttcacttttcttctttttgttcagtatctgcaactccattttccttggtgctaatggagatgacaatggtggttggcaaactgcccatgccaccttctacggtggttgctgatgctaccggcacaatggtgttagcttgtttttttggtatcctgtttttttttttggtatttgtatctagctcatcatttttttattcttatttttttatttattttattttttttgagttatttttttttttttttctagccttttattttgttttttttttttttttt

SEQ ID NO: 5787 - DNA, 394 bp, Gossypium hirsutum
  Clone ID: LIB3083-116-Q1-L1-D11
agattctgagcaactagctattctggggatagcatttacaattatggatgaactgttaccaagtatggtggttaaaatttggagtccaaagaatgaaaaccaggaaccaggaaatgaaaacattgttcctaatgcaagtactactaccgaattaaaagactggaggcgtcagctccagtactcttttgacaagctcagagatcacttctgcaggcaatatgttttgagtttcatctattcaagagaaggtaaaacacgattaaatgcacaaatatatttgggtggagatggagaagattcacaatgggacactctgccttctttgccatttcaggcattatttgctaagctacagcagttagcaaccgttgctggagatgttctacttggaaaa

SEQ ID NO: 5788 - DNA, 328 bp, Gossypium hirsutum
  Clone ID: LIB3083-116-Q1-L1-D12
gactattggattgttaagaactcatggggaagcagctggggagaagcatgctatatcacgatggcaaggaatgtggccattaccttaactggcaaatgtgggatcgcgatggaagccttttatcttatcaaaaccggttactattcccctatttcatgaccgttttcactatcttctataatgtttttgacttcttcttatattatttatttctgttcttttatttagttccttttattcatttgtaaatactttattttttatattctttttatattttcagtttcttctattttattttttatcttttaattttttttcttttttt

SEQ ID NO: 5789 - DNA, 322 bp, Gossypium hirsutum
  Clone ID: LIB3083-116-Q1-L1-D2
gttctgtgcttcagacttcaaagctaatgggaaatatatattgtttaaagaaaaggaacttaatgtcacattcaactgtgaagaatgcacatctcttccagctggtactttcaatacagataccaataatgataataaggggaatgaattgcgtgttgctataattgtactgattgttctagtggcttcaactgtaacaatatttggactgatgatggcttataaatactggcaaaagaggaagaggcaacaagatcaggctcggttcttaaaactgttcgaagaaggggatgacctcgaggatgaactagagcttggtaat

SEQ ID NO: 5790 - DNA, 235 bp, Gossypium hirsutum
  Clone ID: LIB3083-116-Q1-L1-D3
cggcgatcgaccagttgcttaatgttgagaagcagatgcgcttcgccggcgatgtcgctggaaccaagaaagcggttactgacattttgctgctttgctttgaagctaaagattggaagtctctcaacgaacaaatcgttaatttgtccaagaaacgaggtcaacttaagcaggcagtacctgcattggttcaccaggcattgcattccattgatgaaccaccaaatctggaacc

SEQ ID NO: 5791 - DNA, 319 bp, Gossypium hirsutum
  Clone ID: LIB3083-116-Q1-L1-D4
tagatgtgtcatgatcagaacgatatttctggggttgtatgtattaggagtgcgtgcttttattaactctattcttacggttttgttattttttttaataatttttttttttttttttcatttttattctattattttttttttttttttttttttttttatattttattttttttatttttaatattttatttttttattcacttattatttttatttttttttttcaatattatattaaatttttttttttattattattttttaattttctttttcttttttatacattatacattattctattttttcatttttt

SEQ ID NO: 5792 - DNA, 321 bp, Gossypium hirsutum
  Clone ID: LIB3083-116-Q1-L1-D5
ttcatgatttgccacctccggggaaaaagggtcgcacttatatttgtagttgcatgatttttctgcgtcccaaagatggagctaaacttgtaatgaagaaatggatcgaagaacttcaagctcagccatggtccaaagcaaagaaagcaaatgatcagcctgcttttaactgggctctaaacaaaactgctggtttggtggatctctacctgcttcctcaggcagcattcccaacaggaggattatacttcaagaaccagacatgggtgcagcaaaccaagggaatgcacgtcataattcataataattacatcaccggct

SEQ ID NO: 5793 - DNA, 319 bp, Gossypium hirsutum
  Clone ID: LIB3083-116-Q1-L1-D6
tgagaaatcgctcttctccgtcaatatgatcaggcatggaatgtgtatggggtgcttaattacttgcaagcatttgtggagaagtcgaatattattcagatattgaagcaggagaaggagggtcttgagcaatttactgctactgatggatatgattacagtggtggaagcaatgtgttgaaggtgttggggtacttcagtatggtgggtttgttgcgagttcattgtcttttgggtgattaccaaaccgggttgaagtgcttgcttcctattgacatcagtcaacaaggtgtttacaccagtgttataggaagtcata

SEQ ID NO: 5794 - DNA, 319 bp, Gossypium hirsutum
  Clone ID: LIB3083-116-Q1-L1-D7
tggagaatagctcatctgatggaagcaccaccaaattgtcactctctttgttcaccttccttctgttggcaacatcatatagttcaatcttcacatcacactgaatcttctctagtataccctacctctcatgacacttcatgttagcaaaaacactatattgtattttttttatttgttagtgtccattctcctttggttgaggatacatgtaattttttttatccccttcactactccagggtcctatgattttgtatagcttaagagaaatatggcttctcctcccttctcaataaaagattgcttgggattactt

SEQ ID NO: 5795 - DNA, 361 bp, Gossypium hirsutum
  Clone ID: LIB3083-116-Q1-L1-D8
tggccgatctgtttaccgacgatcagatctctgaattcaaggaggcctttagcctgttcgacaaggatggagatggttgcattactaccatggagttgggaactgttattcgatcactttttcatattcttatttattcataatttttttattttattatttttttttttttctattaaataattttttctttttatattttttttttttttttttttttctatgattatttttttttttttttacttattttcttttttttttttttaatatattttattattttttattttttcattttattaatataattttttttttttttctttattttatttttttttttattattttctttttt

SEQ ID NO: 5796 - DNA, 393 bp, Gossypium hirsutum
  unsure (1)..(393): unsure at all n locations; Clone ID: LIB3083-116-Q1-L1-E10
attttaggcgtctttacgctaattctatagacttgaacacaaaatcctacctctccacgacaaagcgtgcattttgcaggccaagtgaacacgcaaaggtcgttaacaccaccatcacttgttctccattttattgcagcaataacttaggatcgagatcccattcaagcagacccgaaatggaggggatagagcatagggtaatcaaagccaatggcataaatatgcacgtcgctgagaaagggaaaggccctgtaantcctttcctccatggattcccagagctctggtatacatggcgccatcagatcactgcttttgcctcgcttgggtaccgagctttggctcctgacctgcgtggatttggggaaacggaggcacccgatgatgcct

SEQ ID NO: 5797 - DNA, 391 bp, Gossypium hirsutum
  Clone ID: LIB3083-116-Q1-L1-E11
tgacctcccgcggttctcagcagtaccgagctctaactgtccctgagttgacacaacaaatgtgggatgcaaagaacatgatgtgtgctgctgacccgaggcacggtcgatacctcacagcatcagccatgttccgaggcaagatgagcaccaaagaagtggatgaacaaatgatcaatgtccaaaacaagaactcttcctacttcgtcgaatggatcccgaacaacgtgaaatccagtgtctgcgacatcccacctagagggctatcaatggcatcaaccttcgtaggaaactcgacctcgatccaggaaatgttcaggcgagttagtgaacaatttaccgctatgttcaggaagaaagctttcttgcattggtacaccggtgaaggtat

SEQ ID NO: 5798 - DNA, 244 bp, Gossypium hirsutum
  Clone ID: LIB3083-116-Q1-L1-E12
tacctccttttttttcacataccgaactctacttgggctggtttaacaacaaatgtggttgcaaaaaacattatattttcttcttacccaattcactgacctatcctcacatcatcattccatttcctagtcaataataacactatagaattgtatgaacaaattatctttttccaaaacattaacttttcctactttttttattgaatccctaacaactttaaattcattttttttctacatt

SEQ ID NO: 5799 - DNA, 306 bp, Gossypium hirsutum
  Clone ID: LIB3083-116-Q1-L1-E2
ggatctattaattttgaagaccataaaacaatctgttgaaatgaggaatagcgtttgtcacagtgctacaatctatgcaaatgctataatgcatgctggaacaactgtggatacattcctgagggacaatctggactggctgagtagggctacaaattgggccaaattcagtgcaacagctgggcttggtgttattcacagaggacatctgcagcaggggaggtctctgatggctccatacctaccccaaggtggtgctggtggtggtgggagttcattcttttaatgttttttatcttttttttt

SEQ ID NO: 5800 - DNA, 317 bp, Gossypium hirsutum
  Clone ID: LIB3083-116-Q1-L1-E3
aaatggctaatcgttctctagtttccctttacaagttccttttcaggcacccttttcaatcatctgcaaaacccacgtctccttttctctttaaatccctttctccgtttcaaactcaactcgcggccaactctgtcccatctccgagacctgcctcttttcgattcccagtcttccaaacctcacaagttcagcacccaatttaccacatcctgaggaagtacagttctgagtcaccagcatccaagttggatgtgaacaaggaggtggactcgatcaacctcaagtttgcagaggcaagagaagagatagagatg

SEQ ID NO: 5801 - DNA, 332 bp, Gossypium hirsutum
  Clone ID: LIB3083-116-Q1-L1-E4
tgcaattgttcaaggagccttgcagatactcactgttgcagactgtctaacaagcaggtcttcggtctttgaagcatccttgagagctactctggctagattgggcgcaactttgtcactttcggtatttggttcaagtttggataataaccagctacatgttgcatatgacgatggaattggggagccaccattaggtgtatgttctgcactagattgtttttttgtgcatctttgtttttttatttttttatggctcttttttttttttttttttttttttttttttctttttatttttttatttttatttttttttttttttttttttt

SEQ ID NO: 5802 - DNA, 187 bp, Gossypium hirsutum
  Clone ID: LIB3083-116-Q1-L1-E5
tagtaattgctaatctttctctactttccgggtacaatttccttttcaggcacccctttcaatcatctgcaaaacccacgtcttctttttctctttaaatcccatactccttttcaaactctaactcttgccaacttcttttctatctcctagtacctcctcttttttattcccagtcttccaaacc

SEQ ID NO: 5803 - DNA, 353 bp, Gossypium hirsutum
  Clone ID: LIB3083-116-Q1-L1-E7
ttgcaaaaaaaaaaaaaaacaccctaaagggacaatgagaaagctgctggcctttgcctttcttttcttcttcttttgggataaaacattatctcaaatagctccggcgccgccgataaaggttgacaacattactttcattctttaaatttgtggctctatttccttttttttatagttttttttatgctttatctattggcttttttattattatccttctgctttattttttctgtttttttaaatttcttttttttatcttttttttttctattttattttttttttttcttatatttttttattttttttttttttttatcaattttttttattttttttttttattt

SEQ ID NO: 5804 - DNA, 390 bp, Gossypium hirsutum
  Clone ID: LIB3083-116-Q1-L1-E9
aaaaaagtttgtttttgattttaaaatataaacttacgacatctagaaatggtgacctcagtgctacctagagtagaaagcttggcaagcagtgggattcagtcaatcccgaaagaatatatcaggcctcaagaagagcttacaagcataggtaacgtgtttgaagaagagaaaaaagaggaagggcctcaggttccgaccatcgatttgacagaaatcgagtcggaggacaaagaggtccaggagagatgtcggcaggagctgaaaaaagctgccatggaatggggtgtgatgcaccttgttaaccatggcatctccgaggagctcatggatcgtgttaggaaagttgggcagaaattctttgaacttcctgtggaggagaaagagaag

SEQ ID NO: 5805 - DNA, 266 bp, Gossypium hirsutum
  Clone ID: LIB3083-116-Q1-L1-F10
gtcaatgcttttaatttaccacccgagagagctttagtggccattctaataaaaaggggctgtgaacaatttaaaactgtcttattatcatatgtaggactatttacggcctctcacttatttggttttccaaaaatttaatatttttgtgtaatttactagtttatttttttggtattttgatctattctcttttttattattttcttttttatattattttttgaactagttttattttttttacttttttttcctcttcttat

SEQ ID NO: 5806 - DNA, 344 bp, Gossypium hirsutum
  unsure (1)..(344): unsure at all n locations; Clone ID: LIB3083-116-Q1-L1-F11
gtgatgatgatgatgaagagaagcgtcaccaccaccgctataagcaccaccaccataagcgccacgatgactatgacgactagtcagactggccattccctctacaaatggaaatctgcagtaatagctattaaataaatgatcgaggcatgccacctttgatcgtttcttctaccatttccgtgtgctttttgtgtgtgtgtcagtgtttgatcgtcaataaaatgcccgaacattagggttagcgcaattgcgcttgttgattntcaaanaaaaaaaaataaaaatattattataatttttatatttttttttttttatatatttattttttatttaatttt

SEQ ID NO: 5807 - DNA, 322 bp, Gossypium hirsutum
  Clone ID: LIB3083-116-Q1-L1-F2
tggacttgatataattggtgttcagactgttattaattatgcttgtcctcgagatattacaagttacgttcaccgagtcggtcggacagcaagagctggtagagaaggatatgccgttacatttgttactgacaatgaccgatctctattaaaagctattgcaaagagagtaggttcaaagttgaagagccggattgttgtggagcagtctatcactaagtggtctcaaaaaattgaggagatggaggagaaagtcactgaagttattgaagaggagagggcggagagagccctaagaaaggctgaaatggaagcaacgaat

SEQ ID NO: 5808 - DNA, 314 bp, Gossypium hirsutum
  Clone ID: LIB3083-116-Q1-L1-F3
gatgaacaagcttttattagactcgaagttgaagctgacattatgatgtacaaaggacgaaacaggaataaaagctagttttaacataaagctacctaaacagaaagttactaccatttctcataaccaaacagttctttttcttcttttcatttcccactctacaagtactttcatatggagactgatccatatgctatgcatttgcagctcctataattccatggatccatagatttagaaggagaaagcaaaggactactctgtggcagcaacaacagctggcccttccaccttgaatttagcaccccata

SEQ ID NO: 5809 - DNA, 322 bp, Gossypium hirsutum
  Clone ID: LIB3083-116-Q1-L1-F4
tgcgagtttttttttttttttttggcgaaaaccctatctatcctcctctgagcttcctttttccttttccctctttcgagtccgtgcttttttctagggtttgttctttgatctaactaacgcagattattaagaaaatgtcaagtgctttagagatgtcgctagacgatctcatcaagcgcagccgtaagtctggatccggaaactcccggtgtcgaggccgtggatccacggcgggacccgcccgccgcattcctaaccgccttgcgaaccgctccgcaccctatacctctgctaaggcgcctgatactacttgtcttca

SEQ ID NO: 5810 - DNA, 319 bp, Gossypium hirsutum
  Clone ID: LIB3083-116-Q1-L1-F5
tggtgcaaccttgcaggaccaactgcctgtccgaggagagtgccatcactttggtcgacgggaaggttgtgcaagacatttgcctccgattgagaaacgtggagtgcggtgaagtggaaatccaacttcaatggattgaacttcccgggtctaaaggtttattatgaagtgtgtgttcataaaaatgctgtttcgttccatatcgttatgttttttgttgcaggtttggggagcttctaataccgggcaccgtttgagttttctgccgaggttggttttgttctttttgaaacagtttgaatatgtagttaaaatatat

SEQ ID NO: 5811 - DNA, 320 bp, Gossypium hirsutum
  Clone ID: LIB3083-116-Q1-L1-F6
accaaacgagcttggaaatccattggaaaaaatggcaatacaattgcgaatcggcggtggcgtcttcctctcacaatggtctccacagctagtgttggatagtaacaataggaatgggcggcggttggtaatcgggggcgagagctgggagagatcgcgattcatcggccttgtccattgcaacagcagaagcagcaataatggtagcagcgatgctaaaaagggagtccctaattcaaactacgttgtgccactcaacaagtcgttttcggcatcaaactcttcgtacatcactcgtcctctagttgaaatccttcgcg

SEQ ID NO: 5812 - DNA, 319 bp, Gossypium hirsutum
  Clone ID: LIB3083-116-Q1-L1-F7
tgcacgtaaatataattttctatacttgaaagaaaaatcaaaatagattttttttagtttaagcactgtgattcatttgtatgtacgccagcgtcaaggctgctgaatgacacgcaaaagaaaagaaactaactgccaatgccaaatgtcatacagaagagaagtccagtcgactcaccaacactctagctttctactggcctattactcaccgacctgataataatagtatacaattaacttcaccctcaacctcgagccaactaccccacaacaatattatctcaattttcaatctcaagagatggtttactcaatt

SEQ ID NO: 5813 - DNA, 328 bp, Gossypium hirsutum
  Clone ID: LIB3083-116-Q1-L1-F8
tggttcccttaacaatttacttccaatacagacaacaaaaatatcaagtttcaacccaaacacaaataaaacatgaaaaagcataacatacagtaaaccatttcaagtctttaacaagcttcaaagaatagaagcttgcataacacggaagcaacaggtaataaaagacatcatacgcacactcaatcacaggtacttcttagtactcatcatcttcaccctcatcaccctcagccgactcagcaccaacttcttcataatccttctccaatgcagcaagatcctcacgagcctctgagaattctccttcttccataccctcaccaac

SEQ ID NO: 5814 - DNA, 320 bp, Gossypium hirsutum
  unsure (1)..(320): unsure at all n locations; Clone ID: LIB3083-116-Q1-L1-F9
ctccttttatgttgaacttggattgtgaccattatttaaataacagcaaggctgtaagagaggctatgtgtttcttgatggaccctcaaattggaagaaaggtttgctatgtccaattccctcaacgtttcgatggtattgatagacatgatcgatatgccaatcggaacacagttttctttgatattaacatgaaaggtctagatggtatacaaggccctgtatatgtcggcacggngtgtgttttcagaaggcaagctctttatggttatgaacctccaaagggacctaaacgctcgaaatggttacctgtggttgct

SEQ ID NO: 5815 - DNA, 402 bp, Gossypium hirsutum
  Clone ID: LIB3083-116-Q1-L1-G1
tgtttagggttttacgatgaatgagagaaagacgattgatcttgaacaaggattggagtttatggaattaggtattataattgtttatttattttttttttagttaattttttagtttttttttattatttttgtttttttttttatttatattttaattttttttatatttttttttatttttctttgttatgtattaagtttttttttattttctatattttttctgtttatatttattaatatgtttttttttattttatatatattttttattatttttatttttatttatttatatattttataatttttatattatttataattatttttttaatatatttttaatattatttttttttttattttatattttctatattttatttattttttttt

SEQ ID NO: 5816 - DNA, 391 bp, Gossypium hirsutum
  Clone ID: LIB3083-116-Q1-L1-G11
agaatatctccttttattttcatttcgtcttcatttcatctcaaatccatcatcgaaattacttgtagttatcagaatggggacaataggcaaaactactacggccactatttttctttgtcttcttctgtttcctattgtcttttccacgcctaatgacagatttgttagaattggactcaaaaagagaaagattgaccgaaacaatcggatggctgcacaccttgaatccaaggaggaaaaggcatctgaagcttttcttagaaagtatcgtcttcatgggaacttgggggaatcagaagacattgatattgtggcactaaagaactacatggatgctcagtactttggtgagattggtattggcactcctacacagaacttcactgtg

SEQ ID NO: 5817 - DNA, 304 bp, Gossypium hirsutum
  Clone ID: LIB3083-116-Q1-L1-G2
acaaacccctttagccttacctcaagcttcatcccctttatatttctttgaaattttttcattaaaaatcctaacaaaagcatgggtaattctgggtttctagcaacattattattaccgacattcctttgtgttcatctctttggtgggtttgttgatggtcttggtgtgaattggggcacaatggcaacccataaattacctccagaaacagtggttcagatgttgaaagacaatgggattaaaaaagtgaagcttttcgatgcagattcaaagactatggatgctctttcagggagtgatc

SEQ ID NO: 5818 - DNA, 328 bp, Gossypium hirsutum
  Clone ID: LIB3083-116-Q1-L1-G4
tcgagttttttttttttttttttcaacaaaaatcagaattaagtatttttctcaatcagctataaaaataacaactcggttcaaaaatgagaatttaagtatacatcttaaagcaatgagtatatcttaacctaagacattggtccatgaatatgacaaaagaacacaaagcagatcccggttttacacactaatcaatcttgacagatgagtagataagtcttgtgaaccaaaagcacgcataaaatccgatggtgcccgttagcacaaaaaatgcatacgaagcaattagcatgtacccaaagtataggagccccgaaaccagctt

SEQ ID NO: 5819 - DNA, 316 bp, Gossypium hirsutum
  Clone ID: LIB3083-116-Q1-L1-G5
tgtttttttttttttttttttaacaaacaaaaaaatcaaatatttggaatcacaatcacaaattacaaacagtaacacaagcatcgcatgcaaaaataaaatccatattcaaattcccctattaatagcccagaaaacagtctttgtctaaaaacccattgccaaagcatgaattttcaagctcactttaccagctgcattagttcccttaaccgcttgtttaggtctcgttacctaacctttatttttcgtatactcctgtatttttttttttatctgtattttttttttttttttattatttcttttttttttt

SEQ ID NO: 5820 - DNA, 306 bp, Gossypium hirsutum
  Clone ID: LIB3083-116-Q1-L1-G7
ccccattcaaaaagagtctggcaagtctaaaccctagtttcaagcgaaaggagaaaagaaagaagaaatgccgagagaaatcataacactgcatgtgggacaatgcgggaaccatatcggaatggagttttggaaacagctctgcctcgaacacggcatcattaaagaaggctttcttgaagatttctcttctcatgtaggtgacaggaaagatttatttttttactaatctttctattttgtattattttaccatttgtctttactttttttttttgtatcctttatttaataattgtttttttt

SEQ ID NO: 5821 - DNA, 321 bp, Gossypium hirsutum
  Clone ID: LIB3083-116-Q1-L1-G8
tgcgaaaggctactttctgaccaagatttttcatccaaatattgcacccaatggggaaatttgtgtaaacacactaaaaaaggattggaatccaagtcttggattacgacatgtactcatcatagttaggtgtttattgattgagccatatccagaatctgcactaaatgaacaggctggcaagatgctgcttgaaaattatgacgagtatgcccggcatgccaggctttatactggaatccatgcgaaaccaaaaccgaagttgaaatcaggagctatttgcgagtcaactacagcattgaacgtggagcatcataacac

SEQ ID NO: 5822 - DNA, 300 bp, Gossypium hirsutum
  Clone ID: LIB3083-116-Q1-L1-G9
tggaggtggataagaagccatcattattttctcgtacaattcaaatggaaatggcaaaagctcttgtagactttcggaatggattatacacatttattaaactattatatgggctaggcctcgttcacaatttttgacatttatagtctgatatttgttgtttactggattttgttggttcattttttttttttattatatttatgttttttatcttttatttagtcttattatattttttttatatttattgtcttgatatatatttttttatttttttatttattttttatttttttt

SEQ ID NO: 5823 - DNA, 388 bp, Gossypium hirsutum
  unsure (1)..(388): unsure at all n locations; Clone ID: LIB3083-116-Q1-L1-H10
gatgaaagtgaaggaagtccctaactacgtgaaaccgatgctatcaatggattacgtgaagaaagcttttcaaaagggtttggacaattacaattcaaagtacattcaaaccgattcgatccagcctctttaccatgtctgtttcggtgggatggtcttttcttacctcgtcgctctcccaaatgagcgtcgccatctcgagcaccagcaacacgccaaggaacatggtcatcactgatccctgctcaggttaaagagtggcatttatggcataatgcttctggttgtaatttctgagcaatttangcaggaagatcctgtctttgatcaaatgcattgcagcattgtggtgataaaataatattaaaaaataaatggatttttgtta

SEQ ID NO: 5824 - DNA, 382 bp, Gossypium hirsutum
  Clone ID: LIB3083-116-Q1-L1-H11
ctcaaatccgtcgtgctgttgaggctgaagggatcccttacgacttatgtgcctgctaactgctttgcaggctattttcttcctacattgtcgcagccaggagccacctctcccccaagagacaaggtggttattctaggtgatggaaatcctaaagctgttttcaaccatgaagctgacatcggaacgtacaccatcaaagctgtcgatgaccccagaacagcgaacaagactctattcatcaagccttccaagaacacctactcatttaacgagctcatcgccctgtgggagaagttgattggcaaagcccttgaaaaaacatatgttcctgaggaccaacttctcaaacagatccaagagtctccaatcccaatcaata

SEQ ID NO: 5825 - DNA, 329 bp, Gossypium hirsutum
  Clone ID: LIB3083-116-Q1-L1-H2
aaagaaacaaaccccttttattttgaaaaaaaaaatccgaagactttaaaagcaaagacaaaggagaaatgtgcaaatccaaccctagggcctgcctgaaaactttgtttgcaaaagccagcgccctatatttccagctccgtttctccaacagttccgtttccaccgccgcaccgtcgttttccacctgaacttctccgtccatggctgcaacggactctcctctaacgaccaatgtttgtatcattgggagtggccccgccgctcacacggccgctatgtacgctgctcgtgctgagctcaagcctattctttttgagggatggatg

SEQ ID NO: 5826 - DNA, 317 bp, Gossypium hirsutum
  Clone ID: LIB3083-116-Q1-L1-H3
ctcgtgccgttttccccttttgtctccgacggttggggttccccattgcccgccgaaccgccatcgtacccggtggccgatgaagcgcgaagaccggctttttagccccgtttcaaaaggaaatcgaaggtctagccttcttgagccaaaaaaaacgaaagaagagatcctcgctccttttcgatcctgacgacggaggaaagacctctgacgtcgtaaccgcgggcgatcccagtaaggtcaacgaggctgtagatggccattttggtgcaacggggccgaatctcgggcgtgtgcgtgccgagggcgcacatgga

SEQ ID NO: 5827 - DNA, 327 bp, Gossypium hirsutum
  Clone ID: LIB3083-116-Q1-L1-H4
gagagagagagaactagtctcaagttttttttttttttttaagtaacaaatgattcacatttttctgtttttgcttctgtatatatccaatgataaggtctttttttttaatttattgatgcagttagattgattttcctgtgtttgatattatctccctcttagagatcagaattctggcattgtcctccttttgaggaattttctttagctgttcttcatcatgaagggagagacttcatggatcagccattgctttgatgacatgtcaaaagaagttggtggcttagattcgttttcggaacttattgatgaaggtaacaaaga

SEQ ID NO: 5828 - DNA, 286 bp, Gossypium hirsutum
  Clone ID: LIB3083-116-Q1-L1-H5
ccatcaaaacatcggtttgcccttcaaaccaaacgtaatacctttagattttccaaattaaaactcttacaattccatgcagacaaaacaaacaaaccctcccatccacaggttccaacataatttgatttttttgcaaatattaataaaactacgtaacctgagtgggaatatatttatataattctctccttaaaccactaaatattaatttttttataataaacttactcgagtatattgttgctttctctttcaggtctatgcttttgaagcagcctcatcc

SEQ ID NO: 5829 - DNA, 326 bp, Gossypium hirsutum
  Clone ID: LIB3083-116-Q1-L1-H6
cgaatcctcatcgggtctccatatctacgacctctccagcggtcactataccggttcagttcactggaccgaccaggacgatccacggatatacaaagcccgagtctgcgccatcgctaactcacccgactcggtcttcgtatcattcgattgtccccatagagaaaacagcgtcctcgttatcgacaaatcaacgcttcaggtctcatcagagctgactcgccaatcaggaagcgccgccaagaacacattccccggaaaactgacgtggctaccggaaactggtttggttatcggaagtgctgtcacatgtggggcatttggtt

SEQ ID NO: 5830 - DNA, 327 bp, Gossypium hirsutum
  Clone ID: LIB3083-116-Q1-L1-H8
cagttcttaatactttgtttcatttcatcaaaaaaaatcccatcatgagagaaatcctccacgttcaagccggtcagtgtggaaaccaaatcggaggcaaattctgggaagttgttagcgacgaacatggaattgatcccaaagggaactacgtcggtacttctcgtgttcagcttgagagggttaatgtttactacaacgaagctagtggtggtcgttacgtacccagagctgttttaatggaccttgaaccaggaaccatggatagcttgcgtactggtccgcacggacaactttttagacctgataacttcatttttggtcaaa

SEQ ID NO: 5831 - DNA, 287 bp, Gossypium hirsutum
  Clone ID: LIB3083-119-Q1-L1-A1
gaaaaatgtcgggaatcatgcacaagatcgaagaaacccttcacatgggagggcacaagaaggaagaagagaagcacaagggagaagctcatcacgaaggcggccatggctatggcgctgctgagcacaagggagaagttcatcacgaaggcggccatggctatggttatggcgccgctgagcacaagggagaagttcatcacgaaggcggccatggctatggcgccgctgcggccgccggtcacggtcacggtcacggcgagcagcaaaaggaagggcttatggat

SEQ ID NO: 5832 - DNA, 294 bp, Gossypium hirsutum
  Clone ID: LIB3083-119-Q1-L1-A10
ccttccaatatttccttatactgaattcaactcctccaatggagtccttccaaatcaccatatactctgttctttcttggattcccttaaattacccatctttcaaaacctacactagcaccctagataccattagattccattaagccaccaacacaacagcgttaccagaaagtagtatatagggaaaaggaaaacagcgatggaggagaggcatgttttatttgggaaatacgagatggggaggctgttagggaaagggactttcgccaaagtctacaacgggaaagaatt

SEQ ID NO: 5833 - DNA, 274 bp, Gossypium hirsutum
  Clone ID: LIB3083-119-Q1-L1-A11
gcttgctctctttgtttttcgagatctgtgcgttttcttcttttcaattagcttcttgaaagctttattttcttaagaacaggaaaccgctgaagagatggcaccaccaattgagactccaaccaagtcctctggctctcaccacgcatcacatcctcctttgaatgaaaggattctttcatcgatgagcagaaggtctgttgctgctcacccatggcatgatcttgagattggacctggagctccaatggttttcaactgtgtgattgaaatc

SEQ ID NO: 5834 - DNA, 296 bp, Gossypium hirsutum
  Clone ID: LIB3083-119-Q1-L1-A12
cgattttgtcggattatttatatatatttatattcaatagaaatgaataagaaagcactggccattttgatgcgagctagaatgagacctaatcatctcaccaacttcgccctttctcccatttccaatgagttgaatcaaattctgtcaaattctcatggaaaccgatccggtgaaaacggggagcatcatgccatggaacatggaaaagaaacgctcaatcatcaaagatcatttgaggttgtacgagaatcaatgcactccgtgatatcaatgaataaaactgaagttggtga

SEQ ID NO: 5835 - DNA, 293 bp, Gossypium hirsutum
  Clone ID: LIB3083-119-Q1-L1-A2
cttcattacattgttcaagaaaaaagaagcaaaaaaacatggccaaagttctgttgttcattgcactatgtgtgcttccagctttggttagtgctacacgcattctgaataatcaattggtggtagaaggctatgtgtactgtgatacttgccgtgctggttttgaaacccctaagactagaagcctagctgatgccatggttaggttggtatgctccgacaggaagagcggccaagttgtcttcaaaaaggagggatacaccgacaaaaccggaaaataccagattcgtgta

SEQ ID NO: 5836 - DNA, 286 bp, Gossypium hirsutum
  Clone ID: LIB3083-119-Q1-L1-A3
gcaccccggacctcctcttccccttcctcttccgccggattgggcattagagttgttttgaaaccagattatcgaattactcctctgcctcagttttcgccgcaagttggggatattcgtcgaagcaatttccagtttgatttcgagtttgagaggaaaatcttggctcaaccagatgcggaattcatgaatttgagccaacttgacttggaaaatcatccttcggaacctacccaatcaactccttcctccggtgcaaattcggattctgtgttaaacaaataca

SEQ ID NO: 5837 - DNA, 296 bp, Gossypium hirsutum
  Clone ID: LIB3083-119-Q1-L1-A4
gtttacccaatttcagttctatctaaagagcagaaaagaaaattgggttgccgtgagatgaagatcgaggatttggatgacgtggagaatgaagacggcgattacggcgcgaagcagttgcagatagtcagagtggacgaagccaaacgactcctagtcggagccggtgctcgtatcctcttttaccccacccttttgtataatgtcttcagaaacaaaatccaatccgaattcagatggtgggacgaagttgaccagtttcttttgctgggggcagttccatttcccaaggatgt

SEQ ID NO: 5838 - DNA, 283 bp, Gossypium hirsutum
  Clone ID: LIB3083-119-Q1-L1-A5
aaacaacaaagcaagaaattgattcattaaatactgttcgaatcacaaaaagacagaatggaaacatgtcatttcttacataccgaaagcaaactttttttttcttatgatttgtactaaaaatgctgggaaaagaagaaacttaatatgaaatatacaacaaatacaacctcaaaacaaaaacagatatttttttaacaattgaagaaacacacaatcccatcagtatttttatgtgaacttgaatctcaagccttttctttttcttcatctgatttggagt

SEQ ID NO: 5839 - DNA, 296 bp, Gossypium hirsutum
  Clone ID: LIB3083-119-Q1-L1-A6
gacaaaaaaaacacaaaaaagagtgggcaaaatattatttttataaaaaaaaaaactctttcagctactgataactgagagaaacaaagctaaagccaacggtttttttttttcagttccacaaacaataaaacaatcaacttcttttcttctctgtttcaatttttttttggcgttttgaaggttgatttttttcttgagttgaagttcttggactcggtaactcagtaatggcaattacgagtccgagtcattgcgtacgtgttttgattcttgtgatgttattatctccaccg

SEQ ID NO: 5840 - DNA, 252 bp, Gossypium hirsutum
  Clone ID: LIB3083-119-Q1-L1-A7
agatcaacatcatatataataagggataatttcttaatccataagccaaacttggatcttactgaagaagaaagctgagatacaggacgaaaacttaccagcagatggtaaaatacatatatagcttctcaccattctaatattactatggatcaccaatgcatatacattaagaacacaagttgatactacttataataattgcatccacaaaatgaacagcaaaacagcttcaccagcattcaaagcctt

SEQ ID NO: 5841 - DNA, 293 bp, Gossypium hirsutum
  Clone ID: LIB3083-119-Q1-L1-A8
caactacgaatcgatccaaatacggtctgaagatccgattcatcaaatccataaatgctgcaggggcattagtgagcccaaacggcatcactaagaattcgtagtgaccatatctcgttctgaaggcagttttaggaatatctgaatctcgaattcgcaactgataatagcccgatctcaaatctatttttgagaacactgaggctcccttcagttggtcgaacaaatcatcgatgcgcggcaacggatatttgttctttatcgtcactttattcagctgacgatagtcaatg

SEQ ID NO: 5842 - DNA, 293 bp, Gossypium hirsutum
  Clone ID: LIB3083-119-Q1-L1-A9
cggagttagagagagtgaaacaaaatgagtatcagctgcgcgttgaaggtggttccgattgtgcttctgttggttcttttcgcattagcgaatgccaagaaatcagctgatgtgaccgagctgcagatcggcgtcaaatataagcctccatcatgtgaattccaggctcataaaggtgatagagtaaaagtgcactatcgggggaagctcactgatggaaaggttttcgattccagttttgaaagaggtgatcccattgagtttgagcttggtagtggacaagtaatcaaagg

SEQ ID NO: 5843 - DNA, 291 bp, Gossypium hirsutum
  Clone ID: LIB3083-119-Q1-L1-B1
catggtggtggaataggaaaaggaggtggacttggaggtggaattggaaagggtggtggacttggaggtggtattggcaaaggaggaggcctcggaggtggaattggaaagggtggtggacttggaggtggtgttggcaaaggaggaggccttggaggtggaattggaaagggtggtggacttggaggaggacatggtggtggacttggaagtggtattggcaaaggaggaggccttggaggtggaattggaaagggtggtggacttggtggaggaattggaaagggtggt

SEQ ID NO: 5844 - DNA, 238 bp, Gossypium hirsutum
  Clone ID: LIB3083-119-Q1-L1-B10
cactgaatgggtcgagtcatccgagctcaacgtaagggtgctggttccgtcttcaaggcccacacccaccaccgcaagggtcctgctcgtttccgcagcctcgacttcggtgaacgaaatggctacctcaagggtgttgtcaccgatgtcatccacgaccctggccgtggcgctcctttggcccgtgtcgtcttccgtcaccctttccgcctcaagaagcataaggcgctttccgttg

SEQ ID NO: 5845 - DNA, 271 bp, Gossypium hirsutum
  Clone ID: LIB3083-119-Q1-L1-B11
aggcatctttgaagaccgaaagggagaagaagaaggaaatgtacttcccaatgaggaagtatgccattaaggtgtagggtaggatctctcacattctatttacatatcgattcgctctttactttctagcatcgtcttccgtaaaacccgagttgtgattttgtttcaatcttcatgtttggaaactcttttttgtccccttgtttaaaaccattattctggtctttttgattgaatggctttttaattattttttgcattatggatttat

SEQ ID NO: 5846 - DNA, 296 bp, Gossypium hirsutum
  Clone ID: LIB3083-119-Q1-L1-B12
agagaaagagaagaaattgaaggaagctcgtgaactagaagagaaagagaagaaattgaaggaagcttgtgaacgagaagagaatgagaggagattgaaggaaattcgtgaacgagaagagattgagaagagattgaaggaagctcgtgaacgagaagagaaagagaagaagttgaaagaagctcgtgaacaagaagagaatgagaagagattgaaggaagctcgtgaacgagaagagaatgacaagagattgaaggaagctcgtgagcgagaagagaaattgaaggaagctcgtg

SEQ ID NO: 5847 - DNA, 295 bp, Gossypium hirsutum
  Clone ID: LIB3083-119-Q1-L1-B2
ccaccattgatgttcctgagcaggtttcggttcttgcagatgcagaagctcttagaaaggcttgtaaaggatgggggacagatgagaaggcaataatttcagtgttgggtcacagaaatgcagttcaaaggaagcaaatcaggcttgcttatgaagacctttaccaggaagatctcatcaagcgtcttgaatcagagctttctggtgatttcgagaaagcagtgtatcgttggatattggatccagcagaccgagatgccgtgttagctaatgttgccataaagaaattaagccc

SEQ ID NO: 5848 - DNA, 294 bp, Gossypium hirsutum
  Clone ID: LIB3083-119-Q1-L1-B3
cttctttttcgcttctctcaaacgaacgtaacaggaacagtaacagaatcatgataagtggcggattccaacataaaaagttaatagattttaaggactgtgtttgaggtccgtgttttccgttttttaacctttgctgcaatttccaatacccaatccacacaccaaaatattagactgtcgtgtccctcacacactcggtagagttaaaaagacttcagagagtgaaggatagaagaagaaagcaaagggaaagtcaattgaatttttttttaaaaaatgggaaaatccact

SEQ ID NO: 5849 - DNA, 300 bp, Gossypium hirsutum
  Clone ID: LIB3083-119-Q1-L1-B4
aacaaaagaaaaacctcaatatccaaaatccaaagccaatctcaaaaaacccaacaaataggaaaaaactaacaaatctcaatattctcaaccctttttccttgtggaagagtagaaaaaaaaaaacaccatgcaagaagaccttcaagccaagtcattggaacctattgaagattgtccaagaagtgatatgatgtttgggtggatagaacccaaacaagataaaaacagcagcaagtgtcttgtttacattcttgctattatggtcatccaaggatccatcctcttggttttagccaa

SEQ ID NO: 5850 - DNA, 206 bp, Gossypium hirsutum
  Clone ID: LIB3083-119-Q1-L1-B5
aaaaccgggggggcatttacaagttcccttaaaaatttacttccaatacaaacaacaaaaattttaagtttcccccccaacccaaattaaacatgaaaaagcttaacataccggaaacctttttaagtttttaacaagcttaaaaaaataaaagcttgcttaacacggaagcaaccggtaataaaaaacattatacccccacttaa

SEQ ID NO: 5851 - DNA, 305 bp, Gossypium hirsutum
  Clone ID: LIB3083-119-Q1-L1-B6
caagcattgcccaagtgtttgttgctgcttacaacaaacgacatcttaggcttcctgcagagggacaggaatttggagttttctatgatcctcctttaaaggaatacgtgttgtcaaagctacccctcacctaccagttcaggttcttaaacaaagccgcgataacaaccaagaatgatttagaagacgatggttcccctaaaaaaaggtggttgtgcagcatccaagatgtagaagaggtcaaatgccttgtcagaatcatccctatatgggcttctggtatcattagcttcaccgccatggca

SEQ ID NO: 5852 - DNA, 203 bp, Gossypium hirsutum
  Clone ID: LIB3083-119-Q1-L1-B7
gctcataaccattaacctgccggcaggtttgctttcaacccattgcattctataagaaggtgagggacaatgtactaaacgatgcactacaaagcatgtacatgtgcaaaacaactaggggcacacaacttaatatgattacgccttattcgaatgtgatcatcatggttcttatggatataggcaagcaccgatccatctta

SEQ ID NO: 5853 - DNA, 292 bp, Gossypium hirsutum
  Clone ID: LIB3083-119-Q1-L1-B8
gttgcagcttgtgctaagcactacgtaggagatggtggaacaaccaagggcataaatgagaacaacacagtgatcaactggcatgatttgcttagcattcatatgccaggctactacacttcgattatcaaaggtgtttcaacggtcatggtttcgtattctagttggaacggcgttaaaatgcatgctaatcgtgatttagtcactggtttcctcaagaacaaacttcgattcagaggcttcgtcatctcagattgggaaggcattgaccggatcacttatccacctcatg

SEQ ID NO: 5854 - DNA, 192 bp, Gossypium hirsutum
  Clone ID: LIB3083-119-Q1-L1-B9
aaaagcgaaaacccgtattccaaacagttccgttcaactgaaaaaatagattttaaaaatctaatcattaaaagcaaaatcttaggattcccaaagtccgggctttacaaaaagggtacatataacggcacgggcttacaactttgatctaaaatgactatggggccccgtgatatgcttatgcttggggcc

SEQ ID NO: 5855 - DNA, 294 bp, Gossypium hirsutum
  Clone ID: LIB3083-119-Q1-L1-C1
tcgagttttttttttttttttgtaacaaaagttagtctttgatcatacaattatcccagcaaacagcaaagcattccaatcactttcagcatttcaaatcccactaatttcgtacatacagcgatccatcatagagctaaagaaaacaaactagactagtactatttaagtcctttccttcccttcttctggattcaaacacggccccacttaaacaaaactgagaatcattgacaggcactcacacaaactgcaacaaacccttagattctacatgtttcctcaactggtctc

SEQ ID NO: 5856 - DNA, 295 bp, Gossypium hirsutum
  Clone ID: LIB3083-119-Q1-L1-C10
ggacagacaactcgtgacaatattttcagctcccaattattgtggcgaatttgataatgccggggccatgatgagtgttgatgaaagcctgatgtgctctttccaaattcttaagcctgcagataaaaggtccaggttcatttgagagatactactctgtctctgttcctacattgaactgctgaatgattcgagaagaaatgtccaaagattaaggatgctgatgctgatgctgattttgcagctccatgtgataatgaaatatgaccatatccttccctatatcaaagggtac

SEQ ID NO: 5857 - DNA, 292 bp, Gossypium hirsutum
  Clone ID: LIB3083-119-Q1-L1-C11
ccaaaataatggccctctgcaagccgtattctaggttggtcctagcactggccatggcattggtggcagctacggtgcctgtttatgggcagagaactatcaacactccatgcaccccatcggcacttaacatcttcactccttgtatgaacttgcttaccaatagcagtgccaatggtacttcgcccactgcagattgttgcaactcgcttaaaacgctcacatcgagcggcatggactggttgtgcctcattgtcaccgggagtgtcccgttccgtttacctatcaatag

SEQ ID NO: 5858 - DNA, 260 bp, Gossypium hirsutum
  Clone ID: LIB3083-119-Q1-L1-C12
ataacaagttctactagtttgacattgtttattcaaaattactagatagagtgctgtatacagcttgttaactgattacatcagggcctaattctagaagtgataatttgctctaaaaacagtttctaagcatataaattccttgaaaattaggcatgctttgaatcttatcaagcaacaacagggcctttttttttctgtatatgcttagcctcaatctatactggaagaaggtctttgacacccacaaaaacaaccct

SEQ ID NO: 5859 - DNA, 338 bp, Gossypium hirsutum
  Clone ID: LIB3083-119-Q1-L1-C2
tctaaaaccaggggaaccccccggcctgcagggttttttttttttttttttttaaattcgaatccaagttgaaagatgttacaccaaaaagatcacattttaggctttgcaatatttcatttgaatcataactgaagcacattaatttaaatgaagcatgtctggttcagcgtggctacccaacaattttgggcagaagcaatcacatgaataatcataaaaatgcagagagtttatatatatacatatctcttaggaaaacacattatgaaatacaacatcatcaaagttaaggtcttccaacagttgacaattctgctacattttatgcactgaac

SEQ ID NO: 5860 - DNA, 294 bp, Gossypium hirsutum
  Clone ID: LIB3083-119-Q1-L1-C3
tcgagtttttttttttttttttttgcgtagacacttaacatttgttattaatatattatctcttttcagaaaccaataaaatatctttcgggatgaaaacaggggtacctcaaaattcagtttctcacaaacagtttaggatcattaaggaaaacgagagcaccattacaatcactgctttcttctcaaagggcttgtccgccagatgacgatgaagacatcactgacagaacctctgtcacagaagccattacacttaaagcagctttcagaacttcctgagaacacccgggc

SEQ ID NO: 5861 - DNA, 296 bp, Gossypium hirsutum
  Clone ID: LIB3083-119-Q1-L1-C4
caaggcttttattgagccagatctcgaaacagcacatattaaaatcatcaacaagtttaatccgttcactggatttcagaatcctacttatattttgaagtctacaaggttggtgacactggatcaaattaaggaagttgtatctgaggaacacaaagaaactatagaggaaacatacgacatttatcttctaccccctggtgaagatcccgaagcatgtcagtcatatctgaggatgaggaacagggatggcaaatacaatctcatgtttgaggttagatgtttcatttttaagc

SEQ ID NO: 5862 - DNA, 354 bp, Gossypium hirsutum
  Clone ID: LIB3083-119-Q1-L1-C5
ggggggggggcgctctagaaactgagggtatccccggctcgtgcggaatttggacgagggaaatcgaagaaagagcaacaactttccatagtatggaaaccgaagcttcatgcggccaaaacaatttctaaatgagcgagacgctggcgacatttcttgcgtcgacgccattgttggaggaagcatggagggtgtgcaatatagcaaacataagcttcccaggggcttacctggtggaacggattggaagcgtggcttatattgcgttttccggccggcaaatgacttctgggtctgactagaaatgcatgtaattgttggctatgaccatagactaccgtatatcaaagggta

SEQ ID NO: 5863 - DNA, 290 bp, Gossypium hirsutum
  Clone ID: LIB3083-119-Q1-L1-C7
atttgaagtacactcgacagttccagcttaaagctttgttttcttttgggtgtctctctaaaaccctttcttcaatggcttacgaaggcatcctcttgggcatgggaaacccgcttcttgatatctctgctgttgttgatgaagacttcttaaagaagtatggcatcaagttgaacgatgccattctcgcagaggataagcacttgccgatgtatgaggagatgactaaaaagtatgaagtggagtatattgctggaggtgccactcaaaactctatcagagttgcccag

SEQ ID NO: 5864 - DNA, 296 bp, Gossypium hirsutum
  Clone ID: LIB3083-119-Q1-L1-C8
cccaaacatgagaagcctgaaatgcacaaggaggaaaaaaaaaaaccctgcaaacaacatgaagagtacgagaaagaaaaacctgagttccccaaacaggaaaagcctaaagagcacgagaaacacgaagtcgaatatccgaaaatacccgagtacaaggaaaaacaagatgaggataagaaacataaacatgaagagtaccacgagtcatacgaatcgaaggagcacgaagagtacgagaaagaaaaacccgagttccctaaatgggaaaaatctaaagagcacgagaaacacga

SEQ ID NO: 5865 - DNA, 293 bp, Gossypium hirsutum
  Clone ID: LIB3083-119-Q1-L1-C9
aatacatctctcatctgggttgtcgtttctatagctgaagaaactcttcaatggctgaaaagagcaaggttttgatcatcggaggaactggatatctgggaaagttcattgtggaagccagtgcaaaagagggtcatcccactttcgtttttgtaagggagtccaccgtctccgaccctgttaagggaaaacttgtcgacaacttcaagaacttaggggtccatttgttgttaggggatatgtacgaccatgagagtttggtcaaggcaataaagcaagttgatgtggtgatt

SEQ ID NO: 5866 - DNA, 93 bp, Gossypium hirsutum
  Clone ID: LIB3083-119-Q1-L1-D10
tttcgagcctttatgaagcttcactgcgggggttttcagtgtggtggccacactagctttttactctactattaatgatccaatgcagacgat

SEQ ID NO: 5867 - DNA, 281 bp, Gossypium hirsutum
  Clone ID: LIB3083-119-Q1-L1-D11
aaaaaaaaaaaaaaaaaaaaaagaaaaaaaaaaaaaaaaaaaaaaaaaaaaaaaaaaaaaaaaaaaaaaaaaaaaaaaaaaaaaaaaaaaaaaaaaaaaaaaaaaaaaaaaaaaaaaaaaatttttttttcttggccctctttttcttaaaaaaagttctaatttttttttttttaaccataatttttgttttttaagcctttaaacttgggggcaggcgctttaaactcccccttggcccctttcccatccggtttttgggcaattggttccaagtgggg

SEQ ID NO: 5868 - DNA, 273 bp, Gossypium hirsutum
  Clone ID: LIB3083-119-Q1-L1-D3
ctggaaaaacaaaactttatttcaggctttgatctaaacttgatttcacaagccattcatgcagggaaaacagacgtgtaagaattttatgataggaaatcatctcgtggaaatcttcattgcgcaccgctgactagaattcattgatttccactaagtttcaaataaatgcgtgcttgtgtgggactgtatgattgttttatagattatctaccgtcgacgctgttaacaagtgagaccaattcaacgttactggattcttcagctaccgtc

SEQ ID NO: 5869 - DNA, 335 bp, Gossypium hirsutum
  unsure (1)..(335): unsure at all n locations; Clone ID: LIB3083-119-Q1-L1-D4
cccccggcctggcaggttccaaataccccaatctttcttaanccatgtgtcacagtggacagcttgtnntctttgttaagctacatnncgcaattgcatttggatgaagatggttcncaatgcagaccattcgatctagggttcagtttttcaagatcacgactttgagtttagtcttttgcgtgtcggtggtgtttgggaatatttctttgaggtatttgccggttagtttcaatcaggctgtcggtgctacgacaccgtttttcactgcggttttcgcttacttgatgacattgaagagggaaggttggcttacttatattactctagtccct

SEQ ID NO: 5870 - DNA, 296 bp, Gossypium hirsutum
  Clone ID: LIB3083-119-Q1-L1-D5
ctttggagaggcaacactgccaatgttctcagatacttccccacacaggctttgaactttgccttcaaggattatttcaagaggatgttcaacttcaagaaggacagagatggctactggaaatggtttgcagggaacttggcatctggtggtgctgctggtgcttcatcacttctttttgtttactctctggattatgctcgtacacgtttggctaatgataacaaggctgctaaaaagggtggtcagaggcagtttaatggtttagttgatgtctacaggaagaccatccaatc

SEQ ID NO: 5871 - DNA, 293 bp, Gossypium hirsutum
  Clone ID: LIB3083-119-Q1-L1-D6
ccggggtcatttgcatttttcgggctaacgggccccattgggttttatgcatgtttttggttcacaaggcttatctactcatctgtcaagatcgattaacgtgtaaaaccggagatgcttttatcatatataatcatgattcttagattcgatcatgttttcagatgagataatcgctattgttgtcttaagttacaggtcaagggtaagaactaatcatgctttcagatataaacttttaatgctcattttggggctgagcctttattttttattaatttttttctttttta

SEQ ID NO: 5872 - DNA, 290 bp, Gossypium hirsutum
  Clone ID: LIB3083-119-Q1-L1-D7
acggaaaggagtggaagctaccaaaatcatcagactggtgcacgatgccttttccaaggagctcggtcctgtctctttaactgcccaaggtaaagttcctgtaccagatgggttaacgcttaatgagaaccttggtgatttggaaacgatatgcggtgatattgaactaccttcatcgaacacattttcttttggatatccttctgaggagaaggatgtgtcgtctttctccaaccttcagattaaagaagactcgggacaatcgaatgagtccacttctttgttagcgg

SEQ ID NO: 5873 - DNA, 294 bp, Gossypium hirsutum
  Clone ID: LIB3083-119-Q1-L1-D8
ccgccgtcaacatccactcccccgtcttcagcccctgaatcttcaccaacttcctctcccactacttctcccccagctcctctcgctggttctcccgctggctctccccctaccgctgattctcccacgaactccatcagcgagacaccaggcagctctcccacttctcctacgagtgcagccgcttggaacagagtcaccgtcgctggatctgccgttgcagtcgtttttgctgctttgttgatttagatctgactttcgggggaggacaggatttggatttgatgattttta

SEQ ID NO: 5874 - DNA, 292 bp, Gossypium hirsutum
  Clone ID: LIB3083-119-Q1-L1-D9
aaaaatttgtttctatcagcattgctttgcattgctgttgcaggagttttgggtcaagctcctagtaatcctcctacgtctacgccggcgccacccacaccaccggcttctactcctcctccgacgactcaagcaccgcctacaccaaccgccactccgccactggtttctactcctcctcccacttcatcaccgcccccagtgacagcttctccacccccagtttcaactcctccacccagttctcctcctcctgcaactccaccacctgcttctcctcctcctgcaactc

SEQ ID NO: 5875 - DNA, 294 bp, Gossypium hirsutum
  Clone ID: LIB3083-119-Q1-L1-E1
ccaaggaatacgttcgtgaaacttttgcttggatgcattattactggtaccttaccaacgatggcattgaatttttaaggacataccttaatctcccctctgagattgttcctgctactttgaagaagcaaactaggcccggtggtggtcgtcccatgggtccttctgatagccgcccacgtggtccgccacgctttggcgacggtgagaggcgattcggtgacagggatggataccgtggaggtccacgaggaggcggtgatttcggtgataagggtggtgcgcctgctgatt

SEQ ID NO: 5876 - DNA, 296 bp, Gossypium hirsutum
  Clone ID: LIB3083-119-Q1-L1-E10
ctcctgaggaacagcttctgaagacttatgcatgttacttgtccacctcggctggtcctgttatgggagttttatatttgtcaagtcaaaagcttgctttttgtagcgacaatcctctgtcttaccaagttggtgctcagactcaatggagctactataaggtggctattccattacatcaactaagggcagtgaatccatcaacaagcaaggcaaacccagctgagaaatacatccagataatatcagttgacaaccatgaattttggttcatgggctttgtacactatgacagt

SEQ ID NO: 5877 - DNA, 288 bp, Gossypium hirsutum
  Clone ID: LIB3083-119-Q1-L1-E11
atttgaactgccccggtggaagtacatattctgtcttggcaatttacgattgcatgtcttggataaagccaaaggttggcacagtttgtttcggagtagctgcaagccagggagcacttcttcttgctggtggagagaagggaatgcgttatgcgatgccaaatgcacgtattatgatacaccaaccgcaaagtggatgtgggggtcatgttgaagatgtcagacgtcaagtaaatgaagccgttcaatctcgttataaaattgacaaaatgtacgcggctttcaccg

SEQ ID NO: 5878 - DNA, 294 bp, Gossypium hirsutum
  Clone ID: LIB3083-119-Q1-L1-E12
cggtgactccgatctccagctggagcgtatcaatgtctactacaatgaagccagtggcggtaggtatgtccctcgcgctgttctcatggatcttgaacctggcactatggactccgtcagatccggtcttttcggccagatctttcgtcccgataactttgtcttcggtcagtctggtgctggcaacaactgggccaagggtcattataccgagggagctgagctcattgattctgttctagacgttgtcagaaaagaggcggagaattgtgattgtttgcagggttttcaagt

SEQ ID NO: 5879 - DNA, 274 bp, Gossypium hirsutum
  Clone ID: LIB3083-119-Q1-L1-E2
aacaaatgctaattttgtgcatatatatgaatgtgtagagccaggatcaattaatgcaataacagtagtatcatagagagaaaatgtacccgcaattacatcaggagaggacgcctcttcacgagctcgagtagcatatgatcttgcaggtgctctaacatctgatctaaccgctgaatctttgaatgcacccctattacttgcccccactcctgggtttctctgcggtctacctctggtaggagcattacctgatctcgcactcgttatttct

SEQ ID NO: 5880 - DNA, 294 bp, Gossypium hirsutum
  Clone ID: LIB3083-119-Q1-L1-E3
gcagtttggtatagccaggaaagttatcatcaccaaggattcaacccaaataattgctgatgccgcttcgaaggatgaaatacaagctagggtgcaacaattaaagaaagaactagccgagacagattctgtttacgacacagaaaaactggcagaaaggattgccaaactatctggtggtgttgcagtcattaaggttggggctgcaactgagactgaactcgaggatcgcaagctacgtattgaagatgccaagaatgctacctttgctgccatagaggaaggtattgtacc

SEQ ID NO: 5881 - DNA, 297 bp, Gossypium hirsutum
  Clone ID: LIB3083-119-Q1-L1-E4
ccgtgccagaaatagtgaaaatttacaatgatccaaccaaaagagggataaataatgtaaaagttactgcatccgatgatctaactcgtgaaggactacaatctaaattccgtgatttagtgaaccaactttatgacaatggcaatgacaaagtgaaatgcaaagatttcccaggcttggaacaggcattgaagaatgctaggggggaaatcccagagtacctcgaatctattgccatccaaatcgaaaaagatcgtggagaaactactgaatttgttctgatcaacattcaaattc

SEQ ID NO: 5882 - DNA, 298 bp, Gossypium hirsutum
  Clone ID: LIB3083-119-Q1-L1-E5
gtttcaagctcaaattctttcgtgttataccatcttttcaattttgtcgatcaaaaaaaccttcccatttaccggagactccaggtccggtgacccaccggctatctccggtgaatcctaaagcattagatatcttttatccgaacctccctgcaccgccgccgtcgacaccggactactcttttttcaaatgccatttgtcaccaaagatagcgacagttggctgcggttgccgagcaagatcatcacacactcaatacttaccctcagtggacgttagttttgagtcacctgatta

SEQ ID NO: 5883 - DNA, 292 bp, Gossypium hirsutum
  Clone ID: LIB3083-119-Q1-L1-E6
atcaagtgtgtcacggtcggtgatggagctgtggggaaaacttgtatgctcatttcatataccagcaatactttcccaacggattatgttccaacagtatttgataactttagtgccaatgtggtggtggatggcagcacagtgaaccttggcctatgggacactgccgggcaagaagattataataggctaaggccactgagttatagaggagctgatgtgtttttgttggccttttctcttataagcaaggccagttatgaaaacatctacaaaaagtggatcccagagc

SEQ ID NO: 5884 - DNA, 292 bp, Gossypium hirsutum
  Clone ID: LIB3083-119-Q1-L1-E7
aaagactgggtggttccagatgaggtggtggagatagagaaggagaaaccgattaatgttgctaagaaaattgaggataaggacttcgagtcgaccacaatggataagtaagcaacgtggtacgtcaggcattaaagattggggtggtgtgaggatcggattaaagtccagtgttcttttggatgtggaggtggatgatgaatgtgcgcatctggcgcaatttgtgtagggattgggagatgatagaccggtggggatatcaccgtaaagcatgggcagcaaaagtgtaact

SEQ ID NO: 5885 - DNA, 294 bp, Gossypium hirsutum
  Clone ID: LIB3083-119-Q1-L1-E8
aacctctcttcattctctatttcctccgtgaaagctgctgttgtgctgatccaagtgataaaccagtgtaaagatgagcgttgttgggtttgattttggcaatgagagctgcattgttgctgttgcaaggcagagagggattgatgtagtgcttaatgatgaatcaaagcgtgaaactccggctattgtgtgctttggggagaagcagagatttattggtactgcaggggcggcgtcttcaatgatgaaccctaaaaattcaatttctcagattaaacggttgattggccgtca

SEQ ID NO: 5886 - DNA, 295 bp, Gossypium hirsutum
  Clone ID: LIB3083-119-Q1-L1-E9
tctctctctccctttctttggtttccaagatataggaggatatagcacacagcagctatgtcctctcaatcataagcagaaaattagaaaaagagaaatagaaaaaaagcgtgtaagaattaaattcctttgccaaacatcaagaaaaataaagtagggggaactggaaacgtgctctaaaggagacaagttttgctttacttgttttttttttgtatgtgtaaatctcgctagaatttcgtgtggtgggggagtttgacaagtggggaagacggtggaaccataacccagcttt

SEQ ID NO: 5887 - DNA, 53 bp, Gossypium hirsutum
  Clone ID: LIB3083-119-Q1-L1-F1
aaaaaaaaaaaaaaaaaaaaagaaaaaaaaaaaaaaaaaaaaaaaaaaaaaaa

SEQ ID NO: 5888 - DNA, 293 bp, Gossypium hirsutum
  Clone ID: LIB3083-119-Q1-L1-F10
aaatatctcaagtgtgttataaaagaaaccttaagactgcaccctgttgtacctttattgattccaagagaaagtagcaagaattgtgtggttaatggatttgaaatacctgcaaagaccagagtcattgtgaatgcatgggcaatcgggagagatcctaatcattgggttgagcctgaaaagtttgagcctgaaaggtttgtcaacagttcagttgatttcatggggacaaatttcgagctcatcccatttggggcaggaaggaggatatgtccaggcatattattcgcact

SEQ ID NO: 5889 - DNA, 274 bp, Gossypium hirsutum
  Clone ID: LIB3083-119-Q1-L1-F12
atgataacaaatgactggcctttatatataaacatatattgcaaacttggaagttaataaaacaaaaagcttgtgtgaaaccgatgctgaaaggttatgatcatggagttgcataataatgacaatcaaaaagcacacatcttcaaacaatttggccaaaaacactgaacaaatacaagatgaacaaaacctaattaattagaatcttccatcctcattttcattagacaacaataagacaagttgaacataaaaactgtgaagtctcaacgcc

SEQ ID NO: 5890 - DNA, 296 bp, Gossypium hirsutum
  Clone ID: LIB3083-119-Q1-L1-F2
gtatgaacctccaaaaaaaacctccaatgtatgaacctaagccaccgaagccaccggtttatacacctccaaagaaagaaaaaccagaacccaagccaccaatgtatcaacctcccaacaacccaccaatatatgagccaaaaccacctaagccaccagtttatgcaccaccaaaggaagaaaagccaaaacctaaaccaccagtttatgagcctccggcacatgagccaccatacggtcactatccaggacatccacctttggggaagcctcaatagaatgctcccatcgactag

SEQ ID NO: 5891 - DNA, 296 bp, Gossypium hirsutum
  Clone ID: LIB3083-119-Q1-L1-F3
ctgcaacttggtaatattgaccgttgccgaaaactgtatgagaagtatctggagtgggcacctgagaactgctatgcatggagcaaatatgctgagttagaaagatcattagctgaaacagagcgggcaagagctatttttgagcttgccatcacacaaccagctttggacatgccggagttattgtggaaggcatacatagattttgaaatttctgaaggtgaatatgaacgaactagaggattgtacgagagactattagatcgtacaaagcacttgaaggtgtggattagtta

SEQ ID NO: 5892 - DNA, 298 bp, Gossypium hirsutum
  Clone ID: LIB3083-119-Q1-L1-F4
tgtcactgcaggaagctagacggtttgagttgagggagttgtctttggcgaccaaaaatttcagtgatagaaacctgatcggggaagggaaatttggtgaggtatataaaggtttgcttcaagatggaatgttggttgctatcaaaaagcgagctggagctcctagtcaggaattcattgatgaggcatgctatctttcatctattcagcatcggaatcttgtcactcttttgggctactgccaggaaaataatcaacaatttcttgtttacgaatatatacccaatggaagcgtttc

SEQ ID NO: 5893 - DNA, 301 bp, Gossypium hirsutum
  Clone ID: LIB3083-119-Q1-L1-F5
gttccccaaattggaaaagcctaaagagcacgagaaacacaaagtcgaatatccgaaaatacccgagtacaaggaaaaccaagatgagggtaaggaacataaacatgaagagtaccacgaatcacgcgaatcgaaggagcacgaagagtacgagaaagaaaaacccgagttccccaaattggaaaagcctaaagagcacgagaaacacgaagtcgaatatccggaaatacccgagtacaaggaaaagcaagatgagggtaaggaacataaacatgaggagtgccacgagtcacacgaatcg

SEQ ID NO: 5894 - DNA, 184 bp, Gossypium hirsutum
  Clone ID: LIB3083-119-Q1-L1-F6
acccaggcgaaatcgggggtttttttcgttaatttatgaatggcgggggtaaccccataaatgttgggggattcaaacgacaacccaaaccacgcctacttaccgggttcggacacacaaagtacaaatttcggatgggttcacttttggaattgcgttcgcatcgagacaatcattattcttc

SEQ ID NO: 5895 - DNA, 293 bp, Gossypium hirsutum
  Clone ID: LIB3083-119-Q1-L1-F7
atttcttgagagaattaaagaggatttcaccaagagatatggcggaggaaaagctgcatctgcccctgcaaacagcctgagcaaggagtttgggccaaaattaaaggagcatatgcagtattgcattgatcatcctgaggagatcagtaagattgccaaagtgaaagctcaagtttcagaagttaaaggagttatgatggaaaacattgagaaggttctggaccgtggtgagagaattgagcttctggtggatagaacagaaaatcttcgttctcaggcacaagattttcggc

SEQ ID NO: 5896 - DNA, 295 bp, Gossypium hirsutum
  Clone ID: LIB3083-119-Q1-L1-F8
gttctcagtcatggagattgggtgccactcttagcacaggtgaatgaacactcaatgttgtcaatgctgagaaatgcaacctgcacattatcaaatttttgcaggggcacgccccagcctacatttgatcaggtaaggcctgcccttcctgcgcttgaacgtctcattcattcaaatgatgaggaagttctcactgatgcctgttgggctctatcgtacctttctgatggtacaaatgacaaaattcaagctgtgattgaggcaggagtttgtccacgacttgttgagctcctac

SEQ ID NO: 5897 - DNA, 294 bp, Gossypium hirsutum
  Clone ID: LIB3083-119-Q1-L1-F9
ctgaattccaaaccaacttggttccctacccaagaatccacttcatgctttcctcgtatgctccagtcatctctgctgagaaggcttaccacgagcagctctcagttgctgaaatcaccaatagtgcctttgagccctcatctatgatggctaagtgcgatccacgccatggaaagtacatggcttgctgtttgatgtaccgtggtgatgttgttcccaaggacgtcaatgctgcagtcgcctccattaagaccaagcgcaccattcagcaacactggtggagttagaaatcat

SEQ ID NO: 5898 - DNA, 293 bp, Gossypium hirsutum
  Clone ID: LIB3083-119-Q1-L1-G1
atgatttgaattttttttcaatgttccttttactttccttcaaatctctccaatctccaccgctacttccgccacttcggccaccgccgcgaatttccgatttataatgtgtttgtattaattgttacctgttacgatttgtgaataattgagttagggttttcgatttatcttgatttatttgtaaaggaaaagggaaaaaggaaaagaaaataaaagatggacaagtacgagctggtgaaagacataggatctgggaacttcggcgtagcgaggttgatgcgtaacaaaga

SEQ ID NO: 5899 - DNA, 309 bp, Gossypium hirsutum
  Clone ID: LIB3083-119-Q1-L1-G10
ctcgtgccgcggaaacactggtggtcagcttgctgtttatcaaatcgatcaagttcttcaaccattgcaaatatttgcacctaggcctccagctcccgcaccggcaccggcaaagtcgaagaataagaaggctaccactgttgctgatagccccgatgttaccccagctgataactccaaagcggccaccttgcaaaatgttggtttgtttggagttgctgctctagttattgcactttctttgtgaccatgaaaatggagaaaagaagaagacagtgattttgatggtggtgatcaagatggcgagtg

SEQ ID NO: 5900 - DNA, 273 bp, Gossypium hirsutum
  Clone ID: LIB3083-119-Q1-L1-G11
gagactgatgttctttttggggggaattaaatctagcaggctcttcaaccattgcaaatatttgcacctaggcctccagctgccagcaccgacaccggcaaagcctaagaataagacggctaccactgctgctgatagccccgatgtcaccccaacagataactccgacgctggcaccttgcaaaacgtggacatgaaagaagcaacccctctagttaaagcgctcccttcgccaccatgacaatggataaacgaagaatacacaggttttga

SEQ ID NO: 5901 - DNA, 295 bp, Gossypium hirsutum
  Clone ID: LIB3083-119-Q1-L1-G12
cttaaatctaggcggcatttaaatgtccgaggaaaaagtgctacactgccttctattacagaaaaggactgggatgacataaaatttggtgtagacaataaagtcgacttttatgctgtttcttttgttaaagatgcagaagtggttcatgagttgaagaattatcttcagagttgcgatgcagatattcatgttattgttaaaattgaaagtgcagattctattccaaatttgcattcaattataacagcatctgatggggcaatggttgcaggaggagatcttggtgcatagc

SEQ ID NO: 5902 - DNA, 295 bp, Gossypium hirsutum
  Clone ID: LIB3083-119-Q1-L1-G2
cttccacgttgactgcatcgacatgtggttttatagtcactctaactgtccaatgtgtagagctccgatccaggctgttattccggtcaacccaccgaaaacattagagcagaccgccgctacagtatctgaaacagccctaccattgcctcctggtgacgatattgaagcgaacagctttttccctccttcttgctcgtcgtcttcgtcgtcgtcattggagatggaaagttgccccatgaaacgactagagctagtgggactgggaactgttgtggaggtcaccatcggaact

SEQ ID NO: 5903 - DNA, 58 bp, Gossypium hirsutum
  Clone ID: LIB3083-119-Q1-L1-G3
cttgaaagtcaccacacccatgttcctatataataaaatatagatgtctcgtattgtg

SEQ ID NO: 5904 - DNA, 301 bp, Gossypium hirsutum
  Clone ID: LIB3083-119-Q1-L1-G4
aattagttcccgttttatgttaaatgcatcaaaagaaatccgggaaacatcaagagatcggaaaagcaagcagcgactgcatctcttccgatttcgaccattccacttctttactaatcccttccttggatgatcatcgattcaatcgaaacaacctacaaaagaatccaaatgttcccactcaaaacaggtctcatctcatcatccaaatcccatcctcaacgaacccatcaccaccaccaccaccaccatcgacaacgacaacccatcatcaggaaagacctaatgacttttctccaac

SEQ ID NO: 5905 - DNA, 301 bp, Gossypium hirsutum
  Clone ID: LIB3083-119-Q1-L1-G5
aaaacagatgtcactgaaggtatgaacagaggttcacatactcctgagaagtcaccagctattgttggacattctaccaaaggaacagataaaaaagcatcgcctactggttctaatgatatgatggaaacttttaatgtagtaaaggccgagaaggatgttgaggctgatgttcgtagtcaagccagtgacaaagagaagcgaaaacctgattgggaaatggtccctgcccagaaagttgagcatatggaggagaatttagaaggtagtgagtgtcctgaaccatactgtggactatctc

SEQ ID NO: 5906 - DNA, 294 bp, Gossypium hirsutum
  Clone ID: LIB3083-119-Q1-L1-G7
tcgagtttttttttttttttttttttatttacaaattgaaagcgacattatccaataacaaaaaaatcttacagacaagtacaatttcgactttagcttgtagttagttagtcaagtaaaagtgttacatgtagtcaaagttgtatggaaatttgccaaaaagccctcttcttttaaaaaaatttcatcctcccagataaaatggtttcatgagcttttatctagtttaccaactttgggtcggtatggagcagtagccaaactagtttttagggttggaccctgagagaattc

SEQ ID NO: 5907 - DNA, 296 bp, Gossypium hirsutum
  Clone ID: LIB3083-119-Q1-L1-G8
aaaaaacacaccctaaagagacaatgagaaagctgctagcctttgcctttcttttcttcttcttttgggataaaacattagctcaaatagctccggcgccgccgttaaaggtggacaacatcacttccatcctcgaaaaaggtggccaattcaccactttcatcaagctattgaaagccacacaggtggctgatcaactaaacaaccagctaagcacaccggaccctaacgacgggataacggtgtttgcaccgagtgacaacgcgttctccggactcaaacccgggacgttaaac

SEQ ID NO: 5908 - DNA, 295 bp, Gossypium hirsutum
  Clone ID: LIB3083-119-Q1-L1-G9
gttgctcctgctacaaggtctgcaatggctttaatggggtcatctagaaatgaaaaccaagaagtgaataccagcatgagaactgccgagaccatgctgcggttggtgcctatggctttaggggttgctgcacttgttgtcatgctcaaaaactcacagtccaatgactttggctccgtttcatactcagatcttggtgctttcaggtacttggtgcatgctaatggtatttgtgcaggctattcccttctttcagctattatagcagctgtgcctagtccttctactatgccta

SEQ ID NO: 5909 - DNA, 274 bp, Gossypium hirsutum
  Clone ID: LIB3083-119-Q1-L1-H1
gagggaaaaaaaaaaaaccttttgccagttgtagctgcacccacaatattgatacaagatgatatagctgtataatacaagcgtatacctttacgaatcaaagcctctccatctcttcaggtaattcatggatgtctttgtgcaccaggcggtgctgttggcctcggcaattgagcattaacaaagttaggggcctccacgtatgggctctgtggtgccaatggagaaggagatagttcttcccgggatgaggactttgttgatacatttggag

SEQ ID NO: 5910 - DNA, 301 bp, Gossypium hirsutum
  Clone ID: LIB3083-119-Q1-L1-H10
aaaagaagcagcttgaatctgtttttttgaagatggagggtaaagaagaagatgttaagctaggagcaaacaagttctcagagagacaacctattgggacatcagcccagacagacaaggactacaaggagccaccagcagcacccttctttgagcctggtgaactcaaatcatggtctttttacagagctggtattgccgagtttgtagccaccttcttgttcctttacatcaccgtcttgactgtcatgggtgtgtctcagtctaaaaccaaatgtgcaaccgttggtattcaaggcat

SEQ ID NO: 5911 - DNA, 297 bp, Gossypium hirsutum
  Clone ID: LIB3083-119-Q1-L1-H11
gttggttcaatttaatcataggagactttttacaaacaagataaatcccttttagaatcacagcaaatcaacagtagtggcaaaaagggaaaataaaataataagaaaggtttgtaaaacaccatttagcactccacgccacattgtttaagaactggacctgtttgtttgggcaagaagggatcgatccgtacccaaaccagtgagaaaatcgatgccaaaagtatggaccaaagcacaacaatggtgggcgtcttgttttgtctccccatcaaacctttgaggaatgggtaaaga

SEQ ID NO: 5912 - DNA, 274 bp, Gossypium hirsutum
  Clone ID: LIB3083-119-Q1-L1-H12
ccccatcgctcctactgttttcatctgcttcaagtcatggcaggtttggcaccggaaggatcccaatttgatgctcgccaatatgatcagaaaatgactgagttgctccaaactgatggagatgattttttcacgagttatgatgaagtttatgacagttttgatgcaatgggacttcaagagaatcttctgaggggtatctatgcgtatggttttgagaagccttctgcaattcaacaacgaggtattgttccattttgcaagggtcttgatg

SEQ ID NO: 5913 - DNA, 297 bp, Gossypium hirsutum
  Clone ID: LIB3083-119-Q1-L1-H2
cgcttctttggagaagttccttcaggaaaggatcaaggttggtggcaaagctggtgctctaggtgactccgtcactgtcacccgcgacaagacccgtatcacggttacctctgactccaacttctctaagcggtaccttaaatacttgactaagaagtacttgaagaagcacaatgtccgggattggcttcgggtgattgcttccaacaaggaccgtaatgtttatgaactccgctacttcaatattgctgagaatgaaggggaagaggaagaatgagcaatcagttcagttacttt

SEQ ID NO: 5914 - DNA, 298 bp, Gossypium hirsutum
  Clone ID: LIB3083-119-Q1-L1-H3
gcaaagttgaggatgttgatgaggagaaggagaaggaagagaagaaaaagaagaagattaaggaggtgtcacatgagtggtcattggttaacaagcagaagcccatttggatgaggaagccagaggaaattaccaaggaggaatatgctgctttctacaagagtcttacgaatgactgggaagagcatttggctgtcaagcacttttcagttgaggggcagcttgagttcaaggctatcctctttgttcctaagagggctccttttgacctctttgacacaaggaaaaagccaaacaa

SEQ ID NO: 5915 - DNA, 301 bp, Gossypium hirsutum
  Clone ID: LIB3083-119-Q1-L1-H4
gaaccctaatgaccctgaggagaatcctgaggccttcatgtatacgaggggaggcccggaaagcaactacgatggccggtccgtgccagtcacggccgataaacaccatcggaatgctgctaataaagatggtccttcttatgatcatcaaaagagcgcaagaaggcaacgggacacagcactggaatccgaaaacaacaccggatcggaccgttcgattctgcattcgagtcatcgacgtcgaaactcgggtcaaaagaatagtcggcctgggggaagtgccttctctgcatctgtctca

SEQ ID NO: 5916 - DNA, 301 bp, Gossypium hirsutum
  Clone ID: LIB3083-119-Q1-L1-H5
gaaaatccaacagccacaggatgaatactttcgtggtcaaggaaacttcttcgaggactccagcatgcccaataaccatcagatgtttccacaaggggaaggtcaatttgaccggttcaagggcctgaattctctgtttgagaccgaacataacaacaacaacagcttcccgctgatgttcgggtttccattcgatttgtctactttcgattacaaggaagatcttcaaacagttgggatggacaccatcccaaggcaggatgtttcaatctggttccagtaagactgtaacgcctgtcgg

SEQ ID NO: 5917 - DNA, 271 bp, Gossypium hirsutum
  Clone ID: LIB3083-119-Q1-L1-H6
ctccacaagatcatcatccagggtggatctgtcatcgaacgagtgcaccgtgtgtttatctgagctagaagaaggtgagaaagtgaggaaactgaaatgtaaacacactttccacaaggattgcctcgatagatggctccaacagtattgggcaacttgcccactttgtaggaccaaagtgttgccaaataaggttggggttaatattcacaggctccaaaatcagtgtagagttgatggaagtgatgaagagaagatttttttattatcc

SEQ ID NO: 5918 - DNA, 292 bp, Gossypium hirsutum
  Clone ID: LIB3083-119-Q1-L1-H7
gaaaaatcttatcttgtgatcatccacttggttgagggtgtatatgatattcctttcctctttctatctttctgcctgctgctaccgattttaaactaatctaaccacaaattcttcaccatcgtttttgtttggaaccctgcacctgcagcttatattgctcaggtgcgtttccaaacatactggactggttttgttttcgacttttcttgatccccacctacatgaattctatttgatcaataaccttcattatcggtgatagatttgtggtcataataaaagacaatgc

SEQ ID NO: 5919 - DNA, 271 bp, Gossypium hirsutum
  Clone ID: LIB3083-119-Q1-L1-H8
aatcccaacacgaaatgaatatctcatttctaaattgtaaccatagaaccttgaattatgccctcaatcagttcatacaaacagcacacttttgataattataggtttttactagaatttgttgttatatcgggcagctaacaatcacatcatgtgcttacatcggtttccttcttttccatagtccccgcaccttgctccgcctgcttagcatttccatctgccttgttcatgtcttgctcagatggcttcgtcacttcttgctcttcat

SEQ ID NO: 5920 - DNA, 293 bp, Gossypium hirsutum
  Clone ID: LIB3083-119-Q1-L1-H9
ctcatgaagagttgagtaaaatttagattattttaccaaacccccaacttccacaacagttttcttcaattagatctaaatctttttctctttggtgatctaatctttggctgaaaattttgtgaagatgattgaggttttcgaaggttatgaacgacagtactgcgaactctctgccaatctttcccgaaaatgcaattctgcttctgctattacagattcagaacagaagaaacagaagttttcggagatcaattctgggatcgatgaggctgatgtcctgattcggaaaa

SEQ ID NO: 5921 - DNA, 388 bp, Gossypium hirsutum
  Clone ID: LIB3083-120-Q1-L1-A1
cagcaatggaggaattttccttccaaggcagagcaaaaggagaaggatgagtgaaacttactacttcatacagaagttagtataacaatcatagtagttattataattatgtaagttgctgtatgttagcagcattttggtggagtaatactaaagataaccgggaactttgtttatttgggggttaacaaaatccccatccccaacataaagtttaccattggatttctctcgcttgtattgaattgtattttggtgggttatatataccttcccttggggggtatataagagaagcgcacccaaagagaactctgtattatataaataataaagggagggatttttattggttttctttaaaaaaaaaaaaaaaaaacttcggggg

SEQ ID NO: 5922 - DNA, 276 bp, Gossypium hirsutum
  Clone ID: LIB3083-120-Q1-L1-A10
gagttgtcggatgtttgcgctagtatcttgactttgttggactcgaatctgatcccatctgctgctgcgagtgaatcgaaggttttctatttgaagatgaaaggggattatcatcggtatttaacagagtttaaggttggtgatgagaagaaagctgctgctgaagatactatgctgtcttacaaggctgctcaagatatcgcactgacggatctagcaccaacgcacccgatcaggctgggacttgcgctgaattactcggtgttttactatgag

SEQ ID NO: 5923 - DNA, 335 bp, Gossypium hirsutum
  Clone ID: LIB3083-120-Q1-L1-A11
gggaattttcttgtcataattttctgaggaattcatcgatggcaaccaaagtgtatattgtatactattccatgtatggacatgtggaaaaactagcagaggagataaagaaaggggcggcatctgttgaaggtgttgaagcgaaactatggcaggtccctgagactctgtcagatgagattcttggaaagatgagtgcaccaccaaaaagtgatgtaccgatcattacaccacatgaccttcctgaggctgatgggtttatttttggcttcccaacaagatttggcatgatgtcttgccaattcaaagcatttatggatgcaactgatggtcta

SEQ ID NO: 5924 - DNA, 104 bp, Gossypium hirsutum
  Clone ID: LIB3083-120-Q1-L1-A12
cggagtcatattttgcaacattgtttatgagacttctaatgtgctttaaataactgttgttgttcttaaagacactcatattgagatcacggggtatatttctc

SEQ ID NO: 5925 - DNA, 209 bp, Gossypium hirsutum
  Clone ID: LIB3083-120-Q1-L1-A2
gaaaaatggttctgctagagaaactttgggatgatgtaggggccggtcctcaaccggaacgtggcctttgccggctgaggaagatcaccaccaccccacccttgtccaccaaagatgaggcttcatcaatggcgatgccgacgagtccgacgacacctgggacaccatcgacgccggtgtcggctcgtaaggacaacgtgtggaggagc

SEQ ID NO: 5926 - DNA, 80 bp, Gossypium hirsutum
  Clone ID: LIB3083-120-Q1-L1-A3
cccctatcccaccgccgacaattagagtcagagtcaaatacaagtcaatctatcatgaaataacatcattctaaactaca

SEQ ID NO: 5927 - DNA, 261 bp, Gossypium hirsutum
  Clone ID: LIB3083-120-Q1-L1-A4
gagacaagatggatacatccaacattcataaaaatggtaataatttttaatattatacatctatagtagaacaaggcaggtagtgatatagatcgtcaacattgtaccaaagatacttttagagtatatcgaatcagtataactatccttcttctgacacagcaatgcaatttcaaacagtatatcaatgtgaagtgctagataatttcttttttcttcttgggtggcgatgtataaccaagtatcatgcaatagaaaatt

SEQ ID NO: 5928 - DNA, 237 bp, Gossypium hirsutum
  Clone ID: LIB3083-120-Q1-L1-A5
gattaaacttcccattcttcccggctcgcaaactttcaaaggaagggttttgatgtcttatacaaaggtgcttacattcctttcttaagccaataccagccttaaattcttgatcttattgagcatgcttagacacaacccaaccttaccattggtgtcttggtctctattggggggaatattctcacgaatttcttcaaactcattttttgtggggagaaaccacccatatttgag

SEQ ID NO: 5929 - DNA, 60 bp, Gossypium hirsutum
  Clone ID: LIB3083-120-Q1-L1-A6
cgtgaacctgctgtatttgttccacatatgcccactcaaaagcccgggcttggtgataca

SEQ ID NO: 5930 - DNA, 302 bp, Gossypium hirsutum
  Clone ID: LIB3083-120-Q1-L1-A7
aaacacagaactaataccaggctgtttaaactgatggttgatagagttttaacatttgaacctatcacactccaaggcaaagttctaaaggctctcctcaagcaactaaagatacacaagatataagaggcgttgtcattgcgtgtgcgtccaaccatagaacaaacttatatattgcgaggtatactagacaaaagcagcactgatttcaggcaataccctttttctgtaatttctcaaaacaaaatgtgtaaacaaaacatattgaactaactaaattgtaaactcttttgtcaaaagta

SEQ ID NO: 5931 - DNA, 242 bp, Gossypium hirsutum
  Clone ID: LIB3083-120-Q1-L1-A9
gaaccaaagaagtttggacttcttgcaaattggcagagggagtataccatggaggatttactgacacagctgaaaaaggagatggcagcaccacataaccgaaagctggttcaacctcccgagggtacctacttctagctctcaagattatcggacatcctggatctaagtgcatttctggtatgcaatatatagtttgtaatgctttgtgatctttaaagaaaatagtggggaatgcccca

SEQ ID NO: 5932 - DNA, 292 bp, Gossypium hirsutum
  Clone ID: LIB3083-120-Q1-L1-B1
cagaacctttttaagaaaccaaaaatcaaacattttcaaaggagggagtgaaaaaaggattagcccaaaggaccattttgattcttcaccggcaccgctcattgaactggcttagatcaaaccttggtctttttaccgaactctcatcgcccaatataatgctactctcctttttctataccataccataaccaccggcattgggcacaagaaacaacacgaagcatgccatgggggtggtcctttgggtattgcttgggccttttgtggcctgaatttcattcctggttac

SEQ ID NO: 5933 - DNA, 318 bp, Gossypium hirsutum
  Clone ID: LIB3083-120-Q1-L1-B10
cttggatcgtatccgaaagcttgctgataactgtactgggctccaaggcttcttggttttcaatgctgttggtggtggtactggttctggtcttggatctcttctcttggagcgtctctctgttgactatggaaagaagtcgaagcttggtttcaccgtctatccttcacctcaggtttctacatcagttgtagagccttacaacagtgtgctgtccactcattcactccttgagcacactgatgtcgctgttcttctggataacgaagcaatatatgacatctgcaggcgttcttttgacattgaacgacccactta

SEQ ID NO: 5934 - DNA, 217 bp, Gossypium hirsutum
  Clone ID: LIB3083-120-Q1-L1-B11
aaacaaacaacaagcacgctaagctatttacattcatggtgcaatgtccagtctcaaatccgagctcggagaatatgtatggttacagaaggcaggcttaaacaaaagaaaatggaaaaccagatgaagcttgaggctaaactccatgaactggaggtagaatggtgtgctgggtctgaaactattgaggaaattctttccagaattcaacagaaag

SEQ ID NO: 5935 - DNA, 283 bp, Gossypium hirsutum
  Clone ID: LIB3083-120-Q1-L1-B12
ggtttggtgccacacctgtgatgtgccagaagaacctaatatgggttgtcacaccgatgccaggtgtggttgatcgctattctactttgggggaggttgttcaaggccacactttggtcaatgcatctgggaagaatggccttccaagagattggcttgtcaccaataatgaaaccggtggaatttttacaccagccaccagggtgttggtggtggtgaattaaccggcttgaaaggtattttaaattcccaaagagggttgggggggaataaaacccttttt

SEQ ID NO: 5936 - DNA, 138 bp, Gossypium hirsutum
  Clone ID: LIB3083-120-Q1-L1-B3
aaacataatgggggggcctaaacccggattagacccaacatttgtccacccaagaagtggtacctttttttttattttttaaaacgggggaaataaaggggaaaatggacggcaaaggttccaaccggaaggggaaaa

SEQ ID NO: 5937 - DNA, 264 bp, Gossypium hirsutum
  Clone ID: LIB3083-120-Q1-L1-B4
acattaaatctcaacaaccagatacccccaaccgggaaaggtcctggttctttcaaaggaaccaaattccccaaaattttccttcccccaacccaattttgaaagaggaaagggagatccccaaaccggggggttcatggatttggatgaaaaccctttggaccagggtctgaaacacgttgattccaggaccctaacaatggcctcccgcgttaggaagctggggctcaaaactggtagagaccagcgtttttgggaggtgat

SEQ ID NO: 5938 - DNA, 143 bp, Gossypium hirsutum
  Clone ID: LIB3083-120-Q1-L1-B5
cagcctgtttttaacttttaaaacccccgaaccatctggcccaattgtatttccaatgccccaaagagggttgttcttacaaccaatttgggccccaaacttttcaccccccttaacttttttaagacccccagccccaaaaa

SEQ ID NO: 5939 - DNA, 132 bp, Gossypium hirsutum
  Clone ID: LIB3083-120-Q1-L1-B6
ctcaaggatttcgccccgggctggggttaaactttttaaaccccgaaccaactggtccaatggaggtggcaattgcccaggaggggtggttttttaaaacaatattggaccccaaaactttttccccccttt

SEQ ID NO: 5940 - DNA, 325 bp, Gossypium hirsutum
  Clone ID: LIB3083-120-Q1-L1-B7
aaaaaaaaccaaacaaacaaacaaaagaaggtttgattttgatttttcactatcaatcatatatttcatttcgtggattccccaacttattgctacttctacccttaatttcacctcccgatatgtctctgttttgttttacatcttcagctctaaattggaagtgatagagtaaatacacagatattatctcttgtttatttcttgggttttccttcattttcgatactgcgttgtgcagatacttggtctgcttcaaacatgcatgctagacatagaaccgctgggaatgactatagatctaattctaatgcgatggggggtt

SEQ ID NO: 5941 - DNA, 301 bp, Gossypium hirsutum
  Clone ID: LIB3083-120-Q1-L1-B8
gttctctatttggaggagtcgccggctatctttcaggaagagaggctatcgattctagagcagctcaaaatattggaagagaaaatggtttcattgaatgatgaggagttacattttgaggatgtaaaatcaattgaattattgtatgaagagaatggcaatggcttctatggaagttctgatttcacctatgaaacaaatggggttaccaatggtcatttcgagggagcaaatgggaaacatcatcaggagaaaaagctgatggcttgcaatgcaaagagacttctcccactttttgatg

SEQ ID NO: 5942 - DNA, 232 bp, Gossypium hirsutum
  Clone ID: LIB3083-120-Q1-L1-B9
cttggatggagaattcattaaagtagagaaggaagcactagatatgaaggacggttcaaatgtcgctaagccctcacccaaccagggcgatgagtcaactaccatcgaaagaagcttaagcaattcaagtagagaactacttgaagcccaagaaaagatgaaagaactcgagcttgaattggaaagagtgaccggagcattaaaggattttgaatcagaaaatagcagactg

SEQ ID NO: 5943 - DNA, 160 bp, Gossypium hirsutum
  Clone ID: LIB3083-120-Q1-L1-C1
cagcccctatcttaaaacaaaaatgggtgaaggttttaaccggtggatgccccgtaaaaatgggtcatttgcgacaaccacactatttggagggcatcaactggctttggaatatctcgtgccgaatcttttggagctatatggtggcattgaattcact

SEQ ID NO: 5944 - DNA, 268 bp, Gossypium hirsutum
  Clone ID: LIB3083-120-Q1-L1-C10
attgcacccactggctcatcttttccatctcggtctcgttttgagtatgtggaaaatgttcaatctactgagttgaatcatggtggcccacaagtgcttaatcatgttgctccaccaaagtcatcaagcttctttgcggaatttggaatggacagtggttttcagaagaaatcaagctcaaattcctcaaaagtgcagattcaggaaactgatgaagctaggaaaaaattctcaaatgctaaatctatttcatcagcccaattttttg

SEQ ID NO: 5945 - DNA, 373 bp, Gossypium hirsutum
  Clone ID: LIB3083-120-Q1-L1-C11
agctaagcctagtggttctgaacaaagcgttctggaaaagcatgttgcattctttgacagaaaccatgatggcatcgtttatccatgggagacttttgaaggttttcgagcaatcggggcaggttatctcttgtccatgaccggtgctttcctcattcactttgctctcagtagcaaaactcgccctgggaaatatccttctccattctttccaattgaggttaaaaacatccacctggctaaacatggcagtgactctggtgtatatgacagtgatggaagatttgtatcattgaagtttgaagaaatcttcagaaagttcgcccgtacccatggcaatgccttaacatctggtgaactcatggcaatgctc

SEQ ID NO: 5946 - DNA, 364 bp, Gossypium hirsutum
  Clone ID: LIB3083-120-Q1-L1-C3
aaaaggcctggtctctacttcgatatcggcaaaaaagctagagatcttctttacaaggattaccaagcttaccacaaggtcactggcactacttacactttccatggagtcgcaatcacatcaaccgggactaagaaaggggaattgcttttggctgatgtaaatactcagctcaagaacaagaacatcacaactgatgtgaaattcgactcccgatcgaatcttttcaccactgtcactattgatgaacctgcaccaagattgaagaccatctttagtttcgttgttcctgatcaaaagtctggcaaggtggaactgcaataccggcatgaatatgctggcataagcactggcattggattga

SEQ ID NO: 5947 - DNA, 330 bp, Gossypium hirsutum
  Clone ID: LIB3083-120-Q1-L1-C4
agaaggggaaggggatcagctgtctttattgacgcttttggtggctgcttttaggaagtctttgattgggtgtagcctttctggaagtaaagagctttgttcaatggaaattgggttgcctaccaatgttagacatgttgctcatgtgacttttgataggttccatggatttcttggtttgccggttgaatttgagcctgaggtccccaggagagctccaagtgccagtgcgagtgtatttggggtttcaacagaatctatgcagctctcactggactctagagggaacagtgttccaacaatactactcctgatgcaaagtcatttata

SEQ ID NO: 5948 - DNA, 241 bp, Gossypium hirsutum
  Clone ID: LIB3083-120-Q1-L1-C5
cagccttaccctggaatgctcgaagcaacaaggggatcgggaatattcctctcgaagggtccgagaaacgaggacatacaaagcctcgcaaaagatcaaagtgcacccgatgcatgggttaacaccaacatcgtcccttataaggacgatgttcagttcaagttgatcactattgggaatgaagccatttcaagacaatcaagctcttacattcctgatgccattaacaacataatggact

SEQ ID NO: 5949 - DNA, 214 bp, Gossypium hirsutum
  Clone ID: LIB3083-120-Q1-L1-C6
aattaaattagtacccctatacattaatgtgataaaaatcccaagaagatcatgtccaaacacgccgtggtaagtactgctaccaacacgtaagaaaatcttagaatgcccccgctatttggttctacaaacaaactttcccctgattttcagagagattacaacaatcaaacattgcgggtgacgaaaaatttctatttaaacatccatttta

SEQ ID NO: 5950 - DNA, 347 bp, Gossypium hirsutum
  Clone ID: LIB3083-120-Q1-L1-C7
gtcatttgaaaatcactcgtcctggtattaacggtacagcgtttcgattttcatagagaaacctcgaaacttctacgtagtgagaggaaagtttgagtacgtgcgatggctcgctcgtggagagcaagcggctctttggtggctctagctatagtcttgtccggatgcttctttgcaatctcaattgccaaggaggaagccgcgaaattgggaacagtcatcggaattgatcttggtacaacttattcttgtgttggtgtgtacaaaaacggtcatgttgaaattatagccaatgaccaaggtaaccgtattactccatcgtgggtggctttcactgacagcgagag

SEQ ID NO: 5951 - DNA, 315 bp, Gossypium hirsutum
  Clone ID: LIB3083-120-Q1-L1-C8
ctcctaccaagaagataacctctctgaatgatggagtcatcatctcagagcttttaaagtatccggtcagaggtgttgtctttgaaggtggtaacactcttcaagacttgtctgacgcagtgtctgatgcgtgcatttgccttcaagataacaacatagcatacaatgtcctcatctctgattgtggacagcggatcttcctccttcctcagtgttatgctgagaaacaagctcttggggaagtgagtgtagagcttttggacacccaagtgaacccggctgtgtgggaaattagtggtcatatggtgttgaaaa

SEQ ID NO: 5952 - DNA, 373 bp, Gossypium hirsutum
  Clone ID: LIB3083-120-Q1-L1-C9
cgagtatttttattatttcttttttgaattatggagtcattatgttatatcttttgatgttttcttaacaacaaaccaagaaaatgattcattaaatactgttcaaatcacaaacagacagaatggaaccatcttatttcttacataccgcaagcaaactttttttttcttatgatttgaactaaaactgctgggaaaagaagaaacttaatatgatatttacaaccaatcctccctcaaaacaaaaacagatatttttttaacaattgaagaaacacactgtcccatcagtatttttatgtgaacttgaatctcaagccttttgtttttcttcatctgatttggagggtttaccagggagcttttccttgat

SEQ ID NO: 5953 - DNA, 245 bp, Gossypium hirsutum
  Clone ID: LIB3083-120-Q1-L1-D1
ccaacaaggattcccaaccactcaataccttccaaggtttaacaaaggatcgaactttaaaacaataaaaaaaaactccctacatggtccaagttctcaaaattcaagcaaccctatcttaaagcaaaacacgaaatacaaattcatcttaaacttcaaaagccttatgcacgagcaggagccgcaacaccaggacgaggagcctgaccaggctgaccaggctttggcatatcatccctgcgtct

SEQ ID NO: 5954 - DNA, 372 bp, Gossypium hirsutum
  Clone ID: LIB3083-120-Q1-L1-D10
tcgagtttttttttttttttcctttttttgaagtgaatgctttctttttgtccttttgcaatttcgaaatgttcaaatttcaacaattggttaaaaaattaaaaaccagagaaaatcactataactctctcgcaattattccaggctctatttgccattcccttacttgccttgggcaaatatcacaaaaggataattaaaaagataaaaataaatcaaaatcacagaggattttgaaaaaccttcttttcaaatccccacagttaatgagtgtttcaagctccccacatgcagcaaatgttgtcccaatgctacttttcggcttccaagttcatcaaccacactcaaatccttacaaacatccaccttaaa

SEQ ID NO: 5955 - DNA, 226 bp, Gossypium hirsutum
  Clone ID: LIB3083-120-Q1-L1-D11
atatttgtgtttttttttttaaaattttatgtaccgaaaacagggggaaaatagagctttgcttcattcatacctcaattatataacatggcgaatacacaacaaagcttgtgaaaataatttgattacactatatacaaaaacgcgttctctgcccaatgagccttgaatgcagtaagcaaaactcgtcatgaaccatatcttgtctatttaatgggttaaaccc

SEQ ID NO: 5956 - DNA, 138 bp, Gossypium hirsutum
  Clone ID: LIB3083-120-Q1-L1-D12
cccggggggggcgcttttaaaaaatgggtccccccggcctccagaaattcgccccaacccacggttgtggtgaaggaaccactgccaaccaaggaccgagggatttttgtttttttggggaaaaaagaaaaggaaaac

SEQ ID NO: 5957 - DNA, 167 bp, Gossypium hirsutum
  Clone ID: LIB3083-120-Q1-L1-D2
aaggttcctggtttaacctttgatttttggggggaaccacttggtgtcccaaatcaaaatgggtcaagaaacctgcccccccaaccttgaaaccaattcttgggtcaaggttaaaccaactgggtgagccgatttattaaattgggggaaaaaaatcttaaacccca

SEQ ID NO: 5958 - DNA, 272 bp, Gossypium hirsutum
  Clone ID: LIB3083-120-Q1-L1-D3
aaaaaccgaaagtcgaacgaaaaggagggaaaacaaatggtaagttctcaacttcaatgcacgaggatggtaccacgggtgaagagaaaccgaagaagaagaagaaactagagaaacgggctgaactagacattatcgacgatgcaggtgcctcgttcacagagctgtttgcaactgatgttgctgatccgatacatgatggtaaaaggaagatagtcgatagagcaaatcaagatacaaaatcgtctgatagcttagttacctaccctgtg

SEQ ID NO: 5959 - DNA, 89 bp, Gossypium hirsutum
  Clone ID: LIB3083-120-Q1-L1-D4
gaaaaaaaaatgcaagttgtaatagtaaatggaatataatgtacatatggtccaaactgatacaaaatttagtgcaacaggcttaatca

SEQ ID NO: 5960 - DNA, 293 bp, Gossypium hirsutum
  Clone ID: LIB3083-120-Q1-L1-D5
atggtgggataataggaaaaataagaggaacccaagatatccagattttaagcacaaggatactggagaagctctatggattgaaggtaggaatactccccattgggtgagatcccagttggagatactagattctagaatgagctctctgcaagatgaggatgaaaggatgttttcttcgatggccagtgacaatctcctgcctttttaatgggttaaaccagtgtgtttatgatgttactataagttgaatgcacttggcaagggccctgcattttggatgcaaaaagttt

SEQ ID NO: 5961 - DNA, 386 bp, Gossypium hirsutum
  Clone ID: LIB3083-120-Q1-L1-D7
ctcgtgccgttcttcttattcctttattgctttttagaatttttcttaatcgaaaatgagagagtgcatttcgatccacatcggtcaggccggtatccaggtcggaaacgcttgctgggagctttactgtctcgagcatggaatccagcctgatggtcagatgccaagtgacaaaactgtcggaggaggtgatgatgcttttaacacctttttcagtgaaactggtgctgggaagcacgtccctcgtgccgtcttcgtggatcttgaacccactgttattgatgaagtgagaactggtgcttaccgccagctcttccacccagaacaactcatcagcggcaaggaagacgcaactaacaactttgcccgtggtcactacaccattg

SEQ ID NO: 5962 - DNA, 378 bp, Gossypium hirsutum
  unsure (1)..(378): unsure at all n locations; Clone ID: LIB3083-120-Q1-L1-D8
cagtactacatcgtagtgatttgttatatttactttacccgtgttgtggtttatgccttggagacgattacttcttataagtatctttggaccagtgtagtggctggggagttagccacacttgcattttatgtgtttacagggttcaaattcaagccagaggctcataacccatactttgtgatcgatgatgaggaggaagaagctgcagcagagcagctgaagcttgaagatgagtttgaattgtgatagtattcattgaggaaaagaaatggagaatgattgaagaaggttcaggttgtcaaactggggcaattgaggtagaagccttatcatcttaatgggtaccattgaaaaaaaanaatgggatatttgatg

SEQ ID NO: 5963 - DNA, 355 bp, Gossypium hirsutum
  Clone ID: LIB3083-120-Q1-L1-D9
cgatttcatggggaagaaagaagaggagaagcctcaagaggaggtgatcgtaaccgagtttgaaaaggttaatatcgaagagacaaaggcagaggaagaaggtgaggagaagaagaagcatggtctcctggagaagcttcaccgatcagatagcagcagctccagctcttcaagcgacgaggaagaaggtgaaggagaagagaagaagaagaagaaaaagaaggagaagaagggactggaagaaaagattgaagagaaattagaaggggaaaagaaagaagaggacacctcagttccagtagagaagtgcgatgagccagtagtccagccagagacgccagagaagaaaggtttc

SEQ ID NO: 5964 - DNA, 204 bp, Gossypium hirsutum
  Clone ID: LIB3083-120-Q1-L1-E1
atagaccaaaaacaccaaccgggaacctggaattattaaagtattccgcacggaaataccccccaaaggtttttattggcaacctcaaaaggaacctggcccatcaaatcttcccacctttcccaatggaaccaggggccatcgccttataaaaggtttaaatcccaagccatgcctcaataagtccggttaagctaaggtttt

SEQ ID NO: 5965 - DNA, 348 bp, Gossypium hirsutum
  Clone ID: LIB3083-120-Q1-L1-E10
cctggctcaaggggacgtaacccgtgctgatggcgtagtcatccttccacgctgccttcctttattgatagggaatggtaatggtgctgatgctgatgttgatgccccagcttgctgcgacatcgtcaggggtctcttgagctcgctgctctgtggtggtgtttaggaaccgatctagcttgaaatcgggttcggattcgggtggagtttcaaattggtgtgttatggaatcccaacttaatcgtgtttaggggtgggatccaattgtgtgatacattacagagcatggttgtggattgttttctcatatgttttgattgacttgcttgatacattggatgattcgat

SEQ ID NO: 5966 - DNA, 383 bp, Gossypium hirsutum
  Clone ID: LIB3083-120-Q1-L1-E11
gaacaaattatcctctacaaagacacaacttccatatgacttttactacttgaaatattgtaagccatccaagattgtgaacaatgctgaaaatttgggggaggtgctacgaggtgaccgcatcgagaactctgtctacacctttgaaatgagggaggatcagccttgcaaaatagtctgtcgaataaaactcgatgctgattctgccaagaatttcaaggaaaaaattgatgatgaatatcgagttaatatgatacttgataaccttccagttgcggttcgtagacaaaggagagatggaagtcaatcaacaacatatgaacatggtttccgtgttgggttcaaagggaattatgccgggagcaaggaagagaagtatttca

SEQ ID NO: 5967 - DNA, 105 bp, Gossypium hirsutum
  Clone ID: LIB3083-120-Q1-L1-E2
cgccccggggtttttttttttttttttataataaggggtaaattcttaatccctaaacccaacctgggtcctacctgaaaaaaaaggctggataccaggccaaaa

SEQ ID NO: 5968 - DNA, 129 bp, Gossypium hirsutum
  Clone ID: LIB3083-120-Q1-L1-E3
cgggacgagcgggacttccggaaatgccagcccaaatccagaaaggaatgggtgctggtcaagatcccccttgtgccacaacttatctggccagccaagagggagccgattccccatccggttttggtg

SEQ ID NO: 5969 - DNA, 379 bp, Gossypium hirsutum
  Clone ID: LIB3083-120-Q1-L1-E4
acttcctccacctgttccgatctacaaacctccaccagttgaaaaaccacatcctccacctgttccgatctacaaacctccaccagttgaaaaaccacatcctccacctgttccaatctacaaacctccaccagttgaaaaaccacatcctccacctgttccaatctacaaacctccaccagttgaaaaaccatatcctccacctgttccagtttataaacctccaccagttgaaaaaccacatcctccacctgttccagtctataaacctccaccagttccagtatataagaaaccatgtcctccaccagttccagtctataaatctcctccggttccagtatacaagaaaccgcatcctcctccagttccagtctat

SEQ ID NO: 5970 - DNA, 83 bp, Gossypium hirsutum
  unsure (1)..(83): unsure at all n locations; Clone ID: LIB3083-120-Q1-L1-E5
tggccgaatcgcaaatcctataatanaaaataaccgaaagggtgaggtgtcagttgacagagccctttaagacgggctcacgc

SEQ ID NO: 5971 - DNA, 342 bp, Gossypium hirsutum
  Clone ID: LIB3083-120-Q1-L1-E6
gtctatccttcacctcaggtttctacatcagttgtagagccttacaacagtgtgctgtccactcattcgctccttgagcacactgatgtcgctgttcttctggataacgaagcaatatatgacatctgcaggcgttctttggacattgaacgacccacttataccaatcttaaccgccttgtctctcaagttatctcatctcttaccgcatctttgagggttgatggagccctgaatgtggatgtgactgagttccagactaacctggtcccatatcccaggatccactttatgctttcttcttatgcccctgtcatttcagctgagaaggcttaccatgag

SEQ ID NO: 5972 - DNA, 362 bp, Gossypium hirsutum
  Clone ID: LIB3083-120-Q1-L1-E7
gagaaagtgacgggaaaataagaaaaatgcctagatcgaaatcaccggtgtcaatagctttatcgtttctcttcacattcttcagcatctcaaacgcttttttcggaccgtcgtcgccagtgcttcagcttactccttctaatttcaagtccaaggttttaaattcgaatggagttgttttggttgagttctttgcgccttggtgtggccattgtcaagctctaacacctacatgggagaaggctgccaatgttttgaatggagttgctactgtggctgctcttgatgctgatgctcaccagtcccttgcagagaaatatgggattagagggtttccgacaataaaggtgtttgcacctgga

SEQ ID NO: 5973 - DNA, 317 bp, Gossypium hirsutum
  Clone ID: LIB3083-120-Q1-L1-E8
attcctccaagttaggagtttggagagtggtcaccgctgaagcaaaacaaatttcttgggggaaaagaaaatggagttttccatgatttttatgattagcttctctgtattgattttgtgctcctcactggcatatggtcaagttgcaatgagcacaaacccgacaccgtcaccctcaccagcaccggcaccgacaccggcatacacaaatatcaaagacttactctctgtggcaggtccatatcacaagttcctgggctacctctagtcgactaaattaatcgacacgttccaaatccaagccaacaacacggttg

SEQ ID NO: 5974 - DNA, 376 bp, Gossypium hirsutum
  Clone ID: LIB3083-120-Q1-L1-E9
gcttaatggaggtctcggaaccactatgggatgtactggtcccaaatccgtcattgaagttcgcaatggcttgacttttcttgacctaattgttattcagatcgagaatcttaattctaaatacggatgtaatgttccgttggttctgatgaactcattcaacacccatgatgacacattgaagattgtcgacaagtactcaaattcaaacattgagattcatacttttaatcagagccaatatcctcgtctggttgttgaagattttgctccattaccaagcaaaggccagcatggcaaggatggatggtaccctcctggtcatggtgatgtgttcccatctctaatgaacagtggcaagcttgatgctttctta

SEQ ID NO: 5975 - DNA, 276 bp, Gossypium hirsutum
  unsure (1)..(276): unsure at all n locations; Clone ID: LIB3083-120-Q1-L1-F1
gacaagcattcactttgcaacagaagggcgtaaagaccgtttctctgctctacggaaccgtatattactcatacaattgcaagcaaaccaaaaatccctcacatacaaaaatgggtgattaaaagtcgaaaccctctccagattaactcaatggaggatcgacaactntagtccttgttcttacaaaaaatccgaccccttaaggtcggtctttggaactggcacttgtctatagagaagaatcgatatatgtatattcgattatttcccgagcca

SEQ ID NO: 5976 - DNA, 336 bp, Gossypium hirsutum
  Clone ID: LIB3083-120-Q1-L1-F10
cttgatttgaagggaccaaaagccaataaggtccttctggactactatatcatcatctaggaacagcactttatttagttttgggaagatctctggtaaataaaacccaagatggttcagtatggacaaatactttgggttccggaacttcaaatttgaatcaaaactaacccgatgtgccctgaagtaataatcaatcatggaaggggaacctaacttgctttggtcccttgatttgaagggaaacgtctatggtgctgttgaaacttgtggggaaagcttccatcggtttgatcggtatctcaacttcttaaaatccctgatctcaaagaactt

SEQ ID NO: 5977 - DNA, 395 bp, Gossypium hirsutum
  Clone ID: LIB3083-120-Q1-L1-F11
acgagcttaaacaatcaatcaagtgataaaatagcccttatcttttgtaagagggagaaattcataggaataattggtgtagctgagaccgtagccgaattcgaataccttcagcccttggtagaatctgtaagtacgtccaggataacctgaagatggttcaggccgcattctcatgtctgtcatcggtattttagtcaaattttgtggataccatgtaattggtaatctccctcctggattatgatcaccaaatataatttcggctaatgcacgtcctccagcttcaccgggatagccagcccatataatgcttccaatgttctgatcattcttggcaaatgttatgtctactggacctccacaaagaagcacaagaatgacaggcttatttg

SEQ ID NO: 5978 - DNA, 240 bp, Gossypium hirsutum
  Clone ID: LIB3083-120-Q1-L1-F12
tgtccatctgctgtattaccagtgttggactcactggtggaccctcttcaaaagacaattaatttcaagcccaaacaagatgctgtcaaacaggaagtagatcgtaatgaagatatgatccgtagtgctcttcgtgcaatcgcattcttgaaccgaataagtgggggagatagcagtatgaagttgaagaatctcatgagtgaaatatcgaaatctccaacattattggacaagtattac

SEQ ID NO: 5979 - DNA, 149 bp, Gossypium hirsutum
  Clone ID: LIB3083-120-Q1-L1-F2
cgccccagccagaaatgtaatttgtgccaaaccttgatatggggggttcttttggtggcctcccctggtggttccttcttttttctcttatatattttaacctaagatccaaagttggtaccattcatgttaatgaaaccaaaaacttg

SEQ ID NO: 5980 - DNA, 393 bp, Gossypium hirsutum
  Clone ID: LIB3083-120-Q1-L1-F3
ggaacctttcggattcgttgataattttttgaaagatttcttcgaaaaggtttcattaactcctcatttatatcgagtagaccttgttgttgcgagaattcttaattcatgagttgtagggagggacttatgtcaccacaaacagagactaaagcaagtgttggattcaaagctggtgttaaagagtataaattgacttattatactcctgaatatgaagtcaaagatactgatatcttggcagccttccgagtaactcctcaacccggagttccgcctgaggaagcaggggccgcggtagctgctgaatcttctactggtacatggacaaccgtgtggaccgatgggcttaccagccttgatcgttacaaagggcgatgctacgacattgag

SEQ ID NO: 5981 - DNA, 284 bp, Gossypium hirsutum
  Clone ID: LIB3083-120-Q1-L1-F4
gtttttcctcactaccgtcctcacatcctttttctcttctcttctttgcgccacccgcagaagagagagagtaaaaaagaaactcactttcatcacgtctctctctctctcttagatataaaaaatcttccttcctttttaggtttttctttttcaacattcagattcagcgttttagatatcgctgagttgttggtttttatatatcggacggctgagattggatcttacctgagaaaagaaatcgaggtatgcagcaaggtgatcagacagtgttgagctta

SEQ ID NO: 5982 - DNA, 269 bp, Gossypium hirsutum
  Clone ID: LIB3083-120-Q1-L1-F5
gcactcaagtctccacttatgggaatatttgagaagcgtcgtgcacggaagttcttcatatatgttcaagattatgatgaaaaggatcctaaaactcacgagggaatggacttgacaagggtgtcaactagggcactaattgcgaaatatgggcttgatgataacactgtggatttcattggtcatgcattggcacttcacagagatgaccgctacctggatgaacctgcattggatactgtaaaaaggatgaagctttatgcggagtc

SEQ ID NO: 5983 - DNA, 390 bp, Gossypium hirsutum
  unsure (1)..(390): unsure at all n locations; Clone ID: LIB3083-120-Q1-L1-F6
caggctatgtcaattttgatctcaactttccaccatggcaaaaacccttctgctattgatcaaatgacttttgcaaggtacacggagcgaactgcttttgaaaggcccctcacaagtggtgtggcatatgctgtaagggtgctccactctgaaagggaacaatttgaaaagcatcaaggatggactattaagaggatggatacactcgaaaaaaatcctgttcataaggatgactataatcccgacctctttgaaccatcgccaattcaggaagaatatgcacctgttatctttgcgcaggatatcatatcacatgtgatttctattgatctgctgncgggaaaggaagatcgcgagaatgtattgcgtgcaagaaaatcaggaaagggg

SEQ ID NO: 5984 - DNA, 385 bp, Gossypium hirsutum
  unsure (1)..(385): unsure at all n locations; Clone ID: LIB3083-120-Q1-L1-F7
gttcagccggctttttgccaagaaggagatgcgtatattgatggttggacttgatgctgctggtaaaaccaccattctttacaagctcaagttgggagagattgtcaccacaattccaaccattggtttcaatgtggaaactgtggaatacaagaacatcaactttactgtctgggatgttggtggccaagacaagattcgtccattgtggaggcattacttccaaaacacacaaggactcatttttgtggttgatagcaatgatcgtgatcgtgtggtcgaagccagggatgagttgcacaggatgttgaacgaggatgagttgagggatgctgtgctactggtatttgcaaacaaagcagatcttncaaatgctatgaatgct

SEQ ID NO: 5985 - DNA, 241 bp, Gossypium hirsutum
  Clone ID: LIB3083-120-Q1-L1-F8
gatagcaaaaattacataccactcttccattcagaataaattgaatattacaaacgaaattatattaatacagattaaatactcatgttggtcacttgccgtcattcagttgtagactgatattgcccatagtaattggacgcaacgtgtattaaacaatactgattgcggtggcgatctcataggcctccctatcactcaattgccactagtattccagtgctctaatcccatataacat

SEQ ID NO: 5986 - DNA, 251 bp, Gossypium hirsutum
  Clone ID: LIB3083-120-Q1-L1-F9
tggagtgcaaggagctgatgctaaaaacatcttctatttgagagaaattgatgatgctgataagttggtagaagcaatcaaagcaaagaagaatggaaaggctgttatcgttggtggaggttatattggtcttgagcttggtgcagccttgaaaattaacaatcttgatgtcagcatggtgtacccggaaccatggtgcatgccccggcttttcacctctggcatagctgctttttatgagggttattatg

SEQ ID NO: 5987 - DNA, 377 bp, Gossypium hirsutum
  Clone ID: LIB3083-120-Q1-L1-G1
cccggtcggtcaccgaatcgtgatcgctggagactagacgagttagagtgtttctttatctttgtttgttagtgtaagaggaaagtgtgcgtgtttggattgataagaggaaaagagaaaatgaatgggaatagcaatggatttgggagtgccggtgcggtggcggcgactgagtttttaaggagacgtcatcgacatgagactggagagaatcagtgtagttctgccgtcgtcaagcggatcaaagctcctgttcctctcgtttggtctctggtgaggcgatttgaccagcctcaaaagtataaaccctttgtcagccggtgtgttgcacaaggaagccttgaaattgggagtcttagagaagttgatgtcaagtc

SEQ ID NO: 5988 - DNA, 210 bp, Gossypium hirsutum
  Clone ID: LIB3083-120-Q1-L1-G10
ctgatcccgctaaatacaatcacttgtacagtatggtgaaagaagaagttgattgtaaaacagcaacagattcatctagttgtaccaatggtcttctttggttgacacgagcaatggatttcctcgtagaattgttccgcaacttacttgcacattcagattggactatgactgaatcttgtaccgacttctatggcaaaaccctgaaaa

SEQ ID NO: 5989 - DNA, 128 bp, Gossypium hirsutum
  Clone ID: LIB3083-120-Q1-L1-G11
ccccagagctcttaggaggttgaggactgcttgtgaaagggcaaagagaactttatcgtccactgctcaaacaaccatcgaaattgactccttgtatgagggtatcgatttttactctaccattaccc

SEQ ID NO: 5990 - DNA, 372 bp, Gossypium hirsutum
  Clone ID: LIB3083-120-Q1-L1-G12
cttcctataaccatgaatgtcgttgatgctatgccttcaatagcagcggagcaccctatagaagttgaaaggaatagtgacattttgcctatgaaaaagaaaaaaataaccccaaaagaaagtattctcaagtcagagcccgttagacagatgatgaccgatcaggaaaagcagcagttgagcacagaattagagtctttgttgggcgagttgcctgaaaacattattgattttcttaaagaacatagttctactgaaggtcaaatgggcgaggaggagattgaaattgacatcgatgctctgagtgatgaaaccttgtttcaattgcgaaaacttttggatggttatttgctcgggaagcaaaaaaaccag

SEQ ID NO: 5991 - DNA, 217 bp, Gossypium hirsutum
  Clone ID: LIB3083-120-Q1-L1-G2
ggggaccagtctcggggtttttttttttttttccaatcttgactccgcgccttacatttcccaacaaaaagcgaagggaatcattttcatcaatcccccccatcacccttctttatctttcccaccggaacgaagagcaaatcataaaaccttgggaagaaaaaatgagggaaatcttgcatattcaaggaggccaatgtgggaaccagatcggggc

SEQ ID NO: 5992 - DNA, 287 bp, Gossypium hirsutum
  unsure (1)..(287): unsure at all n locations; Clone ID: LIB3083-120-Q1-L1-G3
ggaaaaacaaaaagcaaaaatggagaaatctcaagtctgggtggccttttggagccatggccttgntattggcatcggcgacagcggatgacgtcgttgtactaacggaagatatcttcgagaaggaagtcggtcaagatcgaggagctctcgtcgagttctatgctccttggtgtggtcactgtaagaagcttgctcctgagtacgagaagcttgngtcaagttttaagaaggctaaatccgtcttgattggaaaggtggactgtgatgagcataagagtgtctgc

SEQ ID NO: 5993 - DNA, 317 bp, Gossypium hirsutum
  Clone ID: LIB3083-120-Q1-L1-G4
cgaatctttatcgaattaggacactttgttaccccatttccgtttgaatcaatcaggttttttgtcatggaagataagcagtcggttgcaacactcatagactcaacaactactaagatacagcagcttcagaaagcatttgctgaacttgaaagtcatcgtgctgtaacacttaatctgaaatggaaagaacttgaggaacatttccatgggcttgagaagtccttgaagagacgcttccatgaattagaagaccaagaaaaggagtttgagacaaaaactaagaaatctcgagaaatgttgaagaagcgtgaagc

SEQ ID NO: 5994 - DNA, 275 bp, Gossypium hirsutum
  Clone ID: LIB3083-120-Q1-L1-G5
cagtagaattatatttcggtctggggtacgaagctctccaagggcttccttgggcttcgccgcttcatccttgtcttttggcaggttctttcctttaccttcttccactgcccttaacccttctccttcttttgaactaaaattcatttcctctttcacttttttcctcactcgccgtctatttcacaacacagccttcgttcacaacaaaaacgagtaccaccaaccgggagaagaagaactgccgttctggtattccctttttcctttcttct

SEQ ID NO: 5995 - DNA, 92 bp, Gossypium hirsutum
  Clone ID: LIB3083-120-Q1-L1-G6
caggccatatttttcccggaaatattggccaaccaacaaaaaaaagggaaaaagggggtattcccctacattaaaaacatccttttttttga

SEQ ID NO: 5996 - DNA, 342 bp, Gossypium hirsutum
  Clone ID: LIB3083-120-Q1-L1-G7
gaaagatttgcttctgaacatttggaaacagaagcaaaaaaatttgtatttggttcaaaaaggacaagtaatcctgcatttattgctgcacaaaccaaatttgaggagttgagttcaacagccaattcaagtagatcaattaattcatcctaccaagatgttagtgttgaatcaaacttggacactgtgccttctggggcagatatgataagcaggtcaaaagagccaagcatctaaaaaatccagtcctcaacaattggagggttcaacatggtggctccgaatgtggaactgagttttctattacttccactcttgattcacctgatagatcagaagctg

SEQ ID NO: 5997 - DNA, 279 bp, Gossypium hirsutum
  Clone ID: LIB3083-120-Q1-L1-G8
gcccaaccagctttgtcaagaccaaaaactgctctttgattgcattaatgaagtagtcagagaggtttgtgagtactattttggttcccctagtgtttcatttgttaaacccaatatccgtcctatcccaaacatgcaaaatacaattcaagaagtctgggagggagtttattggcatttgctcccgactccattgccttgtactctggacctggtagtccgaaaagacctggctaagactggaacatggatggaccttcaacttgacacttgttatat

SEQ ID NO: 5998 - DNA, 265 bp, Gossypium hirsutum
  Clone ID: LIB3083-120-Q1-L1-G9
atttggttaaccatggctcataacttttgtcatcctttcttccttttccaacttttactcattactgtctcactaataatcggtagtcacaccgtctcgtcagcggctcgacatttattccagacacaaacaacctcatcagagctgccacaattggcttcaaaatacgaaaagcacaaagagtctgaatacaaacaaccaaaatatcacgaaaagtacccaaaacatgagaagcctaaaatgcacaaggaggaaaaacaaaaac

SEQ ID NO: 5999 - DNA, 384 bp, Gossypium hirsutum
  unsure (1)..(384): unsure at all n locations; Clone ID: LIB3083-120-Q1-L1-H1
aattcaaagatattaactttttttttataattttgaaaaaaaaattatttcaagtcaatttttacaattcaaacatgtttatagcataaaaaaaatttcaaatcatttatatttctatgaaatttacatattcttgtacaagcccaaatatgcccgggcccaaaccaataaacaagcccaattaacagcccanaacccaaattgacctagcccaaacattaaaatttcagaaaccctaacagcatttgctcgtagccgccgcacatcctaacagcagcccccgcacatgtcgcgcacgtccgcctccacgttgactggccgtacattgccttgtcgcgttctgctccttcctccgtctcgatcggagactaggatggcgattga

SEQ ID NO: 6000 - DNA, 224 bp, Gossypium hirsutum
  Clone ID: LIB3083-120-Q1-L1-H10
ttttttttttttttttttaagaaaaacaaatccaaagggaatttaaccgatcatcacaggttcaattcttacacagaaagcatatctatgtatgcaaagggatcaatgacaaatagtatataacaaaatggggggagctttaaaatttttttttagctagcttttgaattataaaacaatgatctgaatttctaaatcagggctttctattacaaacccgggtg

SEQ ID NO: 6001 - DNA, 359 bp, Gossypium hirsutum
  Clone ID: LIB3083-120-Q1-L1-H11
ccgaagatgacaaggagttattgatgtcccacatgaactttgaaaagaaatttggacaatcagccatttttgtaacttcaacactgatggaacaaggtggtgtccctccttcttcaagccctgcagctttgctcaaagaagccattcatgtaattagttgtggttatgaagacaaaaccgaatggggaagcgagcttggctggatttacggctcgattacagaagatatcttaacaggattcaagatgcattgccgtggatggagatcaatatactgcatgccaaagttgcctgcattcaagggttcagctcccatcaatctatcggatcgactaaaccaagtccttcgatgggcactc

SEQ ID NO: 6002 - DNA, 225 bp, Gossypium hirsutum
  Clone ID: LIB3083-120-Q1-L1-H12
attgagtcgccttggaaagcctattgcagctgatgcgggggggaagttgtacacaattatggagatttgccgtctttttgatcaaaaattcagagaacatttaaatggggggcgtactgggggggataaaggttacaatggttttgacaaccaactttctgctggtttgaaaagggtggcatttggcaggccactatcaatggggaatattagggagcttattac

SEQ ID NO: 6003 - DNA, 262 bp, Gossypium hirsutum
  Clone ID: LIB3083-120-Q1-L1-H2
ggttcgatcctgctgcagatttcatacttactcaatcatgtggaaccatcatcagattgtgttctatattgatgaagtgccaattagggtttataagaacaatgaagctagaaatatcccatacccaaaactccagccaatgggagtttattcaacgctgtgggaggctgatgattgggcaacaaggggaggtttagagaaaattgattggaccaaagctccgttcttagcttattacaaggacttcgacattgaaggatgt

SEQ ID NO: 6004 - DNA, 271 bp, Gossypium hirsutum
  Clone ID: LIB3083-120-Q1-L1-H4
acaacatgaaaaacagaacaatagcttgtaaggctattcatgttcttatggagcatcataagtaaaagacaagcatttctaacaacaaaaaaatgacaagcaaacatgactaaatttattccataggcataatttgagaaacctcacacgaataagaaagaacaggataccctcacagggtgaacccatcatcttcaaaataaatgatattgcgatagtagcatcaatattcttcaccttcctcttcatcatctccaccttcagcaccaac

SEQ ID NO: 6005 - DNA, 312 bp, Gossypium hirsutum
  Clone ID: LIB3083-120-Q1-L1-H5
gacccgcccctgactttttggatcaacagacaccaaatctagggggtgtaaatcctttatcacggcctggttttttggactctccagcattacctctatgctaaggagggctactgccctaatggcggccttccttgaggaaacggagccaggaacaatgaacctagctttctaccaaaccagactagggagtcaaatcctcttagctctaatgactcctcaacggacatgcatgccgataggccatctcatgaatctacctactgagaatgcaaggtaactcccttttgaacccccaacgattaacaagat

SEQ ID NO: 6006 - DNA, 286 bp, Gossypium hirsutum
  Clone ID: LIB3083-120-Q1-L1-H7
gttctgcaagtagcaagacactaatttcatagaacaaacagagcaatttacacaatataaatggacttaagcaggtttggccaacagcagacaactttagaaacaaaataagccatccttgaacaacataaattaggacatacaatgctgcaaacaacctcaggaacctttgcaaacctaccgaagctgctggatatcggagaagacaaaagacgacatcatcatcactcataatgtagaagtttccagtttccatgcctttgatcatcaaataattcaagctcag

SEQ ID NO: 6007 - DNA, 156 bp, Gossypium hirsutum
  Clone ID: LIB3083-120-Q1-L1-H8
gtttggtttttctcaataacggcctcacaatccttttctcttttcttctttgggccccccggcgaaaaaagagaggtaaaaagaaactcactttcattacgtctttttttttctcttaaatataaaaaaacctccctcccttttaaggttttcttt

SEQ ID NO: 6008 - DNA, 380 bp, Gossypium hirsutum
  unsure (1)..(380): unsure at all n locations; Clone ID: LIB3083-120-Q1-L1-H9
ctcgtgccgcttacttttctcctcttcaccttctctcaagcccgcttcatcacatctgaatcccaacatgatgtcacccccgaaaaatccgttaccgattttcccgaatccgaccccgaatccgccatccttctccccagcgagaaaccccactttgaaccccccaaattactcgacttcaagcacgatgatgatgcctccggcgtcgcctccgttcctttgaccaagatcagttttaaccctgtcaaccgccacttcccaaggcgtcccttgattccgttccgtcacaagcacaactggccgttccataaacgcttcatgcctttgaatccacgcttncatcagaaacgcttcatttctttacggcacgacatgatact

SEQ ID NO: 6009 - DNA, 571 bp, Gossypium hirsutum
  Clone ID: LIB3083-009-Q1-L1-H11-F2A
cttatccttctcattagcacacaaactgtaaatatatggataaatcgaaagtgagacaagcaggacaatctcatcaacaacaattctctgaccaaatcatagactttatttgtttctgaagcttgcagataaaagattagtattcgcagacaaatggagctttgacatgatggtcgcagcaataaaggccgggttgctgagtgaagccctgttttttgagcatctgcctggccttcaaaacaagctctttattagtaattgagccatctgagtcggcaattatggtttgaatagcattgctaagtgctccataagctttgcttgcattccctgatgggctggcatccgctgaagtttggtcggtctggcagccgctgataagaattccactgtcaggaagagagtgcttaccagctcctgcataagcctcttgcttgctactcacttcagtctcaagggcccggtttcccgtatccttcggcataatccagcttttgtttaagaaactgtagtgccagattcccaaccttccccatgaaaccacccccttcaccgtcaataccactcccct

SEQ ID NO: 6010 - DNA, 520 bp, Gossypium hirsutum
  unsure (1)..(520): unsure at all n locations; Clone ID: LIB3083-009-Q1-L1-H11-R2A
ctgaactgaaaggctgcataaacgatgtgaagagaatgtacaaatgccttacagaacgctatggattctctgaagaagacatcacggtattgatagacaccgataattcttatgatcaacccacagggaagaacatcagaagggctttgaatgatcttgtgagatcggctgagcctggggattttctgtttgtgcactacagtggccatgggactaggcttcctgctgagactggggacgatgatgatactggctacgatgagtgcatcgtcccctgcgatatgaatctcatcactgatgatgatttcagagagttggtggataaagtcccaaaaggtagccgcatttcaatcgtatcagattcatgccacagtgggggattgattgatgaggccaaagagcanataggtgatagctctaagccccaagattcagaatcagaatcaggttcaggtgggtttaggagcttcttgcatcacactgtacaagatgcanttgaatctcgtggaattcatgttct

SEQ ID NO: 6011 - DNA, 796 bp, Gossypium hirsutum
  Clone ID: LIB3083-062-G8_FLI
taaattccacattcatacgcaggacccatcttgttcaatctttctctgttgttttcctctactggttatattacgtttcataaagaaataatcatcttttttaacttatttatctttactactaagtttttttttttaattttatttgggtcctgctattatatatcataaataataactcctacaatggctacatcctcgggttcatcagcaacacaaatcaactcgggctcagaagaagcattaatggacgaaaggaaaaggaaacgaatgatatcgaacagggaatcagcaaggagatcaaggatgaggaaacaaaagcatttggatgatctaatgactcagttgactcagttgcagaaacaaaaccatgagatcatcacaaacataaacttcaccacacaacacctcttgaatgttgagtcagagaactcggtgcttagagctcaactcaatgaactcactcataggttacagtccttgaatgaaatcatcagcttcctgaatgatgttcatggcgatgacgacgacgacgatgataaaacaagcattgacttcactcagcctgctgtagctgataatatcttcctgattcctttccatctggcttacttgaatcagcctatcatggcctctgctgataacacgtttcagcattaattttctataatgccacaattttaatgggatttttaatctcagtttatatatatatatatagttgtataagcagtagtatgaaataaaatatgtgaaaatcataaagctatggtatggttaatggtagatttttttc

SEQ ID NO: 6012 - DNA, 1346 bp, Gossypium hirsutum
  Clone ID: LIB3083-009-H11_FLI
gaattcggcacgagctgaactgaaaggctgcataaacgatgtgaagagaatgtacaaatgccttacagaacgctatggattctctgaagaagacatcacggtattgatagacaccgataattcttatgatcaacccacagggaagaacatcagaagggctttgaatgatcttgtgagatcggctgagcctggggattttctgtttgtgcactacagtggccatgggactaggcttcctgctgagactggggacgatgatgatactggctacgatgagtgcatcgtcccctgcgatatgaatctcatcactgatgatgatttcagagagttggtggataaagtcccaaaaggtagccgcatttcaatcgtatcagattcatgccacagtgggggattgattgatgaggccaaagagcaaataggtgatagctctaagccccaagattcagaatcagaatcaggttcaggtgggtttaggagcttcttgcatcacactgtacaagatgcatttgaatctcgtggaattcatgttccttctagattacgccaccgcgaccaccaccatgataaggaagaggtggatgacaggggagtgaatgaagactatgatgacagtggctacgtcaaaagcagatctctgcccctctcaactctaattgaaatgctcaagcagaaaactggcaaagatgatattgatgttgggaagctaaggccaaccctttttgatatgttcggcgaagatgcaagccccaaagtgaagaagtttatgaacatcattatgaccaaactgcaggggagtggtgatgacggtgaagggggtggtttcatggggaaggttgggaatctggcactacagtttcttaaacaaaagctggatgatgacgaaggatacgggaaaccggcacttgagactgaagtgagtagcaagcaagaggcttatgcaggagctggtaagcactctcttcctgacagtggaattcttatcagcggctgccagaccgaccaaacttcagcggatgccagcccatcagggaatgcaagcaaagcttatggagcacttagcaatgctattcaaaccataattgccgactcagatggctcaattactaataaagagcttgttctgaaggccaggcagatgctcaaaaaacagggcttcactcagcaacccggcctttattgctgcgaccatcatgtcagagctccatttgtctgcgaatactaatcttttatctgcaagcttcagaaacaaataaagtctatgatttggtcagagaattgttgttgatgagattgtactgcttgtctcactttcgatttatccatatatttacagtatgtgtgct

SEQ ID NO: 6013 - DNA, 311 bp, Gossypium hirsutum
  Clone ID: LIB3120-001-Q1-K1-A1
aataaactactgcgttaactttatgcatctaacctcaatttccatggccgatataaccagagcatcaccttaccactctcatatcttacaactacctgatactactttaatcagatctatatggttgaatcttacttgcttctctgcaagctctattattataacagctacctatgcttcttattattgttcctttcaatggccattagttggatcattgctatgggcactgctgctatctgtgtaccgtcttttagcagcagcactgactaccttactgtctcaacactaaaataccatgctttgcctgc

SEQ ID NO: 6014 - DNA, 464 bp, Gossypium hirsutum
  Clone ID: LIB3120-001-Q1-K1-A10
gagagcactagcattagcactagcactagtagcaaccatggcctccgccgcatgtttcttgcgaccaccacgcactcacaaccaatggcagatcatcatcattatcgccgtcgctgcgccaggtttcaaacatgaagcctacccagcaggtggtgtgcaaggctcaaaagcaggaagatgatggaagccttgtgtcccgtaggttggctctcactgtactcattggtgctgccgctgttggctctaaggtttctcctgctgatgctgcctatggtgaagctgcaaatgtatttggaaagccaaaaacagacacagacttcatgccatacagtggggatggattcaagctctcgataccatcgaaatggaacccaagcaaagaagtggagttcccaggtcaagtgctgaggtacgaggacaacttcgacaccaccagcaatttgagcgtcatgatcactcccacg

SEQ ID NO: 6015 - DNA, 327 bp, Gossypium hirsutum
  Clone ID: LIB3120-001-Q1-K1-A11
gttctagatcgcgggcggtcgcccttttggtactcttttagttgaactctggatatggcatgtataggactaccctttgttggttttttcaagtactttttgtgatgtatgtgtgtacagacatgcgaaaatggctcgtagaagtggagtatggcgtggctatgaaaattgtgaatcaaatggtgttgctaaggagaagaatagctggtttggctggaataagaaaggctcaaagaacagtgatgatcctgatgattcaaagattggaaagttctcaaaatcgggtcctgaaggtagcaatcatagacaagttgataatcatagatc

SEQ ID NO: 6016 - DNA, 457 bp, Gossypium hirsutum
  Clone ID: LIB3120-001-Q1-K1-A12
cggacgcgtgggcggacgcgtgggcttcttcacactctcttcgtgctcccgccgtatttcggttcccggctcttctctcttgttttccttccttccttccttctgtcaacaccactttctaatggcttcccttgctggttcatccatctctatgcaacctcgccagaccctggctacaagcagggttactgggttgaaattggtttcatttgtgaaccggtgaagaagcagcctctcctttaagctgcgtccggatcgcttgcggatttcatgtgctgccaaaccagagacagtggataaggtatgtgaaatagttaggaaacaactagccctaccaagtgacaaatcagtcacaggtgaatcaaaatttgctgaacttggagccgattctcttgatacgggcgaaattgtgatggggcttgaggagagtttggaatcactgtgggagaggacaatg

SEQ ID NO: 6017 - DNA, 261 bp, Gossypium hirsutum
  Clone ID: LIB3120-001-Q1-K1-A2
aactgtaaaaatggtccaaaagagaggtgtaaggttgatgtcccgtgcaagaagacacaagagaaagttgtgaatacactgatcgagaagcgtccaaagcagttgggtattggcggggcactacctccgaagaaggagctacatcgatttgtaaagtgggctaatggtgtccgcattcaaaggaatacgaggatccctaagcagaagttgaaggtcccaccatcgttgaaccagtttaccaagactcttgacatgaacctt

SEQ ID NO: 6018 - DNA, 303 bp, Gossypium hirsutum
  Clone ID: LIB3120-001-Q1-K1-A3
ctcacgcgtccgcccacgcgtccgctcgaaagtgaggccacccaagatagaaattgaaagtgttcaggttgttcaacagtgtgtgatgttgataattccccttcattttctgcagttcaccgcttgtctgaatccctttctgtcatcggctgtctttcaagctgaaatgatctgcgtagcttaaacaaggctaccagggtggttcttaaaagcaaggtgattcagaatcgagatccaaggttcagagttctatcatatttgatcccattaagtaaatcgcttgtaagctctattgttatcagc

SEQ ID NO: 6019 - DNA, 448 bp, Gossypium hirsutum
  unsure (1)..(448): unsure at all n locations; Clone ID: LIB3120-001-Q1-K1-A4
gttagctgatctaacatgggatgagtctctaaaacacacgcttggagctgctcagaactgctctgccagcagaaagggcaatcaccagctcactgatgtcgtccttcctgaatcgaaagactggagggaatcgggcatagttagcccggtcaaaaatcagggatcctgtggatcttgctgggcatacagtactactggagctcttgaagctgcttaccatcaggcatttgggaaaggaatctctctttcggagcagcagcttgcggactgtgctggagcatttaacaactttgggtgcaatggtagattgccatcccaagcctttgagtatatcaattacaacggtggccttgatacggatgaggcatacccttatacagaataagatggtcaatgcatattctcatacgaaaatggtggtgttcaagtcatngactctgtcaacatt

SEQ ID NO: 6020 - DNA, 304 bp, Gossypium hirsutum
  Clone ID: LIB3120-001-Q1-K1-A5
cccacgcgtccgtaacacaatcagttgcttcacaacggcctatacaaccatggctctttggtgcccatcattcgtcggtaaggcagtgaagttctgcacttacacccctgaaatccggggaactggccgtgtttccatgaggaaaaccaccaagcctgtttcttctggtagcccatggtacggtcctgaccgagctttgtacttgggtccactttacggtgagccaccatcttacttgaccggggagttccctggtgactattgttgggacactgatggactcttagctgatcccgagaccttt

SEQ ID NO: 6021 - DNA, 331 bp, Gossypium hirsutum
  Clone ID: LIB3120-001-Q1-K1-A6
cccacgcgtccgggagaaaagtgaaaagggtaatggtgttgctcctgctacaaggtctccgatggctttaatggggtcatctagaaatgaaaaccaagaagtgaataccagcatgagaactgtcgagaccatgctgcggttggtgcctatggctttaggggttgctgcacttgttgtcatgctcaaaaactcacagtccaatgactttggctttcgttcatactcagatcttggtgctttcaggtacttggtgcatgctaatggtatttgtgcaggctatttccttcttttagctattatagcaactgtgcctcgtccatctactatgcct

SEQ ID NO: 6022 - DNA, 429 bp, Gossypium hirsutum
  Clone ID: LIB3120-001-Q1-K1-A7
cagaagccatggccagcatgataatggcttcctcaaagcctgtaatctccatggctgctggatcatccttcttttccaaacccaaactcaaacaaatcccacaactttccctcccaaaactccccaccccaaagttcttgaaaacccaacaaatcccctcactctcctccaccactctcaaatctatctccctcttcacagtcaccactttatcctttgccccaccttctcttgctgcagaaatagaaaaggccgctcttttcgatttcaacttaaccctccccatcatgatggtccagttcttgttcctcatgtttgctcttgacaaggtctactttaccccactcgggaaattcatggatgagagagatgctgccataaaggagaaacttgccagtgtgaaggacacgtctgaagaaatgaagcaac

SEQ ID NO: 6023 - DNA, 387 bp, Gossypium hirsutum
  Clone ID: LIB3120-001-Q1-K1-A8
ggtgctcttgatcgagatgatgaggatgtatactttgatgatgaatctgctgaggtggtgatatcatccttgaggcttggtgatgaacaaggaagcctgttcacaaattccaactggtctgcattccaagatgacagaaccggtaatgcacctgcagccacatcccccccagaggtgatgactgatatgaacctttatggccactgcaaatggtggtaacagcactagtgatgatgaagtggtagttggagaggatgatgagttgaatgacaacagccagtcagtgaatagcacgtctactttagatgtgatgaacgaatttaacagtgttatgagccgtggagacttgagtccacaaggtgagaaaagcaatgctactcaagatat

SEQ ID NO: 6024 - DNA, 213 bp, Gossypium hirsutum
  Clone ID: LIB3120-001-Q1-K1-A9
atatcctgagagaataaccccattgttccctcatcaagtttcaatatattcactgtgtcaagggcaagttctgacataattctgtaaattattagtctgtcattctgatccgaaggttgttaaaaagaccctctgttttcagatgtacttattttcacttatgtcatacaattttctcaataattcacgctgatctagctcttcatggacacc

SEQ ID NO: 6025 - DNA, 420 bp, Gossypium hirsutum
  Clone ID: LIB3120-001-Q1-K1-B1
cttttcctccgactttcattccatggattgtgctttatctcctcagatcttcataaacacaagatttgctaggtgtgtggccatcagacaaggagttgaaatcaggctatacagaaaaagatggttgaattctagttgctgtgctgtgggggtgtctgagatgggtgctggcaacctgtttgatgatgggtccttgaaagggtctgaaaatgggtcattgttgggtgcacttggtgactcagttttaccaccatttggaacagtggatgctgaaattaccccagaaaccgttgatttctttgttagtgatgcagaaggtgatcctgactggccttctaaaggattctcttccattgaccaagcattgaatacaatacgccaaggaaagtttgtgattgttgtagatgatgaaaatgaaga

SEQ ID NO: 6026 - DNA, 379 bp, Gossypium hirsutum
  Clone ID: LIB3120-001-Q1-K1-B10
tcgacactgcctctacggcacaggctaacatggtcgctcctttcaccggcctcaagtctgcctgtgctttggcagtcaccaggaaggccaacaacgacattacttctctcgcaagcaatggcggcatagtgcaatgcatgcaagtgtggcctcctactggaaagaagaagttcgagactctctcataccttcccgaacttacacccgtgcagttggctaaagaagtggattaccttcttcgctcaaaatgggttccttgcttggaattcgaattagatgagggattcgtgcaccgtaaatactctagcctacccacgtactactatggacgctactggaccatgtggaagctgcctatgttcgagtgcacctactcggc

SEQ ID NO: 6027 - DNA, 402 bp, Gossypium hirsutum
  Clone ID: LIB3120-001-Q1-K1-B11
gtcgaccacgcgtccgatgagcgctgtgaacaaaatatggacagctaggccactgatcttcgtatccttaaactatgaattctgggcctcttcaccggttgtctagttgcagttaatgcttccgcaacatcatctatgagtgatggagagtataaacccgattggccaactgaatatcgccttcttcaacctgatttaggcaaggatgatggtgcacggcgaaggcttgcccctttccagctgtgcttgctgtgcaagtgttgcagcgccaccgctggctacacctgtacttcaatgccttgctgctttggcatcgattgccagcttcccaacaagccctttggcattagtgcttttgaccccaagacttgcaactgtaattcctcgcttgctaatgcctac

SEQ ID NO: 6028 - DNA, 379 bp, Gossypium hirsutum
  Clone ID: LIB3120-001-Q1-K1-B12
ctaaaaaccaatggccagatttgttctgcgactgcccaccggcaacttgagaagcttctcggttcatgcttcgtcaaacggggctcctccgggtagtggctcacaaaatggggggccaatgatcttggagcttccacttgataagattaggagacccctaatgcgcaccagatcaaatgatcctaacaaagtccaggaactcatggacagcattcgacaaattggacttcaagtgcctatcgatgtgcttgaagttgatggagtttactatggtttctctggttgtcatcggtatgaagctcaccagcgccttggactctcaacaatacgctgcaaagttctaccaggaaccaaacaaactctgaggcatcattttcat

SEQ ID NO: 6029 - DNA, 358 bp, Gossypium hirsutum
  Clone ID: LIB3120-001-Q1-K1-B2
cccacgcgtccgctgtcattagccctcaaccatacgccaaaatatggcagccacttttgcaagcccatcaaccgtcgttggcctcggtggcaccgtcacctctatgtcatccacgccgatgaaaacccgcctctcttcatggtctttgaaatctggggtgacggctaggaaccctttgaggctggctggtgcttgtgggggcaagtttacttgcttcgagagagactggctacgaagggactttaacgtgataggatttggactgattgcgtggatagcaccatctagcataccggccatcgatgggaagagcttgactggccttttctttgaaagcattggaactgagctcgctcac

SEQ ID NO: 6030 - DNA, 376 bp, Gossypium hirsutum
  Clone ID: LIB3120-001-Q1-K1-B3
ggggccgatgtgcaagaatgagattatcatggctgggactctatttctaacggtggggctctcgattgttggaggggtgttaaatgtggatgctgctactgctggcattcttgggttatctgtactacttgtgactggggtagtaacatggaaggagtgacttgctgaatcagttgcatggtatacacttactgggttggctgcactcatcgctatggctgagtctgtgtacaaatgtggtctaatctgatgggttagtcacaccgtgtcaaggtcgcacgtggattcagactttcatggcatatgtcaagcggcattgtgcttcttctctatagctactggcattacttctttgactgtggaactgctcatattg

SEQ ID NO: 6031 - DNA, 444 bp, Gossypium hirsutum
  Clone ID: LIB3120-001-Q1-K1-B4
cccacgcgtccgcccacgcgtccgcccacgcgttcgcaacaacaacccccatcagaaatagcatattctcctttcttcttatgtcttcagtataaaaaacgaaaagaaaagacatggctgctgttactgctgcagtctctgttccttctaccaagtccacctctctccctgctagaacctctcttgtctttcctgataggatcaccttcaagaaggtgcccgtttactacagagatgtttgcagtggggggagagtggtttctgtcaaggcccaggttacaactgaagctcctgccaaagttgtaaaggaatccaagaaaaacgatgaaggtgttgtggttaacaagttcaggcctatcaacccttacattggtagatgccttctaaacactaagatcactggcgatgatgctcctggagagacttggcacatggtcttcagca

SEQ ID NO: 6032 - DNA, 448 bp, Gossypium hirsutum
  Clone ID: LIB3120-001-Q1-K1-B6
caagcttctattcagttttgtaagagctatggctaaggacattgaggttggtggtgagtggcaggccaaggactaccatgatcctccacccgctccattggtcgacgctcaggagttagccaagtggtctttttacagggctgtcatagctgagttcattgccactctcctctttctctacatcactgtcttgactgtgatcggttacaagacccagaccgaccctgctaagggcggtgaagattgtggcggcgttggcattctcggcattgcttgggcttttggtggcatgatctttatccttgtttactgcactgccggtatctctgggggacacatcaacccagcagtaacctttggacttttcttggctaggaaggtgtcgttggttcgagccatattttacatgggtgctcagtgtttgggagccatatgtgggtgtgggctg

SEQ ID NO: 6033 - DNA, 443 bp, Gossypium hirsutum
  Clone ID: LIB3120-001-Q1-K1-B7
cccacgcgtccgcttctcgctttaatcctcgcttttctccgccatcaaccacttcctcgtgttctcaaggttgtagaagatggcagagggcgaggatatccaaccccttgtttgcgacaatggaacaggaatggttaaggctggatttgctggggatgatgcaccacgagctgtgtttcctagcatcgtcggtcgggctcggcacaccggtgtaatggttggtatgggccaaaaagatgcatatgttggtgatgaagctcaatcaaaaagaggtatttcgacgttgaaataccctattgaacatggtattgttaacaactgggatgatatggaaaagatttggcatcatactttctacaacgagcttcgtgttgctccggaagaacaccccattttacttaccgaagcccctcttaaccctaaagcaaatcgtgagaagatga

SEQ ID NO: 6034 - DNA, 72 bp, Gossypium hirsutum
  Clone ID: LIB3120-001-Q1-K1-B8
tccaccttgacccttcattgtttgctgctaatacctctacgacagctaccagtatctcggagggtcaatgtt

SEQ ID NO: 6035 - DNA, 449 bp, Gossypium hirsutum
  Clone ID: LIB3120-001-Q1-K1-C1
attttctcctctttctctctattcgaaatttgaatactctctcattttacgatatttcttagtgtgttttggatcgggaggttagaggtttatcatcaatggcggatactgagacgtttgcatttcaagctgagatcaatcagcttcttagtttgattatcaacactttctacagcaacaaggagatcttccttcgtgagcttatcagtaacgcctctgatgctttggataagatcaggttcgagagcttgacagacaagagcaagcttgatgcacagcctgagctcttcattcatattgttccagacaagaccaataacactctatcaatcattgatagtggtattggtatgaccaaagctgatttggtgaacaatcttggtacaatcgcaagatctggtactaaggagtttatggaagcactggctgctggtgctgatgttagtatg

SEQ ID NO: 6036 - DNA, 335 bp, Gossypium hirsutum
  Clone ID: LIB3120-001-Q1-K1-C10
atcgagactagtgtcacgtgctacgctcgtcggattgttctttctggcgtctcttctaagcgctccggggcattattctccggtccatccacatctccttacttcagctctaacagccttaaaacaagttcactatttgaagaatcattaacggttgttccaacgtcattattcaacgtttcaaaggcaaaccacactacttcactactgacaaattgttacaacagatactactttgacgaatttctcacaaaggcatcaacacataaggcattgattagattcatcatctgcatgggtgaagcattaacaacaattgctttttaagttataac

SEQ ID NO: 6037 - DNA, 275 bp, Gossypium hirsutum
  Clone ID: LIB3120-001-Q1-K1-C11
ctcaaattcagtgaacaatttcacagttgttttcttcattctctctctcagccatggctgcggccatgggcaccgtcgctggcgctggcgacgccaaccgagctctgagagtgtcagtgccaacctcagctttcatggggaagaaagtgagctcaagattcaacagcaccaggcaggttccttcgggaagttttaaggtgatggcggcggacaaagatatagacgaagagacacagactcgaaaagaccgatggaaagggttggcttacgatatt

SEQ ID NO: 6038 - DNA, 468 bp, Gossypium hirsutum
  Clone ID: LIB3120-001-Q1-K1-C12
cacaaaccgttccctaatttcttatctcttattctcctctctctcgtcgccatcgcctctgctgaagggttcttcgaagaacgcttcgaagatggatgggaaagtcgttgggtaaaatctgactggaagaaagatgagaacatggctggggaatggaattacacttctggaaaatggaatggagatcctaatgacaaaggtattcaaactagtgaagactacaggttttatgctatttcagctgagttcccagaagttaacaacaagggcaagactctagtcttccaattgtctgggaagcacgagcagaaacttgactgtggtggtggctacatgaagttgctcagtgataacattgaccagaagaaattttggggcgacaccccgtacagcatcatgtttggacctgatatttgcggctacagcaccaaagaaagtacatgccattcttacatacaatgggacaaa

SEQ ID NO: 6039 - DNA, 424 bp, Gossypium hirsutum
  unsure (1)..(424): unsure at all n locations; Clone ID: LIB3120-001-Q1-K1-C3
ggcaaacgccataattaaagattttgacgttttgctctcgatctctccgcccaaatcttgtggacgcgaagcagataaatgatgtgatgactcttttctttgtcagatcccttcgaaagcgattcttcttcttctttctattctttttaaattgaattgaagttgctgattcgaaatgagtacggacgaccttctcagcatcgagcctttacagctcaagtttacttttgaactgcggaagcagatctcgtgtgctcttcaattgtcgaataaaactgatcattatgtagctttcaaggggaaaacgacaaatccaaagaagtacttgcgtcgtcccaatacgggggtcgttttgcctagatccacatgcgatgtttgtgttaccatgcaagcgcacaaagaggctcctnctgatatgcaatgc

SEQ ID NO: 6040 - DNA, 410 bp, Gossypium hirsutum
  Clone ID: LIB3120-001-Q1-K1-C4
tatattcagctatagcatacactactagtacccactactagcaatggcttcctcaatgaggtcatcggctaccattgccactgcctctccggcacaggctaacatggtcgctcctttcaccggcctcaagtctgcctctgctttcccagtcaccaggaaggccaacaacgacattacttctctcgcaagcaatggcggcagagtgcaatgcatgcaggtgtggcctcctactggaaagaagaagttcgagactctctcatacctccccgatcttacacccgtgcagttggctaaggaagtggattaccttcttcgctcaaaatgggttccttgcttggaattcgaattagaggagggattcgtgcaccgtaaatactcgagcctacccacgtactacgatggacgctact

SEQ ID NO: 6041 - DNA, 454 bp, Gossypium hirsutum
  Clone ID: LIB3120-001-Q1-K1-C5
cccacgcgtccgcattttcatatcaatggctgcagtcacaaacgccgctgctacatcctcgttcatggggacacgcttccccgacgtctacacaagttcagggagattcgtcgccaggtttggttttggcggcaaaaaagcagctcccaagaaagcctcgaaacaaacctccgaccgccctctatggtacccaggagcggtggctcctgattggctcgatggaagcttggtgggtgattacgggttcgacccgttcgggttagggaaaccagcggagtacttgcaatatgatttggattctttggaccagaacctggctaagaatatggctggtgagatcattggaactaggaccgaagttgccgacgtgaaggcgacgccgtttcagccttacagcgaggtttttggtctacaaaagtttaaggagtgtgaattgatccatggacggggggcc

SEQ ID NO: 6042 - DNA, 436 bp, Gossypium hirsutum
  Clone ID: LIB3120-001-Q1-K1-C6
gaaaaagatgcatttgaaagttataacaaatagcctccggttgcttttcttgattctctggttcttggggagtgggaggatcgcatgcaaagagggctctttcgatatgatgttactgcctgtgaaaccaaggtgattcctggtgaatatggctctattgctcagctgaacgagggccgtcaccttaagaagaggccaactgagttccgtgtagataaagttctccagcccttcgatgggaacaaattcaactttaccaaagtcggacaagaagaggtgctcttccagtttgaagcaagtgaagatggtgaagttcagttcttcccgaatgctcccattgatgttgagaatcacccaagtgttgttgccataaactttagtcctattgaatacggacatgtgctgttgatccctcgaattcttgaatgcttgcctc

SEQ ID NO: 6043 - DNA, 434 bp, Gossypium hirsutum
  Clone ID: LIB3120-001-Q1-K1-C7
ccaaaaaatcctgttccaaagcctactccatgtgctctcagcgacaagggccggccattgggacccgatcaaaggatctgctgatactatagtcgatactgcatttgcaaatttgggccatcctgtaaatttgaccattcaatacaggcaactcctccaacagtgtccggactagatcagtctataccgttcaggcattccaccgctacagaacaagctggaattgccagaagcaaccgtgctgataccgcagttcagcagtctgtgtcaaacaaggattcttcgatcaaaggtccataccacttatatctctcacattattatcaaggattctgaattttacctttatttcaaccggaaaagtcgatttgacctctatattcctgtttcagtagccataaacttttgaaggaatgtcattatatatgaacact

SEQ ID NO: 6044 - DNA, 257 bp, Gossypium hirsutum
  Clone ID: LIB3120-001-Q1-K1-C8
cccacgcattcgcgtactcatgttcagacttatgctaagtgtattaccttctgggctcagaatcacttccatgcgggcaatggcaattaaaggatggattcgtgcaccgaaaatactctatcctacccacgtactactattgacgctactggaccatgtggaaactgcctatattccggtgcaccgactcggatcacgtattgaatgaacttgaagaatgcaagatggaataccacaatgcatacattagaatcatt

SEQ ID NO: 6045 - DNA, 322 bp, Gossypium hirsutum
  Clone ID: LIB3120-001-Q1-K1-C9
ctcttttgtataactgtagcatatagtactagtaagctttaatagcaatggccccctccatgatctcgggggctaccattggcaccgtgaactgctcctacccggcacaggccaacatggtggcccccttcaccggcctcaagtctgcctctgctttcccagtcactaggaaggccaacaacgacatcacgtctcttgcaagcaatggtgggagagtgcaatgcatgcatttgtggcctcctcttggtgagaagaagttctagacactctcatacctacccgatcttacacccgtacagttggctaaggaagtttattacct

SEQ ID NO: 6046 - DNA, 438 bp, Gossypium hirsutum
  Clone ID: LIB3120-001-Q1-K1-D1
aaggatcttttaaaaccattgagggagtagaagtccaagtaatcgacaacgttttttttcgacacggaaaaaattggattacttttatggaccagggaggaaccatctcttcgttccgggtccggttaacataccggaacccgttattcgagccatgaaccggaataacgaggattaccgttccccggctattccggcaatgacaaaaacccttctcgaagatgttaagaagatattcaagactacgaccgggactccttttatgatcccaacaacaggaaccggcgcatgggagagtgcacttactaatacgttatcccccggtgaccgaatcgtatcgttcctcattggacaattcagtcttctttggatcgatcaacaacaacgtctcaagttcaacgtcgacgttgtcgaaagtgagtggggacaaagtgctaa

SEQ ID NO: 6047 - DNA, 291 bp, Gossypium hirsutum
  Clone ID: LIB3120-001-Q1-K1-D10
gggggcttgctggaaaggctagctttaacaggtgtggatgtatacagcttatattggacctggtgacagtggcatgaaggctagaaaacgacgttggacactatattgctgagcagggaatcgttgatcctgtagttgtatgcgcatcaaaggacttcatgaccaatcgtattcatgatactgggacaaaagctggtaaagggaaacatatattgaatctcggagatggtattaaagttgcatcacctgaacaaaatgtggaccatctctatgatgttgctccagctgtca

SEQ ID NO: 6048 - DNA, 468 bp, Gossypium hirsutum
  Clone ID: LIB3120-001-Q1-K1-D12
ggaaaaatggcgacctctgctttagccattgcaactgcatagccattgacccatcgtttcggcaactggtgagcacacttcatggccatccttctcctgttcttgctgttcttgcacgccactcgcacctcccaacgaacccaaactctctttcaactcaaaacctgttgcgaaacaatgtgttttcaatgtgggtgttgggcttttagcagcttcacttgttgcttgctcaccattggacgctgatgccaccaggatcgagtattttgcaactggtggggaacctccatgtgagctcaactatgccaaaactggtcttggatactgtgatgttattgcaaggtctagtgtggaagctccaccatgggagcttggcaatattcactacactggaagatttgcctgttgggatagtcctttgaaagtagctataaacggtgctacaacctcttaccatgcgaattggtc

SEQ ID NO: 6049 - DNA, 439 bp, Gossypium hirsutum
  unsure (1)..(439): unsure at all n locations; Clone ID: LIB3120-001-Q1-K1-D2
cccacgcgtccgcccacgcgtccgcccacgcgtccgggaaaatcggcccaaacatcggaggattttagcaaagcagacaagggaagccgaaaccctaagtacttgccctcattcagccgccgttcgacctttaatccaccacgactattgatggataaaatcctacggtggagccttctttctactcgactccacggtttaatgactttagccacaaagccctctctctgccttcgatattgacgaaggggatggagatctccaaggcgcactcacgaaggtaaagcttctgcctctnttctccttaatatttctttgttcaagaaaatagggggaaacgaaaaaagaaaaaaaggaacccagaatctgaatctcaccttttaatttcttttgtgtttggtatttcaaatgtattgattgtgtgcgtaaccttacaact

SEQ ID NO: 6050 - DNA, 451 bp, Gossypium hirsutum
  Clone ID: LIB3120-001-Q1-K1-D3
gaaggattagagattacctccagcgaggactacactgagcaatggttagaagaagcagaaggttccagtggaagttccctgagcatcaagaaaaacctggaacatgaagaagatgtttcattcagtgatctggaagacgatgataccgatacttctaatagagcatcagtgcgtaagtcaacacagcatgacaaagctctttcatccagtggatccaatgactgggttcagctgaacaagagactagaaactcgtggtgctttgcagaaagcaggccaaacaagttgtcgagataaagattctgaagttgaggagtcaaatgactggctcactgatgatgatttcgtcgacgtggtaagagggaaatgaatttctgattcactgtaaagtttcataaacccttttctacctgtagaacttctgtacttgtgggaatcagaccatcacataa

SEQ ID NO: 6051 - DNA, 458 bp, Gossypium hirsutum
  Clone ID: LIB3120-001-Q1-K1-D4
cccacgcgtccgaaaaagaagcaaaaaaacatggccaaagttctgttgttcattgcactatgtgtgcttccagctttggttagtgctacacgcattctgaataatcaattggtggtagaaggctatgtgtactgtgatacttgccgtgctggttttgaaacccctaagactagaagcctagctgatgccatggttaggttggtatgctccgacaggaagagcggccaagttgtcttcaaaaaggagggatacaccgacaaaaccggaaaataccagattcgtgtatccgaggatcacttggatcagatctgtgatgcagttcttgtgaagagctcccagcttggttgtgccacaatgtcccccggtcgtgaacgtgcccgtgttatcttgaccaacttcaatggcatttcatccaccacccgttatgccaatgccatgggcttcatggttgacgagcc

SEQ ID NO: 6052 - DNA, 343 bp, Gossypium hirsutum
  Clone ID: LIB3120-001-Q1-K1-D5
gcgagccactcgtccgaaggaattcttgcgcacgtgaacttagacacaggcattacaatatatgatgctgcaccctgtctactctactgcatgcttgacaccctactcggagcaatcggagctttgatcgaccgaagtaagattgccgacaagccttctacaggcattgaaggtgcagtaatacctcctgggaagggcattacgggcgcattgtgtctaaaggatagaggtccattggcaggattcacaaaggcgaacgagctgcttgtcggaagaatggcttacctggggattgccttattattgataggagaaattatcacagggtaaggagctctagctc

SEQ ID NO: 6053 - DNA, 345 bp, Gossypium hirsutum
  Clone ID: LIB3120-001-Q1-K1-D6
ctcgtggatttggatttgtcacttttgatgagaaagcagcaatggaagaagctattgaagcaatgaatggaatggatttggacgggcggaatataactgttgatagagctaaacctcaacaagggtcagggagagattatgatggtgaccgtagccgtgatcgtggacgtgatcgtgaccacgatcgtagccggggctatgatggcagtcgtggatctaatggtggggagtgttttaagtgtgggaaacctggacactttgctagggagtgtcctagtgatggggctagggggggtaagtataatggtaggggggatcgctatggcggtggaagcgttcgtcgcc

SEQ ID NO: 6054 - DNA, 423 bp, Gossypium hirsutum
  Clone ID: LIB3120-001-Q1-K1-D7
aacgatgtgatgtgcctgcaacttttgacgttacctccataattgatgagcctgtccagtggatgtatggacagaatcatgaaccagtgcttctaactatcacattatcattaccgtaccacaggtcacgtatagaccgtgctcctgacatattcaaatgaacgcacactgtgatctgcgaactcaaaaatgcccatatgactacctctcttggcggataagcaattgccgtgtgatccttgtgaatgactagttcgaccgatgtcaaggagtgttccaccgacaagtctgcgattcactagttacccatgctgccatagcatgtgccgcttcaatggctacctgaggctctgatagccaatggcattgaagcggggactatccagtgtgtgcgtgcaaatgagcagaaggtctggatctcga

SEQ ID NO: 6055 - DNA, 437 bp, Gossypium hirsutum
  Clone ID: LIB3120-001-Q1-K1-D8
tgctgagttatccatttgtgagagatggattggtgaagaaaaccctgggaatcaagggcggttactatgacttcgttaaaggaagtttcgagctatggagtcttcagttccaactttcaagctctctctctgtatgaaaacacaccaaaccatcaccattgacaccatctttgttctttaactaccaatcctttttcttacaatgtactatgttcatgtctttatcgtctattacaataaatatagatgatagagatcacctgccgcccgccgtctgcggtggtggctgcggtggctctttccatctatcaattctcctttgaaaaaaatcattggctacaagaggctctgatagtcaatggcatagaaacggggactattcagtgtgtgcatacaacggagcagaagttctggatctcgtttgcctatcgagattc

SEQ ID NO: 6056 - DNA, 414 bp, Gossypium hirsutum
  unsure (1)..(414): unsure at all n locations; Clone ID: LIB3120-001-Q1-K1-E1
cggcaaccaacccaggtcaccctaaagccttaggcaccttggcacccttggttttccaccgttctactttggttggccaaaccgtttggaagcagtccaatgagctcttacgcaaagtccggaggctttcaatcgtggtcgtgttcccatgcgcagaactgtgaaaaatgcccctactagcatctggtatggncctgaccgnccaaagtacttgggtccattctcagaccaaatcccatcatacctgacaggtgaattccctggtgactatgggtgggacactgctgngttatcagctgaccctgagacatttgctaagaaccgtgagcttgaagtgatccactgcagatgggcaatgcttggtgcccttggttgtgtcttccctgaaattcttcaaagaatggagttaagttc

SEQ ID NO: 6057 - DNA, 446 bp, Gossypium hirsutum
  Clone ID: LIB3120-001-Q1-K1-E11
caaccccaccaatttctcaaagtagggctggcaatggggatgatgaggctttccaaatgctgggtgtcgttgttgtttcttgtggctctgtcgggattcacccatggatttgtgatgtcgcctcgcactttgcttaaccgcttctctcaaaacagcaattattatttaaccactgaagagcactggttcgatcagactctcgatcactattctccttacgaccaccggcaatttaagcaacgttactatgaattccttgactactttcaagttcccgatggacccattttcttaaaaatttgtggggagtcttcgtgcaatggcataagcaatgactatctcggcgttttggccaagaagtttggggctgccgtggtttcacttgagcatcgttactatgggaaaagcagcccttttatgtcacacacaacggaaaatctgaaata

SEQ ID NO: 6058 - DNA, 408 bp, Gossypium hirsutum
  Clone ID: LIB3120-001-Q1-K1-E12
cccacgcgtccgctcttttcattctctccgatctcattgactcacaaatgaatccttccattctatcgaaccgtcctttagagctctatcccatgtttcagatctctcttctttgattcaattttttgacgtttttagaaagaaaaaaaaatcttttgattaaatctcaggatccctcgattttctctcacaaacccagttttttttctttcatttttcgtaatgggtttcactcaaattcgctttctcttcattgtttcctttttcttcttcgttttcgcttccgtttctttttctcaggattcaggttttcaagctgagaaggaggaatctgatgggtcaattaaagatctcgggcgccgcggcatgattggttcaaagaactcccagaatggtgtagtagaccag

SEQ ID NO: 6059 - DNA, 432 bp, Gossypium hirsutum
  Clone ID: LIB3120-001-Q1-K1-E2
atccactgacttcaccggtgtcagcctctttaagtccaaaggctccactagactcataacggcaactcggtgctgtgactacaagcaacaactcagcctcagctcagtgaaacgttgctcaagatcaaccgccgcaacaactgacgatgcgactggtcgtctagtcacggtgaactacggtaacgattcgctcgaaatatgtagagtacttaacggcatgtgtcaaaccagtggaagtagacgcagaatctaccgagactcctgcctataagccatgctttgctacgctgacacctgactctgcgactatgacatggacgaccactactggcctgcataagatctttatggcatatgtatgaatagagttcgtgtggagcgtccgacatagtacttgggaatagtcataagtcttactaaatgggtaccttc

SEQ ID NO: 6060 - DNA, 289 bp, Gossypium hirsutum
  unsure (1)..(289): unsure at all n locations; Clone ID: LIB3120-001-Q1-K1-E3
gtcctttaattaatcgttgaacctaaccgtacctcacataaccccattagccaaaatggcgtctccaacttcggcttaaaccaattccccgtttggccccaatcttctccccaaattctttcctttacccgtcctctccttcactcacagcctcaaatctatcccaccaaagctcaagtctctgatttccctcaaaagagacaaccacctctcaaccttaaccgtcanagcccagaccttggacttctncggttcattctttgagggtggctttcgctctgatgatgac

SEQ ID NO: 6061 - DNA, 367 bp, Gossypium hirsutum
  Clone ID: LIB3120-001-Q1-K1-E4
caacaaaatcagttgcttcacaatggcctctacaaccatggctctttcttccccatcattgggccggtaaggcagcgaagttctccccttccacccgtgaaatccggggaactggccgtgtttccatgaggaaaaccaccaagccttgttccttctggtagcccatggtacggtcctgaccgagttttgtacttgggtccactttccggtgagccaccatcttacttgaccggtgagttccctggtgactatggttgggacactgctggactctcagctgatcccgagacctttgctaggaaccgtgagctcgaagtcattcactgcagatgggccatgttgggagctcttgggtgtgccttccctg

SEQ ID NO: 6062 - DNA, 334 bp, Gossypium hirsutum
  Clone ID: LIB3120-001-Q1-K1-E5
gcgacccactcttccggactatctccttagtgccgcatttgtctgggtacttaatcaagctatttaacaggcactgtccatttgatagaatgggcaattggcacaactcgtaataccctgaacttcatggtgaattacactactagatacctgagactctgggagtcccattgcaacgaacatagtggagacaacctgggactgatacatacctagacatgagcttattacagctcttgcaagtttaacgtaggtgaccaggctgaaaacagtagtgccaacaggctttattacttactgaacatacgacgtatctaaatatctccacatgatc

SEQ ID NO: 6063 - DNA, 416 bp, Gossypium hirsutum
  Clone ID: LIB3120-001-Q1-K1-E6
gccacgcgtctgagggttccatcaaccgttggagccttacctgctattttacgtgcaccagcacctgctctgaatgcgctcgtcgaccacctacattgcggccttcggtcatggctagccataactcttgttattctactccgactgttatccatgaccgcccggttttcgctgaccctgttcctgtgctcaacccgagaggagacatgtgaaacaagtcctacgacgaagccattgaagctctcaagaaacttgttactgagaaaggagaactgaaagctgacgcagctgcaagggtagatcacatcacaaccgagttaaacacaacatgagttgacggcaaaccatctgactcttctgatgagagactgaaagaaggcttagtttacttcaagaaagaaaaatctgaaaagaat

SEQ ID NO: 6064 - DNA, 325 bp, Gossypium hirsutum
  Clone ID: LIB3120-001-Q1-K1-E7
cccacgcgtccgaccacgcgttcgctatagcatacactactagtactcactcctggcattggctttctcaatgatctgatcggctaccattgccactgcctctttggcacaggctaacatagacgattcgttcaccggccttaagtctgactcatctcaaccagtcaccaggaaggcctacaacgacattacttctctcgcacgccatctcggaacagtgcaatgcatgcagctgttgcctactactggaaagatgatgctcgagactctgtcatacctactcgatcttacaccactgcagctggctacatgaagcagtttacct

SEQ ID NO: 6065 - DNA, 169 bp, Gossypium hirsutum
  Clone ID: LIB3120-001-Q1-K1-E8
cccacgcgtcttaccacgcgttttctctattaacctatccaagatctttttcgggcccttgcaaatcgtaattagctcatatattaccatatacactacctatcttctacacgctcacatatacgccattcgtaactcgccacaaaatcggtactcaacttatctaata

SEQ ID NO: 6066 - DNA, 326 bp, Gossypium hirsutum
  Clone ID: LIB3120-001-Q1-K1-E9
tacactctctccacccacattggctgctgccagtgttggcaatcccaggaggagaactaaggttaatgtaagttacattataggattgaattcctttggtgggctaaaagctcataacaatgtgatctcactaggccaaccagtgtgcattgaacgatcatttgcaaaggttgtgagctcactcagagctccatccaaggggaaaggtagtggcggcggtgccctctcttcaacctgcaatgcaattggtgagatatttaggattgcggcaatcatgaatggacttgatctcgttggtgttgctgtggggtttgttctcctttgaa

SEQ ID NO: 6067 - DNA, 367 bp, Gossypium hirsutum
  unsure (1)..(367): unsure at all n locations; Clone ID: LIB3120-001-Q1-K1-F1
cccacgcgtccgctcccatcacccgagatcatctttccccttcagaatggcggctgcaaccatggctctctcttccccatctttcgccggaaaggccgtcaagctctctccttccgcccctaaaatccaaggcaatggccgtgtttccatgaggaaaaccgctaccaaggctgctccctctggaagtccatggtacggtcctgaccgagtcttgtccttgggtccactatctggtgagcctccatcttacttgaccggagaattccctggtgactacggttgggacactgctggactctcggcggacccagagacatttgccaggaaccgtgagctcgaagtcatccactgtangtgggctatgttg

SEQ ID NO: 6068 - DNA, 468 bp, Gossypium hirsutum
  Clone ID: LIB3120-001-Q1-K1-F10
atgaggctccaaactttacaaagctcgcggacaaggttgcagcacgctgggttctatgtgggggctccggacttcttttatggggaaccctattaccctaataaccctgatagacctctatctgcttggataaaagatcatggaccggataaaggttacgaggatgcaaagctcgcaattgacgctttgaaaagtaaaggggtttcatccattggagctcgtgcgttctgttggggtgctaaagttgtggctggactggctaaagatccccttatccaaacagctgtaatgatacatccttcatttgtgactggggacgatatcaaaagtgtgaaagtggccattgcgatattgggagctgagcatgaccatatatctcccccagagcttttaaaacagtttgatgataacttaaaaaccgatgaagttgatagctatgtgaaaatatttgctaaagttgcccatgga

SEQ ID NO: 6069 - DNA, 428 bp, Gossypium hirsutum
  Clone ID: LIB3120-001-Q1-K1-F11
gcttacggtggatacctatgcacccagagactaggaatggcgtagtaagcgactaaatgctgcagcgggttgaaaataagcgtagatccggagattcccgaataggtcaacctttcgaactgctgctgaatccatgggcagacaagagacttgtgttataggatttttgatagacaggattcgacaaatggacttagtcataacataaataacatataaatggattgtgcaaaaatccatagtggtttttttattatttattctagttattctagtaaaataaaaaataaatggaaataaaaagaaataggaagaaagaaaaagaatacaataatattttgattctatatcataggaacggaaataggacttcttccgcttctgattgttgattcaatgcaataacaagattattttgttacaacaag

SEQ ID NO: 6070 - DNA, 411 bp, Gossypium hirsutum
  Clone ID: LIB3120-001-Q1-K1-F12
cccacgcgtccgaaaaaatacaaaatctccattaatttcattgcttttccaagttgttaacagtggaggatgattcaaaccatttctcaaaaccagaaactcccaacaccatgaaagctgaagctgaagcagaagaaagagaccctgaaagtaattcttctctaagtgaaccacttttgaagagaaacagaaccctttctagcaatccattagccttggttggagccactgtctcccatattgaaagcttggattatgagataaacgagaatgatcttttcaagcatgattggagaagcagatccaaagttcaagtccttcaatacatattcttgaaatggactctagctttccttgatggattgttaacaggattaattgccactcttatcaatcttgctattgaaaaca

SEQ ID NO: 6071 - DNA, 254 bp, Gossypium hirsutum
  Clone ID: LIB3120-001-Q1-K1-F3
accggttgccgcttcctttggcgtctctgaattgctcggtacccctctgaatttaactgggggacctaggtcatcggttccaacaccttccacctcatccattttcaaaaccgttgctcttttctccaagaagaaggccgctcctccaaagcccaaggctgctgctgtcgccccggccgatgaagagctggctaagtggtacggtccgacagaagatttcttgcctaaggtctgtaacaacgagatccaatctg

SEQ ID NO: 6072 - DNA, 225 bp, Gossypium hirsutum
  Clone ID: LIB3120-001-Q1-K1-F4
cccacgcgtacggtcactcaaacgatccgttgtacggatgactgtctaacagatggcttgatgatgtacgatggcgccttaagatagagcctagagaccgcatcaaagatggggttactcacgttgtaggttaacggcatgtaccaatgctgaagatgctggtgctgagatgatcatgacggcagagttttacatgatgcatggtgctatgagcatgaaggaaca

SEQ ID NO: 6073 - DNA, 395 bp, Gossypium hirsutum
  Clone ID: LIB3120-001-Q1-K1-F5
gaaaaaaatcatggccaccgtcacgacgcaagcctctgccgctgttttccggccatgtgcatcgaaaacacggttccttactggttcttccggtaagttaaaccgagacgtttcatttaaaccagtggctgctacatcgactagctcattcaaagttgaagcaaagaaaggggagtggttacctggtcttccttcaccagcttacctgaatggcagtcttccaggtgataatggctttgatcctcttggattggctgaggaccctgagaacttaagatggtatgtacaagctgagctcgtgaatggacgttgggctatgttgggtgttgcaaggatgcttctgcccgaagttttcactaagattgggataattaacgctcctcaatggtatgatg

SEQ ID NO: 6074 - DNA, 450 bp, Gossypium hirsutum
  Clone ID: LIB3120-001-Q1-K1-F6
gagttatccctcactttcctcaccaaaaaatatccaaacaacgaccaccgtccactgccgccgaagaggacagacccctataaataaaaaaatggacacaattctccataccgaacctctatctctcactcgcttacgcgccacttcgaattccagcgcttccattcaccatatgccttgccagctcatcttccgtactttccaccgtctctcctttcctttatccaccgtcaacgctggctccagttctcgcaggtcatccgcttttgatgtcgccactagcggcactctcaccgccaattccgtttcgccgagaggtggagtatatacagttggggatttcatgacgggaaaagaggatttgcatgttgtaaagccaacaacaactgttgatgaagcactggaagctctacgtgaacacagaatcaccggttttcctgatatcgatga

SEQ ID NO: 6075 - DNA, 392 bp, Gossypium hirsutum
  Clone ID: LIB3120-001-Q1-K1-F7
ggacaagactactggccagaagaacaagattaccataacaaatgataagggtcggttgtcgaaggaagaaatcgagaagatggttcaagaagccgagaagtacaagtccgaggatgaggagcacaagaagaatgttgaagccaagaattcattggagaactatgcctacaacatgaggaatactatcaaggatgagaagattggttcaaagcttgacccggctgacaagaagaagattgaagatgccattgatggagcaatccaatggttggatggcaaccagctagccgaggctgatgaattcgaggataagatgaatgagctcgagagcatctgcaatcctatcattgccaagatgtaccaaggtgcatgggctgacatgggtggtggca

SEQ ID NO: 6076 - DNA, 448 bp, Gossypium hirsutum
  Clone ID: LIB3120-001-Q1-K1-F8
ggatgttctcaaagcttctactaccattgtttattcaccatacattccaacaacaacatgaaacaaatcccagttttctaaacccatctttcacaatttgaacttacaattaccatgttttacaagaaatggatcgaaatccaggttgtttacgaccttatcatcgtacccaatatcaacaactgagtctattgagccacctatgccggaagttgacgctgaggtcggtaaagagagattcgattggtactcacagtggtatccggtgatgcctgtatgtgatttgcataagatggtgccacatggtatgaaagtattaggacttgatctagtggtgtggtgggataagaacgagaatgaatggaaagtgttcgatgatacttgtcctcatagattagctcctctatctgatggaagaattgatcaatgggggatgttacaatgtgtg

SEQ ID NO: 6077 - DNA, 315 bp, Gossypium hirsutum
  Clone ID: LIB3120-001-Q1-K1-F9
acgctcacccatttccttctgcgtagaccacggttgaacgctgttgctgctggttgatctcttgacaaagagacaattttagtacaattaatgtgcctagtacgatgatgtctggtccacttagcatgagcataggcttatcttcagctctgaacatcactgaagaagcaactactgtcactaagaagcaaggcataatatctattcttggatcggatactgatcagagaccaaccaaaaggtcttcacttagaagaactttatcaactgatatgtcttccaaaaaatggctcactcaactgagccatattgcat

SEQ ID NO: 6078 - DNA, 416 bp, Gossypium hirsutum
  Clone ID: LIB3120-001-Q1-K1-G1
cgtttattgaacttgcgggaactcaaaaacaattcgaaattaatggctaccactcacctgacaactcaaattctccggcaagcccctcctgtttgcggaagtttccgacgtgttaccaccaccggactctcttctagttctcctcttactataacctttaagacaagaaaagaaccaagtccgaagaaccaaaagttcaagtgggcacgtaagttaagcttagtggaagaaagcagcccgccaaaaccaactgttgatgttgaaaggttagctactttcttgtacgatgatcttccccatctggttgatgatcaaaggattgataggacggcatatgacgaacaagtcaagtttaaggaccctataacaaagcatgatacaattagtggttatttgtttaacatttctttgttgaa

SEQ ID NO: 6079 - DNA, 454 bp, Gossypium hirsutum
  Clone ID: LIB3120-001-Q1-K1-G10
cccacgcgtccggtgcttcttcggctattgcagctgttgccatctcatcccccagttcccagaagactggatcagtagtggggacaacaaaggcttctttcctttcagggaagaaacttagatctgtgagaaagtacacaaaaccagctgccggaccaacatttccagtgtgcgccgccgccgaccccgacagacccctttggttcccaggcagcactcctcctccatggctggatggcagtctccctggtgactttggtttcgatcctctcggtcttggttctgaccctgagacattgagatggaacgtacaagcagagctggtgcactgcagatgggcaatgttgggagctgctggtattttcatcccagagttcttaaccaagattgggattttaaacactccatcgtggtactcaacttgaacagaggaatactttactgacaccacaac

SEQ ID NO: 6080 - DNA, 445 bp, Gossypium hirsutum
  Clone ID: LIB3120-001-Q1-K1-G11
cccacgcgtccggccacgcgtccgtatcccgcatgttctttatcgaggggcagctggaggagccacagagttctgactggaaattagtgtatgtggatcatgaaaatgacatattacttgttggtgacgatccttgggaagaatttgtaagttgtgttcaaagcataaagatactgtcgtcagcagaagtacagcagatgagcttggatggtaatcttggaaatgtgtcagttcccaatcaagcttgcagtgggactgaaaacggaaatgcatggagaggacattatgatgatacctcagcagtctcatttaacagatgatgtttctaaattcggatattgagatgtcttcttcccttgaacttttgccgggcctgtggatgaatatattgtatgcttgttcactcaaatgagtacaatgcagtccagtccttcaagagaagtga

SEQ ID NO: 6081 - DNA, 401 bp, Gossypium hirsutum
  Clone ID: LIB3120-001-Q1-K1-G12
aaaaaaaaaagaacatggctaagaagaagcatgttttgaaggaagacgatgaacatgatgggtccaacactaaaaaacaagtttgtcgagctgatttccctccccactttgtcttcggtgtttctacctcttcctatcagattgaaggaggtgtgaacgaaggtggcagaggtaaaagcatatgggatgctttctctcacattgaaggaaaaatcgttgatggaagcaatgctgatgttgcagtggatcattacaacaggtacaaggaagatatagagcttatatccgagttagggttcaaagcttacagattttccatatcatggcctcgtatttttccagatggtttgggaaccaaagttaatgaagaaagaattgcattttacaacaatgtgatcgat

SEQ ID NO: 6082 - DNA, 182 bp, Gossypium hirsutum
  Clone ID: LIB3120-001-Q1-K1-G3
tgctattccattttgctttcaactaacctttctacattctactgcttatctgtcttctttgggcttctttggtccccataagatgcgtagcatggtaagctctacctctgccaaaggcatcgccgccattgtaggcgtcggaccgaagcttgtgcgatccattgcccgcaagtttgctcatg

SEQ ID NO: 6083 - DNA, 354 bp, Gossypium hirsutum
  Clone ID: LIB3120-001-Q1-K1-G4
aagcaatccatcgaaattttttttccggcgggaaaaccctaagtaatttagcgggaaaatgtcgggaaaaggtgcgaaagggttgacaacagctggcaaatccacaaaggacaaggacaaggacaagaaaaaacccgtctctcgctcttctcgcgctggtctccagttcccggtgggtcgtgtccatcgactgctgaaaacaagggttagtgcaaacggaagggtcggagcaacagctgctgtatacacagctgcaattctcgagtacttgactgcagaagtgcttgaaactgcgggtaacgcaagcaaggatctgaaggttaagcgaatcacaccaagacatttgcaactagc

SEQ ID NO: 6084 - DNA, 435 bp, Gossypium hirsutum
  Clone ID: LIB3120-001-Q1-K1-G5
gacccactcgtccggattgagaacgttagatcgtacggagcggatccggcgattatcaaagctttggctaatagggaaattgggatcgtaatcggagcagctaatggagatattccttctttggcttccgatccaaactcagcagctcagtggattaactccaacgtgttgcctttttaccctgctagcaaaatcatactcatcactgttggcaacgaggtattgactacaaatgacccgaatttaatagaccaactgctacccgcaatgcaaaatatgcaaaacgccattaacggcgcttcactgggtggaaagatcaaggtctcaacgggtcattcaatggcggtgttgggtcaatccgacctgacatcttccgggttgtataggccgagttatcaacccgcattgtaaggtttgcttcagttacacaaggac

SEQ ID NO: 6085 - DNA, 447 bp, Gossypium hirsutum
  Clone ID: LIB3120-001-Q1-K1-G6
cccacgcgtccgcccacgcgtccgctttggaagagtttctcacaaaggcaacaacagataaggcattgattagattaatgatgtgtatgggtgaagcattaagaaattgcttttaaagttagaacagcttcatgtggtggtactgcttgtgttaattcctttggtgatgaacaacttgctggtgatctacttgccaacaagcttctttttgaggctttgacatactcgcacttttgcaaatacgcgtgctccgaagaaattcccgagcttcaagacatgggaggacctgctgaaggtggattcagtgttgctttcgatccgctcgatggttccagcattgtcgatacaaatttcaccgtaggtaccatctttggtgtttggcctggtgataagttaaccggtgtaacggggcgagaccaagtggctgccgcgatgggaattttcggt

SEQ ID NO: 6086 - DNA, 417 bp, Gossypium hirsutum
  Clone ID: LIB3120-001-Q1-K1-G7
atttttgcgccgtccgatgaagcttttaaagccgacggtgtacctgatctgagtaagttgaccaatgccgatcaagtttcgctgttagaataccatgcctcgccggattataaaccaaaggggactttaaagacgacgaaagatccgattactacattggctactagaggtgccgggaagttcgatttgacggtcaccgccgccggtgattccgtcacgcttcatactggaatcagtccatctagagtcgctgaagcagtttttgactccccaccggtcgtgatattcaccgtcgacaatattttgttaccctctgagttgttcggaaagtcaccgtcgccagcacctgctcctgaaccagtttcttcaccttcaccgacaccttctccattatccgaagcaccatcgccattagcc

SEQ ID NO: 6087 - DNA, 446 bp, Gossypium hirsutum
  Clone ID: LIB3120-001-Q1-K1-G8
ttacaaggtgccacttaattccaagcgaaatggcggtctcctcttccacagtgtctgctgcagtccctccatttctttgcagtaacaccaccaaaattcccagctttaaagtcccacaccacacgccactacgtttatacaatgctaaaagaacgcagatttgggtcaagaggagctgtttcaagtcaaccatcacagctaaagtcgctcaacaaagcgatttgcagtataggaagctcggcgactctgatcttcaaatcaatgaaatcacattgggaactatgacgttcggagaacaaaatacagagaaagaagctcatgaaatgctcagctatgcttttgaacatggaatcaatgctctcgatccttctgaagcctacccaattcccatgaggaaagagacgagtggaagaaccgatctctacattgctagctggctgaagtct

SEQ ID NO: 6088 - DNA, 269 bp, Gossypium hirsutum
  Clone ID: LIB3120-001-Q1-K1-G9
gtgaattttctttacagggtttctgtattattattcgttcttcaattctcatataccatagataattgtggatttgttcgcggttctccgatctttgtttttcatcaggaatctgtacaaggaatcatctcgggaaaaatttcattgccttttcttgacagttccttcctttatatacatgtatgtatattgggctctaagaaactgaagatcgttgccattactacgagcgtgcaaatagcagttatacatccctgacagccttaaat

SEQ ID NO: 6089 - DNA, 466 bp, Gossypium hirsutum
  Clone ID: LIB3120-001-Q1-K1-H11
cccacgcgtccgtgcacttgagggaaagaaaaaaaaagaagaagaagcttgaatctattttgttgaagatggagggtaaagaagaagatgttaagctaggagcaaacaagttctcagagagacaacctattgggacatcagcccagacagacaaggactacaaggagccaccagcagcacccttctttgagcctggtgaactcaaatcatggtctttttacagagctggtattgccgagtttgtagccaccttcttgttcctttacatcaccgtcttgactgtcatgggtgtgtctcagtctaaaaccaaatgtgcaaccgttggtattcaaggcattgcttgggcttttggtggcatgatctttgcccttgtttactgtactgccggcatttcaggtggtcatattaaccctgcttgtgaccttggattgtttctagcaaggaaactgtcacttacaagggcatt

SEQ ID NO: 6090 - DNA, 466 bp, Gossypium hirsutum
  Clone ID: LIB3120-001-Q1-K1-H12
agaaaaaaaaaagcttcaatctttggttgttaagtgggtgaaacaaaaaaaaaatggagggcaaagaggaggatgttaaactaggagccaacaagttctctgagagacaacctattgggacatcagctcaaacagacaaggactacaaggagccaccaccagcaccattgtttgagcctggtgagctcaagtcatggtctttctacagagccggcattgctgagtttgttgctaccttcttgttcctttacatcactgtcttgactgtcatgggtgtgtctcaatctaagaccaaatgtactactgttggtattcaaggcattgcttgggcctttggtggcatgatctttgctcttgttattgtactgctggcatttcaagtggccatattaacccaactgggacctttggggttgtactggcaaggaagctgtcccttacaagggcagtattcttcatgatcatg

SEQ ID NO: 6091 - DNA, 384 bp, Gossypium hirsutum
  unsure (1)..(384): unsure at all n locations; Clone ID: LIB3120-001-Q1-K1-H2
cttctccaatggcgactcagctgaagagcagctttacgtcgtctgttacaagaggactggtagtccccaggggcatttcgggatccccgttcaaagtatcttccggaaagaccaggaccccttgcttcactgtcaaagctgttcaatccgacaagtcaacatttcaagtaatccaacccatcaacggcgaccccttcattggaagcctggagactccaatcacctcaagccccttaattgcatggtacctttccaaccttccagcctataggacggcagtgaacccacttctgaggggaatcgaagtgggtctggctcacggcttcctcctggtgggtccattcgttaaggcccgccctctaagggacactgcngtggcgggtc

SEQ ID NO: 6092 - DNA, 433 bp, Gossypium hirsutum
  unsure (1)..(433): unsure at all n locations; Clone ID: LIB3120-001-Q1-K1-H3
cccacccgtccgtgaaaaaattgccagctaattgaacattcaaaattggctaagttggggtgctctcattttcctcatcagccagggccaatcccattcaacgcaaaaacatcctattttagatgacaatctcacaatcgaaagcttcatccacaaaactctccaatggaggaaaaatactcttcaccagttaaagttgcaggggaacagactggagctatcaacctncacagtggtagcagcagtgctgagcttcgtagctgcctccatatccagtgcgggaggcattgttgggggagggttgtttattcccattctcaccctcgtgggttctttagaccttacaactgcctctagcttctcagctttcatggtgacgggagggtcagttgcaaatcttatgtttaacttgagtgcccaaagtgcgatgttt

SEQ ID NO: 6093 - DNA, 437 bp, Gossypium hirsutum
  Clone ID: LIB3120-001-Q1-K1-H4
gacccactcgtccggagaaacgctaaaaatgctattctctctggctgtaccgctggaggattggctacgatattgcactgtgacaggttacgagctctccttactgctactactaaagtaaagagcatttcagatgctggcttcttactacatgcgcatgatgtctcgggagggaagcacataggagaattctatggcaaaatggctagactacacggatccgactagaattttccagcgtcttacctgaagaatgggagccagaccagagttgtgtctctatatacagtacgtgatgcatactatgcagacaccaatctatttcgaaaattcagcttatgactcctggcagattaagaacatgttggctcccattgctgctgacaaaagctaggagtggaaaagctgcaagcatgactagaataagtgtacagaaa

SEQ ID NO: 6094 - DNA, 421 bp, Gossypium hirsutum
  unsure (1)..(421): unsure at all n locations; Clone ID: LIB3120-001-Q1-K1-H6
tagaaaacgaattttttctaagaagagctttttttcttttttttttgaaagcaaggaagagtactactgtgaaagaaggcagcaaaaggaaaggaaaggataggatttgtagcgttcaagagggcgcttatctatctcagaaatagcagtaattaatttttgaggaaaaaatggcggcagcagcagcatcagcttccatgtcggccaccgccgtcttgattccacgtgttcctgcagccgttagaacaacccactgttccgccttgccgactgtccctcctcgcgtttccaccgcttccttttcctcgtccgttaagctaactccagaatccccgaggtttccttttctccaaacaaaagcaacagaagacacctctgtcgataccggngagctttttgatgacttgaaagaaaaatggga

SEQ ID NO: 6095 - DNA, 367 bp, Gossypium hirsutum
  Clone ID: LIB3120-001-Q1-K1-H7
atcttgtttctctacctattgtcattgatctttgaacccttcaccattgggtggatcttggtcatagagatattgggtgtaatatttggaatcgtcatctattatcatcaacccgggtcggcctccatcgtcattgagacctcattttcaattttgagtaacgaagacaaatgaggaaatccgcgataattgtgtcagctgctgtagtaatccttaatcctagcgtattcattcagaataccttctcttgaggttcttaagtttcgagttcgagtttctttcttttgtacgttggtttgttccgtcacctaatttccatggactagatgttcagtctttgaaaaaaaaacaacgtttctttgtatat

SEQ ID NO: 6096 - DNA, 453 bp, Gossypium hirsutum
  Clone ID: LIB3120-001-Q1-K1-H8
caaggaaatggcaatttcatcaacagcggcagccactgccgcttcttctaagcttagatacccacacgcctcccctttcccaactcactcctcaaccaccacctctgcctttttctcctcaattccctctaaactaacccctacaagggttgttgatctggcacacttggtggcaagcaagtggccggcctggctggagctggaaaccgtgaccccttggaggattactggaagacaaacccagcagatgaagaatgccaagtttacgaggcgttaatagttgcaactttatgaatggttttttcttttactcgcagatggtatagttggtggccaagggttttccaatgttcatgttaacaaaaaaaataaacagctcattttgtaatgacagcagagtgacatgaacatataacatttcaatgcatgcagctgcaatcatcttttgaataa

SEQ ID NO: 6097 - DNA, 350 bp, Gossypium hirsutum
  unsure (1)..(350): unsure at all n locations; Clone ID: LIB3120-002-Q1-K1-A11
gaaatggtnnagtagtangnntagtagtangnncggaaatgaagaaataggcattttgccgatttcatttcggtggagaatctaattaaannattcgatttaaggggcaatggcttatcngnngatgtataacaacacaaatgtccctttgcttatttatcaccnncctcacgaaggggtggcttacgaaagggtcgttacttttacaacnnngcttcgacannncagggttactatttcnnctcgaccttaactgcnntcgtggccttgggtgatcnnccgaaactacanctcactatagatccattcctgttttgccctcctcatgttgggaaagcaaccaataagca

SEQ ID NO: 6098 - DNA, 449 bp, Gossypium hirsutum
  Clone ID: LIB3120-002-Q1-K1-A12
cccacgcgtccgcccacgcgtccggctgatttagtttaagaaaacatttccttagagcataaaaggaaagttacgaacatgccgggtgtcaatcctgaaattgagttcccagccattgagtttcgtttatcggatttgaagcgaggaactgaaggatggaaccgtttgtgcaagagggttcaagaggcttgtgagactttcggttgtttcgaggtggtatatgaaaaggtatcgactaaactccgagaggatgcgtttgggttgatgaaagaaatggttgagctcccagtggagacgaaacagaagaataatagtcccatgccttaccatggttgggttggaccatgcaagcaggtttctgtgttgtatgaagggcttggagttggagatgcctccaactatgactctgttaaaagtttgctcaacttatgtggcctaatggtcaccca

SEQ ID NO: 6099 - DNA, 483 bp, Gossypium hirsutum
  unsure (1)..(483): unsure at all n locations; Clone ID: LIB3120-002-Q1-K1-A3
tcgtgcggtancaccaaaaaatggtcagtnnccttggtggaatatgttggtnnttccattaganngctcaggtcactttacagaatgcgtcctgtcaaatagcacccgaaaaatgttccatagaaagaaatgacganngggtattgtnntgtgaacannagttcaaaccataagtgaacccctacanttggaaatgtgccttcctcaacatccaaaattatccggagaatgtattcttccaggagagaacttggcacattggtttttnagtaccgaagggggaagtatccatatcagaagaaggactatatccattggtgtcnnatcccagatggtattgacaatgaacggataaaccccacaatacttagattgtacttctattgctagcnagtgctttgggagattntggcaattctcaaactgtttccttgtgtgtgaaaaggcttgtctacaccaacgaacaaggagagatagtgaaag

SEQ ID NO: 6100 - DNA, 124 bp, Gossypium hirsutum
  Clone ID: LIB3120-002-Q1-K1-A4
cttcgcggaccccttggctaattctaaatcgccggcccgcccttttttttttttttaagggatgggggacattccaaccggtctttggttaccattattatttgaataccaaatggattaaaag

SEQ ID NO: 6101 - DNA, 278 bp, Gossypium hirsutum
  Clone ID: LIB3120-002-Q1-K1-A5
tcttaagaaagttgggtacaaccctgagaagatcccgtttgttccaatctccggtgtttgagtgtgacaacatgattgagagatctacaaacctcgattggtacaagggtcctactctccttgaggctcttgaccagatcacctagcccaagaggccctcatataagccacttcgtcttccacttcaagatgtctacaagattggtggtattggaactgtccctgttggtcgtgttgaaaactgtgtcctaaaacccggtatggttgttacctttggt

SEQ ID NO: 6102 - DNA, 399 bp, Gossypium hirsutum
  Clone ID: LIB3120-002-Q1-K1-A6
caagagttctttttttcacagcaatggcagccatgaactccagtgttttggcatgcaacgatgctatctcaggcactggatcatctgagcttaatgccaaacttgcttcagcgccatcagttgcttccccagttatgtgcggtggtcgcaagttgcctgtgatcagagcccagcaggctaaattttctgattccaaaggatcaggtgccagtgaaggaagaagagctgctgtgctctacttggcagctggccttttcaccacagctgttgcttcttctgcaaatgctggggtcattgacgagtaccttgaaaagagcaaagctaacaaggaattgaatgacaagaagaggttggcaacaagtggaacaaacttttccagagcatacactgttcaatttg

SEQ ID NO: 6103 - DNA, 428 bp, Gossypium hirsutum
  Clone ID: LIB3120-002-Q1-K1-A7
agaacccccaaaaagaaaaccagacgcagttaaaagaagcttctatcaaagtgccattaacagtggccactctctcaattggcatcgcctcctccgcccccgccgccaccaccttcttttcgacaaaaacaaaacgaacccacttcaagctcaacatctcctgcgtccaatgggacccagaaggtattttaggaaagccggggtcaggacacttagctcgtcttgaattcaaaaggcggctagagagggacgcagaggctcgagaagcatttgagcaacatttacgtgaagagaaggaacgtcgccgagctcttcgccaatccagggaattacccgatactgctgaggagacgatcgagtattttcttgacaccgaagctcaagagatcgagtttgagattgcaagattgaggcatagattagatgag

SEQ ID NO: 6104 - DNA, 261 bp, Gossypium hirsutum
  unsure (1)..(261): unsure at all n locations; Clone ID: LIB3120-002-Q1-K1-A8
ggaaaacccgggccgaccgacgcgtacgnccactcttcctnnnttctctattttacttttcaagggtttctctcttcaaaaaaaccctgcagaaatctatgcgctggacgctcactttttgattcattcnatgatttcttttccttctcttcttcttgttgttttatagatgggtttgatatctgttttttcggatattttaaagaaacccacaattaaagatgtgccaatatacttactggtttttatagctcctttatg

SEQ ID NO: 6105 - DNA, 424 bp, Gossypium hirsutum
  Clone ID: LIB3120-002-Q1-K1-A9
aggaaatgttcaataatttgggtgacctgttgtgtactatcactgggtttgactccttcgctttgcaacccaatgctggcgctgctggcgagtatgccggactaatggttatccgtgcatatcataagtcaagaggagaccatcaccggaacgtgtgtatcatacctgtttcagcacatgggacaaatccggctagtgctgcaatgtgcggaatgaaaatcgttcctgtaggaactgattccaagggtaacatcaacattgaagaattaaggaaagctgctgaagctaacagggacaagttatctgctctcatggtcacttatccttcaacccatggagtgtatgaagaagggatcgatgagatatgtagaataatccatgacaatggaggtcaagtgtacatggatggggctaacatgaatgc

SEQ ID NO: 6106 - DNA, 269 bp, Gossypium hirsutum
  Clone ID: LIB3120-002-Q1-K1-B10
ctgctcctcactggcacacgccaaaatagtggcccacttcaccaaccttaaatctgcctctgctttcccagtcactaggaatgccaacaacgacatcacttctcttgcaagcaatggtgggaaagtgcaatgcatgcacgtgtggcctcctcttgggaagaagaagttcgagacactctcatacctccccgatcttacacccgtacagttggctaaagaagtagattaccttcttcgctctaaatggattccttgcttggaattcgaat

SEQ ID NO: 6107 - DNA, 449 bp, Gossypium hirsutum
  Clone ID: LIB3120-002-Q1-K1-B11
cccacgcgtccggacgtggtgagccacttgatcccgtgcttgtcctacgtacaaaacgggggtacgcccgctgctgcatgctgcagtggggtaaaaacactctacggccaggctcagacctccacggaccgccaagacgtgtgcaagtgcatcaaatcggcggtgaacggaatgccttacaccggctataacctcaatctcgcagccggcctacctgctaaatgtggtctccatcttccttacaacatcagcccctccactgactgcaacaaggtgcagtgaggttgatgatgatgatatggaagaaggagtgggagaaggtttcagctcagctagataaagtagctagctaaggttaaataagctgtgctggtgtgttgtttttcagcaaattccatgtataatcggggaaagaaaaagaaatagaagctgtactttctaactgtatt

SEQ ID NO: 6108 - DNA, 223 bp, Gossypium hirsutum
  Clone ID: LIB3120-002-Q1-K1-B12
cccactcgtacgcccacgctttcgataaaaatgatctaaaaatgatttattaactaacgtgaacgagcaactattctataaaaaccgtctctgtatacctatacctttgcctcatcacatgatggctcgctaagcatcttctacttaccggactcacattcaaagactctgttcttgacccacatgatccaatgaagacactactcttgctcaaacttgacgg

SEQ ID NO: 6109 - DNA, 441 bp, Gossypium hirsutum
  Clone ID: LIB3120-002-Q1-K1-B3
gttttaaaaaaagaatcaaaacccttcctttttttttcaaaaccattcccctcctccggccattgggtctggccaaaggcagccgtcggcccctctgtgggcggttgtcggcgcccttaaaaaatcagttttttaacccagttttcaaaccccactcaaaggccgagtctttgaaacgggaagccgagagaaaaaagaaaaagaaaaaaatggtctttggcctcctttaagtccgaatctaatgacggcaaggagatcaccgacgccgggctcgcaaggtgaccagttacgctccttctcccttctctttttatttttattttcgcagataaaaaaataaataaacaaaataactaaaaaggatctaaaacaaaaagaacaaaaagtggaatatcacctttgaaaccttgttttttatttatttgaaaagttttgtacgaa

SEQ ID NO: 6110 - DNA, 430 bp, Gossypium hirsutum
  Clone ID: LIB3120-002-Q1-K1-B5
ctttcctttcctttccttttctctctctctagcaatggagtcgcgattgttatcacgcgcgttctgttatcaccggcttacctcagctcaggccgaagctttcgccggggattgtcaacgtttcgtatgcttcggctaagccgatcggagccgtcggtgaaggcgggaacgtcatatggcggaggcaactaaggccctccttgctactcgaatgctcgtcggttagcaagcgagaggttctgaaaccggtttcggctgccgcgtcgtcaccggccgatggaggaagcgattccgccggggaggggaagatcgctccggttggattcttcgagaagtatcctgctcttgttaccggatttttcttcttcatgtggtacttcttgaatgtaatattcaacattctcaacaagaagatctacaattacttccc

SEQ ID NO: 6111 - DNA, 430 bp, Gossypium hirsutum
  Clone ID: LIB3120-002-Q1-K1-B6
agcccagatttcgtttagaaattagaaaaccccaccgtttatagcgctgttattaaatacgtccataaacatcatcccctcaaaaaaggagaagcttctctctcccattaaccctaactacacaagaaataaaattacctcaaaacaataggatggcagaagcagaggtaggatctggtgaaggaaagccccaagagatgtcgttgaaggataaagggaatgagtttttcaaggctgggaactaccttaaagctgctgctctttacactcaggccattaaacaagacccttcaaatcccactctttatagcaatcgagcagcagcgtttctaaatttggttaaacttaacaaagcgctggctgatgctgagacaacaattactttgaaacctcaatgggaaaagggatattttcgaaaaagatgcatttt

SEQ ID NO: 6112 - DNA, 444 bp, Gossypium hirsutum
  unsure (1)..(444): unsure at all n locations; Clone ID: LIB3120-002-Q1-K1-B7
cccacgcgtccggggttctttggtttacttttcaagggtttctctcttcaaaaaaacccgggagaaatctatgcgcttaacgcttactttttgattcattcgaggggttcttttccttctcttcttcttgttgttttagagatgggtttggtgtctgttttttgggagattttaaagaaacccacaattggagatgtggtgagggagttactggtttttatagctcctttatgggttgctgtaattgttggggttttagttggttgggcatggaagccgaagtgggcaactataggcagggagatgttcatggattgttctggttctaaggattcggctcctgcagaatcttctgagtcttctttcagtggttttggttcccttccgagcttgaanttgatcaaatttcagttgcctagtgttatctcttggatttcagatgac

SEQ ID NO: 6113 - DNA, 394 bp, Gossypium hirsutum
  Clone ID: LIB3120-002-Q1-K1-B8
cccacgcgtccgcttttcttatcctgtgcaggttttgttactgatgaaaaaccttactgggaacttgtgtagtccagattttgagccaattaggaaggtcctatcttcatatgatgttggcacaaacacggtgggagttaccaaaggaattattccccaaaaccaaatgaatgatatattgtgttaaggtgtttattatgtaggattttcgggcaactacgttcctctcatattatacttctccaatgctgcccccagaacagaatctgttttctggtgattgctatcttaaatctaaagcgagtgatgggaattaggggcagcatccttcgaggtttaccaggtggagaagttgcagccagcaacctatagaaaatgctggaaacgatgagtg

SEQ ID NO: 6114 - DNA, 418 bp, Gossypium hirsutum
  Clone ID: LIB3120-002-Q1-K1-B9
aaaaaaggcagttaggaaccagaaaccaatgcaatggcttctcttgcaaccttagctggggttcaaccaacgaccatcaagggccttggtggcagctctctcaatggaaccaagctcttggtgaagtcaactcgccagagtttcaaacccaaaaactacagggctggtgctgtggtagcaaagtatggtgataagagtatatactttgatttggaggatattggcaacacaactgggcaatgggacttgtatggatccgatgcaccttcaccgtacaacccactccagagcaagttctttgagacatttgcagctccatttaccaagagaggattgttgctcaagttcctgatcttgggaggcggttccctcggtctttacctcagtgccactgcttccgatgaccttctaccgatca

SEQ ID NO: 6115 - DNA, 436 bp, Gossypium hirsutum
  unsure (1)..(436): unsure at all n locations; Clone ID: LIB3120-002-Q1-K1-C10
caccgagccagtgtccgttttacacgattgggttatagcttagctntgcttaacttctttgagaggaaaacttcattgagacaccatattaatgagttaaaaatctttaccggaaatgggcaaactcgttcccaatcgctcgtttttccttttatttttcctttttcttcactttctcctcttcgatttcgctctctctgagattttcttcgaagaacgcttcgaagatgggtggaagagccgatgggtgctgtcagattggaaaaggagtgagggaaaagccggcacctttaagcacaccgccggcaagtggtctggcgatcctgatgataagggtattcagacttataatgatgccaaacattatgccatctctgctaagataccagagtttagcaacaaaaacagaactctagtggtccagtattctattaaa

SEQ ID NO: 6116 - DNA, 451 bp, Gossypium hirsutum
  Clone ID: LIB3120-002-Q1-K1-C11
gacccacgcgtccgcccacgcgtccgcccacgcgttcgcggacgcgtgggtttagctatggcatggactactagtacccactactagcaatggcttcctcaatgatctcatcggctaccattgccactgcctctccggcacaggctaacatggtcgctcctttcaccggcctcaagtctgcctctgctttcccagtcaccaggaaggccaacaacgacattacttctctcgcaagcaatggcggcagagtgcaatgcatgcaggtgtggcctcctactggaaagaagaagttcgagactctctcatacctccccgatcttacacccgtgcagttggctaaggaagtggattaccttcttcgctcaaaatgggttccttgcttggaattcgaattagaggagggattcgtgcaccgtaaatactcgagcctacccacgtactacgatggacg

SEQ ID NO: 6117 - DNA, 441 bp, Gossypium hirsutum
  Clone ID: LIB3120-002-Q1-K1-C12
aacaaaatcagttgcttcacaatggcctctacaaccatggctctttcttccccatcattcgccggtgaggcagtgaagttctccccttccacccctgaaatccggggaactggccgtgtttccatgaggaaaaccaccaagcctgttccttctggtagcccatggtacggtcctgaccgagttttgtacttgggtccactttccggtgagccaccatcttacttgaccggtgagttccctggtgactatggttgggacactgctggactctcagctgatcccgagacctttgctaggaaccgtgagctcgaagtcattcactgcagatgggccatgttgggagctcttgggtgtgttttccctgagctgttggctaggaacggtgtcaagttcggtgaagctgtatggttcaaggccgggtctcaaatcttcagtgagggt

SEQ ID NO: 6118 - DNA, 408 bp, Gossypium hirsutum
  Clone ID: LIB3120-002-Q1-K1-C2
aacaaaatcaactgcttcacaatggcctctacaaccatggctctttcttccccatcattggccggtaaggcagtgaagttctccccttccacccctgaaatccagggaactggccgtgtttccatgaggaaaaccaccaagcctgttccttctggtagcccatggtacggtcctgaccgagttttgtacttgggtccactttccggtgagccaccatcttacttgaccggtgagttccctggtgactatggttgggacactgctggactctcagctgatcccgagacctttgctaggaaccgtgagctcgaagtcattcactgcagatgggccatgtttgggagctctggggtgtgttttccctgagctgttggctaggaacggtgtcaagttcggtgaagctgtatg

SEQ ID NO: 6119 - DNA, 361 bp, Gossypium hirsutum
  Clone ID: LIB3120-002-Q1-K1-C3
cccacgcgtccgcggacgcgtgggggaaactggagtgtggctaatggaatcaatgaagggttttctgatgattctttcaggactgttgcaaatgagattaaagtgcagaaaaacaaaagaccagctttgagatgttcagaacaaagggatagaatatcttctgcagataagtattctcctgaactgggtagtggtcactgctgtgtagtcccacaatcttctttaaggcccttggttggtaaggtttcacaggttttgcagcaactaaagattaatttacttgatatggatgctgcactctctgaagaagctttgcgaccatctaaggcatgcatggaaaggagatgggccttgcgttcat

SEQ ID NO: 6120 - DNA, 423 bp, Gossypium hirsutum
  Clone ID: LIB3120-002-Q1-K1-C4
ctcttagcgaccctgaccatcctattgtacttgaacgaatggacttccccgatcctgtgagtaaggttgctattgaacctaagactaaagctgatgtcgataaaatggctaatggtttgatcaagcttgctcaagaagacccttctttccacttctcacgggatgaagagatcaaccagaccgtaattgaaggaatgggagaattacatctcgagattattgttgatcgtttgaagagagagttcaaggtcgaagccaatgtcggtgcaccacaagttaattaccgggaaagtatttccaaagtttcagaagtgaaatacgtacacaagaaacaatcaggtggacaagggcagtttgctgatattactgttcgtttcgagccgatggatgcaggtagcggatacgagttcaagagtgaaatca

SEQ ID NO: 6121 - DNA, 443 bp, Gossypium hirsutum
  Clone ID: LIB3120-002-Q1-K1-C5
tgaggagcagtggaggctgatcctttggatcagttccgcaaatggtttgatgatgcgggggtgtcacttaaaggaaccaaatgctatggcattgtcaaccactggaaaagatggaaaaccctcatcgagaatggtattgctaaaaggggttgacaaggatggtttcgtctggttcaccaattatgaaagtcagaaggcacgtcaattatcagaaaatcctcatgcggcacttcttttctactgggatgggcttaatcgacaggtaagagtggaaggatctgctgagaaagtttctgatgaggaatcagagcaatactttcacagtcgtcctcgaggcagtcaactcggagcaatcgtaagcaagcagagtacggtagttcctggacgccatgtactgcaccagctatacaaagaactagaagaaaaatactgcaacgagagtt

SEQ ID NO: 6122 - DNA, 422 bp, Gossypium hirsutum
  Clone ID: LIB3120-002-Q1-K1-C6
aaaccctcctttcctctcctctcctctcctctacaaggaaatggcaatttcatcaacaggggcagccactgccgcttcttctaagcttagatacccacacgcctcccctttcccaactcactcctcaaccaccacctctgcctttttctcctcaattccctctaaactaacccctacccacctctcctcttccttcctccctcctttcctcactaccgtcgccaccacttccgtattccctcgccgtcgcggttctttcaccgtcaaagctgcccgtggcaaattcgaacgcaaaaagccccacgtcaacatcggcaccatcggccatgtcgaccacggcaaaaccaccttaactgccgctctaactatggccttagcctccatgggtaacagtgccccaaaaaagtacgacgaaattgatg

SEQ ID NO: 6123 - DNA, 473 bp, Gossypium hirsutum
  unsure (1)..(473): unsure at all n locations; Clone ID: LIB3120-002-Q1-K1-C7
accggttctcggaattacccgggctcgatccgcacgtcgtccgtcccacgtccgtccgcaagnaaaagttcgaaacgtgtattgtatcattgtgatgttattagcccatgagaaganncctggttttagtgggagcgagatcnntagcaaatctgttaaacccgaagctgctatannttggctgnngtcggcgtggcatagaaaccgcaatttcattctannaagaaatcgatnngattcaattgnnataggatcgtgnngctggaatggaagggaaccagtnntatgactgnnatggaaagaagcaaaagnncttggttgcatacccatcgatggttggccccatgtccatttgcgtgatacttttgacatccgtggtcaacgaatcctnngttcaaataagtnctaccttgatttcccacgtggtccaggccannngtggtcttaacctggggttcaattcnncttcagat

SEQ ID NO: 6124 - DNA, 264 bp, Gossypium hirsutum
  Clone ID: LIB3120-002-Q1-K1-C8
cccacgcgtccgcccacgcgtccgcttacttggtcatgcaaacgacttcccatccgctatcattggggttcttgttaatgaaaataccttctaccccgtcttcaccatttcttgtgaaacacccttgaccttctatggattacaacatgcacactccttggctcctggatataccgaacctgtgaccgttcactacaacccttaggagattgacttcccataaatgaagagcattaccattgcgagatcagcctttctcttctt

SEQ ID NO: 6125 - DNA, 425 bp, Gossypium hirsutum
  Clone ID: LIB3120-002-Q1-K1-C9
ctttacggctttagatctgagagcaagatcggggttcttttttgttccaagatttcttgtgtaaatctttttatctgggttcataaaatgaagatctgattttaggttatgtttcgggagagttttaccaacgtgtgatagagtcaacaaaagtgaagtaagtgcttatgattcaaccaggggggcgtataatttatagacttcgcaacaaggattcgaacgattaggtagttttttcaacttcaagatttctttcggggggatccaattcaaatttcaagaaagttattttcttccaataagcgaattcggaaaaatttaaggaataacaactatgaaaataagggcttccgttcgtaaaatttgtgaaaaatgtcgcctaatccgtatgaggggacgaattatcgtaatttgttttaacccga

SEQ ID NO: 6126 - DNA, 378 bp, Gossypium hirsutum
  Clone ID: LIB3120-002-Q1-K1-D1
ccctaatacatcatctacaagctcaacggttccttgtagcagtgacaagtgcgaacaacagagaaaatgttcttcaccttcaagtaattgtccttatcaagttatctatctatccaatggcacctcgtcgatcggggttttggtggaagatgtcttgcgcttgactacggacgacgataaaacaaacaaacccgtcgacgccaagattactttcggttgcgggaagattcagactggatcgttcttaaacggtgcagctcctaatggtcttttcgggcttggtatggacaatatatcagttcccagcatattagcaaaagaaaatgttacatcgaattcgttctctatgtgttttcgatctgatgggatcggaagaat

SEQ ID NO: 6127 - DNA, 438 bp, Gossypium hirsutum
  Clone ID: LIB3120-002-Q1-K1-D10
gtgagtggcaatggcaaccgctacagttacagcatcgtctacactttcatggcttcacaggtttggaggaacacaaaacgagacagcaaaagtagcagacaaaaacagggtcttcgtggttttcgcccagaagaaagctaaaaagactcgaaagataatactgaaggaggatgtggaatacctggggaaaaagggacagcttttggatgtgaaagctgggtatttcaggaattatcttttgcctacgggaaaaggccagattatcacttcttctttgcttaaggaaatgaaaatggaggaggaaagaattgaagcggagaatcaacgggtgaaagaagaggcacagcaacttgctctaatattcgaaacagttggagcttttaaggtgaagagaaaaggtggaaaaggaaagcaaatttttggaagtgttactgctca

SEQ ID NO: 6128 - DNA, 435 bp, Gossypium hirsutum
  unsure (1)..(435): unsure at all n locations; Clone ID: LIB3120-002-Q1-K1-D11
atcagatctgtcggtgctcctgcattttccgcccactactcttccaaatcctcatcatgtgcgggagagatccgtggggaggtcccctggagataaacgccactgattctgccactgacgacgacaggagcaggaatctgcaggacctggatagggctgcactctctcgccccttggacgagactcagcaaagctggctgcttggccccggggagcaaaagaagaagaagaagtacgtcgatctcggatgtatcattgtgagccgcaagatctttgtatggaccgtggggaccctgctcgtctccgccctcctggccggactcatcaccctcatcgtcaagactgtcccacgtnatcaccaccgncactctcncgccgataactacactctggctcttcacaaggcgctcatgttctttaatgctcagcgttctg

SEQ ID NO: 6129 - DNA, 439 bp, Gossypium hirsutum
  unsure (1)..(439): unsure at all n locations; Clone ID: LIB3120-002-Q1-K1-D12
ctttattttggtgcgaggaacttatcatgaatccactgatttctgccgcttccgttattgcgtgcggggttggctgtcgggcttgcttctattggacctggagttggtcaaggtactgctgcgggccaagctgtagaaggtatcgcgagacaacccgaggcggagggaaaaatacgaggtactttattgcttagtttggcttttatggaagctttaacaatttatgggctggttgtagcattggcactcttatttgcgaatccctttgtttaatcctataaacatgagaattttgtatttttttttcttattttatggcttgggacttactcctcgctttttcgaattctatcaagatttcacccctacaattaattattcgttgggacaataatccatgggaaggattaatttgaggatgaggaantatcacaccgac

SEQ ID NO: 6130 - DNA, 436 bp, Gossypium hirsutum
  Clone ID: LIB3120-002-Q1-K1-D2
cccacgcgtccgatcaactgcttcacaatggcctctacaaccatggctctttcttccccggcattcgccggtaaggcagtgaagttctccccttccacccctgaaatccagggaactggccgtgtttccatgaggaaaaccaccaagcctgttccttctggtagcccatggtacggtcctgaccgagttttgtacttgggtccactttccggtgagccaccatcttacttgaccggtgagttccctggtgactatggttgggacactgctggactctcagctgatcccgagacctttgctaggaaccgtgagctcgaagtcattcactgcagatgggccatgttgggagctcttgggtgtgttttccctgagctgttggctaggaacggtgtcaagttcggtgaagctgtatggttcaaggccgggtctcaaatct

SEQ ID NO: 6131 - DNA, 360 bp, Gossypium hirsutum
  Clone ID: LIB3120-002-Q1-K1-D3
caccaccaccaacatagtccaacattttcataacaatggctgcagtcacaaacgccgctgctacatcctccttcatggggacacgcttccccgacgtctacacaagttcagggagattcgtcgccaggtttggttttggcggcaaaaaagcagctcccaagaaagcctcgaaacaaacctccgaccgccctctatggtacccaggagcggtggctcctgattggctcgatggaagcttggtgggtgattacgggttcgacccgttcgggttagggaaaccagcggagtacttgcaatatgatttggattctttggaccagaacctggctaagaatatggctggtgagatcattggaacta

SEQ ID NO: 6132 - DNA, 436 bp, Gossypium hirsutum
  Clone ID: LIB3120-002-Q1-K1-D4
cccacgcgtccgcaacattaagctctatgtgagacgtgtctttatcatggacaactgcgaggagttgattcctgaattcctcagctttgttaagggtattgtcgactcagaggaccttcctttgaacatctcaagagaaatgttgcagcaaaacaagatcttgaaggttatccgcaagaacttggtaaagaagtgcattgagctcttctttgaaatagcagagaacaaggaagattacaacaagttttatgaggcattctcaaagaacctcaagcttggtatccatgaggactctcagaacaagactaaaattgccgaattgctccgctaccactccaccaagagtggtgatgagctgaccagcttgaatgactatgtgaccagaatgaaaggaggtcagaatgatatctactacatcactggtgaggagtaaaaa

SEQ ID NO: 6133 - DNA, 427 bp, Gossypium hirsutum
  unsure (1)..(427): unsure at all n locations; Clone ID: LIB3120-002-Q1-K1-D5
gttgaaagcggcgtccaagttaattttaatccccgttccccccggtgcaacctaggttaggtaacagagccgtttttcagggcactcccggaacaagtgttccctcgtttccgcctcactttggcacctgcaacaaacccattaatcttcgatagttaagattactgaaagtaggcagaaagtttcgtgaaaaacgccatactgtaatcttaattttagggggaagatctagattccacaattttttgtaaaattgtttgtaatttgcctgtaaatgattctggtcttcatgtagaagaagtttatgtccactacgcanttgctacgctaccactccaccaagagtggtgatgagctgaccaacttgaatgactatgtgaccagaatgaaggaggcgtccaatgatatctactacatcaatggtgag

SEQ ID NO: 6134 - DNA, 172 bp, Gossypium hirsutum
  Clone ID: LIB3120-002-Q1-K1-D6
cttccgtaaaaacctgcttggtcattttcctttattacccattgtaaaaccttttccggggtttgcttttggcttttacctttttggttttgcaaaatagtttgttatattaacacataactgcatgttaaattctctggtccggtatgaataaaaattattttaccttttt

SEQ ID NO: 6135 - DNA, 269 bp, Gossypium hirsutum
  unsure (1)..(269): unsure at all n locations; Clone ID: LIB3120-002-Q1-K1-D7
ccctttcttttttatatcttaaatctagaatttttttcttggnnnatccaanatgtcttagtttttttttaaagatggaaggccatcccctccccatcttattaaaaatttctttctttacatttttaaaaactttttttttattcacccacacataattatttttttatgtattaaccaccaaaacccttttcttatttacttaactactttaattcaaccaattattatccattttttaaatcttaacatttctttattttatatcc

SEQ ID NO: 6136 - DNA, 440 bp, Gossypium hirsutum
  Clone ID: LIB3120-002-Q1-K1-D8
cccacgcgtccgcaagcatcaacgatccgagttgggtcctacaatggagaagagatttatgctccgtttaagagtcttgttgctatggtgaacccaaatgatattgtgtttggaggatgggacattagtgacatgaacctagctgatgcaatggctagggccaaggttttcgacattgatctgcaaaagcaactgagaccctacatggaatccatggtcccactccctggaatctacgatcctgatttcattgctgctaaccaaggtgaacgtgccaataatgtcatgaaggggaccaagaaagaacaagttcagcaggtcatcaaagacatcagggagttcaaagagaaaaacaaggtggacaaggttgttgtactctggactgcaaacactgagaggtacagcaatgtcattgtggggctaaatgacaccgtggaaag

SEQ ID NO: 6137 - DNA, 351 bp, Gossypium hirsutum
  Clone ID: LIB3120-002-Q1-K1-D9
ccaaccccatttcttttccaaaacataaattctaaccctctcatagatttctcctctaacactcccaaatacacatttttttattatactccttttataccacacttatttaactactttctacccttttaatctatatttcatactactttaacctctatttccctttttactatcttattgacacttcctatttttatacttacccttattccttttctattaacaaaactctttacttattctattttatatttttcatttctttttaccacttttcattttctcccccttatttttcttttctaattatttttaactatattttcatttatccctttctattttatt

SEQ ID NO: 6138 - DNA, 408 bp, Gossypium hirsutum
  Clone ID: LIB3120-002-Q1-K1-E1
cccacgcgtccgctcaaatcttcaatcattagttcatctcttcaaaaaaatggcaggttccaacgttttcattttattagcttgtttcattttgttgggtttttcaagcatggaggtcagcctagcagctcgaaatcttcagcaagtaccattaccttcacttcctaatcctatcgttgttcttccaccacttcctaaccttccgccacttcctaatcttccaccacttcctaatcttccgccacttcctaatcttccaccacttcctaatcttccgccacttcctaatcttccgccacttcccagattaccaattccaccgcttcctaaccctaccattgttcttccgccactccccagattaccaattccaccactttctaaccctaccaccgttcttccaccact

SEQ ID NO: 6139 - DNA, 451 bp, Gossypium hirsutum
  Clone ID: LIB3120-002-Q1-K1-E10
ctgtacacaaactctccctctgttttcttgtctgttcactgaagaaaattaatatatatggaatatcaaaaggtcttccttcagttgcttaaaaccaaaatggcagtttcatcatttagaagcgggcgtttaccgttgtttcatcaccctcaattgcctaataaagccgcttcagctgcttgtacaacaagatcgattggtgggtttaagaagccaaattggcgtttcagttccaaccccaattgcggaagggccgtctttctttttgcccagtactctcaaccatctcaagctcaaacacagcaagatcgtttctcatctcgtctccaaagtagtcttgagaacttacccaagctgctggaggatatcgtccagacatctataagcacatgtccccgaggagccctgaggctagctcaaggtattcaagcctttgttggtgttggtgggg

SEQ ID NO: 6140 - DNA, 451 bp, Gossypium hirsutum
  Clone ID: LIB3120-002-Q1-K1-E12
cccacgcgtccgggttttgatcgtgaatttagaggtgggtataattcaagttttaattgtgatcagcaaatggcaggaaaatgggggttttgtggccaaaggaattaaaaaattcaagagtgacggtagaattggcgatgggtatggttctatggttgattttgatcatagttttggtcagcatgttgatggtcttggagagtttcctcttaagaccttatgcgataggagttttttgaacgtgggattcaaatcaaagaattatggttgccctaatctaaattatgattatgataatgattcaaaagagtatagcattgatgaagaaatggggtttcgagctagagattcacgtgcttgggattcagtgccccaaggtattcatcaaaagaaacgtggtagagttgatatgaactttgaaccaggtggtgactgtaggggtttaaatgga

SEQ ID NO: 6141 - DNA, 358 bp, Gossypium hirsutum
  Clone ID: LIB3120-002-Q1-K1-E2
cccacgcgtccgcttttttgtttcttatcttgttgttggtctggaaatctctccactctgtctttttgcttccaagttttgttgctaacagtatatctttgaaagtcagttgatattacaattattcccttcccaaaccttgcatcatcaatcatggttcctttcatttatgttgttcttttcttagccatgtctggccattcaagtgccaactattgcttatgtaaagatggagtgaatgagcaaacacttcagaaaaccctggattatgcttgtggagcaggagctgattgtactccaattaatcaaaatggtccttgttataatcccaacactgtgaaagatcactgcaattatg

SEQ ID NO: 6142 - DNA, 402 bp, Gossypium hirsutum
  Clone ID: LIB3120-002-Q1-K1-E4
aaacaaaccaaataaacctaaaaacacttattcaccataaaaacctaatatatacggggatagtgatttaattgaccagagccggtttaaaacaatccaatgaagctcttacacaaagtcagagctttcgatggtggtcgtgttaccatgcgcagaactgtgaaaagtgcccctaccagcatctggtatggccctgaccgcccaaagtacttgggtccattctcagaccaaatcccatcatacctgacaggtgaattccctggtgactatgggtgggacactgctgggttatcagctgacccagagacatttgctaagaaccgtgagcttgaagtgatccactgcagatgggcaatgcttggtgcccttggttgtgtcttccctgaaattcttttaaagaat

SEQ ID NO: 6143 - DNA, 443 bp, Gossypium hirsutum
  Clone ID: LIB3120-002-Q1-K1-E5
attagcaacaagaagatggagagtggagcaaagaaatggggtttccaaaggactgaggggctgtatgcagcgtccaccaccaccgtccgaggatatctcaacctattaatgggcaacatcaaccaagatagttgccttacagtcgttcctctcggtcatggcgacccctctcattttccaagcttcaggactactcctgctgctgaagatgccatcgttgatgctctacgttcggctaagcataattgttatgcgaccactgttggtattcttcccgcaagaagggcacttgcagattacctcaaccgtgaccttccctacaagtcatcgcccgatgatgtttatttaacaaatggatgtactcaaggaatagaagttgttatatcaattctttcccgccccggtgccaatattttgcttcctagaccgggcttcccactcta

SEQ ID NO: 6144 - DNA, 445 bp, Gossypium hirsutum
  unsure (1)..(445): unsure at all n locations; Clone ID: LIB3120-002-Q1-K1-E6
gtcgacggcttctatcaacggttggtgccttacctcctcttcttccaccactaccgacctgctctttttccgctcgtcgacgacctacattgcggccttcagtcgtcgctagccttaactcttctccttctcctccgactcttatccaagaccgcccggtttttgctgcccctattcctttgctcaccccgagagaagagatgggaaacaagtcctacgacgaagccattgaagctctcaagaaacttctcagtgagaaaggagaactgaaagctgaagcagctgcaagggtagatcaaataacagcagagttaaacacagcatcagctgatggcaaaccatctgactcttctgttgagagactgaaagaaggcttcgtttacttcaagaaagaaaaatatgaaaagaatcctgctctgtatggtgagctngccaagggtcaaag

SEQ ID NO: 6145 - DNA, 444 bp, Gossypium hirsutum
  Clone ID: LIB3120-002-Q1-K1-E7
ggcgatgacatccacttttggattggtaaagatactagtcaggatgaagctggaactgctgctgtaaaagcggttgagctagatgcagtactaggagggcgtgctgtgcagcacagggaacttcaaggccatgaatctgacaaatttttgtcatacttcaaaccttgcattatacctctggaaggtggcgttgcttctggatttaaaacagctgaagaagaagagtttgaaacacggttgtatgtctgcagaggaaaacgagttgtcagattgaagcaggttccttttgcccgttcttcactgaatcatgatgatgtgtttatcttggacactcaaaataagatttatcagttcaatggtgcaaattctaatattcaagaaagggcaaaggcattagaagtaattcagtttctaaaggagaagtaccacgagggaacgtgcaat

SEQ ID NO: 6146 - DNA, 437 bp, Gossypium hirsutum
  Clone ID: LIB3120-002-Q1-K1-E8
cggactcgtggttttcaatctcattacagacgtggattttagacaattagttaaccaattaccaagaggagcaagtttcacgatcttgtcggattcatgtcacagtggtggtctcattgataaagaaaaagaacaaattggaccttctacctatagggcagcttcatcactttcttacaaggctaagaacatcccttttgaatccatacttgagcacctaacaacactaacagggatcaacacatcagacattggtactcatttgttagaatcctttggtgccaatgccagcctcaaattcctcacacctcagctcgagtccgagttattcgacttcttgaaggctgatgaggggattttgttaagtgggtgtcaagcagatgagacatcggcggacatgaacccgatggaaagcggtgggaaagcgtacggagcct

SEQ ID NO: 6147 - DNA, 139 bp, Gossypium hirsutum
  Clone ID: LIB3120-002-Q1-K1-E9
tcattcacttccacttccaggactccaccatcctttatgacatcttttgcttcattccactcctaccaactcaatcccgacatgcaacaatccataaaatactatttttttgttgccaatgcaaaattcattcttgatt

SEQ ID NO: 6148 - DNA, 451 bp, Gossypium hirsutum
  unsure (1)..(451): unsure at all n locations; Clone ID: LIB3120-002-Q1-K1-F10
ggaaggccaacaacgacattacttctctcgcaagcaatggcggcagagtgcaatgcatgcaggtgtggcctcctactggaaagaagaagttcgagactctctcatacctccccgatcttacacccgtgcagttggctaaggaagtggattaccttcttcgctcaaaatgggttccttgcttggaattcgaattagaggagggattcgtgcaccgtaaatactcgagcctacccacgtactacgatggacgctactggaccatgtggaagctgcctatgttcgggtgcaccgactcggctcaagtattgaaggagcttgaggaatgcaagaaggaataccccaatgcattcattagaatcattggcttcgacaacgtgcgtcaagtgcagtgcattagtttcattgcctacaagcctncaggcttctaagctttttattaaacttgtctctc

SEQ ID NO: 6149 - DNA, 431 bp, Gossypium hirsutum
  Clone ID: LIB3120-002-Q1-K1-F11
gcagttattgctctgcgggcaagctgttccaaatgtatttgatgggaggatggatttaggtggtggcatgtttttgaagggtatatttacaagtgtggaggttggattcctcacccttctggaatcccttaatttctgtaaggttggtcaaaatctaaaatgcccaaaatggccgatatgggttgttggaagtgagtcccattatactgtcctgtttgctctggatacagctgttcaagatgagaatgaattggaagaaagagaatcacagatccggaaagcttttgatgcccaagatcagagtggaggtggtgggtttattagcgtggaagctttccatcaagtgctgagggagacaagtatccgacttcgatctgagaaacttgatagcctctgcaactcaggcttcatagtatggagtgagttctggc

SEQ ID NO: 6150 - DNA, 453 bp, Gossypium hirsutum
  Clone ID: LIB3120-002-Q1-K1-F12
cccacgcgtccgcccacgcgtccgcccacgcgtccgctagatcgcgagcgcccacgcgtgcgcccacgcgtccgactatcactaccattatggcttcggctactgtttctgtagccaaacccaaccttcagattcaggcaaaaggaaagggtgttggttttgcagatttctcaggcctacacaactcctctactagccttccctttgccaggaaaacctctgatgacttccattcactcgttgcttttcagacatctgctctaggaagcaataatggcgggtacaggaaagggatggcagaggcaaagctaaaggtggctataaatgggtttggtaggattggcaggaacttcttaaggtgctggcatggccgtaaagactccccacttgatgtcattgccatcaatgacacttgtggtgttaagcaggcttctcaccttctcaaatatgatt

SEQ ID NO: 6151 - DNA, 424 bp, Gossypium hirsutum
  Clone ID: LIB3120-002-Q1-K1-F2
aagtaagcaaaatgggagaagcagaggggtgtagcaaagacaaaagatggagtcttcaaggcatgactgcacttgtcaccggtggtaccaaaggcatcgggaatgcaatcgtagaggaattagctgcattcggagcgattgtgcatacatgttctcgaactgaaactgagctcaatgattgcttactcgaatggaaggcaaagggtttacgagttactggttcagtgtgtgatgtttcgaatcaagctcaaagggaaaatctactaaacacggtttcttctgagtttaatgggaagcttaacatcctgataaataacgtgggaacgaatatagggaaaatggtgacagattacacggcggaagatgtttcatttttgacgagcaccaacttcgaatctgcttataacattagtgtattggcaca

SEQ ID NO: 6152 - DNA, 437 bp, Gossypium hirsutum
  Clone ID: LIB3120-002-Q1-K1-F3
cccacgcgtccgcttctctctcttctcttaccatggatccttacaagtttcgtccttcagagttcctttgattccccgttctggaccaccaattctggtgctccagtttggaacaataactcatcacttactgtgggagcaagaggtccaattctccttgaagactatcatttggtggagaagctagctaatttcgatagagaacgcatacctgaacgtgttgttcatgctagaggagccagtgcgaaagggttcttcgaggtcactcatgatatatctcagctcacatgtgctgatttccttcgtgcccctggagtccagacccctctcattgttagattctccacggttattcatgaacgcggtagtcctgaaactttgagagacccccgaggtttcgctgtgaaattttacacgcgagagggaaattttgatct

SEQ ID NO: 6153 - DNA, 422 bp, Gossypium hirsutum
  Clone ID: LIB3120-002-Q1-K1-F4
cccacgcgtccggttaaacacaacatcatctgacggcaaaccatctgactcttctgttgagagactgaaagaaggcttcgtttacttcaagaaagaaaaatatgaaaagaatcctgctctgtatggtgagcttgccaagggtcaaagccctaagtatatgattgttgcctgctcggactctagggtctgcccatctcatgtgctggacatgcaacctggtgaagcttttgtggtccgtaatgttgctaacatggtgccaccatatgaccagattaaatatgctggcattggatctgctattgaatatgcagttttgcatctcaaggtacaagaaattgtggtgattggacacagtgcctgtggaggaatcaaggggcttatgtctttcccattagatggaaacaactcaactgatttcatag

SEQ ID NO: 6154 - DNA, 440 bp, Gossypium hirsutum
  Clone ID: LIB3120-002-Q1-K1-F5
caaaaatggtatttttggtcatgtgggatcgttgagggaagagaatgaaggtgtgaggagtgatcaaaaaaatggttttggtgaaaaggggtattttggtggcaatggtttgtggtgtattggtgtttggatgcaaaagagtttttactgtggatggagtggctaatgctggttatggagttattgggtagtgcatattgttgttgaggaatgcttggcctaaggcatctatgattcttaaagtgtttaaggaacaaggtctggttttgacagctctgttgggtcttccagctttcttctcgatggtagagactactataactacattatggccttagaagatgagggatggatttaaggcctgctttacagaggttatacatgacaagggcttctgcatataaagatgctcttaagagtttcataaaaggatatcaaga

SEQ ID NO: 6155 - DNA, 445 bp, Gossypium hirsutum
  Clone ID: LIB3120-002-Q1-K1-F6
gggggtgacgatgatgaagttgaaggcacgagatgggcggtcttgattgccggatctaatggatattggaattacaggcatcaggctgatgtttgtcatgcttatcaactgttgagaaatggtggcctaaaagaggaaaatatcattgtttttatgtatgatgatattgcctacaatgaagaaaaccctagacctggaatcatcattaacaatccccatggtgatgatgtttataagggtgttccaaaggattacactggagaaaatgttactgttaacaacttttttgctgctatccttggaaacaaatctgctcttacagggggtagtggcaaagttgttaatagtggccccagtgatcatatcttcatatattactctgaccatggaggtcctggtgtacttggcatgcctaccttaccttatctttatgctgatgatttga

SEQ ID NO: 6156 - DNA, 451 bp, Gossypium hirsutum
  Clone ID: LIB3120-002-Q1-K1-F8
ctcagctcatccttatgggctgggttgaaagcaagcggtgggttgatttcttcaaccccgaatcagaatcagtggaatgggcaactccatggtctaagaccgctgagaacttcgccaacgctacaggtgagcaagggtacccaggaggcaagttctttgacccattggggctagcaggaaccatccagaatggggtctacgtccctgatattgacaagcttgagagacttaagcttgctgagattaagcatgctagaattgcgatgttagccatgttgattttctactttgaggctggccaaggaaagacaccccttggtgctcttggattgtaaaagaaaactttaagggtctgtttggatgtagataactgagttatgtcttggacgtaaggagagttgagccagaaaaaaaactggaaatgatgtttgttgagctgatgagttccctc

SEQ ID NO: 6157 - DNA, 413 bp, Gossypium hirsutum
  unsure (1)..(413): unsure at all n locations; Clone ID: LIB3120-002-Q1-K1-F9
gagaacaaaaggaaatggagattgttttgcaaactcctgctcatcctgctcagaaacgagattatgtttttcacaacgggaagcgccatgtacgaccttactactttgagttcgtctctcatgttaataaacgatgggaaggtaaaacaatagtggatttgttcgctcaagagttcagaggtcgatctagagattactatgttagtgctgtcaaatgtggacggatacaagtggatggagagaatatacctgtttcatacatagttaaacgatgccagaagattagccacttcttacataggcatgaaccaccagtgatggcttgngatgttgaagttcttcaaaatgaacctgatgtactgacagtttgcaaacctgcatcagttcctgtacatccatgtggtcaatatcgt

SEQ ID NO: 6158 - DNA, 439 bp, Gossypium hirsutum
  unsure (1)..(439): unsure at all n locations; Clone ID: LIB3120-002-Q1-K1-G1
ctctctcattttatcactgccgctttgccagcagccgcgccacactcgagagagagctggtgaaccatggccgaacagactgagaaagcctttttgaagcaaccaaaagtgtttttaagctcaaagaaatcttcaaaagggaagagacctggaaagggagggaaccgcttctggaagagcattggtttgggcttcaagactcctcgtgaagctattgaaggaacctacattgacaagaaatgcccgtttgccggcactgtttcgatcaggggtcgtatcttagctggtacttgccatagtgctaagatgattaggacaatcattgttcgacggaattaccttcattatatcaagaaataccaaaggtatgagaagaggcattcgaacatacctgcacatatttctccatgcttncgtgtgaaggaagggatcatgtcat

SEQ ID NO: 6159 - DNA, 301 bp, Gossypium hirsutum
  Clone ID: LIB3120-002-Q1-K1-G10
cccacgcgtccggggaaagtggactgaaacccactactagcacttataacacgctaatcgaaggggacgggatagccggtaagcccgaagaatctgttaaactggtagacctaatgttgcaggaggggaatgtcaaacccaatctccgaacctataatgtacttgtccgagcatggtgcaaaaagaacaacatgacagaagcttggaatgcggttaataagaagaatggccttcggaatgcaaccagatgctgttacctacaataccatagcgaccgcttattcacagaatcaagagactg

SEQ ID NO: 6160 - DNA, 354 bp, Gossypium hirsutum
  Clone ID: LIB3120-002-Q1-K1-G11
cggacgcgtggggctctctggtacattttgtcaatatttcattaggtagagactcttctgttttcgtgtttttgttgtgagttgattcgctagcttccatggggatttgcttggtagcattagccaaactccacctcttaactcccgctcatagtataagtgctcctttacttgcaggcttcatttgcccttttgtggtcaaacttgccttcagattcaggattgttcgtcgagtttacattgatatgctttatgcaaccaggctcttcttttttcagttgagtcagatagctttcgatgctggcggtgaccgtcagccatctccgggcgatggtgagcgatggcagcgagctc

SEQ ID NO: 6161 - DNA, 397 bp, Gossypium hirsutum
  unsure (1)..(397): unsure at all n locations; Clone ID: LIB3120-002-Q1-K1-G12
tttagctatagcatacactactagtacccactactagcaatggcttcctcaatgatctcatcggcggccattgccactggctgtccggcacangctaacatggtcgctcctttcaccggtctcaagtctgcctctgctttcccagtcaccaggaaggccaacaacgacattacttctctcgcaagcaatggcggtagagtgcaatgcatgcaggtgtggcctcctactgggaagaagaagtttgagactctctcatacctccccgatcttacacccgtgcagttggctaaggaagtagattaccttcttcgctcaaaatgggttccttgcttggaattcgaattggaggagggattcgtgcaccgtaagtactcgagcttacccacgtactacgatg

SEQ ID NO: 6162 - DNA, 398 bp, Gossypium hirsutum
  Clone ID: LIB3120-002-Q1-K1-G2
cccacgcgtccgcccacgcgtccgcccactcgtccgtgagaagtcattgaaggatttgaagctgaaagaagtgaagaatgggagattggcaatgttggcaatcttgggttacttcatacaagggctcgtgacaggtgtaggaccataccagaacctgttggatcacttggctgaccctttcaataacaatgtcttgactaacctcaagttccattagatgaaagtgcctatatttgttccatggaactaccctccccccccctccggctaaaagctccattgccaaatccctttctgctcctttcttgatctcagtaaaacatgtgtaaatttattctgtaatctgcgagaaagaactgaaatagactttgttaatgccactgtaatatcatgagttt

SEQ ID NO: 6163 - DNA, 376 bp, Gossypium hirsutum
  Clone ID: LIB3120-002-Q1-K1-G3
cccacgcgtccgatagtcttggaacccaaggacagaagactcttttagcatttcaccggggagatggagataacaaatgtgagcgagtatcaagaaattgcgaagcaaaagttgccaaagatggtgtatgactactacgcatctggtgctgaggaccaatggacattgcatgagaatagatttgctttcaccaagatactgtttcgtcctcgtattctcattgatgtaaacaagatagacatgaccacaactgtgttgggtttcaagatatcaatgcctatcatgattgccccaactgccatgcaaaaaatggctcatcctgaaggggagtatgcaacagctagggctgcatctgctgctggaactatcatgacat

SEQ ID NO: 6164 - DNA, 440 bp, Gossypium hirsutum
  Clone ID: LIB3120-002-Q1-K1-G4
cccacgcgtccggccggcaagattgttctttgtgatcgtgggatgaacgccagggttcgggaaggagctgtcgttaaagcagccggtggtataggcatggttttgtctaacactgccgcaaatggtgaagagctggtagcggatgcccatttgctcccggcaaccgccgtgggtcaaaaatctggtgatgctataagagactacttgttttcaaatcctaacccaactgtcaccattctttttgaaggaaccaaagttggcatagaaccatcaccggtggtggctgcttttagctcaagaggaccaaattctataacctcggagatattgaaaccagacatgattgctccaggggttaacattttagcagggtggtccggtgcagtaggtccaacggggttggctacggataccagacgagtggattttaacatcatttc

SEQ ID NO: 6165 - DNA, 423 bp, Gossypium hirsutum
  Clone ID: LIB3120-002-Q1-K1-G5
atttagctatagcatacactactagtacccactactagcaatggcttcctcaatgatctgatcggctaccattgccactgcctctccggcacaggctaacatggtcgctcctttcaccggcctcaagtctgcctctgctttcccagtcaccaggaaggccaacaacgacattacttctctcgcaagcaatggcggcagagtgcaatgcatgcaggtgtggcctcctactggaaagaagaagttcgagactctctcatacctccccgatcttacacccgtgcagctggctaaggaagtggattaccttcttcgctcaaaatgggttccttgcttggaattcgaattagaggagggattcgtgcaccgtaaatactcgagcctacccacgtactacgatggacgctactggaccatgtggaagct

SEQ ID NO: 6166 - DNA, 404 bp, Gossypium hirsutum
  Clone ID: LIB3120-002-Q1-K1-G6
tattttttttaaaaagggttgcccccttctaactctgaaaggcaatggcttcaatgcttagctcaggaaccgtccttaggccaaccccatttcttggccaaaacagaaatgctaaccctctcagagatgtctccgtgggcactgccaaatacacaatgggaaatgaactgtggtatggaccagacagagtgaagtacttgggacccttttcagctcagattccatcctacttgaacggcgagttccctggtgactacggatgggacactgccggtttgtcagctgaccctgaggcctttgctaggaacagggctcttgaggtaatccatggaagatgggcaatgctgggagcactaggctgcatcaccccagaagtccttgagaaatggcttagagttgacttc

SEQ ID NO: 6167 - DNA, 453 bp, Gossypium hirsutum
  Clone ID: LIB3120-002-Q1-K1-G7
cccacgcgtccgccgccatcttcaataatttcttccgttgatctttgttagagattagctgtttaggttttcattatgggaaagatcaagatcggaatcaatggatttggaaggatcgggcgtttggttgcgagagttgctctccaaagcgatgatattgagctcgttgctgttaacgatcctttcatcaccactgaatacatgacgtacatgtttaagtacgacagtgttcacggtcaatggaagcatcatgagcttaaggtgaaggactcaaagacccttctctttggtgaaaagcctgtcacagttttcggtatcagaaaccctgaggaaatcccatgggctgaggctggagctgagtatgttgttgagtctactggtgtttttactgacaaggacaaggctgctgctcacttgaagggtggcgcgaagaaggttatcatttctgctccc

SEQ ID NO: 6168 - DNA, 456 bp, Gossypium hirsutum
  Clone ID: LIB3120-002-Q1-K1-G8
gcgcccacgcgtccgcccacgcgtccgcaccaacaaaatcaactgcttcacaatggcctctacgaccatggctctttcttccccatcattcgccggtaaggcagtgaagttctccccttccacccctgaaatccagggaactggccgtgtttccatgaggaaaaccaccaagcctgttccttctggtagcccatggtacggtcctgaccgagttttgtacttgggtccactttccggtgagccaccatcttacttgaccggtgagttccctggtgactatggttgggacactgctggactctcagctgatcccgagacctttgctaggaaccgtgagctcgaagtcattcactgcagatgggccatgttgggagctcttgggtgtgttttccctgagctgttggctaagaacggtgtcaagttcggtgaagctgtatggttcaaggccgggtctca

SEQ ID NO: 6169 - DNA, 381 bp, Gossypium hirsutum
  Clone ID: LIB3120-002-Q1-K1-G9
caagtattttgctttttttcaccatgggggactaaactatactctcagtttaagttgctcgtgatccttttcgataacgccaaaacttcaaacaacttctgctcttacctcaatggctctccctcagctaatcccttctcactcttcttcttcactcactcaccagccttccataaaccctaacgcagccaatccataccccatgttgaagtcctttttgaagccatcttctctctctcaatctcgcaggtttcacaggctcagctctcttcgagcttcggcctcttccttccccgataatcaccaaaccgatccttctaaaccagacgacgtcgtagagctccctatatttcctctccccttggttctcttccccggcgc

SEQ ID NO: 6170 - DNA, 400 bp, Gossypium hirsutum
  Clone ID: LIB3120-002-Q1-K1-H1
cttgtttatattttgcaggaggctgctgcttattcacgaacatggaagggccatatgcagaatttgcttggatatgcaggttcagtttattgtgtgtacaaaatgattaagtcattacaaagtgttgttttcaaggaggctggttcagttgaccctgttacaatgtcaattaccatattgttgcagttctttgatattggaatagatgctgcattgttatcacagtatatttccctgctgtttattggaatcttgatcacaatatcagtgcggggtttcttaacaaatctaatgaagttcttctttgcagtttccagagttggtagtggatcttcaagcaatgttgtccttttcctttctgaaattatgggaatgtacttcctctcttcaattcttctga

SEQ ID NO: 6171 - DNA, 394 bp, Gossypium hirsutum
  Clone ID: LIB3120-002-Q1-K1-H11
ccaggattgaagagataagattatagtgaataactaaacataataaagccccttcgacttgcttcagtgatttgccctctcaaagcccaagaaaaatggcttctgcttccgctactctcctcaagtcttcacctattatcgacaagtccgagtggattaagggccaaaacctccgccacccttcggtttgttttgtacggtcacaccctacatcggccgcctttgccgtccgtgctagttcatatgccgatgagcttgttaagaccgcgaaaactgttgcatctccaggtcgtggtattttggccatggatgaatcaaatgctacatgtgggaaacggcttgcctcgattggtctcgagaataccgaggcaaaccggcaagcttaccgtaccct

SEQ ID NO: 6172 - DNA, 421 bp, Gossypium hirsutum
  Clone ID: LIB3120-002-Q1-K1-H2
cttgtttatattttgcaggaggctgctgcttattcacgaacatggaagggccatatgcagggtttgcttggatatgcaggttcagtttattgtgtgtacaaaatgattaagtcattacaaagtgttgttttcaaggaggctggttcagttgaccctgttacaatgtcaattaccatattgttgcagttctttgatattggaatagatgctgcattgttatcacagtatatttccctgctgtttattggaatcttgatcacaatatcagtgcggggtttcttaacaaatctaatgaagttcttctttgcagtttccagagttggtagtggatcttcaagcaatgttgtccttttcctttctgaaattatgggaatgtacttcctctcttcaattcttctgataagaaaaaagttgaggactg

SEQ ID NO: 6173 - DNA, 334 bp, Gossypium hirsutum
  Clone ID: LIB3120-002-Q1-K1-H3
ccaagccttcggattggtttttctttcccatcattcgcccgttaagcaatgaaggtctcgccttccacccctgaaattcggggaactggccgcgtttccatgaggaaaaccaccaagcctgtttcttttggtagcccatggtacggtcctgaccgagttttgtacttgggtccacttttcggtgagccaccatcttacttgaccggtgagttccctggtgactatggttgggacactgctggactctcagctgatcccgagacctttgctaggaaccgtgagctcgaagtcattcactgcagatgggccatgttgggagctcttgggtgtgttt

SEQ ID NO: 6174 - DNA, 390 bp, Gossypium hirsutum
  Clone ID: LIB3120-002-Q1-K1-H4
gcttcgctgaattttcgtgatcgtcgagaaagaaaatgatgggaaggaaattctgcgtcggcggaaattggaaatgcaatggaaccactgaggaagtgaataagattgtgagtactttgaatgctggagaggtgccttctccggatgttgttgaggttgtggttagccctccatttttgttccttcctttggtaaaaacttcactgagacctgagttccaagtcgctgcacaaaattgttgggtcaagaaaggaggtgctttcactggtgaagttagtgcggagatgcttgtcaatttgagcattccttgggttattattggtcattctgagaggagacttattttgatggagtcaaatgagttcgttgcggataaggttgcttatgcac

SEQ ID NO: 6175 - DNA, 341 bp, Gossypium hirsutum
  Clone ID: LIB3120-002-Q1-K1-H5
ctcttttgtataactgtagcatatagtactagtaagcagtaatagcaatggcctcctccgtgatctcatcggcaaccattgccaccgtgaactgctcctccccggcacaggccaacatggtggcccccttcaccggcctcaagtctgcctctgctttcccagtcactaggaaggccaacaacgacatcacttctcttgcaagcaatggtgggagagtgcaatgcatgcaggtgtggcctcctcttgggaagaagaagttcgagacactctcatacctccgcgatcttacacccgtacagttggctaaggaagtagattaccttcttcgctctaaatggatt

SEQ ID NO: 6176 - DNA, 406 bp, Gossypium hirsutum
  Clone ID: LIB3120-002-Q1-K1-H6
aagcaatggtgggagagtgcaatgcatgcaggtgtggcctcctcttgggaagaagaagtgcgagacactctcatacctccccgatcttacacccgtacagttggctaaggaagtagattaccttcttcgctctaaatggattccttgcttggaattcgaattagaggagggattcgtgcaccgtaagtactcgagcttacccacgtactacgatggacgctactggaccatgtggaaactgcccatgtttgggtgcactgactcggctcaggtgttggaggagcttgagaattgcaagaaggaataccccaatgcattcattagaatcattgggttcgacaacgttcgtcaagtgcagtgcattagtttcattgcctacaagcctaaaggctactaagttgtttac

SEQ ID NO: 6177 - DNA, 448 bp, Gossypium hirsutum
  Clone ID: LIB3120-002-Q1-K1-H7
caacccttgatcggcaccaacacaaatctctatcctttgtttccatggaagagcagggttgttggggttgtaaagatgatcacgaagtgttccattagccatgtaatcgtagaccagaatcatctcaccgtcatcgttgcaatatccgatcagtgagaccaaatggaggtggcgtagctgggaaagcatctcaatctcggtcctgaattcgtgagcaccttgttgagactcatggttcaaccgtttgattgcaacttgggtctccccaccatcgatgaatcctttgtaaacgttgccgaaacctccaacaccaataatgaaaacattgtcgaagttgttggttgcttgtttgatctcagacaatgaaaagtatcgacaaagatcataaggctgagatgaaccaccacacttggttgactccttcactggaactcctgtaccggaaaac

SEQ ID NO: 6178 - DNA, 435 bp, Gossypium hirsutum
  Clone ID: LIB3120-003-Q1-K1-A1
aagaaatcaaaagacaaatagccaataacaatggcactcagaatgtgggcttcttccacagccaatgcactcaaaatctcttgttcctccaaacctaatgtttcccttgctttttcactctctagatgcttttccactgttttggatgggctgaagtatgctaattcacatgaatgggtgaagcatgaaggtcctgtggctaccattggcatcactgaccatgctcaggaccatcttggagaagtagtgtttgtggagttgcctgaaccaggtggctcagtgagccaaggaaaagggtttggagcagtggaaagtgttaaagcaacaagtgatgtcaattccccaatctccggcgaagtcgtggaggttaactccaaactgtccgaaactccgggcctgatcaactcgagcccatatgaagatggatggatgatc

SEQ ID NO: 6179 - DNA, 414 bp, Gossypium hirsutum
  Clone ID: LIB3120-003-Q1-K1-A10
cggacgcgtgggcggacgcgtgggcttgaccgcaagcacattctccacctcagaattgacgatcaggtaaagagagagattgggacgctcaaacttctcaaacatcccaatgtggtccggctgcacgaggtatcggcgagcaaaacaaagatttacatggtccttgagtatgtgaatggaggcgaactatttgagcgagttgaatcaaaaggcaggcttttggaatgtgaagggcgaaagttttttcagcagctaattgatgccataagctactgccatgagaaaggtgtctaccatagagacctaaagccagaaaatgttctaattgatgcaaatgggaacttaaagatattaagattttggcctcagtgctttaccttcgcatttcgggaatgatgggctattgcatacaac

SEQ ID NO: 6180 - DNA, 269 bp, Gossypium hirsutum
  Clone ID: LIB3120-003-Q1-K1-A12
acacgcgtccgcggacgcgtgggatccacaccaccaccacagcaatcacgcaatgtcaggacgaggcaagggagggaaggggctgggcaagggcggcgccaagcgccaccgcatggtcctccgggacaacatccatggcatcaccaagccggcgatccgacgtctcgcccgccgcggtggtgtgaataggatcagcggtctaatctatgaggagacccgcggggtgctcaagatctttcttgagaatgtcatccgcgatgctgtgacct

SEQ ID NO: 6181 - DNA, 440 bp, Gossypium hirsutum
  Clone ID: LIB3120-003-Q1-K1-A2
caactgcagctctaacatccatcatctacatggccatggcaactcaagcaggtctcttcacccccacaatccccaccccaaaatctttggccccatggaaaccagcctcatcattttcctttgctacctcttccaagtccctcaacttctccatggctcaaagaaccattagagctgcagctgctgatgaggaagcatcatctgctgctgctacaaaggaagctccggtcggtttcacccctccggaattggaccccaacaccccatcacccatcttcggaggaagcactggaggactgcttagaaaggctcaagtcgaagaattctacgtcatcacatgggattcacccaaagaacaaatctttgagatgccgactggtggggcggccatcatgaggcaaggacctaacttgctcaagttggcgaggaaagagcagtgt

SEQ ID NO: 6182 - DNA, 426 bp, Gossypium hirsutum
  Clone ID: LIB3120-003-Q1-K1-A3
cacaatcaaacttggggttccttaatcacgtgaaccggtccttgccatgtcccaatttgaggctccaacacagagcacgtaaaggtaagaaccatagatggaaaccccatttttgttcttcaaggactcatgttcctggttcagaagggttaagaataagcaaggtgaaggtcactgttgtgtcaaccatggcagccactagctcagcaggtgaaatagctatgtcatcagaggagaacgtttacaatgtggtgttgaaacaggcatctctggttaataagcgattgacatcacctcgtgttgatgacgttgtacctggtgatttgagcttgataaatgaagcatatgatcggtgcagtgaaatttgagccgcttctgcaaaaaccttttatttgggaactttgcttacgaccccagaaagacgta

SEQ ID NO: 6183 - DNA, 439 bp, Gossypium hirsutum
  Clone ID: LIB3120-003-Q1-K1-A4
caccattttccaccacaagcgtgtccagaaggttcagagattttagagagaacaaacaacaatggctgctacatctggggctgtactaaatggattaggctcttcatttctttgtgggggaaagaggagccaagcccttttgggtgccagcattggggccaaaggctcgccctcccctactgctggaactagaaagttgatcgttgtggcagccgccgcacctaaaaagtcttggatccctgctgttagaggtggtggcaacttcattgaccctgaatggctcgatggatcgctccctggagactacggatttgacccactaggtcttggaaaagacccagcattcctcaaatggtaccgagaagctgagctgatccatggacgttgggccatggctgctgtcgtcggcatcttcgtcggccaagcttggagtggcatt

SEQ ID NO: 6184 - DNA, 435 bp, Gossypium hirsutum
  Clone ID: LIB3120-003-Q1-K1-A5
ccacgcgtacggagccgagctctaacatcgtcccgacttcaactggtgcggtaaaggccgtggcccttgtactccctactctcaaaggcaaacttaacggcatcgcattgcgtgtaccaacaccaaatgcgtcggtggtggacctagtggtccaggtttcaaagaagacgtttgctgaagaggtgaacgctgctttcaaagagagtgcagagaaagagctacagggtatactttcagtgtgtgaagaacccctcgtttcagtggacttcaggtgctctgatgtgtactccaccgttgatgcatgactcaccatggtcatgggagatgacatggttaaggtgattgcttggtatgacaatgagtggggctactctcaaagggttgtggatttggctgacattgttgcctatagctcgaagtgatttcaatgggcta

SEQ ID NO: 6185 - DNA, 436 bp, Gossypium hirsutum
  Clone ID: LIB3120-003-Q1-K1-A6
ctaaattatcttctttctcttctcttaccatggatccttacaagtttcgtccttctagttcctttgattccccgttctggactaccaattctggtgctccagtttggaacaataactcatcacttactgtgggagcaagaggtccaattctccttgaagactatcatttggtggagaagctagctaatttcgacagagaacgcatacctgaacgtgttgttcatgctagaggagccagtgcgaaagggttctttgaggtcactcatgatatatctcagctcacatgtgctgatttccttcgtgcccctggagtgcagaccccgctcattgttagattctccacggttattcatgaacgtggtagtcctgaaactttgagagacccccgaggtttcgctgtgaaattttacactcgagaaggaaattttgatctcgt

SEQ ID NO: 6186 - DNA, 392 bp, Gossypium hirsutum
  Clone ID: LIB3120-003-Q1-K1-A7
gtcagtcatttgcatgctttctgactcctggaatgaatattcgacttattggagaagctaacgattatgtgggaaagggtatggctggaggtgagttggtagtaacccctgtagagaatcctgggttttgccctgaggatgcaactattgtacgaaatacatgtttgtatggagcaacaggtggacaaatctttgttagagggatggctggacagcgctttgctgctagaaactcacttgcccaagcagtggttgaaggcactgatgaccattgctgcgagtacatgactgatggctgtgtggttgtacttgtaaaagtggcgataaatgttgctgctggaatgactgtaggtttagcatacatgcttgatgaggatgatactctaatgccc

SEQ ID NO: 6187 - DNA, 393 bp, Gossypium hirsutum
  Clone ID: LIB3120-003-Q1-K1-A8
ctcaatgatctcatcggctaccattgccactgcctcttcggcacaggctaacatggtcgctcctttcaccggcctcaagtctgcctctgctttaccagtcaccaggaaggccaacaacgacattacttgtctcgcaagcaatggccgctgagtgcaaagcatgcaggtgtggcctcctactggaaagaagaagttcgagactctctcatacctccccgatcttacacccgagcagttggctaacgaagtggattacctgctacgctcaaaatgggttcctcgcttggaattcgaattagatgagggattcttgcaccgaatatactcgagcctacccacgtactgctattgacgctactggaccatgtggaagctgcctatgttcgggtgcac

SEQ ID NO: 6188 - DNA, 370 bp, Gossypium hirsutum
  Clone ID: LIB3120-003-Q1-K1-A9
ccggtccttgcttactatacatataatagagtccgtgttcaatgcaacctataaacagtggcctacgcactcttactcactgcacatatgggggatccataccgatcgatacatggccaggagcttcaaacggcgccgactccggcgatggcggcggatctgggggaggatctgatcttggaggtgttgaagagggcggacgcaagaacgcttcggcgggcggcgtgtgtgaatcgacggtggctagtcgatgtcccatgacaagcgcatctgataggctatatacacgaggcactggtccttaaccagactctgtagcaaccacatcctggcgttagtgctggcactcaaggccttattaccaacaacc

SEQ ID NO: 6189 - DNA, 435 bp, Gossypium hirsutum
  Clone ID: LIB3120-003-Q1-K1-B1
cgatctctccgcccaaatcttgttttccgaaaagacgccaaacagataaattttgtgattcctcttttctttctcagatcccttcgaaagcgattcttcttcttcttcttcttctattctttttaaattgaattgaagttgctgattcgaaatgagtacggccgaccttctcagcatcgaccctttagagctgaagtttccttttgagctgaggaagcagatctcgtgtgctcttcaattgtcgaataaaactgataattatgtagctttcaaggtgaaaacgacaaatccaaagaagtactgcgttcgtcccaatacgggggtcgttttgcctcgatccacatgcgatgttattgttaccatgcaagcacaaaaagaggctcctcctgatatgcaatgcagggacaaattcctccttcaaagtgtaaaggtaaa

SEQ ID NO: 6190 - DNA, 473 bp, Gossypium hirsutum
  Clone ID: LIB3120-003-Q1-K1-B10
cattagctgaagaaaaaagaaaagtcgccttggaagctgagaaaatggcatcgaaagaagctgctgaaaaagaagctgctcgaattagagaagctgctaatgctgctgcagaagtggcatttaaagaggctcaacagaaaaaaaccgcagggagagaaatgttatcccagaaaatgggcaccagttcggccaaagatggacaattacaagggatccatgtcatggccacggatgctgcattaaaagccgagacaagccgactaaaaacatatgatgaagtcgcgactatgtaccactccgttgctaaggacttgagtagacatgctcgaaagattcaaacgttggtagcacaaataagtgggagccttgagaacgtcagggcaaaagccactgcattgatgaacattttcaaaaatcctgaatgccctcagcctatctctatattgatttttgcaaagaaggtggtgtgtctt

SEQ ID NO: 6191 - DNA, 478 bp, Gossypium hirsutum
  Clone ID: LIB3120-003-Q1-K1-B11
accctagtgcctagaccttgggaatcggcagtctttagtacttttggggaactaagaaatcttccttggcttctgagcacagggatttggtgtcagtgttgactgaaccttttaagtgattcggtttgagctttccaattactaatagttaatcggattatttcctgtgacaatgctagttcgatatctatcattaactgtgaatagctatctttatatatccaagtctttaactaggtatcatggatgatgagtgacacatcctcactaattacaacttatttatcttgctatagattatgtctcttggggatatcttacttagtaatattaagacaataagctggtctagtttgtctcatttattgttttatttatgctcattgtttttcagattgctattacgattcggtttattatggtttcattctttataggttgttttgttagttatttaaatttcgtttgaatgttggtt

SEQ ID NO: 6192 - DNA, 380 bp, Gossypium hirsutum
  Clone ID: LIB3120-003-Q1-K1-B12
cggacgcgtggggaactgtgttggttggtatagcatgatatcaaccaaatttagaattcactgtgtttgtttaccatgctttgtgtctgaataaaactgagacctgtttgtgttgaaaaaaaaaaaaaaaaaaaaaaaaaaaaaaaaaaaaaaaaaaaaaaaaaaaaaaaaaaaaaaaaaaaaaaaaaaaaaaaaaaaaaaaaaaaaaaaaaaaaaaaaaaaaaaaaaaaaaaaaaaaaaaaaaaaaaaaaaaaaaaaaaaaaaaaaaaaaaaaaaaaaaaaaaaaaaaaaattggggggggccttatatataaacaaaattatattaccgggtattgaaaaaaaaaacttttttatttggggtccaaaaatataattaa

SEQ ID NO: 6193 - DNA, 452 bp, Gossypium hirsutum
  unsure (1)..(452): unsure at all n locations; Clone ID: LIB3120-003-Q1-K1-B2
gaccaagccttccggccgaacttccaattattgggaaccctcaaaaccatcggccgctaccttaatggttcattcaggtccttacctaaccggttcggccctttaaggtcgctacgcttcggaaatttccccatactcgtcgtctcctccgctgatgctgcctctgagatcaagaaaactcatgacttgacattcgtaaacagaccgaaacgcagcctctntcaaaagcttctttatgactacaaagacgtggcgtcggcaccttacggtgagtattggaggcaaatgaaaagtatatgcgtagtaaatcttttgagtaacagaagggataaatcttatcaaggtgtgcgagaagaagaaacggctctagcagtggagaagatcgaaaagtctagctctttgtgttccccggtgaatctaagcgaactctnttccgcaaccaccaacaacgt

SEQ ID NO: 6194 - DNA, 287 bp, Gossypium hirsutum
  Clone ID: LIB3120-003-Q1-K1-B3
gtcagcctatgaaaacaaccattacatgtacaacataagacgctagcttaatctatcagtcaggtcctgagctcaacggctctgtactctacatgtcattgcgcttttggaattttcgaatcctaaaagaggactccactaatactggctatgggagccagagaacacgttgctagacagtcagccaccaagctcacagcgaggcaaccaatagggaccgcggttaatactcaagatgaccggaaagactacactgaaccaccagcgggtacatgattcgagctctg

SEQ ID NO: 6195 - DNA, 440 bp, Gossypium hirsutum
  Clone ID: LIB3120-003-Q1-K1-B4
tttgtctctttcgctttctggcctccgagaagaagccgacgccgccatggttcacgtcagtttctaccgcaattatgggaagacatttaagaagccaaggcgtccatacgaaaaggaacgtttggatgctgagttgaggcttgtaggagaatatgggctccgatgtaagagggagttgtggagggttcaatatgctttgagccgaatcagaaatgctgctagggatcttctcactcttgatgagaagaaccctcgtcgtattttcgaaggtgaagctcttcttcgtaggatgaacagatatggacttttggatgagagtcagaacaagctcgattatgtattggctttgactgttgagaacttccttgaacgccgcttgcaaacacttgtgttcaagactggtatggccaagtcaattcaccatgctcgtgtgttgatta

SEQ ID NO: 6196 - DNA, 432 bp, Gossypium hirsutum
  unsure (1)..(432): unsure at all n locations; Clone ID: LIB3120-003-Q1-K1-B5
tttcccgacaatggagagtttcgggttttgtttccttatgcttacaatcgcaattttggcatcacccgcactttccgatctggtcctttccaaagtcgatcgacgcatatatttcacatcacatattgttcggatttcttcaactatgaaggtggagaatgcaggttccgaaaaggagtccaaggttttgctggcttttcctgagcaacaagccaaaaatatggcatatttgattgctactccacatgaagggaaagggaaaggaaaaaaccctgttgttgttctccctgttgaggctgccaacccaaaagacatgcctgctgctttgacattctattcagtatctttgcctaagggattagctgagggtgatagcttcacttttgatgtcttggccgtatntacccatgccttgcgacctattcctgagca

SEQ ID NO: 6197 - DNA, 385 bp, Gossypium hirsutum
  Clone ID: LIB3120-003-Q1-K1-B6
agcaaatttaagcttattaagagagtaagatggcatccactttcacagccatgtcatcagttggctcattcgttgcacctaatggtctagtcatggataagaagcttccatcttcttccaacagattgtcatctttagcttccatttcttcatcttcatttgttagtagacgaaatgttgttcttagaagatctcgtctgcccaagatttctgcagcaaaagagctacatttcaatacggacgggtcagccataaagaaattacaaactggtgtgaacaagcttgctgatttggttggagtcactcttggaccaaaaggtaggaatgtcgttctagagagcaaatatggctctcccaaaatcgttaatgatggtgtgacagtggc

SEQ ID NO: 6198 - DNA, 162 bp, Gossypium hirsutum
  Clone ID: LIB3120-003-Q1-K1-B7
tcgtgcgatttcaagctctctctgggtgttttatggcagtgacacttgacagccgtacgttcagagctctaatgcgtagcgcctaacgcgctactgatcgttagttcactttcaacttcttcgcacagattgtcaactttggcttacacactgtcatggaag

SEQ ID NO: 6199 - DNA, 436 bp, Gossypium hirsutum
  Clone ID: LIB3120-003-Q1-K1-C1
ctcttctcttcttttctcttctcactctctaattttgtgagtgacaatggaagctggacttccaatgcttaactgtctcttgcagcacacgctacggagcttgtgttcatattcagattcttcttcttcttcatcaaagtgggtttatgcagtgttttggaggatactgcctcgaaattatccaccaccaaagtgggattatggagggagtgcacttgatcgttccgaaggaaacaaaagaaactggattcttgtatgggaagatgggttttgtgatttctatgaatgtgagggtgctggaagtggttatgtaaagggaaggtttggagctgatattttcttcaaaatgtcacatgaagtttataactatggagaaggattagtagggaaaattgcagcagataacagtcacaaatgggtgcataaagaaatccca

SEQ ID NO: 6200 - DNA, 382 bp, Gossypium hirsutum
  Clone ID: LIB3120-003-Q1-K1-C10
ctacctcaatagccaggccctctctttccgcgtcaccaccagcgacggcgtgactctcgacttccccaacatagtcccggcgaattggaacttcgggcagacgttcacaagccgggtgcaattcacttaaagatccaagatccgaaatcctgcggcagaggcatgctcactatttttgctaccattgcccgccaaccagtttttttttctttcaaaatttgtttctttctccccgccgacttactatttacacacatcctttcttgggttgctaaatgatgcagagcttgggaggtgttggacattattagtttacttttcaagaaataaaagttgaaagagggggtgatggttgtagccaaaaaaaaaaaaatataagtat

SEQ ID NO: 6201 - DNA, 289 bp, Gossypium hirsutum
  Clone ID: LIB3120-003-Q1-K1-C11
ctcttttctagattcttggcgatcgatcggagcggcggggttcaagcaatcctaccgcggccccgattgccgagcacgttgaagagccggaggttgtggtgcaagatcgggagtcccttctgggcaagatctcggagaagatccacggccacgattcgtcttcgtcgtcttcctccgattccgaggatgagaagaaacccgaagtgtccgcggcggcgggaatcaagtcgaaaatcttccgcatttttggaagggagaaggcgattcatcacgtgcttggcggggggaa

SEQ ID NO: 6202 - DNA, 386 bp, Gossypium hirsutum
  Clone ID: LIB3120-003-Q1-K1-C12
gatcaaggagaagggcgtcggcggcttcatcaaggagttcaaagatgaaggctacacgaaatgctttttcgatgggaatcttctgcaaaccaaactccataatgtaagtgcaaccgttgtcggagttgataaatatggtaacaagtactatgaaaaactaaaagatactcagtatggaaggcacagatgggtggagtatgccgataagggtagatataatgcatctcaagtaccgccagagtggcatggttggttgcacttcattactgaccacaccggcgatgaacttctgatgctgaggccaaagaggtacgggctcgagcacaagcaaaaacttctctggagagggagatgcatacatataccattccaagggtcacacgctt

SEQ ID NO: 6203 - DNA, 412 bp, Gossypium hirsutum
  Clone ID: LIB3120-003-Q1-K1-C2
catgtacatcggcgatttcccggtgtcagtgcaaacgacagaagacattggtcgtaatgtgtcaaacattatacggagatgctcaagtgacttgttttccgtcaccattttctcaatttttaaatgagcaaatggctaatggcatgaggagctcaaaatctaacatggatgtttacacggtactttaaaggaagtggctgatgaacacatccaatgggacaaccagaaactcaaatgcactatggcctttgttacgttacttttcattattcgtacatcctttgtacattcctggataatcatctgatcaaagtgatgaccctatgatatattggcactatttggaccactgctcgtaacgtaatgatgttgcttgagagatccatgaattactttatacaaaccaaatgaa

SEQ ID NO: 6204 - DNA, 431 bp, Gossypium hirsutum
  Clone ID: LIB3120-003-Q1-K1-C3
attaacccagcggtgactttcgggctgttcttagcgaggaagttgtcgctgataagagcagtcttttacatgataatgcaatgccttggagctatatgtggcgctgccgtcgtaaagagcttccaaaagacccaatacgaaaggctaggcggcggtgcaaacacggttagctcgggatatagcaagagtagtggccttggtgctgagattgttggtacctttgttctggtctatacggtcttctccgccactgatgctaagcgtaatgcacgagactcccacgtccctatcttggcaccgctgcctattgggtttgctgtgttcctggtccacttggcaacaattcccgttactggaacaggcattaatccagctaggagcctcggcgcagctcttatttacaacaaggaccaagcatgggatgaccattg

SEQ ID NO: 6205 - DNA, 441 bp, Gossypium hirsutum
  Clone ID: LIB3120-003-Q1-K1-C4
cccacgcgtccgcggacgcgtgggctttgttttaaaaatctgatcgctgctgctactctggtccggatcaagaaaaggaaatgttaggtgcgcttagtgctgcaagtttaacacttggtctggctggtgcgccagcagcattcaccgcccaatgcggcaatggtggcgctgccaaagccttagcgtttcctagtagcagcaacagcaacaaccgcgcccaattgttggttaagagctcattcacttccacttccaggactccaccatcctttaggacagccgttgctgcagtcgactccgaccagctcagtcccgacatgcaacaatccaaaaaatactattttgttgttgcgaatgcaaagttcatgcttgatgaagaggagcacttcaaagaacttttgtttgagaggcttcgttactacggagaacgcaataaagagc

SEQ ID NO: 6206 - DNA, 406 bp, Gossypium hirsutum
  Clone ID: LIB3120-003-Q1-K1-C5
tcggcatacactactaggacacactactagctttggcttgctcaatgatctcatcgggtaccattgccactggctgttcggcgcacgctctcatggtcgctcctttcaccggcctaacgtctgcctctgctttgccagtcaccaatacagccaacaacgacattactgtcttggcatgctatggcaggcagagtgcaatgcatgcaggtgtggcctcctactggaaagaagaagctcgagactctgtcatacctgcccgatcttacacccgtgcagttggctaaagaagtggattaccttgtttgctcaaaatgagttccttgcttggaattcgaattataggagggattcgtgcacacgatatactctagcctacccacgtactacgatggacgctactggacca

SEQ ID NO: 6207 - DNA, 360 bp, Gossypium hirsutum
  Clone ID: LIB3120-003-Q1-K1-C9
ctacctcaatagccaggccctctctttccgcgtcaccaccagcgacggcgtgactctcgacttccccaacatagtcccggcgaattggaacttcgggcagacgttcacaagccgggtgcaattcacttaaagatccaagatccgaaatcctgcggcagaggcatgctcactatttttgctaccattgcccgccaaccagtttttttttctttcaaaatttgtttctttctccccgccgacttactatttacacacatcctttcttgggttgctaaatgatgcagagcttgggaggtgttggacattattagtttacttttcaagaaataaaagttgaaagagggggtgatggttgtagcc

SEQ ID NO: 6208 - DNA, 316 bp, Gossypium hirsutum
  Clone ID: LIB3120-003-Q1-K1-D1
gcgacggctgctgttggctgtggcgttcgagctagctaggacctactccgtaggaacgcactttctcatcgagatcatagagtacaactgccagctggctcttcggctcgagcgctacctatggccatcctcttacactggggctacagcatgactcagctttcccatgtcactatgaaggcgcagacatactgacattatcttgtatcacaagcaatggcagtgcagtggcaatagcgatagcagtgtgtgcactcctactggaaagactaaggaccagactctatcatacctggctgatcttacacgcgtgcag

SEQ ID NO: 6209 - DNA, 85 bp, Gossypium hirsutum
  Clone ID: LIB3120-003-Q1-K1-D10
cccacgcgtccggttatgttggattgcttcattttctaaaattttctgcctgttaaatattgaactgcttattcatgtgcttatc

SEQ ID NO: 6210 - DNA, 370 bp, Gossypium hirsutum
  Clone ID: LIB3120-003-Q1-K1-D11
gcgccgaggaagcacttgctagggtttgagagtgtgtacttggaggggaagggggaaagggatatggtgtttagagttgatgtctgtaatgatttgagcgtggtggatgaggttggggagaggaagttggggttgggggaacatgttcttcatgtggggagcttgatgcattccttgacaattagggtttgaagggtttgtagggttggatgtgattgaccacaagaaagctgtgatcaattgaagggttgattgatttgcaaccatttagcatttgtttgagggatcaattgtaatttcggataatgcctcatgagttcaatcaagaaattgggatttggtttggtgaaaaaaaaaaaaaaaataatat

SEQ ID NO: 6211 - DNA, 440 bp, Gossypium hirsutum
  unsure (1)..(440): unsure at all n locations; Clone ID: LIB3120-003-Q1-K1-D2
gaaatcagtccccaaggctaccccccagcagcgccgattttcgccatttacagcccagagacgaccccctttcgaactccgatttcaacagagcagaacgagggttaacggcgcaaaaaacaaaggtcactttctcctttcttatttgctttatgtatatgcttatgtgtgtgtaaatagcataacagaggaaagaaggaagagcaatcgaaaaaaaaggataaaaagaaccccaatcgataaaggaaaaaaagaaaaccttctcttgtgtattgatttcgtttttttgatacagtatgcgtgtccccttgaaacaatacagaaatggggtttttatagccccgaaaatacatacatttcccttctatttnttctatttttttcttttctggtgctattttgctatttttctttttctctttctggttgctggctgtttg

SEQ ID NO: 6212 - DNA, 425 bp, Gossypium hirsutum
  Clone ID: LIB3120-003-Q1-K1-D3
gatggagaagatgaaaatcctcctttgattgattctgaaaacaattcaaagccacgtcgtattgcactttttgtcgagccttctcctttctcgtatgtatcagggtataaaaacaggttccagaattttataaaatatttaagggaaatgggagatgaggtaatggttgtaacaacacatgaaggggtcccgacggagttctacggagcaaagttgattggatcaagaagtttcccgtgcccttggtaccagaaagtgcctctttccttggcactcagtccaagaataatttcagaagttgcacggtttaagcctgatataatacacgcatcttcacccgggatcatggttttcggtgctctcattatagcaaaactactatgtgtacccatagtaatgtcttaccacacccatgtttcagtgta

SEQ ID NO: 6213 - DNA, 57 bp, Gossypium hirsutum
  Clone ID: LIB3120-003-Q1-K1-D9
aaaaaaagaaaagggcgtgaagcggcttcatcaaggagttcaaagatgaaaagatac

SEQ ID NO: 6214 - DNA, 196 bp, Gossypium hirsutum
  Clone ID: LIB3120-003-Q1-K1-E10
taatttgggaaattgatcatcttttatcatatttatttcatcaggctctggaatgaaaggtattaggtgttatattgagtcaggcggaatttaataaagtgaacaaaatatggcaggccgttttactggttccaccctttcgttcccgtgcttgcgacgtcatacctctattattgcttcaccaacatgcaattat

SEQ ID NO: 6215 - DNA, 481 bp, Gossypium hirsutum
  Clone ID: LIB3120-003-Q1-K1-E11
cgagaacgccgtgctgctgtggacgctggatccggcggagagggatgcccagctggcgagtgaggcggcgaagaagtcgaaccatctggctctgattgagattggctgtgggaggtcggcggcagagttactggctgcgagggctgagtatcatcagcggtttaagaggtctttggaggaggatgtggctgctcatactaagggggattttcgcaagcttcttgtaccacttgtgactgtgtaccgatatgagggggaagaaatcaacacaacattggcaaaatcagaggcaaagctactccatgaaaagatctcgaagaaggcctacaatgacgaagagctcattaggatcctcactaccaggagcaaagcacagctccgtgcaacattcaatgactacaataatgcttttggaaatacaatcagcaaggatttgcacgccgatccgaatgacgagttcctctctgcactgagagcagtc

SEQ ID NO: 6216 - DNA, 276 bp, Gossypium hirsutum
  Clone ID: LIB3120-003-Q1-K1-E12
aaagaacacagtgctgctgaggtccctggtcccaacaataaagggaaaaacaaaataaaaagatagggtgaaaacaaaacgcagggcttagatgcggattccaaatctcggaacggagcggcacactggaggtgcgatattgaggcgacaagctgtaagaaaacagaactattagttcggggggggccttttctgggtgctgttgctcgccgagctgattaggatgatttgtgctctttttttgatggtccgcatttatggcggtgctgcggcttt

SEQ ID NO: 6217 - DNA, 440 bp, Gossypium hirsutum
  Clone ID: LIB3120-003-Q1-K1-E2
cgcttgtatcgcttgctttcactgtgactgtgagttgcagccatgtatggaggagatgaagtatcggctatagtgatagatttagggtctcacacttgcaaagctggttatgccggtgaagatgctcccaaggctgtatttccctctgttgtggggtgcattgatcaaatggatgctgatgatgacaaagaaaacaacgattctgagactaacaacaataatgttgattccaacaaacccaagggaaaacgcaggttgtatgtaggctctcaagccttgggttttcgtcgtgaccatatggaggtggtgtcacccctaaaggatggggttgttgttgattgggatattgttgatagcatatgggatcatgctttaaaggattgtttactcgttgatccgaaagaacatccaatgctacttgctgagccttcttccaacac

SEQ ID NO: 6218 - DNA, 436 bp, Gossypium hirsutum
  Clone ID: LIB3120-003-Q1-K1-E3
cccacgcgtccgaagccttgcacaatggtcaccatcacctctgccgatgtcgctatcgcatctttcaccggccttaaagccggtgcaaccgcagctaacgttagcgccacagccaaggttgcagcctctccagtcccaaggggcagcatcaaggcctccctcaaagacgttggtgtcgctgttggggcaactgctgcaagcgtaatccttgccagcaatgccatggccattgaagtcttgctcggcagtgaccatgggggtctggctttcattcccaaagaattcagcgtaagcccatgggagaagattgtgttcaagaacaatgccggattcccacacaatgttgtgttcgatgaggacgaaatcccaagcggcgtcgacgtatccaaaatctccatgcctgaagaagagctactcaatgccaaagacgagactt

SEQ ID NO: 6219 - DNA, 420 bp, Gossypium hirsutum
  Clone ID: LIB3120-003-Q1-K1-E4
tcgcgcacgcgtcgctagccttgaacaatgctttgcatcgcctctgtcgatggcggtatcggatctttcaccgtacttaaagcacggagcaaccgacactaagcgttagcgccacatgccaggttgcatcctctccaggcccaatgggcatcatcaatgcctccctcagagacgttggtgtcgctgttggggcaactgctgcacgcgtaatactcgccagccatgccatggccattgaagtcttgctcggcagtgaccatggtggtctggctttcattcccatagaattcagcgtaagcccatgtgagaagattgtgatcaagaacaatgccggatgcccacacaatgttgagttcgatgaggacgaaataccaagcggcatcgacttatccaaaatctccatgcctgagaaagagctac

SEQ ID NO: 6220 - DNA, 435 bp, Gossypium hirsutum
  Clone ID: LIB3120-003-Q1-K1-F1
cccacgcgtccgcccacgcgtccgcccacgcgtccgggtgggatagtgtctgatgatgataatgggaatgctgttgtcactgcacggcttcttgttccaaataatatggtaggatgtctcttagggagagggggtgatgtgattcaaagattgcgaagtggcacaggtgctactatacgtgttcttccagctgatcatcttcctgcttgtgcagtggcaacagatgaattagtgcagatatcaggaaaacgagatgtcacaaagagagctctatatgaagtttccactcttttgcatcaaaatccacggaaagacaagcctcctttgagcttctctgtgccacattcaagccagaatttccctcctagtgctcttccaccgagcaattcaatgtggtcgcatcgaaatttttctcctcatgatagtccaccaatg

SEQ ID NO: 6221 - DNA, 364 bp, Gossypium hirsutum
  Clone ID: LIB3120-003-Q1-K1-F10
atggcggcgagcgtggcggcggtgcagggtcgccacgtcaccaacgaacgggggacaaagctccgcttcaaccgggacgccgagctggctgcggcggccggagctggcacggagcggcagactgggggtggatatggtggcgacaagcggcaggagacgaacgattcgttccggagggccatgtacttgagctgttgggcgccaagctaattaatatgattgagctcagttgagaatgttcgggatttagggcggagctccggctaacctggatggaggatgtttacgatccttgtaaagtaaattactggaattgtaactatcgcttctatgaatatacaataaagatgtactttcactcttt

SEQ ID NO: 6222 - DNA, 354 bp, Gossypium hirsutum
  Clone ID: LIB3120-003-Q1-K1-F11
gggtgcctgcggtgaacattttcgaaagtaggttgagacgtgggaagtttgatgagccacgcgtgtggccaattggatctcgtatggaaatcaccaaggttatccactaagtgcaaagtctgattgacccgatgatgtacctggtgatgtgaaagcattcaaacgcttcacaagctgctcgtgtaggactgttaaggacgttgccgaaactgtctagaatgactttggaagtattgacattctactgcactgtgttgcctatggaccggacgttaccaaacccgcttgttggcacatccataattggattccttgctgcactaaatgcataaagctgtccgtttgtttacatac

SEQ ID NO: 6223 - DNA, 329 bp, Gossypium hirsutum
  Clone ID: LIB3120-003-Q1-K1-F12
gggtgcctgcgtggaacattttcgaaagtagcttgagacgtggaacgtttgatcagccacgctcggggccaaatgggtctcttctggaaatcacacacggacatccactatatgcagggactgattcacccgatgatacacctggcgatgtcataatcctacaaatgctacacaggggcaccttatcggactgttattgaggcagccaaacctgtatagaatgactttgctagaattgacattgtagtgcactctgttggctcttgaccctacactaccaaaccgacagtggagacctccaaaataggacaccttgctgcaatattcgc

SEQ ID NO: 6224 - DNA, 310 bp, Gossypium hirsutum
  Clone ID: LIB3120-003-Q1-K1-F2
tggaatcaacaactgagtcatgattagcagaagacgtatatgagagaccgtgaggaccatgtccctagaggctagccatatccatctgaatgcatagtgagctgcgtttgaacactttcagcgtacactggtatatgagtgtcatctacggagaccctagatacaaaacgaccattcctggtgagctgcgactattgcattaatgtgcaccagtgctcattattgtgctacatgctcctattcaaggatctgatggacatcacatgatacatgttgtacaaatcgaagagatgcatcagacttgaaccac

SEQ ID NO: 6225 - DNA, 249 bp, Gossypium hirsutum
  Clone ID: LIB3120-003-Q1-K1-F3
aggactcctgcgctgagtgatgagatgcagaagacgtatatgatagtacgtgagaatcatgacgctagtgtcaagccatattcatatggatgcattgcgagctgcttcgtagtctatcagcggtcactggtatatgatgtgagtctacggagaccctagagacgaaacggccgatgacggtgagcgttgaactctaggttgcatgagcatcggagagctttattgtactacaagatcccattaaaggat

SEQ ID NO: 6226 - DNA, 449 bp, Gossypium hirsutum
  Clone ID: LIB3120-003-Q1-K1-F4
ggagcttctttttttattttcccccaatttatttaaaacctatatcattcgctaactcttcttctgcaagatcgaagatttgcgtttcgtttttttatttttctcttcatatctttgaagcagttcccaagtctcgctctttcgtggtgccgattttagtttttcgcttggaaaatcgtggatttcgttgatttccgatccgattgaaggtttcctgcattttttatctgacaagttcattcaatacaataagaaggaaaattgttaattggttctggactgagcaatgcggggatacgacagagaagaagtcgaagattatgatgattatgacatggaaggagaatatcaagatgaagatgtcatggaagaagatggggatggatatgaggaggaagaagaagaggaagaggaagaggaagaagaaaccaggcaacctacacaagaag

SEQ ID NO: 6227 - DNA, 448 bp, Gossypium hirsutum
  unsure (1)..(448): unsure at all n locations; Clone ID: LIB3120-003-Q1-K1-F6
cccacgcgtccgcccacgcgtccggtttcttccatatccaaatcctttcctttacctagatctcttcccttcaatcctctcacaactcaatcatcttctaccctgaaaaaagtgaacttctcttctcttccttccattacctcaatccttaccaaagaagacattgtcaaggaagaagaacaataccctcaaaagtcaagctttgatttcaattcctacatgcttcaaaaagcaagttcagttaaccaagccttggaatctgctgtttcactccgtgaccctgttaaaatccatgaagcaatgcggtactcccttttagcaggtggaaaaagggtacgtccggtgctttgtttagcagcctgtgcacttgttggtggccgggaatccatggctatgcccgcagcttgtgctgntgaaatgatccacaccatgtctttaatccacgatg

SEQ ID NO: 6228 - DNA, 478 bp, Gossypium hirsutum
  Clone ID: LIB3120-003-Q1-K1-F9
ctctttcttgatgagaacgggctggtggcgggatggctggagttcgtggcgcgagctgtcccggttcattgcgaacatgggtgatgaggagggggtcgaggggcattgcgggccgtcccattgccaccagttgttggtttatgaccgccatgtagtggatatattggatctggttgtccaaaatggccacctttgcttgcggggagagatggcggcttgtctcatcggggcgcagcgcatcctcttggtgcgacctgtggtgaggtgcccgagaagtttctccttggtggtatcccgaagccgccctctggtgaggtggatcttcgcttgatggtgtagccgttcgaacagagtgctcttgtcggagaggtggaggaggaagtttgtttatggggtttggatctctttccgagtgaggagattgagcggttgatcttcctccagggttaccccccgtcaccttactaattacgggcct

SEQ ID NO: 6229 - DNA, 434 bp, Gossypium hirsutum
  Clone ID: LIB3120-003-Q1-K1-G1
cccacgcgtccgctgagattgtgccaatatttctaaaaaagggtttcttcctaccaacatcgttgaaatgctttcgtctcgtgaaaaacaagttttcttatccgactccgaggatgagaaggctgaggtaaatccaattccaagaaagaaaaagaagaaaaactcaggggtagaacccgttattttgaatgacataccacctcctcaatgcttacaaagctccttggagttcttgaagaaagggaaaatgcaggttccaagatcatctttggttttaaagaactctaaccaagtactccgccttagttgtgccatatcaacttctgggttacgtgaaagttgtaaaagactgtaatgaagtttgctagtgtccttctgaacctgagattgtgccaatatttctaaaaaagggttcaatgcagcctattcctatt

SEQ ID NO: 6230 - DNA, 467 bp, Gossypium hirsutum
  Clone ID: LIB3120-003-Q1-K1-G10
ggggatatagatccgtatgtgctgattgagtatagggctcaggagcgcaagagcagcgtcatccgagcaggcggaggttcgaacccagtttggaacgagacattcaagtttctggtgaactactccggtggcaatgacagccagcagaagcttgtcctcagaatcatggacagagacacattcacggccgatgatttcatcggccaggcatcgatcaatgtggctgacttgatctcgttaggcagcgaaaacgggaaggtcatcgacctacacacgaagaagtacagtgtcgtactcgcaaatagaacatattgtggagagattcgtgtgggagtcaaatttatccccaaggtagaggagaatgagaccggagaagagctcggaggatggaaacacagctttcaccactgatatattacttgttaggagggtgttgtgtagtcgtgtgtgtaaaattgtgataccaa

SEQ ID NO: 6231 - DNA, 85 bp, Gossypium hirsutum
  Clone ID: LIB3120-003-Q1-K1-G11
tttggaattcacttgtaaattgaaattctaaagtaaccgaattgttacaaatttaagtttaagtcaagaagtttagaccttgctg

SEQ ID NO: 6232 - DNA, 183 bp, Gossypium hirsutum
  Clone ID: LIB3120-003-Q1-K1-G12
aaatggacatggtttttttattttaaggatgggcccttctgtggaattttaaccaccaaaattcgaattccataatattatgactgtattccaatttttagaattttttagaatcaagactttgtgaacttatgaatttgtaagttgtatgccaaagttgaaataaattaggatcgtttgttg

SEQ ID NO: 6233 - DNA, 447 bp, Gossypium hirsutum
  Clone ID: LIB3120-003-Q1-K1-G2
cccacgcgtccgcccacgcgtccggaagaactaaattccccagaatttgcttcagtaatggctgcctcagttatggcttcttcagttaccctcaagccttcattcaatgttgagaaatctggtgtaagaggggttccttcccttgctaggtccccttcttctttcaaggttgaagccagtggtggcaagaagatcaagaccgacaagccttatggaatcaatggtggtatgaacttgagggatggtcttgatgcctctggaaggaagggtaagggaaagggtgtttaccaatatgttgacaaatatggtgctaacgtcgatgggtacagtcctatctacaacaccaacgactggtctcccagtggtgatgtttatgttggcggtactaccggattggcaatctgggcggttaccctagccggaaattcttgccgtggtgcacttctt

SEQ ID NO: 6234 - DNA, 435 bp, Gossypium hirsutum
  unsure (1)..(435): unsure at all n locations; Clone ID: LIB3120-003-Q1-K1-G3
cccacgcgtccgcaattttgtaagcaagtatggctaaggacgttgaggttggtggtgagttccaagccaaggactaccatgatcctccaccagctccattagtggacggggaggagttgacaaagtggtcattttatagggctgtaatagccgagtttattgccacgctcttatttttatacatcactgtgttgacagtgatcggatacaagagtcaggttgaccctgataagggcagtgacgaatgcggtggtgttggcattcttggcattgcttgggcttttggtgggatgatctttatccttgtttactgcactgctggtatctctggaggacacatcaacccagcagtgacctttgggcttttcttggctaggaaggtgtccttagttcgagccatattttatatggctgctcaatngttgggagccatat

SEQ ID NO: 6235 - DNA, 449 bp, Gossypium hirsutum
  Clone ID: LIB3120-003-Q1-K1-G4
gcccacactctcaaattcagataacaatttcacagttgttttcttctctctctctctcagccatggctgcagccatctccaccgtcgccgccgctgccgccgccaaccgagctctgggagtgtcagtcccaacctcagctttcatggggaagaaagtgagctcgagattcaacaacaccaggcaggttccttcgggaagttttaaggtgatggcggccgaaaaagagatagacgaagagacacagaccgaaaaggaccgatggaaagggttggcttacgatatttcggacgaccaacaagacattactcgagggaaagggatggtggattccttgttccaagctcccatgaatgatggaactcactatgctgtcatgagttcctatgaatacatcagccaaggtcttaaaacgtacaatttggacaacaacatggatggtttctacatc

SEQ ID NO: 6236 - DNA, 439 bp, Gossypium hirsutum
  Clone ID: LIB3120-003-Q1-K1-H1
ctttgaattgaaaccctcaaaattccacttaaaaaatggcctccacagcttccctctccaccgccgtagccaccacctctttcctccgcggccacccggccccgaaaaccctaagctcccttcctttcaaccaatctcttttcgggctaaaaccccaacgaaatggccgtctcaccatggctgcatacaaagtgacactgttaacacccgaaggaccccaagaattcgtgtgccccgacgacgtttacatcgttgaccaagctgaggaagaaggcattgatcttccgttctcgtgtagggctgggtcttgttcttcgtgtgccggaatgattaagcaaggctccgtcgatcaatccgacggtaatttccttgatgatgaccagattgctgcaggttttgtcctcacttgtgttgcttaccctcagagtgatgttgttat

SEQ ID NO: 6237 - DNA, 473 bp, Gossypium hirsutum
  Clone ID: LIB3120-003-Q1-K1-H10
cggacgcgtgggtaaaaataatataagttacttcgataaaattcattatagaatcaacacaaagtggttgataagagagagagagagagagagagagagagagagattataattctaaaaaaatatatataaatatatgcatgggtaaattacaatcatatttttgggagacatacataaagaggatatatcatctagatgtttgtatattaggaaggaatctagtccagaatccataataaaataatgaaggaagaggatatataatatatataagttagtgaattagaaataattccattatataatcttcaatgagatggataaggaaaaacaaacaaggttgaacaatttaatggttgatcctcgtaacatgcgtatataaattattgactttgagttggaggaaaattatatgatttctaaattagatttgtcttaataggtatatatatatatataaggttgaagga

SEQ ID NO: 6238 - DNA, 398 bp, Gossypium hirsutum
  Clone ID: LIB3120-003-Q1-K1-H2
ctcagtttgcaacaccagagcttgtgtgcttcaaagctaccatcatcatcatgtttcttctgttgacaagatccatttccagacatttaaagggttgaaattgaataaacccaatttatcattcactgctggtagatgccaaaaatccaggcttatatgcaaagccagtgaggctgttgctcaagttgaagtggtgacagaagcagactgggaagagcttgtggttggcagtaagacaccagttgtagtggatttttgggcaccatggtgcggaccctgtcgggtgattgaaccagctatagctgaattagccaaagaatatgctgtgaagattgtttgttacaagctcaacactgatgacagcccaaatattgccacaaaattcggtatcaggagca

SEQ ID NO: 6239 - DNA, 436 bp, Gossypium hirsutum
  Clone ID: LIB3120-003-Q1-K1-H3
gttcggatcgcggcgacgtgggcggttcgctgcccgcgacgtcgcgagaagtccactgaaccttatcatttagagaaaggagaactgaaagctgaagcagctgcaagggtagatcaaataacagcagagttaaacacagcatcagctgatggcaaaccatctgactcttctgttgagagactgaaagaaggcttcgtttacttcaagaaagaaaaatatgaaaagaatcctgctctgtatggtgagcttgccaagggtcaaagccctaagtatatgattgttgcctgctcggactctagggtctgcccatctcatgtgctggacatgcaacctggtgaagcttttgtggtccgtaatgttgctaacatggtgccaccatatgaccagattaaatatgctggcattggatctgctattgaatatgcagttttgcatc

SEQ ID NO: 6240 - DNA, 114 bp, Gossypium hirsutum
  Clone ID: LIB3120-003-Q1-K1-H4
cccacgcgtgcgcccacgcgtccgcctttctttctcccggaaatcatgtctgccgtcactacacaagcctcggctgccgtttccgcccatgcacatcgaaaactaggtttctta

SEQ ID NO: 6241 - DNA, 450 bp, Gossypium hirsutum
  Clone ID: LIB3120-003-Q1-K1-H9
attccggtgcctgttgacctgtctcgacagtcatggccggaccaggtgcggcagtgctgtgggtcgacgttgatgtatttgaggactgggacatgtagtgggatcaaggtggggcgggccactcaggcgcgggatgagattgtggacaatgtgttggcagcggtggagggggtggtggggaatgttccgcggaagtgggctaatgtgcggtcgttccatataaaggcggcggagtctctggcgctgcctatatatcaggctttaccggagcaggggttgaagattgagggggtgcagaagaagggagagactggtggtggttccaagaagaggaagagtaaagcatacaaatctgaggacatgggggtaaagggaaccaagcggttttaattggtacatgaaatggagtgatgggtttgatggaagttatttagctagctagaatgtgtc

SEQ ID NO: 6242 - DNA, 473 bp, Gossypium hirsutum
  Clone ID: LIB3120-004-Q1-K1-A1
aagctaagggcctctgagccttgttgtcatccaatcaattccaacaaaaatcctccattgttgatggttcaagcctttccatcatacatttgacacccatctctttgcataaaaattatgcaaatgaggaccctcaatgcagcaactccaagtttgacacctctctcggttctttctgagacaagaaccgagaccagaaaagcaccattgctccccattgcttcaccactcaaactacccaactgcccggcttttattaagacccaaccagctttgcaccagtgtttttcaagaaccttgcatgggggtttactgctactgccatcacttctccccaatggtttcgctaaagccttgtcatacgaggaagccctacagcagactacgggattctcctcgtctgttgattttgacccaaatgggatccttgataccgttgtcagttttgtaactgagaatcccacggttatagc

SEQ ID NO: 6243 - DNA, 426 bp, Gossypium hirsutum
  Clone ID: LIB3120-004-Q1-K1-A3
gcatttctggcctatacacaacgaaaacaaatgcaaacatcttatgcccgcatgcgaatggggcaggcttgacgctcaacagggagaggcgatatggaaagcaggaagcaaatttattgtagaggctttgacaatgcaaaacgtgaatgattacatgttccatttgttgaacaaatactctaaaccttagatgtataaaccgacaatacctccaaatgtcacgaagctctgtttcgaaaccacagagcacggcctattgaaggagtgcatgcaaaacatggtgaagtgtcctagtgataaacttccatgtacattgccttccccatttaaaccttgaaccattactgcttctctcaaggcaaaagtaaaaatagctagacacgctgtgacgtgggagactgaatattgcaaaaaactgaaagcata

SEQ ID NO: 6244 - DNA, 361 bp, Gossypium hirsutum
  Clone ID: LIB3120-004-Q1-K1-A5
cattagctgaggaaaaacgaaaagtagccttggaagctgcgacaatggcatcgaaagaagctgctgcataagatgctgatcgtatacagaatgctgctacactgctgatgcagaaaaggcctcgaaagtggctaaacacaaaacatcaactctgctagatgcgatatgacatacaatggtgaccggtacacacctagtttgacgattataggggatgcaattaatgatctcaaatgctacattaaaagcgcgtcacaagatgactaagatcatctgctgacatcatgaatatgtaccagtccgtttctaatgacacgcttttatatgctctacatatgtgaacgtccactgaacatattgg

SEQ ID NO: 6245 - DNA, 503 bp, Gossypium hirsutum
  Clone ID: LIB3120-004-Q1-K1-A6
catagctatatcatatgagggttgtaactcactggtggctgtgcacatagtgtgtgaagaggcttgctgctagaaggaaaacgctgtgcagtatcaatataggctgccaatactgatggcgatgtgacgtctgatgcggccaaagatgctacactaaatgctctagttgctgcttgctatggagctggtgcacaaacgtgcatggcactacacacactaggcattcatggcgactctcaatcatctgtgaatgacctggtacagggtcgcctaaagacatatagtgaatgctggactataacccaatgcagaccttgggacagtgattaacatacaggctagagaacgaatatgcttattcatataatctggagttgagagtgcggcagaactactgctagagggtagaaatatcgtggatacatgatatgagcaatgaaactttattggtccgacaattttaactggaggcacagctgacatggaatgctataacgaggaaa

SEQ ID NO: 6246 - DNA, 266 bp, Gossypium hirsutum
  Clone ID: LIB3120-004-Q1-K1-A7
catttctttaggaaataagagatgtcgccctgaaagctgagaaaaaggcattgaaagagggtgctgaaaaagaagctgatcggacttgataatctgctaatgctgctgctgaagaggcttttatagaggcttactagaaaaaaaccggatggctagatatgatatcacattaaacggtcacaaggtcggccatagatgtacgaattacaagggaagcatgtgatttacacggttactacattgaaagcggctacacggctactaaa

SEQ ID NO: 6247 - DNA, 459 bp, Gossypium hirsutum
  unsure (1)..(459): unsure at all n locations; Clone ID: LIB3120-004-Q1-K1-B1
gngaaagaggatccaagactttttatgtgcggcggctgccacaacgatcaactttctagttccagcagcaggggagggcgagcctttggccccaatgctagcacccaaaagggcggaatctgctgaacatacagggatattgagattgaggggtttgccattttctgctggaaaagatgatataatggagttctttaaagattttgtgttatccgaagatgctgttcatatagtattgaattcagaggggaggccaagtggagaagcatttgtggagtttacaaatgcagaagattcaaaagctgcaatgtccaaggataggatgacacttgggagtcgttatattgagttgttcccttcattttctgaagagatggaggaagcaatttcaagaggacggtgattcttcagacaatgtcttntgttttattttctattctataccaggtatgatttctt

SEQ ID NO: 6248 - DNA, 496 bp, Gossypium hirsutum
  Clone ID: LIB3120-004-Q1-K1-B2
cccacgcgtgcggaacaatgtcggtctcacttgaagctgcagctaccctgatgcaaccaatcaagggtgctgcaccatcaaggaccaatgtgctgctcaggtcctcccagagcgtttctaaggccttcggtttggagcctgttggtgctaggctcacctgctctttgcaaactgacctcaaggacttggctcagacgtgtgttgatgctaccaagctcgctggtttcgctcttgctacatctgctcttgttgtctcgggagcaagcgctgaaggagttccaaagcggctaacctacgatgaaatccaaagcaagacatacatggaagtcaaaggaacaggaactgctaaccagtgcccaaccatcgatggtggtgtcgactcttttgccttcaagcctggcaaatactacgccaagaagttctgcttggagcccacttccttcactgtcaaggctgatggtgttaacaagaatgcccctcctgagttgcaaaacac

SEQ ID NO: 6249 - DNA, 411 bp, Gossypium hirsutum
  unsure (1)..(411): unsure at all n locations; Clone ID: LIB3120-004-Q1-K1-B3
ggtgactatggctgggacactgctggtttgttagccgaccctgatgcctttgccaggaatagggctcttgaggtcatccatggaagatgggcaatgttgggagcactaggctgtatcacaccagaagtacttgagaaatggcttaaggttgatttcaaggaaccgggatggatcaaggcaggagctcaaattatatcagaaggtggcttggattacttacgcaaccctaacctagtacatgctcaaagcatccttgccgttctcggattacaagattgtactaatgggactcgtcgaaagattccgcatcaatggctcacctggtgttggtgaatgcaatgatctttatcctgagggacaatactttgaccctcttgancttgctgatgaccctggtacatgtgctgaact

SEQ ID NO: 6250 - DNA, 392 bp, Gossypium hirsutum
  Clone ID: LIB3120-004-Q1-K1-B5
cttgaaatatgcatatatctaaatgacaagtacgaaattgatgggagggatccaaatgggcacgttggttgcatgtgggcaagatgcggcgtgcacgaccagggatggcgagaaagacccgtttttgggaaaatacgatacatgaactatgctggatgcaaaaggaaattcaatgttgacggatacacagcttatgtcaagagactagtcggtgaaatcaagaagagaaaagcagaaagcccggtgggtcaaaagataaagcagccgcgcaacgaacaacattaacatgtcgcggcctgtctgttgagaaactcttttatctaaactccatggctgtagtaccactaaccatattgtgttagaaatgacaatgacatgctaggttttttggt

SEQ ID NO: 6251 - DNA, 289 bp, Gossypium hirsutum
  Clone ID: LIB3120-004-Q1-K1-B6
cttgaaatatgcatatacctaaacgacttggattaaaacgagcggcggcatcacaatggggggcccgatcatatgcgggggggattcggactgcacgcccacggatgcgaacaaagacccttttattggaaaaatacgatacatgaactatgccgggagcagaaggaaaatcaatgttgacggattcacacgttaatttaagagacttacctgtgaaatctagaagagtaaagcagaaagcccgcgtggtcaaaagatataaaaatcgggccactaaacaacataaact

SEQ ID NO: 6252 - DNA, 359 bp, Gossypium hirsutum
  Clone ID: LIB3120-004-Q1-K1-B7
ctcacaacatccataaatcgaattgacacgtactaaatggactggacgcatcaaactgggtgctgggatgaactgcgcactacacacggaacacacaaacggggatcgccacactgaccagcttttgtgaaaatccgatacatgaactatgctggatgcagacagaaaggaatggagccggctacacaccttcatggaagagactagcgcttgaaatcaactaagacgaaaagcataatgcccgacgggccaaaagataaagtatactggccacgaacaacataaacttggatcggcctgtctacagagatactcttgaatgtcaacttcatgggtgatgacccactaacaatatgtgt

SEQ ID NO: 6253 - DNA, 416 bp, Gossypium hirsutum
  Clone ID: LIB3120-004-Q1-K1-B8
caaaactccaacactaaccgcttcggttttcacggaagctgtcactgagactgaaacaccatccgacttcatcattcctcagaaacctgaggaggtggtcaagcaagttggaaagccaagactggttttgaaattcatatggatggaaaagaacatcgggcttgcccttgatcaagtcataccgggccacggcactgttcctctaagtccatatttcttctggccaaggaaagatgcctgggaagagctcaaggccactctagaaagtaagccttggatttctcagaagaagatgattatccttctcaatcaggccactgatatcatcaatctatggcagcaaagtggtggcaacctttcccagagctagatgtgcattttttttatataattttttttgtcttagctatgcaaaa

SEQ ID NO: 6254 - DNA, 358 bp, Gossypium hirsutum
  Clone ID: LIB3120-004-Q1-K1-C1
cccacgcgtccgtggcctatgtttcttgatttctgggttttaactcaaagaaagagaaaagtcagggtcactggaacgtaaaaggttagtgcggataacaggacctggaagagcgaacttaaggcctggcgttagaagctcgttgcttgtcggctaaacagctctttgcatgccgacctgaacggcttgcataaaccctgtgttgacgctatgcaaagcagaagacgttgcttgttatacatatgcacgtgtcgacctccgagcaggcgctgatggagttcttaaactgcttacctacagtggaatccatggcttggcatacattgaatttggaggaacaataactgatcacgactgc

SEQ ID NO: 6255 - DNA, 289 bp, Gossypium hirsutum
  Clone ID: LIB3120-004-Q1-K1-C2
gccatacatggatactctggagtcgtagtcagagttactcccatgcgtactgagatcattatcagagccactcgtacccaaaatgttctgggtgagaaagggaggaggattagggaactgacctctgttgttcaaaagcgattcaagtttcctgaaaacagcgtggagctgtactctgtgaaggtcaataacagaggcctgtgtgccattgattaggctgaggaccttcgctataagctactaggaggtgtcgctgtccgtagggcctgatattaagtgcttacatttg

SEQ ID NO: 6256 - DNA, 486 bp, Gossypium hirsutum
  Clone ID: LIB3120-004-Q1-K1-C3
gcacttaggaaccagaaaccaaggcaatggcttctcttgcaaccttagctggtgttcaaccaacgaccatcaagggccttggtggcagctctctcaatggaaccaagctcttggtgaagtcaactcgccagagtttcaaacccaaaaactacagggctggtgctgtggtagcaaagtatggtgataagagtatatactttgatttggaggatattggcaacacaactgggcaatgggacttgtatggatccgatgcaccttcaccgtacaacccactccagagcaagttctttgagacatttgcagctccatttaccaagagaggattgttgctcaagtccctgatcttgggaagcggttccctcggtctttacctcagtgccactgcttccgatgaccttctaccgatcaagaaaggtccgcaactcccacccaagcctgggccgcgtggcaagatataatttagttaaactctttaagcttttc

SEQ ID NO: 6257 - DNA, 454 bp, Gossypium hirsutum
  Clone ID: LIB3120-004-Q1-K1-C4
gtgatttgcgggtggagaagacgagagctcatctctctgcttcaaagctcctgtccgggtagaattctcttcttgctttgcgttgcgttctttgttgttcaatcgccatggcttcaaagcggattttgaaggaactcaacgatttgcagaaagatccacccacttcttgtagtgctggtccagtaactgaagacatgtttcattggcaagcaacaatcatgggaccctcagatagcccttatgctggacgtgtgtctttagttactatccatttccctacagattattctttcaagcctcctaaggttgcgtttacgaccaaagtcttgcattccaacatcaacagcaatggaagcatttgtcttgatattctcataaaacaatggagccctggactaaccatttccaacgatctggtctcaatctgctcagtgctgaccgatccaaaccctga

SEQ ID NO: 6258 - DNA, 490 bp, Gossypium hirsutum
  Clone ID: LIB3120-004-Q1-K1-C5
cactcccgttcggtactgctggattgctttatcttataaaattgattgcctgtcaaagatggtgctgcttattcacgtgcttatctggtcgatcctttcaccggactaagggcggcctctgttttggaagcaatcatgcaggccaacacctacattactatactcgcaagaaatggcgagcgaatgcaatgcatgcaggtgtggcctactactggaaagaagaagttagagactctgtcataccttcaagatcttacacccgtgcagttggctaaggaagtagattaccttcttagctcaaaatggcttacttgcttggaatacagaattagaggagggattcgcgcaccgtacatactctagactacccacgtactaccatggacgctactggaccatgtgaaagctgcctatgatcgggtgcaccgactaggctcaggtattgaaggagcttgaggaatgcaagaacgaataccgcaatgcattcatt

SEQ ID NO: 6259 - DNA, 107 bp, Gossypium hirsutum
  Clone ID: LIB3120-004-Q1-K1-C6
cccacgcgtccggctatgttggattgcttcattttctaaaaatttatgcctgttaaatggggaactgcttatacatgggctgatctaatcaaaaaaaaaaatagatt

SEQ ID NO: 6260 - DNA, 193 bp, Gossypium hirsutum
  Clone ID: LIB3120-004-Q1-K1-C7
cccacgcgtccggatatgctggaatgcttaaccttctaaatgtgtcggactttgaaagggggaacgtgctttagaggagcgggtcggtacccaaacgagaaatggattggggagctcattgttgatgatttccaccttcgttctaatccattctggaaacatacaactatagtgcgtgctcatgtggaataaa

SEQ ID NO: 6261 - DNA, 458 bp, Gossypium hirsutum
  Clone ID: LIB3120-004-Q1-K1-C8
cccacgcgtccggacggcttgtatcaacggatggtgcctaacctcctgtcttttcaccggggccaggtccaattttgggggtcggcgacgacctacattgcggccttcagtcgtcgctagccttaactcttctccttctactccgactcttatccaagaccgcccggtttttgctgcccctattcctttgctcaccccgagagaagagatgggaaacaagtgctacgacgaagccattgaagctctcaagaaacttctcagtgagaaaggagaactgaaagctgaagcagctgcaagggtagatcaaataacagcagagttaaacacagcatcagctgatggcaaaccatctgactcttctgttgagagactgaaagaaggcttcgtttacttcaagaaagaaaaatactgaaaagaattctgctctgtatggtgagcttgcctagggtcaaagccct

SEQ ID NO: 6262 - DNA, 476 bp, Gossypium hirsutum
  unsure (1)..(476): unsure at all n locations; Clone ID: LIB3120-004-Q1-K1-D1
cccacgcgtccggttggtcgaagttggggttatggaatctggttccgcttcaatgttcattgcactcatgatattcttttcgggaacgaaacgataccgatacaagaaatgttcgggaagccccattgtacatatttgccaagttgtttctgctgcatctgcgaaaaagacagctaaactcccttctgatatttccttgttgtatgaagatctccctgaggcatcacgaatccatcacacggatcagtttcgcttcctggacaaggcatctgttgtgacagaagatgattacagacaaggttccttcatgatgaacccttggaagctttgtgcagttacaagggtagaggaggtaaagaagatgatcaggctactcccgatttgggcaacaacgattatattttggacgacatatgcacagatgatcactttctcggtggaacaagcaaccaccatggagagaaccatangacatt

SEQ ID NO: 6263 - DNA, 461 bp, Gossypium hirsutum
  Clone ID: LIB3120-004-Q1-K1-D2
ctactagtacccactactagcaatggctgcctaaatgatcgcatcggctaccattgccactgcctggtcggcacatgctaacatggtcacccctttcaccggcctcaagtctgcctctgctttcccaggcaccaggaaggccaacaacgacattacttatctcgcaagcaatggcggcagagtgcaatgcatgcacgtgtggcctcctactggaaagaagaagttcgagactctctcatacctccacgatcttacacccgagcaggtggctaatgaagtagattaccttcttcgctcaaaatgcgttcacttgcttggagttcgaattggaggagggattcgtgcaccagaagtactcgagcttacccacgtactacgatggacgctactggaccatgtggaagctgcccatgtacgggtgcaccgactcggctcatgtgttggaggagcttgaagaatgc

SEQ ID NO: 6264 - DNA, 482 bp, Gossypium hirsutum
  Clone ID: LIB3120-004-Q1-K1-D3
ccctatcgtgcgacgctacattcttcaactcatgttacagtttaagctgcgacatatccagaccaagactcctgccgtaaagatgagcaatgcaaggcttatgataatggctggtgcaggctgcactggtgtgaagggtagcatgagaagaaagaagaaggctgtccacaagacaaccaccaccgacgacaaacgattgcagagcacccttaaaagaataggagtgaatgctatttctgcaattgaggaagtcaacatattcaaggatgatgttgttatccagtatattaatcccaaagctcagtgctactatagctgccaacacacgagttgtcagtggctctgctcagacatataactcgcatgataatgttcctggaatcatcacacataagggacctgattactgggacaacttgaagaaattggcatatctatttcagatacaagcacctggtgctggtgatcgtaccggtactggt

SEQ ID NO: 6265 - DNA, 176 bp, Gossypium hirsutum
  Clone ID: LIB3120-004-Q1-K1-D4
ctgccatggactgtacctgaaagttctctggtcggcgtaactggaaatgtaatgtaacacaagactgcatcacatagctagtgactgacttgaacagcgcaaagatggagactgacgacgatgatgaagtgtgacctccctaacggtatgtcgatcaactaacagctcgattaacc

SEQ ID NO: 6266 - DNA, 463 bp, Gossypium hirsutum
  Clone ID: LIB3120-004-Q1-K1-D5
gaactaggtaaattgatcatcgttaatcatatttattttatcatgctcaagaaagaaaggggactgctcatactttgcatggatggctattcactagatctggcactcttggcgtcaccagcattgacttcttcgacattccaaaggttcacccatctgtggcacccgacctgagatgctacggcgacacggatgcgccagatttgggcaccacttatacctgcttccatatactgggggatttggaacagctattaaatattatttcccctaactaacacaaagtgttggtagtaggacatgactggcgacctgccatattttctaatttgtgtttgtttacgccagacaaagagaaagctgtgttcaacctcagtgtgtgctttatttcacataatccacatatgaactctatttatgggtggagagctatttatgggaatgattataacatgtgtacatt

SEQ ID NO: 6267 - DNA, 486 bp, Gossypium hirsutum
  Clone ID: LIB3120-004-Q1-K1-D6
atttttgtgaaaatgatactagcttatgatatttatactgtcaaactttgaaatacagaagctgtgttgtatggtagggtggaactcaacgaacaaacccggttgaacgttgctagcaccaacagggtggctgtggctagacctggttttaccgttagagcttaacatgttcctgccgagcctgaaactggacgcagagctgtgctgggtcttgttgctgctggtataagctactggctccttagttcaagctgtgcttgctgatgcacgaaacatcaaggttggcccgtcttcaccaccctccggaggattgccctgaactttgaatttcgatgagccaagataccttgatctggcgtacaaagatcggtttttcctccaaccatttactccttcacaagcgtgttacaaggcaaatgaataagtcaaatacattcttggtttgaaaatcttgatcgacaaaaaagcatagtcctatgttatgaa

SEQ ID NO: 6268 - DNA, 263 bp, Gossypium hirsutum
  Clone ID: LIB3120-004-Q1-K1-E1
tagccttgtctggtgctcacacatttggcagagctcagtgtttaacttttaccagtcgattgtacaattttacgggagtgggtgatacagatccgaccttgaacgccacatacttggaagaactacgccaaatatgcccacagggtggaaatagtagtgtgttgacaaatcttgatcccacaacacctgatggtttcgacattaactacttaaccaatttacaggttattgaaggttggtttggaattgttaaaatttatttt

SEQ ID NO: 6269 - DNA, 503 bp, Gossypium hirsutum
  unsure (1)..(503): unsure at all n locations; Clone ID: LIB3120-004-Q1-K1-E2
acgcctgcaggtacggnnnaattttctggtcgacgccacgcgtccgcccacgcgtccgataaattaaccgtccaactacaataaaaaggaaaatccggaaaaaaaaatcgtgggaatagggataaggtgaagataggtgggattagcggaggctatgtttttaggagtagcagtgtatttcacgctctgggctattcattactctatctcttatgatgatgccgagttgctaaggagacagtttgatcttgcaaacaaagaggcaatggatgaatctgcagagtggaggctgagatttgatgaagaggcaaacaaggcttgcaagtgtgccaaggaactagacgacgagcaaagagtctattggaaagaatggagattgcactggctgtgacgaaaaactgatgctgactgaaaaggaaaatgctgctttactcaagcaagtggaaacgttaaaaaatgagcttgaggcagagaaacagatgtgtcacacatagtagacaaac

SEQ ID NO: 6270 - DNA, 394 bp, Gossypium hirsutum
  Clone ID: LIB3120-004-Q1-K1-E3
accactttgatcaatccttaatttcccaatttcttctgaaaccctaatcctaaattgatcccccagcttcggtgttccaatggccactgaggaaccaactgtcgccgtggaatctgcgcctgagccggcggaagagaaccccgctgaggctacagccaatcccaaatctggcaaagcaaagaaagctaaagagcccaaagccaagaaggctgcagctcctaggaagccacgagcttctcctgctcatcctccttacgaagagatggtcaaagatgcaatcgttactttgaaggagaagactggatcaagtcagtatgctatcactaaattcattgaagagaaacagaagaatcttcctggaaattttaagaagcttctgcttttccatttgaag

SEQ ID NO: 6271 - DNA, 358 bp, Gossypium hirsutum
  Clone ID: LIB3120-004-Q1-K1-E4
ctcgctgaactgaaaaaggaaaggggacagggagatggcaattaccttgcataacgctaccttcagatctcctttcattaaccctagctctgaccctaagcctaagtggctatgcaccgacgcagcttagcggtgtgatctctactccactgtcttccttcaactccaaaacgacatgtctcaaatttgggtctaggactttcactaaaccggtcaagtgctctatgtgtcaggcggctcaacctgcaatcgagaagaggaggcagttaaagaggcgaagcgatataaggaacatagcaatcgtgacgcatgttgaccatggaaagactactttgggcgatgcaatgttgaaacagac

SEQ ID NO: 6272 - DNA, 384 bp, Gossypium hirsutum
  Clone ID: LIB3120-004-Q1-K1-E5
ctcgcgcttagcgtggaggcgctgcagggtcgccacgtcaccaacgaacggcggacagagctccggtacaaccggcacgccgagctggctaccgcggccggagctggcacggaccggcacactggacgtggatatggtcgcgacaaccgccaggggacgaacgactctggccgcacggccatatacttgatctgtcggccgccaagctaatgcataacattgaactcacctgacactgctgactattcatgaccgctctctggctgacccgtatgtagattcttgacgacccttggcaatgacattactggagctggggctatcgctactatgactatacagtctaaaacttcttatactgtttgataccatggagcaaaatgg

SEQ ID NO: 6273 - DNA, 386 bp, Gossypium hirsutum
  Clone ID: LIB3120-004-Q1-K1-E6
gcgtcgtgtgccgcgtggcgggtgccgtcgctcgtaccaacgaacagcggacaggctcggtaaaccgaacgcggggtgggtgggagaccggagctctcacggagcgtcacactgtgaggggaatattggtgcattacaacgcgtaaggacgcacaaacacattcgctcgagaatggcatagtcttactctgatactcgccaagctcatgaatactcattgagctcagctggatatgcttgacattcacgtgagtcgctctggatgacctcaatgcatatcgtgtacgacccttctgacatacattacttgactcataactaacgcgattatgcatctactatagctacatactttgattgtactatcatgacatgatactcatggg

SEQ ID NO: 6274 - DNA, 471 bp, Gossypium hirsutum
  Clone ID: LIB3120-004-Q1-K1-E8
gagagacgaggcttgtttgcttggcacctttgttatatctctaaaaacacttgtacaagggtgggggtacaatatgaacgcggctgtggctgatgcagcggactacaatggacaccctgctaacaagtctagaactggtggctgggtacctgctgctctcaactaatgaattgaaatatgtgagaggctgtcaacaatgggaatagcatagaaccttgtgacttacttgggtggaaccatgcaccttgcaagcgctacttctgcaaatgttgtaacagacttcatggggacatcatttctactatgattactgggcggctctctagccgattgatactagagcagataccgaacgatcgctatattctccatggatcagatgcttgggacttgcctgctaacagaatctacgaaactcccacaactacggtcaccttcgtcaagtataccgacgtaacacaatgcgaacaa

SEQ ID NO: 6275 - DNA, 412 bp, Gossypium hirsutum
  Clone ID: LIB3120-004-Q1-K1-F1
aatacgctgacgatgagatgaatatcttgaaggaggagttttttattgatcgtggggagctgcttggaggtcttatgaaaggtgataaattgactagtggaactgaccaagcggctttgagctgcccattcttgaggaacacagggtagcctaacgttgatgggtatgcatgaattgcagcgtttagctttgatgggaatgcatgaatttagtgtttgagaaataaaactgatggatcattacataatatagaatagtgagcttccatttacttctgctgattcacttatgcctgccatctatatgtatctgtagaaattgagatgtacaagcacacgagcataacatggtctggttgtatttttaaggacgaatatagtttcggtatctacatattgattcttgctgaaaa

SEQ ID NO: 6276 - DNA, 402 bp, Gossypium hirsutum
  Clone ID: LIB3120-004-Q1-K1-F2
cccacgcgtacgatggcctctactttctgtcaaaatctctgtttgctttctctttttgtgctcttggcagttttctcggctgagcctatttcccattggaagaaccaatctccaagttctagccaggcaaagttacaggctgaaaagctcataagatgacttaatatggtccctaaagatgctattaatgctggtgacaatgcccctgcagttgagacctccaagattgttgaaaagcaattcacgttcctcagtgcttggggaacctgggccttccattcaggagtttgagtcaccatgctgggtactataaacttacacatgctgtatctgcaaggatgttttaccttttcttcgaatgacggaacagcaagaaagaccctgtcgtgatttcggtgactg

SEQ ID NO: 6277 - DNA, 437 bp, Gossypium hirsutum
  Clone ID: LIB3120-004-Q1-K1-F3
gcactttcagtaacagtgcccacattggctctcttctcctttcccagagccttaaaccgtcatttgtactacaacaattgctctctcatcgctcgatgcatacggtctcgactctttcctcaaggccgaggagatactcttcttgcttcccgctcttattcgtctacacttaagagcttgtgcgctgctccagttccccaacgtttacaccgccgtttggagtgcgtcgcgagttccgcagcttattttggggctgctggcggcggcggcgtttatggcggcggcgatggaagtggtagcggtagcggtggcggaagtggagattgtggggaaggaacgggcgacggagacttgaaggcgaaattgggagcgggagccgttgacgagccatctgctgtatctcccgatattattattcttgatgttgggggaatgac

SEQ ID NO: 6278 - DNA, 443 bp, Gossypium hirsutum
  Clone ID: LIB3120-004-Q1-K1-F4
gagggtatcatgagggaggctctcttagacttttatacacgttcagggaagaggaagcctgatcagatcattattttcagggatggggttagcgagtctcagttcaatcaagttttgaacaaagaacttgatcaagttattgaggcttgcaagttccttgacgagaattggaaccctaagtttgtggttattgttgcacaaaaaaaccatcataccaagtttttccagcagggatctcctgacaatgttttacctggtactgtaattgacaacaaagtatgccatccgaagaacaatgatttttacctttgtgctcatgctggaatgatagggaccacaaggccgacccactatcatgttctcttagaccaggttgggttttcagctgatgatctgcaggagcttgttcattctctatcctacgtgtatcaaaggagcaccac

SEQ ID NO: 6279 - DNA, 460 bp, Gossypium hirsutum
  Clone ID: LIB3120-004-Q1-K1-F5
cccacgcttccgcccactgttccgattaaacgttttgcccgggctctctagatcagttgtaagacaagaacaatgtggagataatgtaacacaaaactagaggttgcaaatacgcttaaacacacaaaaggggaaacgttcctgtgagacacctaggggtgaatatctttggtagtgccaaatatagagtctttggattcccttagaccttaatctaccacttagaaagcgtcggtctggatagcatatgcattagcaaggacaagggcagcttgcattaaatatttgacagccaatgcgaaccatgtgcacatgctgtggctctgcaacaagcatgtatacatattccaacaacttctcaatggtcatcttcggtggctcgcaagatggtggccctcacctcgagttcacgagctttctaccgacaccatagactacgacctctccgatccatattctc

SEQ ID NO: 6280 - DNA, 398 bp, Gossypium hirsutum
  Clone ID: LIB3120-004-Q1-K1-F6
gccacgcttccgcccactcttccgattgaacattttgctcagccgcgcaagatcatccggcgtacgagcatcgcgtggggtggtgaactccaacacgcaactagacattcacagtaactgctgaacacactaacggggcaatgaccgccagcggcagctgggcgggataatcattgacagagacacatttacggtcgatgattccattagacaggcatcgatcaattagactgacttgatctcgatagccaccgcatacgttaggatgatggacgttcacatgaaaaagtccacggtcaagctcgccaattgaacatattgtggcgagataccgctctgagacacatatatctacacagttccaaagattgacaccggttgagagcttggaggatgga

SEQ ID NO: 6281 - DNA, 351 bp, Gossypium hirsutum
  Clone ID: LIB3120-004-Q1-K1-F7
gccactctacatacaaatgttctgattgaatattttgctcatgaacgcaagagcaacgggggacggagaaacatgggtgggggccgagctcgcaacgagacattcaactaactggtgaacatactaagggggaaatgtcattgagggatacatggggctgagaatgatgggcagtgacacatttacggtcgttgattgcatttgacaggaatcgatcaatgtgaatgacttgctctcgataggaaacgcatacgctaggataatggaccgacacataaaaaactacaagtgacaagctcgaaaattgaacatattgtggtgagataccaatgggagtcacatatatcaaca

SEQ ID NO: 6282 - DNA, 380 bp, Gossypium hirsutum
  Clone ID: LIB3120-004-Q1-K1-G2
cttacccacaccatttgaattcttcatttcacacaccaactcaacaatcaacctattaatacccatgccatcccatagtaatgaggatctgattgactccccgctcatttaccgccatcaatggctaactctctgatctctctctaacttctcatggactcaacttttacggtctcctccaacaccaaaaactacaggaaaagggcacgttactcaatctatcctcagcaagaaacccaactatagccacactgtttaaacgggccaatctcatgccactttggctggcttactcttctgtgtcgaaaccatacacgcactagccgtgtgacaacgaccgacccactacgtcacctgtaattgaagcccaagctacgaag

SEQ ID NO: 6283 - DNA, 474 bp, Gossypium hirsutum
  unsure (1)..(474): unsure at all n locations; Clone ID: LIB3120-004-Q1-K1-G3
cccacgcgtacgaccacgcgttcggtaatatggatttcctgaattggttaatgtactttgttttctccttgatattgtttcaagctttccatttgatcacaagaaggaaattgggaagatcccataagcttccgcccggtccaccaacaattccgatcttcgggaaccttttccaggttggtgataaaccccataggtcccttgccaaacttgccaagattcatggggacatcatgactctgaaacttggccagactactaccgtagttttttcatctgcaacaatggccaaagaaatcttccaaaagcatgatgccgtatcttgtaaccgaaccattcccgatgcccttcgtgcccttcaacatcacgaagccggattgccttggatgcctgtttcaaccacatggagaaatcttangaaaatctgcaatgngcatattttcgctactcataaacttgacgctgatcaatact

SEQ ID NO: 6284 - DNA, 395 bp, Gossypium hirsutum
  Clone ID: LIB3120-004-Q1-K1-G4
cgccatctctcaagacaatggattggttacaattgttgagccagagatcttgcttgatggtgatcacggaattgacaggactttcgaagtagccaaaaaggtatgggctgaggttttcttctatcttgcccagaacaatgtgatgtttcaaggtatcctcctcaagccaagtatggtcactcccggtgcggagtgcaaggacagggctactcctcaacaagttgctgattacaccctcagcctactccgccaaagaatacctccagctgtccctggaatcatgtttttgtctggtgggcagtctgaagttgaggctaccttgaacttgaatgcaatgaaccaagctccaaacccatggcatgtgtcattctcatatgcaagagcccttcaaaaca

SEQ ID NO: 6285 - DNA, 472 bp, Gossypium hirsutum
  Clone ID: LIB3120-004-Q1-K1-G5
cggacgcgtgggtaaaaataatataagctacttttataaaattcattatagaatcaacacagagtggttgataagagagagagagagagagagagagagagagagattataattctaaaaaaatatatataaatatatgcatgggtaaattacaatcatatttttgggagacatacataaagaggatatatcatctagatgtttgtatattaggaaggaatctagtccagaatccataataaaataatgaaggaagaggatatataatatatataagttagtgaattagaaataattccattatataatcttcaatgagatggataaggaaaaacaaacaaggttgaacaatttaatggttgatcctcgtaacatgcgtatataaattattgactttgagtgggaggaaaattatatgatttctaaattagatttgtcttaataggtatatatatatatataaggctgaagg

SEQ ID NO: 6286 - DNA, 460 bp, Gossypium hirsutum
  Clone ID: LIB3120-004-Q1-K1-G6
cggacgcgtgggtaaaaataatataagttacttttataaaattcattatagaatcaacggagagtggttgataagagagagagagagagagacgagagagagagagattataattctaaaaaaatatatataaatatatgcatgggtaaattacaatcatatttttgggagacatacataaagaggatatatcatctagatgtttgtatattaggaaggaatctagtgcagaatccataataaaataatgaaggaagaggatatataatatatataagttagtgaattagaaatacttccattatataatcttcaatgagatggatacggaaaaacaaacatggttgaacaatttaatggttgatcctcgtaacatgcgtatataaattattgactttgagttcgaggaaaattatatatgtctaaattagattcgtctcaatacgtatatatatatata

SEQ ID NO: 6287 - DNA, 426 bp, Gossypium hirsutum
  Clone ID: LIB3120-004-Q1-K1-G7
tcgaggacgcgtgggtaaaaacattataagtcacttttttaaaattcattatagaagcaacaggaactgggtgatatacacacagagagacagctacagagagagagagattatcaaattaaaaaaatatttatgactatatacatagggccaatacattaacgtaactaagatacatgtcataacaaccatatttaaaataggtgttattgtaattagaaggaatatatgccacaaacgatatataacgatatcggacataacaagttatattatatatagctcatcaaatataagatagttgctttatatggtcacactttaaagaattatgaacaagttggctcaactgatgaatccaaaaataaatatatgagtgcattctatatcaatgatgacctgtcgcctaaataaactgtattatga

SEQ ID NO: 6288 - DNA, 257 bp, Gossypium hirsutum
  Clone ID: LIB3120-004-Q1-K1-G8
tacgcgtgtgtattaatattatacgttactttgttgaaatgcattatagaattaacggggattggttgataagggggggagagagagagagagaaagagagagattataaatctaaaaaactatatataaatatatgcctgggtgaattacagtcatgttcttgggagacatatatgaggaggatatatattataggtgctggtatattaagaaggattatagtgcagacaccattgtaactttaagaaggaagagg

SEQ ID NO: 6289 - DNA, 500 bp, Gossypium hirsutum
  unsure (1)..(500): unsure at all n locations; Clone ID: LIB3120-004-Q1-K1-H1
cccacgcgtccgctcangttatctcatctcttaccgcatctttgaggtttgatggagccctgaatgtggatgtgactgagttccagactaacctggtcccatatcccaggatccactttatgctttcttcttatgcccctgtcatttcagctgagaaggcttaccatgagcagctatcggtggctgagataaccaacagagcttttgaaccctcttcaatgatggccaaatgtgacccacgacacgggaagtacatggcttgctgtcttatgtaccgaggagatgttgtgcccaaagatgtgatatgcggctgtggccaccattaagaccaaacgcacaatccaatttggggattggtgccctactggattcaagcgcggtatcaactaccagccaccaactgttgtttcatgaggggaccttgccaaggttcaaagagctgtctgcatgatcttcaactcaaccagccttgcggaagtgtttcccgcatgatcataaat

SEQ ID NO: 6290 - DNA, 454 bp, Gossypium hirsutum
  Clone ID: LIB3120-004-Q1-K1-H2
gagaaaggcaagaccttccatggagagaggattcgaatatgtaatagtaggaggaggtgtagcaggtggatatgcagctcttgaatttactaaaagaggggtttctcatgctcagctctgcattatatctgaagaaccagttgccccatatgagagacctactctaagtaaaaaatttctacatcctgaatctccggcacgccttccatcatttcacacttgtgttggtgctaatgaggaattgttaactccgacatggtacgaggaacatggtatcgaattagtccttggaactcgagttgaatctgttgatgtcggacagaaaacgctattgacagcttccggcgagactatgcgttatgaaaccctcatcattgccacaggggctaaggctttaaagctcgaagaattcgagtgaaaagatcggaagcggaaatgtatgtatgtacgagat

SEQ ID NO: 6291 - DNA, 162 bp, Gossypium hirsutum
  Clone ID: LIB3120-004-Q1-K1-H3
gaccttactttaattaaaaaatttttacatcttgaatttttggtacgcctttcatcattttacacttttgttggtgctaatgaggaattgttaactttgatatggtacgaggaacatggtatctatttagttcttggaacttgagttgaatttgttgttgtt

SEQ ID NO: 6292 - DNA, 429 bp, Gossypium hirsutum
  Clone ID: LIB3120-004-Q1-K1-H4
aaagaaaatggcactcctttgtgcttcaacctcagtcatcttctcttcttcttcttcttcagagaggccttcctttgcttcattgaaaaggactagtcccagtaaccaaagctcatttcttgggttcttccctgtagtggcattgtccaaaccttcttatgctcggacaacaaccttgtctttctccaaacgggatttcaaggtttgctgccgggacctatctcttgtccctgaaaaccaacgttggatgttcgaggaatccgaggctgatggccctgacatttggaacaacacatggtatcccaaagctaaagaccacattaataatgaaaaaacatggtatattgttgatgcaactgacaaacattctggaagactggcatcaacaattgctgtgcatattcgtggaaagaatttgcccacttatac

SEQ ID NO: 6293 - DNA, 213 bp, Gossypium hirsutum
  Clone ID: LIB3120-004-Q1-K1-H5
gctacgcgtgggctggcgcgtgtgctggacctctagctcattctacatgtctgacacgtgcatgcggtgatataggtgatcggtactgtcaaacaaatgaaacatactgacgtggtctggacgccggagggattggcgaaccccacatatatctacaatggtaccttgcttgtcgtgaaaggaggcgaactattggtgcgagttgaatcaaaa

SEQ ID NO: 6294 - DNA, 225 bp, Gossypium hirsutum
  Clone ID: LIB3120-004-Q1-K1-H6
ccacgcgtccgtgcacgcgtgggctggcgcgtgtgctggacctctagtgcattctacatctcagacacgggcatgcggtgaaataggggatcggtactgtcaaacatatgcaacatactgacgggggctggatacaggaggaattggcgaaccccacacaaattcgcatggaacttgcttgtgtgaatggacgcgaacgtattggagcgagtggaatcacaaggc

SEQ ID NO: 6295 - DNA, 399 bp, Gossypium hirsutum
  Clone ID: LIB3120-005-Q1-K1-A1
tcgtccacgcgttcggagaaaattccctttcttcttcctcttctttttgtttgtctaaatccttgtctttcttttctcctttctcgcgccttggtttcctctcttcatttgataatcttcttgttttgattcctttttattgaattttttcccccacggaaactgttcacttttttttccagcaatgtggttcattggcccaataatttccgctttttatttctctcatttcgagcagattttgttatgaaagattctaaaaaaattatttcagcttttttattaatattttctgaataatcaagcaaattgataatggatcgtgttgtcggtggaaaattcaaagtgggcaggaagatcggagctgcatctttcggcgagcttttcctcggcgtcaat

SEQ ID NO: 6296 - DNA, 433 bp, Gossypium hirsutum
  Clone ID: LIB3120-005-Q1-K1-A10
accacgcgatccacggtgtgaggcacctggtccatgtcttgaaccaattctgataatctcgggcgtactatcatgtggcagctactgcagtaatcaccactcttgcgtagttcaccgggttaagacccaatgctgctactgctccagctaggagcctgccaacagtgcaaccagtgaagggcacggggaaggctgctcttcatgcacgatgagattccatagaatctaccacagagactacaacggcgactacaacaacccttatgctgtttgctgtgacgccaggattggctacatcagccaacagaaaggccaccgctggattgaagctcgtaggcagggactcaggcttgcatactggtgacacagttggtttcacacttgctgacactttggcttgccatattgttggccatattatcggtgttgggat

SEQ ID NO: 6297 - DNA, 360 bp, Gossypium hirsutum
  Clone ID: LIB3120-005-Q1-K1-A11
gtctttctggcaacatgggttcaccaccactttggattctgcttctgggtgtgttgtttatggcttctggaacaatcgcagctccccctaggaagcctgtagatgtcccattctccagaaactatatgcctacttgggcttttgatcacattaagtatttcaatggtggctctgagattcagctccaccttgacaaatacactggtactggtttccagtccaaaggatcatacttgttcggacacttcagtatgcaaataaagctagtccctggagattctgcggggactgtcactgccttttatttgtcttctcaaaactcagagcatgatgagatagattttggagttctgggcaaca

SEQ ID NO: 6298 - DNA, 87 bp, Gossypium hirsutum
  Clone ID: LIB3120-005-Q1-K1-A12
cccacgcgtccgagaaaaaataaaaaaaagaaaattgaaaaagtaaaaactgaataaaaaaagaggaagagaaaaaaaaagatgaat

SEQ ID NO: 6299 - DNA, 401 bp, Gossypium hirsutum
  unsure (1)..(401): unsure at all n locations; Clone ID: LIB3120-005-Q1-K1-A3
cggacgcgtgggtttgtgtgtgtcaggggatgttactttcaagtcggggaaaaaatcgaaaccaagatgaccatagaacatgcgtatcagaggtctttggagactgtgatgcagtggctacgcaacgaggtgaatatgagtaagaccaaggtctactttcgcactttcgctcccgtacatttcagaggaggggattggagaaccgggggaagctgccacctcgagactttgccggagctgggaacaacattagtgccatcggaaacttgggagcttctcgaaatagtaaaggatgtgttatcacctcactcaaacacattccatggaataaaattcgacatattaaacatcactcanatgacagcaccaaggaaagacgggcacgcgtcggtatactattt

SEQ ID NO: 6300 - DNA, 381 bp, Gossypium hirsutum
  Clone ID: LIB3120-005-Q1-K1-A4
ctctacaccatggctctttcttccccatcattcgccggtaaggcagtgaagttctccccttccacccctgaaatccggggaactggccgtgtttccatgaggaaaaccaccaagcctgttccttctggtagcccatggtacggtcctgaccgagttttgtacttgggtccactttccggtgagccaccatcttacttgaccggtgagttccctggtgactatggttgggacactgctggactctcagctgatcccgagacctttgctaggaaccgtgagctcgaagtcattcactgcagatgggccatgttgggagctcttgggtgtgttttccctgagctgttggctatgaacggtgtcaagttcggtgaagctgtatgg

SEQ ID NO: 6301 - DNA, 215 bp, Gossypium hirsutum
  Clone ID: LIB3120-005-Q1-K1-A9
tttgcactgggtcatctctgcctaatgccaagcttgcttcagcaccatcaagtgcttctccagatatgtgcggtggtcacaagttgcctgggatcagagcccatcatgctaaatcttttgattccaaaggatcatgtgccagtgaaggaagaagagctgctatgctctacttggcagctggcctttttaccacagctgttgcgtcttctgcaaat

SEQ ID NO: 6302 - DNA, 408 bp, Gossypium hirsutum
  Clone ID: LIB3120-005-Q1-K1-B1
attgtttgtttttgggttaaaagctctgtttttttattacccttttcataaaaagcttcaatctttcgaccatgttgcttaaagcttcccctgctttttctttgttgaagaatccccaagttgaaactcgggttcctctgttttcaagaaacggttctgggtttgggtctggggctgttgttgtttgtgctaccaaaggagccaataataagccattaacaggtgtgatttttgagccttttgaggaagttaagaaggaacttaatcttgtcccaactgtgcctcaaatgtccttggctcgtcaaaagtttgctgatgagtgtgaagctgccatcaacgaacaaatcaatgtggagtacaatgtttcatatgtctaccatgctatgtatgcctattttgatagggaca

SEQ ID NO: 6303 - DNA, 369 bp, Gossypium hirsutum
  Clone ID: LIB3120-005-Q1-K1-B10
accactacttgttatttgcattaaccttcactctcctctttattcatcaatcctcgtattagcgttacttcctcatcttcttcaaaagcttcatcccgctatcttccctcattctcaaaacgttttggcgtctatttgcgaggtttataactcagaaatcaaagctcgaattagcgattgtgccaacaatacgtatgaagtcagggatgctaagttaagatctggaaacccttgctttcaacagcattggcagcagccatagtcgcttttggctctgaatatctctgctatggcgtgaacctaataagtttgaggcaaaaactcgcggtgaatttaggtatctcgatctgctgcccagcttggttttgc

SEQ ID NO: 6304 - DNA, 371 bp, Gossypium hirsutum
  Clone ID: LIB3120-005-Q1-K1-B11
gagattagattatagtgaaaaactaaacataataaagccccttcgacttgcttcattgaggtgccctctcaaagcccaagaaaaatggcttctgcttccgctactctcctcaagtcttcacctattatcgacaagtccgagtggattaagggccaaaacctccgccacccttcggtttgttttgtacggtcacaccctacatcggccgcctttgccgtccgtgctagttcatatgccgatgagcttgttaagaccgcgaaaactgttgcatctccaggtcgtggtattttggccatggatgaatcaaatgctacatgtgggaaacggcttgccttgattggtctcgagaataccgaggcaaaacggcaagc

SEQ ID NO: 6305 - DNA, 429 bp, Gossypium hirsutum
  Clone ID: LIB3120-005-Q1-K1-B12
tccacgcgtccggcccgtgacaagaactggtctttcagggattaggattctagaggatgaggatgctgccccatcgcgtaggcctttgaagagaatgagttcaccggagaggtgggaagccaaacagttgattgcttctggtgttttgagactagacgagtatccaatgtatgacgaggacggagatggaatgctttatcaagaagagggtgccgaggaagagttggagattgagatgaatgaggatgaacctgcctttttacaagggcagactaggtactctgtcgatatgtcaccagtaaaaatatttaaaaatccagaagggtccttgagtcgagccgctgctctccaatctgcacttattaaagaacggagagaagtacgagagcatcagcagaggacaatgctggattcaaatccaaaagatct

SEQ ID NO: 6306 - DNA, 353 bp, Gossypium hirsutum
  Clone ID: LIB3120-005-Q1-K1-B3
gggaaaggtaaatctggattattgggcagagctttggctgatattggacagcatatgctcatggtgactgcaatggttgtaattatgctgggacgtttcgaccaccgaagtgtcagcttggttgcggccaaccaacccaaagatggtaccatgttcctcggtcttggttgaaacctacacagaatctgttggttctttttgaggagctgggaggagaccccacaagaatctcacttgtaaaaagatctgtgtccagcgtttgtgccgatgtcactgagtatcacccgaatattaagaactggcagattgaaagctatggaaaggcacaacagtttcgcagaccaaaagttcac

SEQ ID NO: 6307 - DNA, 456 bp, Gossypium hirsutum
  Clone ID: LIB3120-005-Q1-K1-B9
ctccaccaccaacatagttccaacattttcataacattggctgcagtcacaaacgccgctggtacatcctccttcatggggacacgcttccccgacgtctacacaagttcagggagattcgtcgccaggtttggttttggcggcaaaaaaagcagctcccaagaaagcctcgaaacaaaccttcgaccgccctctatggtacccaggagcggtggctcctgattggctcgatggaagcttggtgggtgattacgggttcgacccgttcgggttagggaaaccagcggagtacttgcaatatgatttggattctttggaccagaacctggctaagaatatggctggtgagatcattggaactaggaccgaactttccgacgttgaggcgactcccttttagccttacagcgaggtttttggtctacagaggttagggagtgtgaattgatccatggg

SEQ ID NO: 6308 - DNA, 312 bp, Gossypium hirsutum
  Clone ID: LIB3120-005-Q1-K1-C10
cgtccgtgatgacccagaggcattcgcaagacccaatgggtgggagatcatgatcggtcgggtggctatgttctcaatgttcgggttcttcgttcaggccatcgtgaccggtaagggaccattggagaacttggctgaccaccttgctgacccagtcaacaacaatgcttgggcctatgcctccaactttgtccccggaaagtgaacttagagagtgaaaagggattcgtcttgttcatgttattattcggtggtgtgaaagtaatatcgttgcacaattcaatgaaagcagattgtgaattctgtgtgctc

SEQ ID NO: 6309 - DNA, 335 bp, Gossypium hirsutum
  Clone ID: LIB3120-005-Q1-K1-C11
gctgcagctaccctgatgcaaccaatcaaggttgctgcaccatcaaggaccaatgtgccgctcaggtcctcccagagcgtttctaaggccttcggtttggagcctgttggtgctaggcttacctgctctttgcaaactgacctcaaggacttggctctgaagtgtgttgatgctaccaagctcgctggtttcgctcttgctacatctgctcttgttgtctcgggagcaagcgctgaaggagtttcaaagcggctaacctacgctgaaatccaaagcaagacatacatggaagtcaaaggaacaggaactgctaaccagtgcccaaccatcgatgg

SEQ ID NO: 6310 - DNA, 409 bp, Gossypium hirsutum
  Clone ID: LIB3120-005-Q1-K1-C12
gcgtccgtccacgcgtccgtgaaaacattttcattttcaaaccccactccccccatggctggtctcaagcttatttgtggcctagtattgttgtgcatgttggttttggaacccatggccacaactgctctcacatgtggacaagtggcaagccaaacgggtagttgtataaggtatttgcagcgtggagggaaccctccagctgcttgctgcaacggagttaggaacctaaacaggcaagctagaaccacccgtgaccgtcaaactgcatgcagatgcttgcaaactgccgctaggaccatctccggtatcaatactaaattggctgccggtcttccggccaaatgcggtgtcaaaattccttacaagatcagcccctccaccaactgcaatagagtgagatgatcat

SEQ ID NO: 6311 - DNA, 358 bp, Gossypium hirsutum
  Clone ID: LIB3120-005-Q1-K1-C3
acctccaagaacagcctctaatacctggcctgccggaccacgtggcagagctctgcctctctcgtgttcacccttctttgctttactccgtttgccgttcatggcgtcgcttaatctactgtccctttttccctcctttcccctctctctacgctctattcttttcatcgtcagataatgaaatccagttgttgagcttcgatccgatgtcgtctaggtgggaaacggttccttcgccccctaatcctcttcgtctccttgttcatcacccctctttcttatgccggaacctccctgttcaatacactttctgtatcgggtaaatcttgttcttttagcagcaactgtccccaatttc

SEQ ID NO: 6312 - DNA, 368 bp, Gossypium hirsutum
  Clone ID: LIB3120-005-Q1-K1-C9
gtctgtctctctgttttactccacaaccactatcactaccattatggcttcggctactgggtctgtagccaaacccaaccttcagattcaggcaaaaggaaagggtgttggttttgcagatttctcaggcctacacaactcctctactagccttccctttgccaggaaaacctctgatgacttccattcactcgttgcttttcagacatctgctctaggaagcaataatggcgggtacaggaaagggatggcagaggcaaagctaaaggtggctataaatgggtttggtaggattggcaggaacttcttaaagtgctggcatggccgtaaagacttcccacttgatgtcattgccatcaatgacactg

SEQ ID NO: 6313 - DNA, 127 bp, Gossypium hirsutum
  Clone ID: LIB3120-005-Q1-K1-D10
tcgcccacgcgtgcgctttattttaatagaaacggtgtgtcaaacatgaatgggggggggtgagttattagcaatcaataaggtatgtcaaataggaatggttttgtatgatgtttattaatatata

SEQ ID NO: 6314 - DNA, 447 bp, Gossypium hirsutum
  Clone ID: LIB3120-005-Q1-K1-D11
taatatcattacatggttaccaaaaattcgactatgtcgaaggtttcgttattgtagacgaagttctcatcaataattggagatcgtcctttttttcacctcgaaaccctgtcaaaatttcatcccttggttccaacaacaatggcggcgttttgtattgcttggaaattaccaaaaactaccacgaatctacggccgagaccatcgatcaggaaattgaggctttgttgaagaaattaaattttatacccacatcagtgttcacaactgatttaccatatgtggatttcttagaccgggttcacaaagccgagttaaagctccggtctaagggtatgtgggaggttccacatccatggttgaaccttttcgtccctaaatcaaagattgccgattttgatcgaggggtcttcaagggcattttgggaaataaaactagtgggccta

SEQ ID NO: 6315 - DNA, 440 bp, Gossypium hirsutum
  Clone ID: LIB3120-005-Q1-K1-D12
ctccaggttgccggagacttagctccatcacggttctttcaacctgcgagagaacacatcacacatttccaccagaacatcattccgacatcgttcaacggtgaggaggccttgtcgccttcccggcaaggttgacaacctcctcgtcttccacgttttcggatgccaacgactgaatatcccaaaggctgacgaacttgctgctgaatgtgaatatatagagcagcttggcgccagtccatgtgattatgccatcagataatacagtgaatgatttaatcaaagctgctatagaaatttacgtcaaggagaatagaatgccattgttagaggaaactgatcccaagttttttcaaattcactattcgcagatctgcctggaaagtttaagaacaggggaggagctgatcaacttgggatcgaggaatttccttttgggt

SEQ ID NO: 6316 - DNA, 423 bp, Gossypium hirsutum
  unsure (1)..(423): unsure at all n locations; Clone ID: LIB3120-005-Q1-K1-D2
agtttctaaagcaaactccggaataccggttccaaactctttcctcttcctttgctaactgttctactttacactttggatcacacgtctttctttcttcttcttgtttctttcatttccttcttgttgtagctggcaattttttaagtgtcatacaggagatttagagtacaagaggagaatatttttgtttagcttagtcgcctacgggatataacggctgaattgttttaattttgacaagcgtgctaaattgtgtgatggtaattgtatcaaagtgagaagaatctgtatgatggccactgctgctgtgattggacttagcactggaaagagactcttgagctcttncttttcttattcggataccgtagataagctgtcgtatgctggtgattatggatcttcatattatcaaactcc

SEQ ID NO: 6317 - DNA, 377 bp, Gossypium hirsutum
  Clone ID: LIB3120-005-Q1-K1-D3
ccacgcgttctgccacgcgtccgcggacgcgtgggggcttccatcaacggttggtgccttacctcctcttgttcctccaccaccacctgctctttttccgctcgtcgacgacctacattgcggccttcggtcgtcgctagccttaactcttctccttctcctccgactcttatccaagaccgcccggttttcgctgcccctgttcctttgctcaccccgagagaagagatgggaaacaagtcctacgacgaagccattgaagctctcaagaaacttctcagtgagaaaggagaactgaaagctgaagcagctgcaagggtagatcaaattacagcagagttaaacacaacatcagctgacggcaaaccatctgactc

SEQ ID NO: 6318 - DNA, 418 bp, Gossypium hirsutum
  Clone ID: LIB3120-005-Q1-K1-D7
atcgtgttattatccattatatcttgtctccccacccttaaaccatgtctgcttttgtgggcatgtatgcagaggagttgatcaagaacgccaactacatcgccacgccaggcaaaggttttttggcggcggacgagagcacaggcaccatcgggaagcgtctctcgagcatcaacgtcgagaacatcgagtccaatcgccaagccctccgcgagctccttttcacctctcccaacgcattatcctgcctctccggtgtcattcttttcgaggaaacactttaccagaaaacatctgacgggaaacccttcggtggaaatcctcgaagagaacaatgtcattccaggtatcaaggtcgataagggcaccgttgagatagccggcaccaatggcgagaccaccactcaagggttcgact

SEQ ID NO: 6319 - DNA, 453 bp, Gossypium hirsutum
  Clone ID: LIB3120-005-Q1-K1-D9
tcgggcacttgcacatgggttagtcgttcctaagagacgggggtagcccgtccgacagcgcgtgcagcgcgagcttcgaaagggaatcgggttaaaattcctgaaccgggacgcggcggctgacggcaacgttagggagtccggagacgtcggcgggggcctcgggaagagttatcttttctgtttaacggcctgcccaccctggaaacggctcatccggaggtagggtccagcggccggaagagcaccgcacgtcgcgtggtgtccggtgcgcccccggcggcccttgaaaattcggaggaccgagtgccgtccgcgcccggtcgtactcataaccgcatcatgtcttcaaggtgaacagcctttggtcaatgtaacaatgtatgcaagggtagtcggcaaaatggatccggtaccactggaaaaggattggctcttaaggcttggcacggg

SEQ ID NO: 6320 - DNA, 371 bp, Gossypium hirsutum
  Clone ID: LIB3120-005-Q1-K1-E1
cgaccttgcatcccctctccctgctttgctctgaaaagtccaagtttttctccaatggcgaccgtctctccaactcctctgttgaaagatgagctcgacatcgtgattcccacgattaggaacttggactttttggagatgtggagaccctttttccagccttaccatctcatcattgttcaagatggtgatcctaccaagaccatcaaggtccctgaaggcttcgattatgagctttacaataggaacgacatcaacaggattttgggtcctaaggcttcttgtatctctttcaaggattctgcttggtagggcctttgggtacatggtttccaagaagaaatacatctattccattgatgatgactgct

SEQ ID NO: 6321 - DNA, 410 bp, Gossypium hirsutum
  Clone ID: LIB3120-005-Q1-K1-E10
tacataagttggaaatgcttataattcattgttgattgccattaataacatacataagttggaaatgctattaattcattggtgatcttttgatggtatttggtctaacaggctatcatcatagcggcggaggatacaacgtcagttactctgacatgggctttgtctttttactcaataatcgtgacacattatgtaaggtccaacaagaactagatgttaaggttggtaaggataggttggtagtgacggaatcagacaccaaaagcttagtgtaccttcaatccattattaatgaaacgctacgcttatattctgctttttcactatccctgatccatgaagccattgaagactgcacagataatggatatcatgtttcaacttgcacttggcttattataaaactt

SEQ ID NO: 6322 - DNA, 450 bp, Gossypium hirsutum
  Clone ID: LIB3120-005-Q1-K1-E11
cccacgcgttcggatgatgcaacatccagcacaagctatggtaccaccaccaatggctccacagacccaacagtaccaatatcagcaaccacctccggctccggttcctcaggcacaacaaccttacatgatgatgaacatgatgcagccgcctcagagtcatcctccacctatgtggcccccacaacaaggttcggctggggtacctgctcaacaacagccagctggtcaaccggctaacgcagatgaggttcggactttgtggatcggagatttgcagtattatatggatgagaattatctcttgagctgttttgcccaaactggagaggttgcttctgtaaaagttatccgcaacaagcaaaccggtcaagtggagggctatggatttattgagtttgtttcaagagctgctgctgagagagttttacaaacatacaatggtacacc

SEQ ID NO: 6323 - DNA, 271 bp, Gossypium hirsutum
  Clone ID: LIB3120-005-Q1-K1-E12
ctggactctcagctgatcccgagacctttgctaggaaccgtgagctcgaagtcattcactgcagatgggccatgttgggagctcttgggtgtgttttccctgagctgttggctaggaacggtgtcaagttcggtgaagctgtatggttcaaggccgggtctcaaatcttcagtgagggtggacttgactacttgggttacccaagcttgatccatgctcaaagcattttggccatctgggcttgccaaggttatcttgatgggagccgtcg

SEQ ID NO: 6324 - DNA, 353 bp, Gossypium hirsutum
  Clone ID: LIB3120-005-Q1-K1-E2
cccactcgtccgcggacgcgtgggtttagctatagcatacactactagtacccactactagcaatggcttcctcaatgatctcatcggctaccattgccactgcctctccggcacaggctaacatggtcgctcctttcaccggtctcaagtctgcctctgctttcccagtcaccaggaaggccaacaacgacattacttctctcgcaagcaatggccgtagagtgcaatgcatgcaggtgtggcctcctactgggaagaagaagtttgagactctctcatacctgcccgatcttacacccgtgcaattggctaaggaagtagattaccttcttcgctcaaaatgggttccttg

SEQ ID NO: 6325 - DNA, 417 bp, Gossypium hirsutum
  Clone ID: LIB3120-005-Q1-K1-E3
cccacacgtgcgaaaaaatttccccttttcgattcaatcatgagtaacgaatatgatcatgtgttcaagcttctgcttatcggcgattcctccgtcggaaaatcctgcttgcttctcagatttgctgatgattcttatgtggatagctacatcagttccatcggtgttgatttcaaaatcagaacagtggagttggacggcatgacaatcaagctgcaaatttgggatactgctggacaggagcgttttcggactattactagcagctactaccgaggagctcatgggataatagtcgtctatgatgttaccgagatggagagcttcaacaatgtcaagcaagtggttgaacggagaatgacagatatgctaatgacagtgtatgtaagcttctggttgggaaccaaatgtgattta

SEQ ID NO: 6326 - DNA, 425 bp, Gossypium hirsutum
  Clone ID: LIB3120-005-Q1-K1-E6
tcggcttgttgttcacatcaccaagaacttcatgacccttcctaacattaaggttcctcttatcttgggtgtttggggaggcaaaggtcaaggaaaatctttccaatgtgagcttgtctttgccaagatgggaatcaaccccattatgatgagtgccggagaattggaaagtgggaacgccggagaaccagccaagttgatcaggcaaaggtaccgtgaggccgtcgacattatcaagaaagggaaaatgtgttgcctcttcatcaacgatctcgacgctggagccggtcgtatgggaggaaccacacaatacacagtgaacaaccaaatggtgaacgccacactcatgaacatcgctgataacctcaccaacgttcagctccccggtatgtacaacaaggaagagaaccctcgtgttccgatca

SEQ ID NO: 6327 - DNA, 284 bp, Gossypium hirsutum
  Clone ID: LIB3120-005-Q1-K1-E7
ctttgccttcacaacttacaactcagcctctcctctctctttctctcttcgcctccaaatggcttctgccaccacttccaccactctttccctcctcaaaaccaccgtctccaccacctcttcctccgcctcccgctcttctgcatccctcatccgccttccttccacgcgccgtcacctcaagtcctctcctctcatccacagcctaggcttctcctccgctgcttctggggactctctgctttccctccatgtctcctccaaagttcgatcttttcaaggga

SEQ ID NO: 6328 - DNA, 450 bp, Gossypium hirsutum
  Clone ID: LIB3120-005-Q1-K1-E9
gaacttttggatgaggctagagaagccaccaagtctggtggcagaatgtcaagggaacagtatggggctctgagaaggaaaattggagggacatacaaggatttcttcaaatcctatgttgaggtgaatggcgaatacgtggaagaaggatgggtggacaaaacatgcaaggtgtgcaagaaagatacaagaggtgaagcaaggcaagttgacaattttgggagatatgttcatgttgcgtgcttggaaaagtccaattctgggaatttcttcactaaactcttctctagatgagtgtagtttttagttgtcaatttttgtattttttttttagtaaaaacatccctaatctggagataagcaaatatgtttgtaattactggggcatttaagcctcatatttatttcttgattatattggacactaaatatatatttgtaaagcactgt

SEQ ID NO: 6329 - DNA, 437 bp, Gossypium hirsutum
  Clone ID: LIB3120-005-Q1-K1-F10
acgatttttcaactcaaaatcaattcccattgacaaacaatggcttccatgcctagctctggagttgttcttaggccaaccccatttcttggccaaaccaaaaatgctaaccctcttagagatgttgtctctttgggcactcccaaatatgcaatgggaaatgaactatggtatggaccagacagagtgaagtacttgggaccattttcagctcagactccatcttacttgactggagaattccctggtgactatggttgggacactgctggtttgtcagccgaccctgaggcctttgccaggaatagggctcttgaggtcatccatggaagatgggcaatgttgggagcactaagctgtatcacaccaaaagtacttgagaaatggcttaaggttgatttcaaggaaccggtatggttcaaggcaggagctcaaat

SEQ ID NO: 6330 - DNA, 448 bp, Gossypium hirsutum
  Clone ID: LIB3120-005-Q1-K1-F12
tcgcccacgcgtccgaagaaatatactcttcctcgttatccctccctcagatctcctcaattgtaccatcaacaaatgtccccacccaaacaaggcattatcatcttcagtcttttttttatattgggggcattcgtgaataattagaaactgcattgggaagccacaatgttgtcattttcttactcattgcctctcttcctctgttttatctcaagctttaacggattctttgctgccacagaattcgatttctgtacgttaatacctagcatcttgaatctccttggtgtcgctcacttaaacaatgggtgcgtcagactcactctcgacctccaagtaccctgtttcggctccggcagagcctttgaactcgaaaccctgcatatttcgggatccccatactcaatctccttgtagctttttcaccttcttctccttttacatt

SEQ ID NO: 6331 - DNA, 356 bp, Gossypium hirsutum
  Clone ID: LIB3120-005-Q1-K1-G10
caatgttatctatgactggtttacgtggctcttcacaagctgggttggaaggtaatcttcaactcagcggccaaacccgtctgaacgttgctagcaccaacagggtggctgtggctagacctggttttaccgttagagcttaacaggtccctgccgagcctgaaactggacgcaaagctgtgctgggtctcgttgctgctggtttggctactggctcctttgttgaagctgagcttgctgatgcacgaagcatcaaggttgggccgtcttcatcacccttcggtggattgcccggaacttttaattcctatgagccaagatacctttatcttgcgtacaaagatcggttttttctt

SEQ ID NO: 6332 - DNA, 419 bp, Gossypium hirsutum
  Clone ID: LIB3120-005-Q1-K1-G11
tcgcctgtctccaatggcggctgccgtcttcaccatcggtgctgtcaaccgagcaccgttgaggttgaatggatcaggtgccggagcttctgctccaagctcagctttcatggggaacagcttgaagaaagtgagcgctaggttcaacaacaacggcatggctccagtgggaagtttcatgattgtggctgccaaagaaatcgacgaagacacacagaccgtccaggaccgatggaagggtcttgcttatgatatctccgatgaccaacaagacattaccagagggaaaggtttggtcgactcattgttccaagcttccatgaacgaaggtactcactatgctgtcatgagctcctatgagtacatttgccaaggccttctcacatacgacttggacaacaacatggatggattctaca

SEQ ID NO: 6333 - DNA, 447 bp, Gossypium hirsutum
  Clone ID: LIB3120-005-Q1-K1-G12
attcgctggactctcatctgatcccgatacctctgcttggaaccgtgagctcgaagtcattcactgcagatgggccatgttgggagctcttgggtgtgttttccctgagctggtggctaggaacggtgtcaagttcggtgaagctgtatggttcaaggccgggtctcaaatcttcagtgagggtggacttgactacttgggtaacccaagcttgatccatgctcaaagcattttggccatctgggcttgccaagttatcttgatgggagccgtctagggctaccgtattgccggtggaccactcggtgaagtgactgacccattgtacccaggtggcagctttgacccattgggtcttgcttatgacccatatgcattcgctgagctcaaggtgaaagagatcaaaaaacggttggttggctatgttctcaatggtccggttctttc

SEQ ID NO: 6334 - DNA, 344 bp, Gossypium hirsutum
  Clone ID: LIB3120-005-Q1-K1-G2
cccacgcgtccggtcaaacgttgggtcacgcatacgtccacgctttcgcgttgaatggctcactggtgttacatggcacgatgctggcaaggtggagttagttgaaggttcatctgatctaggcacaacccctgtccttctcgatggcatcattgattggtatagaaatattggtgatcggattcatcgagttccaataggaacgcccatcttgaccctgataagaggctgtaccccggacgaaagttctttgatcctctcgatctagccgacgaccctgagaaggatagcaccctatcaatcggctgatatcaatcatgctcatcctaccatgggtgctttct

SEQ ID NO: 6335 - DNA, 222 bp, Gossypium hirsutum
  Clone ID: LIB3120-005-Q1-K1-G9
ataccgacagcccactcttactttcaacatccaaaataccacaactccaaaagggctggagataatcgagaagtggaacatggatcatccgctaaactgcaaggtcaaaagctaataatccaagctactacccatgaaaaattatgcccgaactatgttggggggcgtccctttcggtgaagaaaaaccaatgtatatagtggataaaacacggacagaccc

SEQ ID NO: 6336 - DNA, 444 bp, Gossypium hirsutum
  Clone ID: LIB3120-005-Q1-K1-H10
tcttccactcgtccggttgagttgagccatggttcttatcttcaatccttcatacaattcttacgacctttgtctttggcccatcccctaagctttccccttctatctcttcaccccaacgctttcccttcttaaccaaacccctccgacccaatgccttcaatctctcaacatcatcatcagctcctgatcagaaatggagggttaacgtttctttcttcccagctttttttaacaaaggcaaggacgctaaggttctcaagcaagaccttcttgattgcattgcaccacttgaccgatgtgccgatgccacccccgtggaccagcagagagttgatcagtttgcaagcaaacttggagcagttaatcccacaaagcagcctctgaaatctgatttactaaatggaaaatgggagcttatttacaccacttccaaatctaatt

SEQ ID NO: 6337 - DNA, 354 bp, Gossypium hirsutum
  Clone ID: LIB3120-005-Q1-K1-H9
cttaattcccttgtttgcctatgcgttcgtccacgcgttcttattagcattcttctccagtgtttgcaacaaaatctctagtaggtcagggacattatcagcttctcctcgattctctcctttatatttctcttctcaacctcgtctctcactcttcagctccactcccatttctcactacgttaaaaatctaccagctattttggccatggattcttctaaagctggtacagtgaaggaattgccagtggggctagatgaagctaccgaggataaatatgcttcccagcggaaataacttcaagagtttactaatatctcttacatcgacaaggcatgggtttttaaggcttg

SEQ ID NO: 6338 - DNA, 318 bp, Gossypium hirsutum
  unsure (1)..(318): unsure at all n locations; Clone ID: LIB3120-006-Q1-K1-A1
acgancaanggntccactctctatctgtctatgcctccaaatggcttttgtcaccacttccaccggtttttgccttctaaagatcgccgactacaccacctattcctgggactggcggtgttctgcatacgtaatccgccttgcctgcacttgacggcacctcaaaggctggtctttcatccacagcctacgcttctcctccgctgcttgaggggacactctactttgcctgcatgcctcctccaaagatatatctttcaaaggaaaagggtcaagaggggttgtttcaatggccaaaaagagcgttggggacttgac

SEQ ID NO: 6339 - DNA, 374 bp, Gossypium hirsutum
  Clone ID: LIB3120-006-Q1-K1-A10
gttgcctgctcggactctagggtctgcccatctcatgtgctggacatgcaacctggtgaagcttttgtggtccgtaatgttgctaacatggtgccaccatatgaccagattaaatatgctggcattggatctgctattgaatatgcagttttgcatctcaaggtacaagaaattgtggtgattggacacagtgcctgtggtggaatcaaggggcttatgtctttcccatttgatggaaacaactcaactgatttcatagaggattgggttaagattggaatccctgctaagaccaaggtgctagctgaacatggtggtgagcctttgggagtccaatgtacacactgcgagaaagaagcagtgaatgtattcct

SEQ ID NO: 6340 - DNA, 54 bp, Gossypium hirsutum
  Clone ID: LIB3120-006-Q1-K1-A11
cccactcgtcctgataataatactaatggattatgaatctgcacttcttctact

SEQ ID NO: 6341 - DNA, 344 bp, Gossypium hirsutum
  Clone ID: LIB3120-006-Q1-K1-A2
caaaacgaactgcttcacaaaggcctatacaaccatggatctttcataaccatcattcgccggctaggcagtgtagttcttcccttacacccctgaaatccaaggaactggccgtgttttcatgaagaaaaccaccaagcctgttccttctggtagcccatggtacggtcctgaccgagttttgtacttgggtccactttgcggggagccaccatcttacttgaccggggagttccctggtgactatagttgggacactgctggactctcagctgatcccgagacctttgctaggaaccgtgagctcgaagacattcactgcacataggccatgttgggagctc

SEQ ID NO: 6342 - DNA, 259 bp, Gossypium hirsutum
  Clone ID: LIB3120-006-Q1-K1-A3
gagaagtcgcagagggagagagagagttgaaacgatttcgtttttggtgatagaaaacaaatggcggcttcatcatgttcatttactcttagccctagggtttgtaatccatattcttcatttgagtgccgtccagatcccgatttctccagtgcgccgatcggggacaagcctcgtcttgccttcagccgaagggtgacggcttcgtcgctttacgccggaggtatcagtagccgagggttgtcttctctgatctttc

SEQ ID NO: 6343 - DNA, 361 bp, Gossypium hirsutum
  Clone ID: LIB3120-006-Q1-K1-A4
agctcgcgtgcagaacaagtgtattcaccgtgggagaaaagcatagttttcttctttctttctttgcgtacgggcaaatcatctttggcagcttacataaccagtgaccaaggactagggggctggcaaatatcatttcagcctaatacttacatgcttgcaattggttctactgagcaagaaaatgatgtacctggacgcactcataaaacaatggctcctaaaaatcttcggctttatatgataaagactacccctcgacgagtggatgaacgtggcatctatgattcctggaaaaacacatggggatgtcatcaagcagtacagagaattcggagaagatgcgagtgatatatatgct

SEQ ID NO: 6344 - DNA, 404 bp, Gossypium hirsutum
  Clone ID: LIB3120-006-Q1-K1-A5
agctcttgtacattcagggagtttgtccctttgccaaaagagatatttcatgataatggtacaaatgagatgaaagctgctcaaaattatcctcggcatgttgctgtgcatgtcctagatggaagccttagaacatgtgttcaaaatccttccctggctgcatcggcaactactgaacatcagaataatgcaccaaaatctactcatcaggcattgccaccttttcatattccctttatacatcttcggcccgatcaagaggagtatcgatcatttctacatgtctcctccactttttccaatctcattgtatctactttgttacagaatccagctgctcatgctgcagcaaagtttgcagctacattttggccatatgcaaatgttgaaagttcttggcgatt

SEQ ID NO: 6345 - DNA, 228 bp, Gossypium hirsutum
  Clone ID: LIB3120-006-Q1-K1-A6
aagaacagcacaggcgttgtttcggaagtgaataacgaacgtcccgctttatagcgtattgcatggaaggaaggaaggaaggtgaagtaaaattatttatgaactttgacctcatgttaaacgaagtggtgtaacatatggtgatagttgcatgaattgataagcgtgcaaacctttttccgagggaattcacgtttacttggatccctaacgtcccttggccttaaa

SEQ ID NO: 6346 - DNA, 243 bp, Gossypium hirsutum
  Clone ID: LIB3120-006-Q1-K1-A9
tcgtccacgcgttcggagcgaacatggtgatagtatgtaatgtcttgcacatgacgggtgtgcctcatgcccttgcgagtgccggtgctgctatagtattcggatcgagcattcacttcacgggaggattagctagggaatctcttaacaaaaatatcatcattaatctccatcctgtattgatgttgaatggcttcattatcataggaggtgaagccattatgagctacaagtctttgccac

SEQ ID NO: 6347 - DNA, 274 bp, Gossypium hirsutum
  Clone ID: LIB3120-006-Q1-K1-B12
tcgctttgtttttcaatagatcgtaacaatgtctgtctcacttcaagctgcagctacctggatgcaaccaatcaagggtgctgcaccattaaggaccaatgtgctgctcaggtccttccagagcgtttttatggccttctgtttggagcctgttggtgctaggcttaccggctgttactaccagttctaaaaggcttggctcagacgcttgatgatgctaccaaactcgtccttaaaacaactagtctcatttttttttgttttttattgagca

SEQ ID NO: 6348 - DNA, 427 bp, Gossypium hirsutum
  unsure (1)..(427): unsure at all n locations; Clone ID: LIB3120-006-Q1-K1-B2
nccacgcgttcggccacgcgttcgcccacgcgtccgagaaatttcaagaaactgctctctgtgtcttaacgctataatcattgaagaaaaatgggtttgaaggaggaattcgaggagtatgcggagaaagctaagacccttccccagaacactaccaacgacgacaagctcattctctatggactctacaagcaagctactgttggaccagagaacaccagcctgcctggaatgttcaacatgaaggaaaagtacaagtgggatgcatggaaagctgttgaagggaaatcgaatgaggaagcaatgaacgattatatcacttatgctaaacagcttgcagaggctgctgctgcatcttcttgacgtgtgtgtgagaatagaaaaatggtgaaattntcaagcccttttgatacctatgggcgttgaa

SEQ ID NO: 6349 - DNA, 73 bp, Gossypium hirsutum
  Clone ID: LIB3120-006-Q1-K1-B3
ttttattttttttttacattttattattatatttaggtttaatgagtataatgaattaatatatgctgtacgc

SEQ ID NO: 6350 - DNA, 312 bp, Gossypium hirsutum
  Clone ID: LIB3120-006-Q1-K1-B4
aggagatttcgtcgttggatgaaaggttcgtgtttggtgctggtttagatttggatttgctgggaattgaagttgatgacaatacattgattccaggacttgcagtggcttcttcacgtgcaaaaccattggcagcttggatgaatggattggaagtgtgttcagtagaggctgataccagtcgcggttgcttgatcctatccgttggaatatctactcgttacgtttatgcaacctataagaaaactccgacaactacaagtgaagctgaagcttgggaagcagcaaagaaggcatgtggaggattacatt

SEQ ID NO: 6351 - DNA, 146 bp, Gossypium hirsutum
  Clone ID: LIB3120-006-Q1-K1-B5
agctctttgtcattcaaggagattgtacctttgacaaaagagatattttatgattattggtgggagtgtgatttaagctggttgggattattttttggatgatgttgggtatgttttagatgggaggcttagaacatgtgttttaa

SEQ ID NO: 6352 - DNA, 133 bp, Gossypium hirsutum
  Clone ID: LIB3120-006-Q1-K1-B6
tgaggaaaatcatgggtgccaaagttctcggcatctttgcttagctttccttgtcagctgagttggcatttgcacaggatgaggaagaccaatgtcttgttatgaacttctacaaggattcttgtcctcaggc

SEQ ID NO: 6353 - DNA, 340 bp, Gossypium hirsutum
  Clone ID: LIB3120-006-Q1-K1-B7
acgattgacccttatttcctgccttagttacattgaaggcgggactctaaaactactgggttgggccaactccagcgaggaggcggaaaaaacaaagcaaattgataaaatggcaacacaagcacttgaaaaatcatctcttacctactcagtggagactgcaaggcagattcttggagctaaacgacaaatagggccttcaaggaaaggaacctttgtcgttaaggcaggttcgacttcacccgttaagcaaggaactgatagacctttatgggttgcatctaaacaaaagcctttcatacttggaaggcaagccttcaagtgaataaggaatttgacc

SEQ ID NO: 6354 - DNA, 268 bp, Gossypium hirsutum
  Clone ID: LIB3120-006-Q1-K1-B8
attataattttaggggtgttatacattggagctggggggttctgatggggtgctaaggttgtggctagactggctaaggatccccttatccaagcagctgtaatgttacatccttcattcgtgaatgtggatgatatcaaaagtgtgaaggtgcccattgcgatatttggagctgagcatgaccatatatctcccccagagcttttaaaacagtttgatgacatcttaaaagccaatgaggtttatagccttgtgaaaatattatcta

SEQ ID NO: 6355 - DNA, 156 bp, Gossypium hirsutum
  Clone ID: LIB3120-006-Q1-K1-B9
ttgcttatctgtgtctgagtttttttgacgcgccaccaacattacaatgcggcatgggattactattcctctcatcttctataacccctttcttcccctctcttcatctcaaacctaaacataatctcttttttactttacccaaactccttttct

SEQ ID NO: 6356 - DNA, 354 bp, Gossypium hirsutum
  Clone ID: LIB3120-006-Q1-K1-C1
cccacgcgtacgactatcactaccattatggcttcggctactgtttctgtagccaaacccaaccttcagattcaggcaaaaggaaagggtgttggttttgcagatttgttaggcctacacaactcctgtactagccttccctttgccaggaaaacctctgatgacttccattcactcgatgcttttcagacatctgctctaggaagcaataatggcgggtacaggaaagggatggcacaagcaaagataaaggtggctataaatggatctggtaggattggcaggaatttcttaagatgctggcgtggcccgaaggactccacacttgatgtcattggcatcaatgacactggt

SEQ ID NO: 6357 - DNA, 342 bp, Gossypium hirsutum
  Clone ID: LIB3120-006-Q1-K1-C10
tcctcacgttctcactgtttttacaatggcgactcagctgaagagcagctttacgtcgtctgttacaagaggactggtagtccccatgggcatttcgggatccccgttcaaagtatcttccggaaagaccaggaccccttgcttcactgtcaaagctgttcaatccgacaagtcaacatttcaagtaatccaacccatcaacggcgaccccttcattggaagcctggagactccaatcacctcaagccccttaattgcatggtacctttccaacctcccagcctataggacggcagtgaacccacttctgaggggaatcgaagtgggtctggctcacggctt

SEQ ID NO: 6358 - DNA, 359 bp, Gossypium hirsutum
  Clone ID: LIB3120-006-Q1-K1-C11
ttcttcttcaaaaaaaaaagaacccggaccctttttcggcttcgcgtcgtctcttagtaaaaatctgttcttcgccatttctttcttcttttttgattttctggtcagtggacattttcagtataaatgtttgcagatttattatctgaaaggcctttgttcggtggatcaatcttaactacttttccttttaggtttcatgatgtcagtaacatcaggctagtttccgatcatcatgaggtttttgtggaccctgcacgtgatgagagcttaattttttgagttactatattacatgcatgattgttttagatgaagggagtgctgtttgttttatttaagaacttgcctttgaacaa

SEQ ID NO: 6359 - DNA, 339 bp, Gossypium hirsutum
  Clone ID: LIB3120-006-Q1-K1-C12
tcgcccacgcgttcggatgacttaaagagtggtcagaccaagatgaaatctgtcctcgtggattgccttgttggggctgggatcaagccaacatcgatagtgagttacaaccatctgggaaataatgatggcatgaatctatcggcaccccaaaccttccgttccaaggagatctcaaagagcaacgttgttgatgacatggtttcaagcaatggaatcctgtatgagcctggtgaacatactgatcatgttggggtcattaaggatgttccatatgtgggagacagcaagaaaaccatggatgagtatacatcaaagatattcattggagggaagaac

SEQ ID NO: 6360 - DNA, 267 bp, Gossypium hirsutum
  Clone ID: LIB3120-006-Q1-K1-C2
gccaagcgaacattatggcgtaggttcaaacaccatacaactcatccactcatacgaccgcgggttttttttacaagacgatggccggtcctccaaagaccagggctgctgctgttgccccggccgatgaatagctggctaagtggtacggcccggacagaaggagtctcttgcctgaacgcctgttagacagatcggagaggccacactactatgtacggcgactttaccggacactatagatactatgccgatgagctgagcaag

SEQ ID NO: 6361 - DNA, 362 bp, Gossypium hirsutum
  Clone ID: LIB3120-006-Q1-K1-C3
catctggggctgtactaaatggattaggctcttcatttctttgtgggggaaagaggagccaagcccttttgggtgctagcattggggccaaaggctcgccctcccctgctgctggaactagaaagttgatcgttgtggcagccgccgcacctaaaaagtcttggatccctgctgttaaaggtggtggcaacttcattgacccagagtggctcgatggatcgctccctggagactacggatttgacccactaggtcttggaaaagacccagcattcctcaaatggtaccgagaagctgagctgatccatggacgttgggccatggctgctgtcgtcggcatcttcgtcgggcaagcttggagt

SEQ ID NO: 6362 - DNA, 414 bp, Gossypium hirsutum
  Clone ID: LIB3120-006-Q1-K1-C4
cttgacgcaaaaaccattaaaaatcacccaaaaaagaaacccactaatggccgaaacgacgggtggtgttactactactacatgttgtacgcaatctccgaatcccatgatgatggacccttcacaaccgttatggtcggcgatgcctacacctgcaccgtcgcctcccacggcggtgactacgacttcaagaacgttagcgcctgcaccttcaacgaattcctcaattcttcctcaaaacaacaacaatccttctccttctcctttcattgacccttcttcactgcaaaatcaacagcagcagcagcagcaaatttacgaaattttgtcttcaactttttctcaacaacaacatctaacactgcggcagcaacagcaaacacatccaaatgttgcaactttaataaaaatttc

SEQ ID NO: 6363 - DNA, 379 bp, Gossypium hirsutum
  Clone ID: LIB3120-006-Q1-K1-C5
gttcctcaatctctctaatcctcgctttcttccccatcaaacacaccttcgattttcccaaggtcggttctttttgccctttggttggatctgccggccgcttctcgcttttcttttaacgggttgcttttttgctttgttttaatgaattgggtttttttttgagcgaaataaagaaacacaatcccatttcaagcattggttttattttgtttttgtgtttaagaactaatttgtgttcttgatgtagttttttttcccttggctgatgtgttgtgagggtgctttagatttcaattccttgatgggatctgaggaagcttgaaatttgactttatagacccaaaaagaaagaaaatcaacgaagaatggttaaata

SEQ ID NO: 6364 - DNA, 251 bp, Gossypium hirsutum
  Clone ID: LIB3120-006-Q1-K1-C7
gccacgcttgccacaacacgtccgaccacgcgttcgcccacgcgtacgaagaaactgattggtcctttgactcatgtgcctctaaaagcttgaattctccggtctgggtaagggcggtggctgaaatggacagtgtcgacttcctactgatcatgcgcatccacatggttcaatcgcttcgttactaaccacacaaagactgctgatcgccgacgcacctgatgatcatttaattctgagaccacccatca

SEQ ID NO: 6365 - DNA, 184 bp, Gossypium hirsutum
  Clone ID: LIB3120-006-Q1-K1-C8
gcgttcgtccacgcgttcgatcacacgttcgcccactctttcgtccactcttacgaagaaacggaggtgttcttacactcagttgggaaaagcttgaattttcccttccttagtattgtcgttggtatgaatggacaggtacactatcatctcattattggagtccaagttcttcaatctcttc

SEQ ID NO: 6366 - DNA, 361 bp, Gossypium hirsutum
  Clone ID: LIB3120-006-Q1-K1-C9
tctcatattttttctggcctaggaaagatgcctgggaagagctcaaggccactctagggagtaagccttggatttctcagaagaagatgattatccttcttaatcaggccactgatatcatcaatctatggcagcaaagtggtggcaacctttcccagagctagatgtgcattttttttatataattttatttgtcttagctatgcaaaaaggcctcggttaattcactgatattgagaatgtctggtttgaaacctcttatctcttaactaagatatgaattgatggttttaataggataacaaacactgctgaattgttggtatttcccttaaaatccacatatttgtttatttatcat

SEQ ID NO: 6367 - DNA, 423 bp, Gossypium hirsutum
  Clone ID: LIB3120-006-Q1-K1-D1
cccacgcgtccgctcttgtgtttttgtttttgttttttaattgttttctcttcatcttcctcttacggtcttacttacagatgaaagagtgaaaaatgagattgagatttgttgtgttttttatggtattattattataatgaaaggagaattccttttcctcttctttgaaagctatggctctgcaagcagaagggactcagcagattcaaagccctccattgatgaatcatgatggcctgttatgtgaagaagaagatttaggagtttatagttttgaagaaaatggaagtgaaattcctgctgaaaaggagaattttgtacctttatttcttaacgaacatgatttgttctgggaagacgatgagttaatctctttaatgtctaaagagaaacaaacccatcatggctacgttgatggtt

SEQ ID NO: 6368 - DNA, 437 bp, Gossypium hirsutum
  Clone ID: LIB3120-006-Q1-K1-D10
tcgataccacccaaacatcgtcgtcttctacactcttctctggtaagttcatcgaaagatcaagtcaagatccctgccaaaatgaacgactctgatgtatccaagcagatccagcagatggtgagattcatccgccaggaagcggaggaaaaggctaacgagatctctgtttccgctgaagaggagttcaacatcgaaaagcttcaattggtggaagcggagaagaagaagattaggcaggagtacgagaagaaggagaagcaagttgaaatccgaaagaaaattgagtattcgatgcagcttaatgcatctaggatcaaggtccttcaggctcaagatgatgtggttaatgctatgaaagaatcagcattcaaggaccttctcaatgtgagccatgatcaccatgtttacaaaaggcttttgaaaaatctaattgt

SEQ ID NO: 6369 - DNA, 425 bp, Gossypium hirsutum
  Clone ID: LIB3120-006-Q1-K1-D11
gaagatttctgctacttctatttacttcgagagtttgccttacaaggttaactccactacggggtacattgactacgataagttggaagagaaggcgttggatttcaggcctaagcttatcatttgcggtggaagtgcgtatcctagggactgggattacgctaggttcagggccgttgctgacaagtgtggtgctctgttgttgtgtgatatggctcacattagtggccttgttgctgctcaggaggcaaacaatccgtttgagttctgtgacattgtcacaaccaccacccacaagagcttgaggggtcctagggctggtatgattttctatcgcaagggaccaaagccaccaaagaagggccaacccgaagatgcagtgtatgaacttgaagacaagatcaactttgcagtttttccttccc

SEQ ID NO: 6370 - DNA, 420 bp, Gossypium hirsutum
  Clone ID: LIB3120-006-Q1-K1-D12
agcactatctctattatcaactatggctttcgtcgtatgtttcttgcaccaccacgcactgaccaccaatggcagatcatcatcattaccgccgtcgctgcgccaggtttcaaacatgaagcctaaccagcaggtggtgtgcaaggctcataagcaggaagatgatggaagccttgtgtcccgtaggttggctctcactgtactcattggtgctgccgctgttggctctaaggtttctcctgctgatgctgcctatggtgaagctgcaaatgtatttggaaagccaaaaacagacacagaattcatgccatacaatggggatggattcaagctgtcgataccatcgaaatggaacccaagcaaagaggtggagtttccaagtcaagtgcttgaagtattaagacaactttgacaccacca

SEQ ID NO: 6371 - DNA, 267 bp, Gossypium hirsutum
  Clone ID: LIB3120-006-Q1-K1-D3
taattatatcatatatacatatatcatggacataaccatgccgaaatatgactcatcaacagattctgtgaatgtgagaacacagccaacgtaagttgtttggaccccacatgcctgagcatgccattcttggtggaggaaaagttgctgatgtcattactatcgaggaacccaaaggtatcaaccgccttgataacagcagtgacaaccatttggattctcttcgaggtggtcgagtacaactatcacacccttctctgttacatt

SEQ ID NO: 6372 - DNA, 322 bp, Gossypium hirsutum
  Clone ID: LIB3120-006-Q1-K1-D4
aaaattcttcttcttcttcttcttcaaaaaaaaaagaacccggaccctttttcgggttcgcgtcgtctcttagtaaagatctgttcttcgccatttcttttttcttttttgattttctgttcagtggacattttcagtaaaaatgtctgcagatttattatctgaaaggcctttgttcggtggagcaatctcaactacttttcctcttaggtttcaggatgtcagtaacattaggcaagttcccgatcatcaggaggtttttgtggaccctgcacgtgatgagagcttaatatttgaggtactttatttcaagcatgatgtt

SEQ ID NO: 6373 - DNA, 309 bp, Gossypium hirsutum
  Clone ID: LIB3120-006-Q1-K1-D6
aaagaacctacttttgttgaatagttttgccttgctactccagggttggagcatgggagaatgcatactgcaagccaaccatcaaagcggatgccaagtgggggtatctaatctcttcttgcaatcccaagaatctttgcgtgtgcacagacaagattccatcttcccgtttgggtcttatttggaactgcatttaaacatgtcattcaaaaggacatcaagaatctccctatgctgcaagagatgatcaatgaaagggctttctttaaaatgacaattgattttgggtgaaaatggcatttgtaaaat

SEQ ID NO: 6374 - DNA, 280 bp, Gossypium hirsutum
  Clone ID: LIB3120-006-Q1-K1-D7
acgattgagcttaatatattgtcgtaaaaatactgatgggagacctctaagactactgctgtcggccagatgcaccatcgccctcaaacaacaaagcatagggtagaataaggggacagacgcacaagcttgatctgcttttatactctcaaaggtgactgtcatggagagtcttgtagcttaacaaccaaaaaggcctttaaggtgaggacacatcggtgtatatgtaataaggacagcacccttacaagcaaggtggtgaaatacaactatggtgtag

SEQ ID NO: 6375 - DNA, 360 bp, Gossypium hirsutum
  Clone ID: LIB3120-006-Q1-K1-D9
acgagtggatttgttagtatgcgtctggggtgatcggcgcatacaacgaattgtaaaggtggggaaataaaagttcgaagagggagaatgtaaagtggacactgtagattttagctatccatctttctcggagaagatctatctagcgggatttcgaaggctgctccaccagcaagagctagagctgattacgattaccttattaagcttttattgacctgcaacagtggtgtttagtaaaattgcctacttttactgttctctagatgtttctttacgacctgctttattaccaccattggtattgatttttagaataagaaccatttatcttaattttaaacggaattatgcttttaa

SEQ ID NO: 6376 - DNA, 334 bp, Gossypium hirsutum
  Clone ID: LIB3120-006-Q1-K1-E1
atctagctatagcatacactactagtacccactactagcaatggcctcctcaatgatctcatcggctaccattgccactgcctcttcggcacaggctaacatggtcggtcctttcaccggcctcaagtctgcctctgctttcccagacaccaggaaggccaacaacgacattacttctctcgcaagcaatggcggcagagtgcaatgcatgcaagtgtggcctcctactggaaagaagaagatcgagactctctcatacctacccgatcttacacccgtgcagttggctaaggaagtggattaccttcttcgctcaaaatgggttccttgcttg

SEQ ID NO: 6377 - DNA, 403 bp, Gossypium hirsutum
  Clone ID: LIB3120-006-Q1-K1-E10
tcgcccacgcgttcgtccacgcgtccgggagaggctttggaacaaaaagaaaaatgaaggccacacttcccacaccccatctgcggtctttcccttctccaaccccactttctttcaaactctccttcgcattccctgaaaccagaaggaaatcactaagcatcagctctactccgaagggaacaccatctccttctttggcttacgtgccactgagggtgagtgccagttctcaagccgctgctgcacctactgtcaatttgacggcaattcccaccgaaatgaaggcttgggtgtacggggaatatggaggtgttgatgtgttgaagttggatgataaagtgagcgttccataaatgaaagaagattaggttttgataaaagtgggcggttggttgccctt

SEQ ID NO: 6378 - DNA, 325 bp, Gossypium hirsutum
  Clone ID: LIB3120-006-Q1-K1-E11
acgaacatactttcgtacatactattgtattcatcaagtcttgttcaattgccatcatgagctgtgccgctgtcgctatccgatctttcaccggccttaaagccggtgcaaccgcagctaaagttagcgccacagccaatgattcagcctttccagtcccaagggtcagcatcaaggccttccttaaagacatcagtgttgctgttgcggcaactgctgcaagcgcaatccttgccaacaaagccatggccattgaagtcttgcttggcagtgactgaatggtgtctgagctttattctcaaagaattcaatgtaagcccatggg

SEQ ID NO: 6379 - DNA, 208 bp, Gossypium hirsutum
  Clone ID: LIB3120-006-Q1-K1-E12
tcgaaaaaaataaaaaaaatataaaaaaaaatatttaaataataaaaaaaaaataaaatggggatgaaaaaaaaaaaaaaaaaggggggggcctatataaataaataaaacatagtggcgcgctcatgcaaaatcaaagctcttctaggggggacccaaaaaaaaacccactggatatggttgaacaaaataaaaaatatgggaaaac

SEQ ID NO: 6380 - DNA, 201 bp, Gossypium hirsutum
  unsure (1)..(201): unsure at all n locations; Clone ID: LIB3120-006-Q1-K1-E2
ntgcgccacgcgtnncgccacgcgtncggtcactcttacttactctgatcatggctagcaaaatgggttccttgctttctgagcgttggatcctcagcattctgcatgccattgctgggcaagccatcgcagcacgtgacatctttgagaatgatgatcaaatgaaacagcctgaatatctaaaacatgaccgtagtgtgc

SEQ ID NO: 6381 - DNA, 396 bp, Gossypium hirsutum
  unsure (1)..(396): unsure at all n locations; Clone ID: LIB3120-006-Q1-K1-E3
gcgcccacgcgtncgcccacgcgtccggtgtgcctctgctacgcaccacttcttaagcagcttcctctacgatcataatggtgtcggttactgtttctgtagccaaaccaacccttcaggcaaatgcaaagggttttgcggaattctcaggtctgcgcaactcagctagccttacctttgccaggaaaacctcggatgactttcaatcagtcattgcttttcagacttctgctttgggaatcaataatggtggataccggaaaggcgtggtagaggcaaagctaaaggtcgctattaatgggtttggtaggattggcaggaactttttaaagtgctggcacggccgtaaggactccccacttgatgtcattgcaatcaatgacactggtggtgtta

SEQ ID NO: 6382 - DNA, 364 bp, Gossypium hirsutum
  Clone ID: LIB3120-006-Q1-K1-E4
aaatggcccgccattctgattgttttattgctttaccaggcgggtatggaactttggaggagttattggaagtgataacctgggctcagctgggtatccatgacaaacctgtgggcttgcttaatgttgatggctattataattatctactgactttcatcgacaaagccgtggatgatggctttatcaaaccttcccaacgccacatcattgtctctgcaccaaatgccaaagaactggtccagaagcttgaggagtacgttcctgtgcatgatggaatcatagccaaggcaagttgggaggttgagcagcaacagcagcaagtgccgcaacaggtggggttcaatgccactacttttcagac

SEQ ID NO: 6383 - DNA, 273 bp, Gossypium hirsutum
  Clone ID: LIB3120-006-Q1-K1-E5
tcggctttacgttactatttatttaaaatattctcttaccaataagaaatctgatttttatagtggggcttggtgatgtctgcgataaaacttcattactagcagaatataactatctctgtaacgaaagcttggtttattttcctacagcctgaaccttctcttgtggcgagatatctttgaattacactctttaggtcatgattgttagtacatttatgctaatttttcaaaatgacaatacacatcaacttactgttgttaaatatcttc

SEQ ID NO: 6384 - DNA, 197 bp, Gossypium hirsutum
  Clone ID: LIB3120-006-Q1-K1-E6
cgtagttgtgaatgtgttataaccacctcctcccatattagaaaacaaggattttctatagatgtgtgagagttaactgctttagagactttgacctcatatataacaaaatttgtttgctaaaaataataactgtatccaactgatgctttcaatcattattgcgatgagaatcttgacgatattccccctttact

SEQ ID NO: 6385 - DNA, 101 bp, Gossypium hirsutum
  Clone ID: LIB3120-006-Q1-K1-E7
acgatcatgcgtatctactaattattctattttctatgtgtaaagcattattattagctgcttgtaatgtgcgatcctatgtgagaaacataagtggtttt

SEQ ID NO: 6386 - DNA, 174 bp, Gossypium hirsutum
  Clone ID: LIB3120-006-Q1-K1-F1
gcgatttcaatggcttcttttgcttcttcttcatcctcctctctcctcttctcatcttcacctaccaaggttccttcacctatgctatatcctcctctacgcttgactcttttcacttcatcttttcttctctgtcttctcttacactattcttccttcctcccatgctctact

SEQ ID NO: 6387 - DNA, 463 bp, Gossypium hirsutum
  Clone ID: LIB3120-006-Q1-K1-F10
ttcgatcgcccacgcgttcgatatactacaacattcaaaatgttgcaactacagtttaagaagggctcagacaactacagaaggcggaaagaacacagaaacagggaggcatggtgatgtgtgctacagtgctcgttataatgtgctttgtcatgttggtcctcctaatcctcaaggagataatcttttgattcgcatgcatgtttttttcgttgatgatttccagtttgaccagcggtgagagcccattactttagaatcagcaatttccttggtcagcagcatgagcatgggggattttgaatacccccatacgcatacgacttaaccggcatgaatacttatttttttactctttaattcttgggttgttgttctttcaagaaaaaggaaaaggcgggtgtttgaatcgcgtttaaaagattgatctataatagagttaataagttatgtatttcttttt

SEQ ID NO: 6388 - DNA, 361 bp, Gossypium hirsutum
  Clone ID: LIB3120-006-Q1-K1-F11
ctcgaacaacttatcgttttcactctctttctctcttcgcctccaaatggcttctgccagcacttgcaccactttttccctcgcttaaaaccaccgccttcaccacctcttacttcgcctcccgctcttatgcatacctcatacgccttctccttcactcgccgccaccttaaatccttttctctcatccacagtctaggcttcttctccgctgcttctggggactctttgctctcccttcattgcctccttcaaaggtcgatcttttcaagggaaaagggtcaagagtgggttgccttaatggccaaaaagagtgttggggacttgacttgccgcttatttcaaagggaagaaagtgttt

SEQ ID NO: 6389 - DNA, 393 bp, Gossypium hirsutum
  Clone ID: LIB3120-006-Q1-K1-F2
cccacgcgtccgcccacgcgtccggctggagcatacaaggttgctgtcctcaagaggaagacaccctcaattcttgccctttccagacaaaagctaccccaattagctggaacttccattgagggggttgaaaaaggtggctacatcatttcagacaattcttcaggcaacaatcctgatgtaattctgattggaactggttctgagttagagatcgctgttaaagctgctgatgaactaaggaaggaagggaaggctataagggttgtctcccttgtttcatgggagctctttgatgaccaatcagatgcctacaaggaaagtgttttcccatctgcttgaacagctagagtgagtatttgaggctggatcaacatttgggtgggggaagat

SEQ ID NO: 6390 - DNA, 410 bp, Gossypium hirsutum
  Clone ID: LIB3120-006-Q1-K1-F3
ccacgcgttcgcccacgcgttcgcccacgcgttcgcggacgcgtgggctcaaattcttgatgaaaatggcgcatttagccagcttaaatggaatcaccgagacccttcccgctatcccaaagcttcccaccatccgaagaacccgcaaaacatcgaaaatcatcggatttcttggcaaaaacacctcaaactttcacggacaaccaccactgcaaactaccagaagaatggcattagcctttgcctccattgctcttattggaacttctaccaatggtatctcccttgccgaagataacggctattggattaccgatcttttaccccgtccttccgtcgaaaacaagataacgaatgcggataccggaactcgatctttcgtaaagaaaggactgtatgtggctaatctt

SEQ ID NO: 6391 - DNA, 406 bp, Gossypium hirsutum
  Clone ID: LIB3120-006-Q1-K1-F4
gcgttcgccacgcgttcgggcttcggctactgtttctgtagccaaacccaaccttcagattcaggcaaaaggaaagggtgttggttttgcagatttctcaggcctacacaactcctctactagccttccctttgccaggaaaacctctgatgacttccattcactcgttgcttttcagacatctgctctaggaagcaataatggcgggtacaggaaagggatggcagaggcaaagctaaaggtggctataaatgggtttggtaggattggcaggaacttcttaaggtgctggcatggccgtaaagactccccacttgatgtcattgccatcaatgacactggtggtgttaagcaagcttctcaccttctcaaatatgattccacccttggcatcttcgctgccgat

SEQ ID NO: 6392 - DNA, 434 bp, Gossypium hirsutum
  Clone ID: LIB3120-006-Q1-K1-F5
cccacgcgttcgcccacgcgttcgccctctcttttcttcgtctagctttttaacttcattatcatttctctgcaaaatgaccgttctttcttccgatcaatttccttcatgtcatgtctttaagtcatgtctaccctttctttttgtagccttgttgtttcagtttcaaactggtttctctgctttgataatgagcttgaagaaccatcctggccaccctcaacatcgaaggccaatgttccaaacgaaccaaagcacttgtgcattgtttgtaggcacttgggttcgtgatgatagttacccattgtaccaatatttcaactgtccaatcatagatgcagaattcaactgccaactgtatggaagacctgattctgattacctcaaatatcgatggaagcctctcaattgtgtgctttccaggttcgatggac

SEQ ID NO: 6393 - DNA, 364 bp, Gossypium hirsutum
  Clone ID: LIB3120-006-Q1-K1-F6
tcgcaccaacaaaatcagttgcttcacaatggcctctacaaccatggctctttctttcccatcattcgccggtaaggcagtgaagttctccccttccacccctgaaatccggggaactggccgtgtttccatgaggaaaaccaccaagcctgttccttctggtagcccatggtacggtcctgaccgagttttgtacttgggtccactttccggtgagccaccatcttacttgaccggtgagttccctggtgactatggttgggacactgctggactctcagctgatcccgaaacctttgctaggaaccgtgagctcgaagtcattcactgcagatgggccatgttgggagctcttgggtgtgtt

SEQ ID NO: 6394 - DNA, 205 bp, Gossypium hirsutum
  Clone ID: LIB3120-006-Q1-K1-F7
gttgaactgtttgctttagaatgggctttgtgggctttacggtttctaggattgtgggtctgaaatgggtttaggcttgggctggtttgggttctattgttggggtcattgggattttgagttggtgggcgacacatgttgcaaatggacttaaaatttggactttttatttggcgaattatacggcgaaaaaaaaaaataaaaa

SEQ ID NO: 6395 - DNA, 241 bp, Gossypium hirsutum
  Clone ID: LIB3120-006-Q1-K1-F8
atgctaagaacgccgctaacatcgaaaatcatcggatttcttggcaaaaacacctcaaacttacagggacaaacaacactgctaactaccaaagcaatggcctgagcctgcaacgcaagcgagtgtaggcgaccactggaaaaaagaagttcgagactctctcatacctgcccgaacttacaccccggcatgtggctaaagaagtggattaccttcttcgctcaaaatgggttccttgctt

SEQ ID NO: 6396 - DNA, 278 bp, Gossypium hirsutum
  Clone ID: LIB3120-006-Q1-K1-F9
tcgaacagatgcttgaatctggtggggctaaagtgtgttttatactccaaacaatcatgggttctcctcaagttgaaggtggtctgatgcggctatgccaagtatataattagctcgtagacatgcattcagtgagcatgaacgcctggtttactagggatggattctataagatactggacactgggaggaatggcttctaaaggtataagaagttattaaaatttaagtgattcttatatggcgttctatcttataatcgaatgctaattgacttg

SEQ ID NO: 6397 - DNA, 322 bp, Gossypium hirsutum
  Clone ID: LIB3120-006-Q1-K1-G1
tcggccaaagatggtgtatgactactacgcatctggtgctgaggaccaatggacattgcatgagagtagatttgctttcaccaagagactgcttcgtcctcgtattctcattgatgtaaacaagatagacatgaccacaactgagttgggttttaagatattaatgactatcatgattgtaccaaatgccatgcaaaaaatggctcattctgaaggggagtatgcaacagctagggctgcatttgctgctggaactatcatgacattattctcatgggcaacttctagtgttgaggaggtggcttttgacaggacccggcat

SEQ ID NO: 6398 - DNA, 455 bp, Gossypium hirsutum
  Clone ID: LIB3120-006-Q1-K1-G10
acgcccacgcgtccggagagctcaagcctaaatgtttgaagaaatttataactagagaagaagagccagagcagtattggcaaacagcaggagaaagggaaggagagaatcccatgaagacccctcttccttacattataatatttggaatgtcaacaccttttgtaatcttagccattgcttttgccaatggctggattaaggttcctgttcgatgagttttgagaattgagagactgggtttttcaatgttggtttactccaaatgcacctttaattcagccttctcggctttctaccgtaagcatttgttgttaacacacccttgttttgagtatttatgttgtgaatttctcaagcaaaaccagaccatttctgagtactgggtcttctatatcagttaaaagagacatggctttttggtcaaacccaaaacttcttagtaataaaattat

SEQ ID NO: 6399 - DNA, 307 bp, Gossypium hirsutum
  Clone ID: LIB3120-006-Q1-K1-G2
agctggtgttcaaccaacgaccatcaagggccttggaggcagctctctcaatggaaccaagctcttgggggagtcaactcggcagagtttcaaacccaaaaactacatggctggtgctgtggtagcaaagtatggtgataagagtatatactttgatttggaggatattggcaacacaactgggcaatgggacttgtatggatccgatgcacctttaccgtgcaacccacttcagagcaagtgctttgagacatttgcagctccatataccaagagaggattgttgctcaaggttctgaacttggga

SEQ ID NO: 6400 - DNA, 383 bp, Gossypium hirsutum
  Clone ID: LIB3120-006-Q1-K1-G3
gcacgtgtctggattggttaagaatggccatgacgccacaaatggcttaataaataaatcccacacccagttggccaaagctttacaccgaagaagcaaagcagcatcggcatggcagtttattgcaattccgctcccttttcttgcaaagcctcgagaaacagagaccccacacccttattcgcactcttacccacccgtctcttgtcacttcttcaacccccaatcagctttcatccagatagattaaagctctcaacttgcacgtgggataaggaggcttctgctggtgtttctgaagaaagagcagttgggtcaagctcttctgggactgatgtattcaacctcacttacctagaggggaatagttggctgggggatat

SEQ ID NO: 6401 - DNA, 286 bp, Gossypium hirsutum
  unsure (1)..(286): unsure at all n locations; Clone ID: LIB3120-006-Q1-K1-G5
tggcttggactacctaggcaaccccaaccttgttcatgctcaaagcattcttgctgtcctcgggttccaggttgtcctcatgggactagtcgaaggattccgcatcaatggtctccccggagtcggtgaaggcaatgacctttaccctggtggccaatactttgaccctcttggtcttgctgatgaccctgtcacatttgctgaacttaatgttaatgaaatcaagaatggctggctagccatgttctttatgtttgganactatcgtcaagccattgtcacacgc

SEQ ID NO: 6402 - DNA, 359 bp, Gossypium hirsutum
  Clone ID: LIB3120-006-Q1-K1-G6
cacaaataccctttctccgttaaggatggcctagcccaaatgctccgtggcggggtgattatggatgtcgtcacccctgaccaagctcgcatcgctcaataagctggagcctgctcccgccatggttcttgaacgagaccccgccgacattccatcccaatgtggcatggcgcggatcagtcgacccacaactcatcaaagaaattaagcaagctgtcaccattttcctcatggccaaagctcgtattggacatatcgttgaggcccagatcctttaagccattgtcatcgactcttttgacgagagcgaaaaccttaccctctccgacgaaaaaaaccacattaacaaacataatttt

SEQ ID NO: 6403 - DNA, 256 bp, Gossypium hirsutum
  Clone ID: LIB3120-006-Q1-K1-H12
caaattgttgcatccccacaatgtgtcactttttctactcttgcttccccacccgatcagttccagagtcgttcctggaagaccactgcctactgtcgcaagattgctctaaatgtgatggctttggccactggtgagaccttggccacgcgtgaagctccaaccgaagttaccccaactgagctgacagagtttattaacaaaatacaataaacctgggataaagttgatgacaagtacgcagtgaggtcacttg

SEQ ID NO: 6404 - DNA, 379 bp, Gossypium hirsutum
  Clone ID: LIB3120-006-Q1-K1-H2
ctttgccaagaatgttagagatacttcctttttcgacgtgctggctgcccaacttactccggagagtgaaggcgtaccatcaggatctcttaagggagaaacagccgccaaactgaaggttgcaatcaatggattatgacacattggcaggaacttgctcagatgctggcatggcaggaaggactcacccctcgaggttgttgttgtaaatgacagaggcggtgtcaagaatgcttcacacttgctgaaatatgactacatgctgggaactttcaaagctgatgtgaaaatagttgacaatgaaaccatccgtgttgatgggaagcccatcaaggtcgcttctaacagggaccatctaaagcttgcttgggctgaactt

SEQ ID NO: 6405 - DNA, 295 bp, Gossypium hirsutum
  Clone ID: LIB3120-006-Q1-K1-H3
gctctgcctattggagattacacgcaaaaggctaccctggccttgcgtctgtgttatttgtgagatatctctcatactacaagtggcagaatacccttatagaatgcacagagatgagacgttcatacatggcaacgactgagcttgtttaccaccaggagcactacattggcggtcgaaatagtcaccggaaacacatggaagaccggagagtcagcatggaggctgtcagtttttaatatacagatatttctgactttgcttgctaataggcagtcttacatatcttagggta

SEQ ID NO: 6406 - DNA, 453 bp, Gossypium hirsutum
  Clone ID: LIB3120-006-Q1-K1-H4
gagcactatcattagcactagcactagtagcaaccatggcctccgccgcatgtttcttgcgccaccacgcactcacaaccaatggcagatcatcatcattatcggcgtcgctgcgccaggcttcaaacatgaagcctacccagcaggtggtgtgcaaggctcaaaagcaggaagatgatggaagccttgtgtcccgcaggttggctctcactgtactcattggtgctgccgctgttggctctaaggattctcctgctgatgctggctattgtgaagctgcaaatgtatttggaaagccaaaaacagacacagacttcatgccatacagtggggatggattcaagctctcgataccatcgaaatggaacccaagcaaagaggtggagttcccaggtcaagtgctgatgtacgaggacaactttacaccaccagcaatttgagcgtcatgatcac

SEQ ID NO: 6407 - DNA, 336 bp, Gossypium hirsutum
  Clone ID: LIB3120-006-Q1-K1-H6
tcggccttttttatatcagaactagagagattatattctggtttgagggtgatttgccttggattgtacgttgtacaatttattatgaatctcaccctcattcaccctcgaggatgccaaagctctttgtaatcaatcgcaggtgcctcactgcgtgtcactcttttgacgctgctgttgtgttaggttacgtagctatgccagctgaggtgccacaagacttggtaacactatccaacataccccaaacatctttaggagaggggttattcccctaagaatgcgaaaagccttaaatccagcgaccaaagtctaggaaaggtgagacatgcacta

SEQ ID NO: 6408 - DNA, 332 bp, Gossypium hirsutum
  Clone ID: LIB3120-006-Q1-K1-H8
acgcccacgcgtccgaaaagaaaggtttttttcaatggccgaccggcgctgacgtaccggaggcgcttccctcctcattcctctcatctcctttcacccgatccgggtttgttttcgataaatttcttctattttcatggctgctccacctgcaagagctcgagctgattacgactacctcatcaagctccttttaatcggcgacagcggagtgggtaagagttgccttcttttgcgtttctcagatggctcatttactactagttttatcacgacaatttgaaatgactttaagataaggactatagagcttgatggaaaaaagatcaaac

SEQ ID NO: 6409 - DNA, 285 bp, Gossypium hirsutum
  Clone ID: LIB3120-007-Q1-K1-A1
agaaaaatgaaggcgtcattgaaaggcagatacaccaatgacaagagcaccgccgtcgtttgcctttccgccaacgcgggcgacatcaagctacgcgcttccatgactgacgcgacattcatcaagggtcccagcctgaacggtttgactcttgccgtggaaaaacctggcttcttcatcatcgactacgatgtccccaaaaaggattttcggtttcagttcatgaactcagttagggttgcggagaagcccgtgaaacttacttacattcacggcagaagggat

SEQ ID NO: 6410 - DNA, 364 bp, Gossypium hirsutum
  Clone ID: LIB3120-007-Q1-K1-A12
attcgaaaacatagcaatgaatatcttaaaacaacataagggcccgccgaggacaataaggcatagggatactagaccgacggcgtgcaccattgaagcaaggttgacatgttcggccactaccaccacaaccaagcctaagtccagtcagaaccagttggttatcgagccacggcttgagacaaaaccggactctatcactcccattatccctagagtaggccctccctagtccaatgatccaagtttacaatcaacatggtcccaccgagcatgggtggccagaggatgcaccacgctattcttttccctagccaagactgtaacgggtgcaactgatacacatatggggatcaaacctata

SEQ ID NO: 6411 - DNA, 255 bp, Gossypium hirsutum
  Clone ID: LIB3120-007-Q1-K1-A2
ctctggtcttcattgtaacacaatattacattctgtttcctctgctatcgctctggggggggccattgtataaaactcgttatggatggatccggagcgtttgtcgatagagaaggtgcaggtcagcacattgaatcatgatccagagaaagtgctgattactgccccagggaacggggacatccccacctatgtggttggagtgaatgctgacacctacgacccaagtgaatctatcattacctatgcttattg

SEQ ID NO: 6412 - DNA, 423 bp, Gossypium hirsutum
  Clone ID: LIB3120-007-Q1-K1-A3
cccacgcgtccgcacagtcatctctcatcgccaaacaagcctcgtctttctcttccttctattttatccctttccctctctcctccttcctattgcctccaagtttccgacagagcaggaaatcaaataaggatcaacatttgaagcttgtttcaaagcaacagtgatgagacgacagggacaatatgcagactctggtggcaatgcatatgtacctgctcagatgcagcatatgcctgcacaaaggatggagatcaagtctggtcaatttcaaggacaactagaagcatttactcctgaaagggatcaaccatatcgaactccaaaatcagatggccagtggaggtgggaaagagatggatcaaaagtgtcaaaccaaataacacccaaaatgttcaatgaaggccaagggactgatggatc

SEQ ID NO: 6413 - DNA, 358 bp, Gossypium hirsutum
  Clone ID: LIB3120-007-Q1-K1-A4
cccacgcgtccgcggacgcgtgggctgtctctaccactgaaagcaaagaaaaaatggcaacggagatggcccttgtaaagcctatctccaaattcagtacaagcagtccaatttttagcaactcccgatatgggaagttcacgaccgtcagaatgtcatctacttcccaatcaacagcaaaggccgccgcgaagggtggcaagaaagctgccaaaaccgccatcaaagagacccttttgacaccaaggttttacaccaccgactttgatgaaatggaggcgcttttcaacactgagattaacaagaaccttaaccagtccgagtttgaggcactgctgcaagagttcaagactgatta

SEQ ID NO: 6414 - DNA, 352 bp, Gossypium hirsutum
  Clone ID: LIB3120-007-Q1-K1-A5
cccacgcgtccggctggggctggatcggctaccttgtcaatggcatatgcagctgtcaagtttgcagatgcatgtctccgaggcttgagaggagatgccggagtcatggaatgtgcctttgtagcttccgaggttaccgaacttcctttctttgcaaccaaggtacgacttggtcgtacaggagccgaggaagtctatcaactagggcctctaaacgaatatgagagggttggtttggagaaagcaaaagaagagttagctggaagcattcataagggtattgccttcatcaagaaatgaaattgttgctgctgagctaatcttttaatataatataacataaagcctctta

SEQ ID NO: 6415 - DNA, 447 bp, Gossypium hirsutum
  Clone ID: LIB3120-007-Q1-K1-A6
gaaacccaagattataaatttagtatcgatttgagtatttgaatagtttagattacaagaatggcaggggaactagtattgtgggatttctggccaagtccatttgggatgagatccaggattgctttggctgagaaagggataccatacgagtacagagaagaagatttgaggaacaagagtgatttgctgctgcagatgaaccctgttcacaagaaaatccctgttcttatccataatggtaaaccggtttgtgagtcgggcattcaagttcagtatattgatgaggtctggcatgataaagctcctttgatcccttctgatccttattaaagagctggtgccagattctggggtggattcattgacaagaagatatatgagctggggagcaaaatatggaagacaaagggagaaaaacaagcaaatgcaagaaagatttattga

SEQ ID NO: 6416 - DNA, 410 bp, Gossypium hirsutum
  Clone ID: LIB3120-007-Q1-K1-A8
gcgtccggtcagctgtctgtgtgagagattatagtgttccggcgtccagatcatggtgggggacgtgggacttatatctctcagcgtttctttactgtctatgccttgtcttcctcgaatcggcttcaccaaacgcagaccatttcccatggcagcattgagtgatgatcctgttcaagaatggattctcaccgaaggaaaagccacccggattacgggtattcgtcccgtaggtggtggttgcatcaatcttgcgaatcgctacgacactgatgctggttccttctttgttaaaacaaacaggagtatcggtccaccaatgttcgaggcagaagctatcggttagacgccctgtttgaactcgaacaattcgtgtgcctaagccctttaaggttggacccttacgaaat

SEQ ID NO: 6417 - DNA, 221 bp, Gossypium hirsutum
  Clone ID: LIB3120-007-Q1-K1-B1
gaatcactagccacagagcttgcacctaggatgagtgccatagcaacgctactgataatgcgcatgaactgaaaaagaccttgtctatcatctacaacctgcagcgtcatgcgaaaatcaccgcagagatattggagattgttgctggtgccaatgctttggcctaatgaacttgaaacctgactcaccatcaattatgtccccttgtaggtatcaaaaag

SEQ ID NO: 6418 - DNA, 442 bp, Gossypium hirsutum
  Clone ID: LIB3120-007-Q1-K1-B10
cggacgcgtgggctcagattggtttttgtctaaaggtggtacacgcatgagcatgcagcgaatgtgggatccggttgcttatgccttgggttttattgactgtgataacatcagtgctcgttgtatgcttacgattttctctctgtttgccactaagacagaggcttcccttctgcgtatgctgaagggttctcccgatgtctacttgagtggtccaatcagaaattatataacagaaagaggaggcaggttccatctaaggtggggatgcagagagatactttacgataaatccgctgatggagagacatatgttaccggacttgccatgtccaaagctactaacaagaaactcgtaactgctgatgcttatgttgctgcatgggatgttcctggaataaaaagggtactttcattcgggtggagggaattagaatttttt

SEQ ID NO: 6419 - DNA, 438 bp, Gossypium hirsutum
  Clone ID: LIB3120-007-Q1-K1-B11
ctttaaagtgccaaaccctctttttataaaatccaaacagcttcattgctgtttgttgaggtggtggtggtggtgaaaaacgtccaaatgtggaactcagttattattcagtgcttggaatttctgaacaagcttccccttctgaaattcgagaagcttatcgtaaacaggctttgaaatggcatgctgatagatggatgaaaaaccccactgtatcacgtgaagctaagaaacgatttcaacagattcaagaggcttattcagttttatcggataaaggaaagagaaagatttatgacgctgggttgttgggtctacttacagacgatgatgatgaaagctttcttaacttcatgcaagaaatggctatgatgatgcaaaacgtgaactcaaaggaaggaaacagcttggaggatcttcaaggatcgttaatggatg

SEQ ID NO: 6420 - DNA, 146 bp, Gossypium hirsutum
  Clone ID: LIB3120-007-Q1-K1-B2
gcgacaaattaattgcttacaatggcctccactccatttttcattcttccccatcactcggcgattgggcattgaatatcggcctttgcaccctttaaatccagtgaaccctccttttttatataaccaatactcttaagaagctt

SEQ ID NO: 6421 - DNA, 443 bp, Gossypium hirsutum
  Clone ID: LIB3120-007-Q1-K1-B3
agcagctgcaccacaactacagagaagagagtaaaggggaaaaaaagcgtcgtcgtttttgcttcttcttctacttcgctctctctccttctccgaagttcctctttcgttctttcatttattcagtattgtaaaagatggccgacggtgaggatattcaacccctcgtctgtgataatggaactggaatggtgaaggctggttttgctggtgatgatgctccaagggcagtttttcccagtattgttggtcgtccccggcacactggtgttatggttgggatggtcagaaggatgcctatgtaggagatgaagcacaatctaaaagaggtatccttactttgaaatatcctattgagcatggtattgtgagcaactgggatgatatggaaaagatctggcatcatacattctacaatgaactccgtgttgctcctgaggagc

SEQ ID NO: 6422 - DNA, 429 bp, Gossypium hirsutum
  Clone ID: LIB3120-007-Q1-K1-B4
ctctgatgtcaccaatttcgacattttggagaattctgtgaaaaatttagggtttcccattgatgttgttgtctcttgtcttgctagccgtactggtggtgttaaggattcatggaaaattgattacgaagctacaaagaacagccttgtcgctggtaagaaatttggggcttcacattttgtgttgctatctgccatttgtgtccaaaaacccctcctcgaattccagcgagctaagctgaaatttgaggccgaattgatgaaagaagccgaaggagatgacgggtttacttacagtattgttaggccaactgcattctttaagagtttagggggtcaagttgacttagtgaaagatggaaagccttatgtgatgtttggtgatggcaaattatgtgcttgtaagccaattagtgaacaagatttggc

SEQ ID NO: 6423 - DNA, 447 bp, Gossypium hirsutum
  Clone ID: LIB3120-007-Q1-K1-B5
gcaagagactcccatatccctgtcttggcaccacttcccattgggtttgctgtgttcatgggtcacttagccactattcccatcaccggaaccggtatcaacccggctcgtagtttgggggctgctgttatcttcaaccaggacaagatatgggatgaccattggatattctgggtaggaccttttattggagctgccattgccgcaatctatcaccagtttatattgagggcatccggtgctaaagctctgggatccttcaggagcagctctgccatgtaaaatcttgtgaagcaagaactgtgcagccatgagttcaaagtaaaagctggcatgcttggatgaatgaaatgaagttttcttcagaccattgaatttggaaaagataatcaaagggtaatggctcttctttatgcatgtggcacttatttttaatgtgccctaaac

SEQ ID NO: 6424 - DNA, 444 bp, Gossypium hirsutum
  Clone ID: LIB3120-007-Q1-K1-B6
gaagatcttgggcctttctttgagtctataatcagatgcatacctggtccacatattgacaaagatggtgcactgcaaatgcttgctacaaatattgagtatgatgaacataaaggacgaatagctattgggcgcttgcatgctggggtacttcggaaaggaatggaagtaaaggtttgcacctcagaagattcgtgtagatatgcaagaatttctgaactttatgtctatgagaaatttagtaagaccgctgttgagagagtagaagctggtgacatttgtgctgtttgtggaattgaagatattcagattggagagactattgcagataaagcatttggaaagccattacctgccattaaggtggaagaaccaactgggaaaatggctttctctatcaacacttcaccatttgttggccgtgagggaaagtatgttactagc

SEQ ID NO: 6425 - DNA, 138 bp, Gossypium hirsutum
  Clone ID: LIB3120-007-Q1-K1-B7
tcttatatgggtggtgcttatgttggcaccggatctgaaacatttccttattattggagacacgtacatttcggatggtatctttaaagtcgaaatatatagcgtatttatcagtgtccagatacagtttgtaataaa

SEQ ID NO: 6426 - DNA, 294 bp, Gossypium hirsutum
  unsure (1)..(294): unsure at all n locations; Clone ID: LIB3120-007-Q1-K1-B8
gcactntcgaatcttaagaatccacaactagtttcaaatggcacccaaagccgagaagaaggcagcctagaaaaagccagctgaggagaaaaaggccgagaaggccccagctgagaaaaaaccaagagccgagaagaagctccctaaagaagccggggacaagaagaagaagcgaagcaagaagagcattgaaacctacaagatctacatcttcaaggggctgaagcaggtccatcctgatatcggcattttcagcaaagccatgggtattatgaacaagcttcatcaacgaca

SEQ ID NO: 6427 - DNA, 403 bp, Gossypium hirsutum
  Clone ID: LIB3120-007-Q1-K1-C1
tgatgatatgacggaagctgatgcagtgattggtgctgctgatggtggctcgcatcaagctccattagctaggaaagagtctagcaagaagaagaagcctcttaaggttgccatggaagccatgataagagggttacaaaagtttgtagaggatgagtctgaagaagagactgcttccaaggaggaatgcaatcataatgtagctgcatggcacaatgttcctcacccggaggagagattaaaattttggcctgatcctgatatagaactgaatctggccaaagatactggcattagcatctttcggatgggaatagactggaatccaatcatgccacaggatccagttaatgggattaaggatgctgttaattttgcagcattggagcgatataaatggatc

SEQ ID NO: 6428 - DNA, 406 bp, Gossypium hirsutum
  Clone ID: LIB3120-007-Q1-K1-C10
cgtccgcccacgcgtccggtttagcctttgaattgaaaccctcaaaattccacttaaaaaatggcctgcacagcttccctctccaccgccgtagccaccacctctttcctccgcggccacccggccccgaaaaccctaagctcccttcctttcaaccaatctcttttcgggctaaaaccccaacgaaatggccgtctcaccatggctgcatacaaagtgacactgttaacacccgaaggaccccaagaattcgtgtgccccgacgacgtttacatcgttgaccaagctgaggaagaaggcattgatcttccgttctcgtgtagggctgggtcttgttcttcgtgtgccggaatgattaagcaaggctccgtcgatcaatccgacggtaatttccttgatgatgacc

SEQ ID NO: 6429 - DNA, 441 bp, Gossypium hirsutum
  Clone ID: LIB3120-007-Q1-K1-C11
gccaccgtgacctcaggcgtgctagagccgcagctctcaacatcgtcccgacttcaactggtgcggcgaaggccgtggcccttgtactccctactctcaaaggcaaacttaatggcatcgcattgcgtgtgccaacaccaaatgtgtcggtggtggacctagtggtccaggtttcaaagaagacgtttgctgaagaggtgaacgctgctttcaaagagagtgcagagaaagagctacagggtatactttcagtgtgtgaagaaccccttgtttcagtggacttcaggtgctctgatgtgtcctccaccgttgatgcatcactcaccatggtcatgggagatgacatggttaacgtgattgcttggtatgacaatgagtggggctactctcaaaggttgtggatttggctgacattcgtgccaatagctggaagtgacttca

SEQ ID NO: 6430 - DNA, 270 bp, Gossypium hirsutum
  Clone ID: LIB3120-007-Q1-K1-C12
ggggcgacggacgcgtacgaacaaacggaaagagaaacacactttatcaccaccaaagccgaacagaccaagggggggtggggcagccaacattagggagaaagggaaaacaccgcgccaaagcatcaaaaagagcgacgacgcaaccgcgctgctggcaagaaccacacaagacacacgcgacaaacaaaggaaaaaggccacactaacgaacaaggcggacaacgaccagcaaagagaaggggccccatgagcacaacaaagtacaga

SEQ ID NO: 6431 - DNA, 339 bp, Gossypium hirsutum
  Clone ID: LIB3120-007-Q1-K1-C2
tgatggtggctcgtatcaagctccattggctaggaaagagtctagcatgaagaaaaagcatctaattgttgctatgggaagtatagattagaggcgttacaaaagtatgtagaggatgagtatgaagaatagactgatttcaaggaagaatgcaatcataatgtagctgtatggcacaatgttcctcacccggaggagagattaaaatattggtctgatcctgatatagaaatgaatctggccaaagatactggcattagcataattcttatgaaaatagacatggatcaagatatgcctaagtagtcatattaatgggattaaagatgctgataattt

SEQ ID NO: 6432 - DNA, 428 bp, Gossypium hirsutum
  Clone ID: LIB3120-007-Q1-K1-C3
ctgatgaggaagaagccaagcaaaggcagctgaagtccattttgaacaagctaactcctcaaaattttgagaaactctttgagcaagtaaaagctgttaacattgacaatgcagttacactcactggtgtcatctcacagatctttgacaaagctttgatggagcctactttttgtgaaatgtatgcaaacttctgccagtgtctggctggggagttgcctgattttatcaagaacaatgaaaagataactttcaagagattgctgctgaacaagtgccaggaggaatttgagagaggggagagagagcaagaagaagcaaataaaatagaggaagagggtgaggctaagctgtctgaggaggaaagagaagagaagagaatcaaagctcgaagacgaatgttaagtaacattagacttattggggag

SEQ ID NO: 6433 - DNA, 348 bp, Gossypium hirsutum
  Clone ID: LIB3120-007-Q1-K1-C4
attgtttcacatgggcctctacaaccatggctcttttttccccatcattcgccggtaaggcagtgaagttctccccttccacccctgaaatccagggaactggccgtgtttccatgaggaaaaccaccaagcctgttccttctggtagcccatggtacggtcctgaccgagttttgtacttgggtccactttccggtgagccaccatcttacttgaccggtgagttccctggtgactatggttgggacactgctggactctcagctgatcccgagacccttgctaggaaccgtgagctcgaagtcattcactgcagatgggccatgttgggagctctttggtgtgttt

SEQ ID NO: 6434 - DNA, 367 bp, Gossypium hirsutum
  Clone ID: LIB3120-007-Q1-K1-C5
gcgagcgccgcccttttttttttttttttttttttttttttttaaataaaatacataaacaggtaataaattcacatagtataccaccctcatattagtatatattttggtggattaataaacttattaaactctcacaaaacatgctaaaatagggggaaaacatcgtagtatagcaaaacattcaatgtagccagattctagggcatatgtggcttgcttcatcgacggctgtaaatcaggtcgatgatgatcaaggattcggggaagtttggatgctcaaaagcttcacgtcgtcgaggactgggccacatatggaagagaagtcatcactcctcatggtgtaaaaagtgctaaggaacatgat

SEQ ID NO: 6435 - DNA, 378 bp, Gossypium hirsutum
  Clone ID: LIB3120-007-Q1-K1-C6
tagctcaaagcactgcggggcgctgctcggaggaagtgaaccagctggttctacctttcaatgccaatgtgaaaaccatgatgaatagccttaatgctaaccttccgggtgcaagatttatctacgtcgacattgctcacctttttgaagatatcgttgctaatgctagaacatacggatttagtgtggtaaaccgagggtgttgtgggattgggaggaacagagggcaaatcacatgtcttccattccaaacaccatgtgaaaatagagatgaatatgtgttttgggatgcattccatccaactgagaaagtgaatatcataatggcaaggaaggccttcaatggtgatccttccattggttatcccatcaacattc

SEQ ID NO: 6436 - DNA, 372 bp, Gossypium hirsutum
  Clone ID: LIB3120-007-Q1-K1-C7
gcggcggcgtaggtagcggcggtgtgcttgtgatctcaatctcaaccccaggcgagctcggctccggtcacccgtcgatccacgcaaccatgtctaggaggaagaccagcgagcccaaggaggagaacgttacccttggacccactgttcgtgaacgagattttgtctttggtgttgctcacatctttgcatccttcaatgacaccttcattcatgtcactgatttgtctgggagggaaactttggtttggatcactggtggcatgaaggttaaggctgatcgtgatgagtcctctccttatgttgatatgcttgcttgccaagatgttgcacatagttgctaggagcctcggtttgacattgctttatatt

SEQ ID NO: 6437 - DNA, 278 bp, Gossypium hirsutum
  unsure (1)..(278): unsure at all n locations; Clone ID: LIB3120-007-Q1-K1-C8
acggcaatctggggatgggatctttgcaatgatgtctgctttgtggtttagcagtttggtttggtttggggtctggtctttgtttgaagaggccaactagttatcctatgttagttatagttcaataaaatgttgatacgggtagggggccgggttacagttatccttgtgtttgcctatgtttgatgttatgaataaagatgaaaaaatcatggagatatcaaagagaatcaagtgctcaattggatgtgcttcaaaaaaaaaaaaaaaancnattn

SEQ ID NO: 6438 - DNA, 271 bp, Gossypium hirsutum
  Clone ID: LIB3120-007-Q1-K1-C9
atagtactagtaagcagtaatagcaatggcctgctccatgatctcatcggcaaccattgccaccgtgaactgctcctccccggcacaggccaacatggtggcccccttcaccggcctcaagtctgcctctgctttcccagtcactaggaaggccaacaacgacatcacttctcttgcaagcaatggtgggagagtgcaatgcatgcaagtgtggcctcctcttgggaagaagaaattcgagacactcttattacctcccgatcttacaccc

SEQ ID NO: 6439 - DNA, 400 bp, Gossypium hirsutum
  Clone ID: LIB3120-007-Q1-K1-D1
cagaaattaaaaaaaaaatttcaatttaattttattactaaagcgtaaagattcaagcttgcaatcgaattcctcatttgaaattctttgatgaaacaggtattagaactgtaataaagaggataaaaaaagatcattgttgaggatggcttgtaaaggatgcctagaatgcttgttgaagctgttgaacttcttgatgactcttgttggtttggcaatggttggatatgggatctacttgtttgttgagtacaaaagagctgctgatgttgccatgcttttgtcacctgtgggcactgaccaaatacagctcggtcggcccatgctcatggccgcgtctctttcgtctagtattttcgataatcttccaaaagcatggtttatatatttcgttattgga

SEQ ID NO: 6440 - DNA, 426 bp, Gossypium hirsutum
  Clone ID: LIB3120-007-Q1-K1-D10
cccacgcgtccggttagctatagcatacactactagtacccactactagcaatggcttcctcaatgatctcatcggctaccattgccactgcctctccggcacaggctaacatggtcgctcctttcaccggcctcaagtctgcctctgctttcccagtcatcaggaaggccaacaacgacattacttctctcgcaagcaatggcggcagagtgcaatgcatgcaggtgtggcctcctactggaaagaagaagttcgagactctctcatacctccccgatcttacacccgtgcagttggctaaggaagtagattaccttcttcgctcaaaatgggttccttgcttggaattcgaattagaggagggattcgtgcaccgtaaatactcgagcctacccacgtactacgatggacgctactggaccatg

SEQ ID NO: 6441 - DNA, 368 bp, Gossypium hirsutum
  Clone ID: LIB3120-007-Q1-K1-D11
ttggatttgatccacttagacttggtgaggtgccggagaaccttgagaggtacaaggaatctgagttgattcactgcagatgggctatgcttgctgttcctggtatattggtgccagaggcattggggtatggaaactgggtaaaggcacaggaatgggcagccgttcctggtgggcaagccacttacttaggcaaccctgttccatggggaactcttccaacaatcttggtcatcgagttccttgccatcgccttcgtcgagcaccaacgcagcatggagaaagataccgagaaaaagaagtaccccggcggtgctttcgaccccttgggatactccaaggaccctaaaaagtttgaggaatacaaa

SEQ ID NO: 6442 - DNA, 423 bp, Gossypium hirsutum
  Clone ID: LIB3120-007-Q1-K1-D12
ggcatccatcaccatgacaacatttttccttagcaccactaacctcacaaagggggctccaagaattacccagcggagactagtggttgccaatgctgctaagggagctcaagtggagagtgtccagatgagcggtgagaggaaaacagagggcaacaatggcaggagggagatgatgtttgcagctgcagctgctgttatttgctcggttgcgggggttgcaacggcggagcctaaacgtggtagcgcagaggccaagaaggcgtatgctcctgtttgtgttactatgccaactgctaggatctgtcgcaactgaggcagtgccactgcacattgctcgagtgccatgagactatgcttgttatgggcaggggctgaaagaagtaatttaataatgcttggaaatcttcatttttataattg

SEQ ID NO: 6443 - DNA, 315 bp, Gossypium hirsutum
  Clone ID: LIB3120-007-Q1-K1-D2
cccacgcgtccgcccacgcgtccgcccacgcgtccgggctgctgccaagattgggaagatacttgcggaacgcttgctgctcaaagagatccctgccgtttccgtttccttaaagcgagaacagaagtatcatggtaaagtcaaggctgtcatggattctcttacggaaggcaggtgtcaagttgctttaaatttagaacattttcaaaacattgtttacttttctaaatctgggctttttaacgattcattttttgtcctggaattgataggtgactttagttccaaggaagaatacattgggcatttttatgc

SEQ ID NO: 6444 - DNA, 313 bp, Gossypium hirsutum
  Clone ID: LIB3120-007-Q1-K1-D3
cccacgcgtccgcgagctctgtatagattcttctagttccgaccaaaaaaagaattgctcatctttccttcagagaatatttgttttgagtgaaaaaaaaaatgttgggagtattcagcggagcgatagtgtccccgccggacgagctggtggctgccggttgcaggacgccgtcgcctaagataacggcggacgctcttgtgaaacggttcatcgaggcaaacccctccaccgtgtctatgcagatcggagatcatgtccaattcgcttattctcaccgtaacgagtctgctttactttccaggtcattcgc

SEQ ID NO: 6445 - DNA, 439 bp, Gossypium hirsutum
  Clone ID: LIB3120-007-Q1-K1-D4
cagattcccccaaatcaaccaaattcactcgttccatatctccaatctatctctctgttctcttttggtttgttttcttcacttcctgcatcaaacatcttccgctgtctggcataactgaatccttgccgggaaaaatgatatcccggcggcaaccgggtgcagaggacctggtctcctctgacaatcccaatgcttggatttttgatgattatggtttgttagaagacattcctgtccctggtggtgatcttccctcacttgacccttcagccccaatctggtcatctccttcccttacttgctctactcctctcagtgttgaattcactgaatcggttgggaattcagacaatcttaatgaaacaagctcccgaaaacggatgaggtctggatcatccagtgcatctgggtccaaagcttgcagagaaaagatgcg

SEQ ID NO: 6446 - DNA, 243 bp, Gossypium hirsutum
  Clone ID: LIB3120-007-Q1-K1-D7
cggacgcgtggggcatagctgctggtgctgtataggctgttctctgcacaccagggtgaacttttcaaacttcgaaaccaacttatttctgtgattccttaaaaagctatgggccctggatatgttgctcaagaatcatatccactgctatccaaactgttgcctggatatgatcctgatattagggtgtggaacaacaccatgagcctgttatgtgagttttcttccaagcatgcttggcat

SEQ ID NO: 6447 - DNA, 257 bp, Gossypium hirsutum
  Clone ID: LIB3120-007-Q1-K1-D8
ccaaagtgcacatcagggcgaaggatatcgatctggaatctacttgcacgccttgggtaggcgagacactaatcacggtgctatgcagagctcctctttgtttaacatccgggctttaccttgataaaatgcccctgcctgaaagggacctttggacaaccatcctttgggagccccatcttataaggtaataacatgccttgggcccgccgcgaaatgcaaagttgtatctttttccccatgcaatgccttttgtt

SEQ ID NO: 6448 - DNA, 442 bp, Gossypium hirsutum
  Clone ID: LIB3120-007-Q1-K1-D9
aatggggtagctactgaaagggaaaagaagttcaagattttccgggcagaccctgtcgattatcagagcattaccgacgccctgaaaggctgctctggtttgttttacgcctttgagcccccacaagaccaccctgcctatgatgaatatatggtagaagtggaggtacgagcagcacataatatggtagaggcatgcgctcggacggagacaatagacaaggtggtcttcacatcctccgccactgctgttctttggagagacaacaattcccaatcgcttgcttccgatttggatgaacgccattggagcgacgtcaatttctgccgcaaattcaagttatggcacgcgctgtcaaagacggtggcagagaagacagcatgggcgttagcaatggatagggacattaacatggtttcaatcaacggggggttgttgatgg

SEQ ID NO: 6449 - DNA, 172 bp, Gossypium hirsutum
  Clone ID: LIB3120-007-Q1-K1-E1
caagggacaactttctgtactccaatgaaatctgaaccctttattttttatttatggatgggattggcctgccaaaggggaggaatggattatttttttatctacatttatactaaaaacaataaaaaaaaaaaaaatatataaaaataagaaaattataaaaataaaattt

SEQ ID NO: 6450 - DNA, 445 bp, Gossypium hirsutum
  Clone ID: LIB3120-007-Q1-K1-E11
cccacgcgtccgtgttttttggtttatagagatggatcatgcagcagatgctcataggactgatttgatgacaataacacgtttcgtgttgaacgagcaatccaagtatcctgagtctcgtggggatttcaccatcttgcttaatcacatcgttcttggttgcaagtttgtttgctctgctgttaacaaggctggtcttgccaaactcatcggactcgctggggagactaatgttcagggtgaagaacaaaagaaattggatgtgctttcaaatgaagtctttgtcaaggctttagtaagcagtggcagaacatgcatccttgtctcagaagaagatgaagaggcgacttttgtagatccctcaaagcgtgggaagtactgtgttgcttttgatcctctagatggttcctccaacattgactgtggagtttcattggaacaattt

SEQ ID NO: 6451 - DNA, 422 bp, Gossypium hirsutum
  Clone ID: LIB3120-007-Q1-K1-E12
ggccaccagaatcgacggcgattcctcccgaaaaatcatccccgacccgacccgaataaccaatccctcgataactcttcggatcctcaatccttgctccattccaggtttttaaaagtctaagcgcaatggatgatgtaactgatttgactggtgatggaggtgttattaagaagatcgtagcaagagccaaagtgggtgcgctcgccccttccgaggatcttccgatggttgatgttcattatgaaggtaccctagctgaaactggtgaagtttttgatacaacacatgaagataactctgttttctcctttgagcttggaaagggcacggttattcaggcttgggacattgctttaaaaactatgaaggttggtgaagttgcgaaaataacttgcaagccagagtatgcctatggtgct

SEQ ID NO: 6452 - DNA, 294 bp, Gossypium hirsutum
  Clone ID: LIB3120-007-Q1-K1-E4
tcatcatattatccgaacatgcaggaaccagtaatttatcggtgaagtttcatctctgaaggtgtgggattggggatgtgcgaggaattgctcattcggttctgtacttgtagtcatgtatcttaattcattgaagatctcaaaatgattgctgtaggctagctgagattcatggaaggatgtgctttattagcatcgtgacacactaatttggtattctactatgcttattgctgtaggccttttggtgttcatgccatttgaccaaactgcatttgtttaatgcccggggcc

SEQ ID NO: 6453 - DNA, 365 bp, Gossypium hirsutum
  Clone ID: LIB3120-007-Q1-K1-E5
cacaaccactatcactaccatgatggctttttttactgtttctgtagccaaacccaaccgggggaatgatgcaaaagggaagggtgttggttttttattattttttaggcctacacaactcctctactagccttccctttgccaggaaaacctctgatgacttccattcactcgttgctttttagacatctgctctaggaagcaataatggcgggtacaggaaagggatggcataggcaaagcttaaggtgggtataaatgggttttggttggattgtggaggaaccttttttaaggtgctttgattggtcgtaaaggactccccacttgatgtcattggcattaatgtacactggtggtggtaa

SEQ ID NO: 6454 - DNA, 258 bp, Gossypium hirsutum
  Clone ID: LIB3120-007-Q1-K1-E6
gtttcttcttacaagcttatgtgaccggagaaggtccggtggagaacctttcgaagcacctgagcgatccttttggcaacaacttgctcacggtcattgctggaactgctgaaagagctcccaccctctgattttaatatctttgttttctgattttcgccgctacttgttattgcgtttatgcattttgttgtacatcaaacttatcggataattcccgagaactttaatcttgaaggtctcaccctcgaatttact

SEQ ID NO: 6455 - DNA, 419 bp, Gossypium hirsutum
  Clone ID: LIB3120-007-Q1-K1-E7
agctatagcatacactactagtacccactactagcaatggcttcctcaatgatctcatcggctaccattgccactgcctctccggcacaggctaacatggtcgctcctttcaccggcctcaagtctgcctctgctttcccagtcatcaggaaggccaacaacgacattacttctctcgcaagcaatggcggcagagtgcaatgcatgcaggtgtggcctcctactggaaagaagaagttcgagactctctcatacctccccgatcttacacccgtgcagttggctaaggaagtagattaccttcttcgctcaaaatgggttccttgcttggaattcgaattagaggagggattcgtgcaccgtaaatactcgagcctacccacgtactacgatggacgctactggaccatgtggaagct

SEQ ID NO: 6456 - DNA, 424 bp, Gossypium hirsutum
  Clone ID: LIB3120-007-Q1-K1-E8
atcgggctccataggtaggtcattgagagaaaagtataggtagaaaactctcaaaacccctacccgcgaacggtgaatctgggaaaacccactcagctcatttagatccctaccaaatctgcaaaaaacataccatgatttgatcccaaaaacccaccccaaacaaatgggttttggtttttcttcaaaacccttcttccttttcctctcatttcttgttttctttaccaatcttgaactttacccttttgttgaatcagcccctgattacacaactttggtctacaaaggttgtgctaagcaggcttttacagatccagctgggatatacttccaggccttgtctggcttggttcagacctttctttcacaggtcatgaagggaaaggtttacaagaaaaacaccgggtactggccaaaccac

SEQ ID NO: 6457 - DNA, 446 bp, Gossypium hirsutum
  Clone ID: LIB3120-007-Q1-K1-F1
cccacgcgtccgcccacgcgttcgcccacgcgttcgcccacgcgtccgcggccacatatcagaaactgcgaaaattcatttaaaaatggcgacagctgcatcctcttcatcctccatggtggccaccgccgttttgattcctcgttttccggcagcctccgttggaactacccgctgcagtgccttgccgcctctccctcctcgcgtttcgaccgcttccttgtccttttcctcttccgttaagctaatcccagaatccaagaggttttctctactgcagacaaaagcctcagaagagacctctgttgatgctggtgaccttttcgctgacttgaaggaaaagtgggataaagttgaggacaagaccacagttgttctttacggtggtggggcattagttgctgtttggctatcatccattcttattggtgccattaactcggtcc

SEQ ID NO: 6458 - DNA, 429 bp, Gossypium hirsutum
  unsure (1)..(429): unsure at all n locations; Clone ID: LIB3120-007-Q1-K1-F10
gtgggtggatattctttcacttcanaagctctgcatcgatttaatgggttctgctgatcaaagatgtcgtttgtccgaagatctttgccgattatcagtcgttctcaagagctctcctccaatcattcgagtttcaatatcagatacgggcaccggtacgtgcttggaggagtttcaagaccttaagtgcaacagagaaggtattggaacggaaaagtgggatgggttgctttccatcaaaactaccagcattagtgataataagatatatcattatcacttaaatcttagaagaagcgtttctgccagaaggctgactaggctaccttcaattcttaagaatgatgccaagttcaagggcacccgaagtatgtctgtccatatttgagactattgatgccttgctgaacgatatcaaacactactttc

SEQ ID NO: 6459 - DNA, 395 bp, Gossypium hirsutum
  Clone ID: LIB3120-007-Q1-K1-F2
gggagtggtgctggacatactcgtagcaatgggcttcattaaatcgcatcatcactggttagacgtagagcacattgaagaagctcttcaaaacacattagtttgcatagagatggttgttttcactgtagtacagcgccgtgcatacagtgctgcacgatatagtggagaaagtgaagctaagataaagaaaaatgaatgatatttgggatgccccaataaccatatctatgtatgtatgtttattcatggattgtattagaagataagcttagaaatgcttctactctctattttcaatatattaaatagatttaatgagggtctgaaaatttcctttcttttcgttgtttttgtgtgttttgttgtgtgtttttgtgtttttttgttatatt

SEQ ID NO: 6460 - DNA, 421 bp, Gossypium hirsutum
  Clone ID: LIB3120-007-Q1-K1-F3
aagaaataacctcaaagccaaatggatctcctcttcttggagaaggccctcctgggccttttcgtggcggtggtactagccatcaccatctctaagcttcgtggcaagcggttcaagctccctcctggaccattacccgtgccggtgttcggcaactggctccaagtgggtgatgacttgaaccaccgcaacttgacagatttggccaagaaatacggtgacatatttttacttcgaatgggacagcgtaatctagtggtggtgtcttcacctgagctagccaaagaggtgctccactcgcaaggagtggagttcggctcaagaactaagaacgtagtgtttgatatattcacgggtaaaggtcaagacatggttttcacggtgtacggagagcattggaggaaaatgaggcggatcatga

SEQ ID NO: 6461 - DNA, 444 bp, Gossypium hirsutum
  Clone ID: LIB3120-007-Q1-K1-F5
cccacgcgtccgcaggtattgtgctggattccggtgatggtgtttctcacaccgtgccaatctatgaaggatatgcccttccacatgccatcctccgtcttgaccttgcaggtcgtgatctaaccgatgccttgatgaagattcttaccgagagaggttacatgttcaccaccactgctgaacgggaaattgtccgtgacatgaaggagaagcttgcttatgttgccctggactatgagcaggaactggagactgcgaagagcagctcatctgttgagaagaactatgagttgcctgacggacaagtcattactattggagctgagagattccgttgcccggaagtcctcttccagccatctttcatcgggatggaagctgctggaatccatgaaactacctacaactctatcatggagtgtgatgtggatatcaggaaggatc

SEQ ID NO: 6462 - DNA, 203 bp, Gossypium hirsutum
  Clone ID: LIB3120-007-Q1-K1-F7
agaacgcgtgggattcaagccgactagcgcactggcgcccgtcacgctgctattgattagtggagtccgaggattctcttgatgaggggtggggctctaccggaaaaccaaggggtccgtggacttctacgtcccaataacctgctaaggtagaagctgatgattgctagaacatcaagacggacttgcctgagcggattaat

SEQ ID NO: 6463 - DNA, 440 bp, Gossypium hirsutum
  Clone ID: LIB3120-007-Q1-K1-F8
ccaccgcatgcttcttgcaccaccatgcactcacctccgcacccagatcatcatcgactccacccttcacatcccagcgccaagttgcaatcgtcaagtcaaatcaactactggcttgcacatctcagaaacaggcagtccaagaaaatgatgattcgggaagcaacgctgtgatctcccgtaggttggctctcactctgctcatcggtactgcagcggttggctctaaggtttctcctgctgatgctgcctatggtgaagctgcaaatgtatttggaaagccaaaaacaaacacagagttcatcccatacaatggggaagggttcaagctgtcaataccatcaaaatggaacccaagcaaagaggttgagtacccaggtcaagttctgagatacgaggacaactttgactccaccaccaatgttgctgtcctggtcact

SEQ ID NO: 6464 - DNA, 436 bp, Gossypium hirsutum
  unsure (1)..(436): unsure at all n locations; Clone ID: LIB3120-007-Q1-K1-G2
aaacgaaagccctttttcctcccatggccgccaccaacacattgatgagctgtggcatcgccaccgctttcccttcagtgctttcctcttcaaagtccaagttcgccaccgctacgccgttgcctagctttggcgccaatgttggccaccgtgttagcatgtcggctgactggatgcctggtcagcctaggcctccttatcttgatggttcagcacctggtgactttggatttgatccacttagacttggtgaggtgccggagaaccttgagaggtacaaggaatctgagttgattcactgcagatgggctatgcttgctgttcctggtatattggtgccagaggcattggggtatggaaactgngtaaaggcacaagaatgggcagccgttccttgtgggcaagccacttacttaggcaaccctgttccatgggg

SEQ ID NO: 6465 - DNA, 323 bp, Gossypium hirsutum
  Clone ID: LIB3120-007-Q1-K1-G3
ttccaatctatctctcggtcctctttggtttggttttcttcacttcctgcatcaaacatcttccgctgtctggcttaactgaatccttgccgggaaaaatgatatcccggcggcaaccgggtgcagaggacctggtctcctctgacaatcccaatgcttggatttttgatgattatggtttgttagaagacattcctgtccctggtggtgatcttccctcacttgacccttcagccccaatctggtcatctccttcccttacttgctctactcctctcagtgttgaattcactgaatcgtttgggaattcagacaatcttaat

SEQ ID NO: 6466 - DNA, 440 bp, Gossypium hirsutum
  Clone ID: LIB3120-007-Q1-K1-G7
aagctctccccataaacatcaataccccaactgcacctcgataacacccataatcagcatacccatggcaactcaagcaggtcttttcactcccactatcaccacttcaaagtctctggctccatggaacccatcttcaacattttcattagctacccccaagtccatcaacttctccatggctcagagaactagcgttagggctgcagctgcagatgaagctgctgctgccgctgccacaaaggaagctccggtgggtttcacccctccagaattggacccaaacaccccatcacccatcttcggaggaagcactggtggactgctgagaaaagcccaagttgaagaattctatgtcatcacatgggattcacccaaagaacaaatctttgagatgccaactggtggtgcagccatcatgagacaaggacctaacttgc

SEQ ID NO: 6467 - DNA, 371 bp, Gossypium hirsutum
  Clone ID: LIB3120-007-Q1-K1-G9
acaatcagcaagcctggcacaacggccaccagcacctcagccgctgacgcaaggccatctatcaccggccggaaagccggagcaaccgcagctaaagtaagcgccacagccaaggttgcagcctctccagtcccaagggtcagcatcaaggccgccctcaaagacgacggtggtgctgatgcggcaactgcagcaagcgcaatcctagccaacaatgccatggccattgaagtcatgctcggcagagacgaagggggtctggcatacattccgcaaagaaatcagcggaaagccaggggagaagattgaggacaagaacaatgccagattcccacacaatgttgagtacgatgaggacaaaatcccaagcg

SEQ ID NO: 6468 - DNA, 365 bp, Gossypium hirsutum
  Clone ID: LIB3120-007-Q1-K1-H1
gaacaacgccggcttcccgcacaacgtcgtcttcgacgaagacgaggtgccgagcggcgtcgacgccaccaagatctcgcaggagtagtacctcaacgcgccaggcgagacctactccgtcaccctcaccgtgccgggaacctacggcttctactgcgagccgcatcaaggagccggaatggtcggcaagatcaccgtcaactaattaagctagctatcgatcgatatccattcatgtattagctgttgcttcctgctttgtactccgccgatctgtccatctctacatgttctcgtcttcacacaacaacctttggtacgactacgtatatatgcatgctactagctgattgatttttattaaa

SEQ ID NO: 6469 - DNA, 423 bp, Gossypium hirsutum
  Clone ID: LIB3120-007-Q1-K1-H2
gtcggccttgtttgctttgctccaaaataatttcttagaaggaaaaaagaaaaacaaaaatgcagaaatcataaaatcaaaggtgattaaaactctttttttcttttaggattttgattttgattctcaaatcttgttttttcacataaaagaacagaaatcaaatcaatcaaatattgatttggattaataacattaatattagaaaaaaagaaaaaggagaaaagagaagacgaagaagattagagagagatggagggttactgtgtggatgaggcggtgatagctttgaagctgaaagatgcatcgaattggtggcatgacattaacgaaattacgctctggcaggatcggatttttcacattctcgccgctctttacggtctcgtagccgccgttgctcttgtccaattgattccgata

SEQ ID NO: 6470 - DNA, 355 bp, Gossypium hirsutum
  Clone ID: LIB3120-007-Q1-K1-H8
attgccacaggaggctttagcagcagctgaagttcctcaacttccgatatcgcaatcaagcagtacaaacttataccgacctaccaaatattccatggctcttaaaaagcctagaatcgaaaccccggatgaagatgacgagttcttcacagtccctgatctaggttgagttggataacgagactcgtgtgtcagtagttcgaccaaactatagtgtttcatatgttgagtacacttatgcacgtactcatcttatcacgctttactatgttgcctttgtttttaagtatccgacatatgttcaaacattgatatgttgatataatcttttatatacttttcaaatacttaaaat

SEQ ID NO: 6471 - DNA, 432 bp, Gossypium hirsutum
  Clone ID: LIB3120-007-Q1-K1-H9
gagagagatggcttcaaaaagatcggcatcggttgccctcttttttgcactcaacattctcttcttttcacttgtcagtgctaattgttcttgcccttcccccaagccaaaaccaaaccccactccctccccaactcctgctgcggaaggaaagtgccccataaatacccttaaactaggtgtatgtgctgaggtgcttggtttagtcaatgtaactgttgggtcacccccagttcaaccttgctgcacccttatcaaaggccttgctgatcttgaagctgctgtttgcctttgcacagcgatcaaaggcaacattttgggtatcaatcttaatatcccacgttccctcagcttgcttctaaatgtctgctcaaaaaaagttccatccggctttcaatgtccctgatcactcttccaaaatctttcttttct

SEQ ID NO: 6472 - DNA, 314 bp, Gossypium hirsutum
  Clone ID: LIB3120-008-Q1-K1-A1
ggagtttgagaagccagaaaactgggtggcaccctatccaaaatatgaatttggatggtgggatcccttcttgccaactggagttaaagtttgaagtacagcatttttggctatcgtttttttgtttagttggaaccattactataacagatgaaagattaattaatgtggttgtccattttgcatgagttggtgcttcctagagacaagttgaaaattttaatctcggatgttacaactgctaagctaatatcttaactctagcgtgtagacctttatgtgtagaattcttttgatttgattctacctttttc

SEQ ID NO: 6473 - DNA, 411 bp, Gossypium hirsutum
  Clone ID: LIB3120-008-Q1-K1-A10
gttgtattcgagtatgtactaaaattggatacccaacacgatttgatggacctgttttcaggtgaaagagatcgtggtcatcggacacagtgcctgcggtggaatcaaggggctgatgtcattcccgtacgacggaaccacttcaactgatttcatagaagattgggttaaaattggaatgcctgcaaggaagaaggttaatgcaaaaaatcgtggggagcctctggggcttcgatgcaccttttgtgagaaggtaatcatcttaaatttaaaatctctgctattaaataatgctgttaatccagatagggaaataataacaatattaagaggttttaaaaccaagcctgatagtgaaactggtttaattaaataaatcataaaaataaagaaaaagattagaaaatagag

SEQ ID NO: 6474 - DNA, 222 bp, Gossypium hirsutum
  Clone ID: LIB3120-008-Q1-K1-A11
tcgctccacgcgatatgactattcgttcgttcctgtgggttatttctttgtctagggtaaaaaagaaaatggcggatgatgtgctttatttttgcttgcttttaccttgctgctcactgggtgtgttttgggtcctatattttttgttttatccaaacatggggtttcattttatgcttataagaaaatcggctttaaactttttgaagggtattttgaaaa

SEQ ID NO: 6475 - DNA, 391 bp, Gossypium hirsutum
  Clone ID: LIB3120-008-Q1-K1-A2
accacgcgtccgcccacgcgttcgtccacgcgtacggccccggttcggccatttacaggtgaaacttgcaatggccaaaatgtttcaccgatgggtacacatgttaatcaaggacaaaaaccggctccttcgtatcctgtcaagaaaagaggaaggggaagaccgaggactcggtttccatagtaaccccaatcggttagtttcaatcctggaattagtttgtctgaacaataaagatgttaacatggaataagtagaaaaatgtgcttttgaggtttgatgctagcaggagaaaagcttagccaaatggaaaaggcggatgagtcgaattccggcattgtttaacgtgcagaagttgaaagctggcaacatgagaatccgggctgtttga

SEQ ID NO: 6476 - DNA, 428 bp, Gossypium hirsutum
  Clone ID: LIB3120-008-Q1-K1-A3
cccacgcgtccgaattcctatccatcgccttcgttgagcaccaacgaagcatggagaaggacaccgagaagaagaagtaccccggcggcgctttcgaccccttgggattctccaaggaccccaaaaagttcgaagaatacaaggtcaaagagatcaagaacggccgtctagcattgttggcatttgtgggattctgtgttcacaatcagcttacccaggcactggaccattggagaatttggctacacatttggctgatccatggcacaacaacattggagatgttatcattcctagatcactttacccttagatgatgatagattgatggaatattttaaatgtaatgtccgttcttgcattgcgtaaaacatatgtaatgaaatctaatttgaaggctttcgtaatgggaattataatttttttta

SEQ ID NO: 6477 - DNA, 383 bp, Gossypium hirsutum
  Clone ID: LIB3120-008-Q1-K1-A4
cccacgcgtccgcaagcaatggcatcgatgactggtttacgtggctcttcacaagctgcgttggaaggtagtctccaactcagcggccaaactcggttgaacgttgctagcaccaacaggttggctgtggctagacccggttttaccgttagagctcaacaggtccctgccgagcctgaaactggacgcagagctgtgctgggtcttgttgctgctggtttggctactggctcctttgttcaagctgtgcttgctgatgcacgaagcatcaaggttggcccgcctacaccgaccttcggtggattgcccggaactttgaattccgatgagccaagagaccttgatctgccgtacaaagatcggttttttctccaaccattgac

SEQ ID NO: 6478 - DNA, 409 bp, Gossypium hirsutum
  Clone ID: LIB3120-008-Q1-K1-A5
cggacgcgtgggggaattttagtcttcaggggaacgatcgaacgatgtcgtacctactaccgcacctgcactcaggatgggccgtagatcaggccatcttggcagaggaagagcgtctcgtcgtcatccgattcggccacgactgggacgaaacttgcatgcagatggatgaggtgcttgcttctgtcgctgaaacaataaagaactttgctgtgatttatcttgtagacataacagaagtacctgattttaacacgatgtatgagctttacgatccatcgacagtgatgttctttttcagaaacaagcacattatgattgatcttggcactggcaataacaacaagattaactgggcactcaaggacaaacaggagttcatagacatcattgagactgtataccgggg

SEQ ID NO: 6479 - DNA, 400 bp, Gossypium hirsutum
  Clone ID: LIB3120-008-Q1-K1-A6
cccacgcgtccgcccacgcgtccgcccacgcgtccgcccacgcgtccgcccacgcgtccgcccacgcgtccggtttttgttttttgttttttcactttcacaccacattcttcagtgcaggcaccatggcagcttcctcagctttgttcacccctatcttctccaccgtccaaaagaagaatggcattgtcacccccttcagcatctcattccacggccttagacccctaagcaagagcaaatcttcatccaacgccatctccttctcaagaaactcagctgctagtgctaggcttgcaatcaaagcagagctgagcacccaagttgtgataagcgtcagcactgctctctcccttttcttgggtagatttgtgttcttcaactttcaaagagagaacgt

SEQ ID NO: 6480 - DNA, 464 bp, Gossypium hirsutum
  Clone ID: LIB3120-008-Q1-K1-A7
cttcgaaattcctttggggggcgcgtgcgcaacgcgttcaaccactcattttcttatttttccagccatggcggcagaatgcaatgcatgcacgtgtggcctcctactggaaagaagaaattcgagactctctcatacctccccgatcttacacccgtgcagttggctaaagaagtagattaccttcttcgctcaaaatgggttccttgcttggaattcgaattagaggagggattcgtgcaccgtaaatactcgagcctacccacgtactacgatggacgctactggaccatgtggaagcttgcctatgttcgggtgcaccgactcggctcaagtattgaaagagctttgggaatgcaagaaggaataccccaatgcattcattagaatcattggcttcgacaaacggcggtaagtgcagtgcattagtttcattgcctacaaaccttcagcttctaagcttt

SEQ ID NO: 6481 - DNA, 336 bp, Gossypium hirsutum
  Clone ID: LIB3120-008-Q1-K1-A8
ctctcaccatcaccatcctgatccaaaggtaacaaaaaccagcaaacacatgctcgatgcgccacaccgcaaaggcgactcactctctatgcttttatcgaagaaaggggtgaaagcatatgagccatcatgagcgtttatgctgctacgggcattatgatgagaaagtgcagaacaaccggcgacactgcagctatcgcactcgctgtcgtaggcgttcaaactcgagccgtgtcaacaacctgaagagttcacaacaaacgcacaagattaatcgacggccacaaagaccaggaacgtacaaaagggacttcttgtacgacctcacctacatct

SEQ ID NO: 6482 - DNA, 428 bp, Gossypium hirsutum
  Clone ID: LIB3120-008-Q1-K1-A9
gctagagaaggcatcgtttcgttgggaggcccttacattcctctcaaaactggaagaagagacggtagaaggagcagagcacatgttgtggaggagtatcttccggaccacaatgagaccatctctggcgttctcgacaggtttgccgccatgggtattgacacccctggagtcgttgccctcctaggagctcacagtgtcggcagaactcactgtgtgaagctggtgcatcggttgtacccagaggttgaccctgccctcagccccgaccatgttccacacatgctccataaatgccctgatcaaatcccagaccccaaggccgtccagtatgtgagaaacgatcgtgggacacccatggttttggacaacaactactacaggaacatactggacaacaagggtttgttgattgtggatcaccaact

SEQ ID NO: 6483 - DNA, 414 bp, Gossypium hirsutum
  unsure (1)..(414): unsure at all n locations; Clone ID: LIB3120-008-Q1-K1-B10
gttggaacatttaatgctgataccgggtttaaagccgattatttaaacgagctggaaagaatgctagaaaaggctttatccaatgcaatgttgaaggctagacctaatattgaatcgaggattaggttactaaaaagggattggtcaatcgtgtatgacatgcttaatgaccaaaacaatagcggttttggttgggacgagcataggcagctcgttgttgttgaagatgcggtttgggactcttatttaaatagtcataaagatgccggtcaattcagacatcgcagtttcccttactacaacaaacttactgccatatacgtaagagatcaagcgactgggaaagatgctcaaacagccactgatgttattgaagaaataaatgttangatgtacatactgcagatattaatg

SEQ ID NO: 6484 - DNA, 392 bp, Gossypium hirsutum
  Clone ID: LIB3120-008-Q1-K1-B11
caaaacccctagccagccacttccccgccgcctctccgaaccatgggccgagtccgtaccaagacggtaaagaaatcctctcgccatgtgatcgagaggtactactctcgcatgacgcttgatttccacaccaacaagaagatcatcgaagaagtggctatcatcccttccaagcgtctccgcaacaagatcgccggcttttccacccatctcatgaagcggatccagaagggtcccgttcgtggcatctctttgaagctccaagaagaagagcgtgaacgtcgcatggatttcgtccccgacgaatccgccatcaaagttgatcaaatcgaaatcgataaggaaactctcgatatgctttccgttctcgggatggctgatattccccggct

SEQ ID NO: 6485 - DNA, 396 bp, Gossypium hirsutum
  Clone ID: LIB3120-008-Q1-K1-B12
gtttgtttcaacagctttgagctgttcaaagggtgtttcattggtggtgggcttattttcattgttgatcccttccatggcatttacttcaagcaaggtcccaaatgggtcagttgtgactaagactattggtaacactaaccatcgtggtaaaatctatcctataactcgagggtttgatcatcggagactgagaaatacaggtcttttgatggcaaagttgaggtttccaaacgaacgtttgggaaacatatatgaaaaacctggtggtttcggtgtcactcgaggatcttccctgatatgcttgtcctcaagaactcaaaagtctgaaaccgattgctcggatgcatctagtgcacagattgccgaaggcgaagttggtcattcaagcatgca

SEQ ID NO: 6486 - DNA, 405 bp, Gossypium hirsutum
  unsure (1)..(405): unsure at all n locations; Clone ID: LIB3120-008-Q1-K1-B2
gcatacactactagtacccactactagcaatggcttcctcaatgatctcatcggctaccattgccactgcctctccggcacaggctaacatggtcgctcctttcaccggcctcaagtctgcctctgctttcccagtcatcaggaaggccaacaacgacattacttctctcgcaagcaatggcggcagagtgcaatgcatgcaggtgtggcctcctactggaaagaagaagttcgagactctctcatacctccccgatcttacacccgtgcagttggctaaggaagtagattaccttcttcgctcaaaatgggttccttgcttggaattcgaattagaggagggattcgtgcaccgtanatactcgagcctacccacgtactacgatggacgctactggaccatgt

SEQ ID NO: 6487 - DNA, 365 bp, Gossypium hirsutum
  Clone ID: LIB3120-008-Q1-K1-B3
ctttgctagaccatgtgcatgtgtgttatccgatctatggatgtgttgaaaagtaagatcttgaaaataagatttcttgttctgaatatcttttataatggcactgatcactgatttgtctgttgaagtcgccttgctcttttttattactgtttttgagtctcccatgattctaattgactgagatcataaagcaatcccctttcatgccttctaaacatgcatatgcctctgctgcaaatggtgagggaacatttcttgtgataaccatttttaacaccaagagattttcatcatattccaacctactaaaccagtcgctgatttaaaaagtactactattcaatgcttcatcaaatttgatc

SEQ ID NO: 6488 - DNA, 429 bp, Gossypium hirsutum
  unsure (1)..(429): unsure at all n locations; Clone ID: LIB3120-008-Q1-K1-B4
cggacgcgtgggcttagtttagcgttccaagtaactctccctcccactcttacctttcaagcccgtaaagtcatgagcttggttctggaacctccgcctccacctctatgcaaatccaaaaccggtgctccgctcaaacgctgcttcacctccatccgcaccgcgttatctccgccaaaccatcgattcagagcctctcgttttccacttcatccgacttccagctctagaccaactgttactgtggttctaaagacggagaaagaaaaaaatgcggtgacggagcaaaaagacccgccggtaaggattgtggcagtggtcggccaaggaagcgtcagcccattaaaatgcaccccctgggaggaggttatgatgcacaccgcanaaagattgaaatgggtggatgaaggatatgaaatggttgttttc

SEQ ID NO: 6489 - DNA, 328 bp, Gossypium hirsutum
  Clone ID: LIB3120-008-Q1-K1-B6
cggacgcgtgggcggacgcgtgggtaaatggcatcatcccttctctctagaactcttttgggtcatcgcttaattcgattctcctcgtctctccctcacaaccccttgattttctctaatcttttcaataagagagagttctgtgtacaggctgggtcttaccataccacatataaggcctctggtcagccttctcgtttaatggcttctgcagcaattgagataagaagtaatttttcgacacaatctctttccaccaatgatccggttgtttctgttgattggcttcatgctaatttaaaggagcctgatttgaaagtattggatg

SEQ ID NO: 6490 - DNA, 409 bp, Gossypium hirsutum
  Clone ID: LIB3120-008-Q1-K1-B7
cccacgcgtccggtggccagactagggtttatcaaaaaaaacgacgaaatggatgattggttgaacgagaaacacttcccgtcgaggatccgagtttgggtcggaccggaagtcgggtcaacgtacgtgtccgggttaaccttgggtcggtccacgaacaatggtgaaaacgaagtcgaaacacaaaggatccttaaagggagattcgggaaatattcaaaggattccttccatgttaaagcaagagcaagggtttccatgaagaacaagatgaaaaactggaggtgggatcaagacgcggaagggaacgccgtggtgttcgacgcggtgctttgcgacaacgtgacgggccacgaaatcgcaacttggaaatcgttgaacaaaatagcaacggcagcagccatggttt

SEQ ID NO: 6491 - DNA, 415 bp, Gossypium hirsutum
  Clone ID: LIB3120-008-Q1-K1-B8
ggaaaacccaaactccatctctggtttcgcaaacaaagtcattggctctctccctatagtcggccttgtcgctaggatttttagtgatgaaggcggtgttggtggggatatcattgattttgctgagtttagaagaagggtgggcaagaaatgtactgttactgattctagagccttttacgagttccaagaaaggagaggccggggaggggatcctttgtatgttctgctatcatgttggctagcagctgtgggtgctggtcttcttaaatctgaggagatattggagggggtggcaaggcttcggatttccaatgatatcgaattcgaagagcagaattttattgcaatgatgaatgaagcaagagagaggcgagctaagctgaatgcggatgccccaactcttcccatggag

SEQ ID NO: 6492 - DNA, 329 bp, Gossypium hirsutum
  Clone ID: LIB3120-008-Q1-K1-B9
ggtttagacttgtagggtgaagagagcagaaaaaaagagtcaatggcttccagttcagctgcttcaatggctctgcccttagctggagctactcaaaacaggatgccaagttctgaggcattctttaagccactcccggtaaagccatggagatcaatgggcgctgttaaaagacccaacggacggctccaagtcaaggctgcttcttcttcgttcaaggaaaaggtggtgacagggttgacagcagcggcgctgacgacatcgatgatgatcccagaggtggctcaagcagctgatggagtcaccccatctctcaagaacttcttgct

SEQ ID NO: 6493 - DNA, 431 bp, Gossypium hirsutum
  unsure (1)..(431): unsure at all n locations; Clone ID: LIB3120-008-Q1-K1-C1
cccacgcgtccggacatggcagagacattgtgtcagaagcgtgctttggaagcattcaggttagatcctgaaaaatggggagtaaatgtgcagcccctttctggttctccttccaattttcaagtttacactgcactcttaaagcctcatgacagaattatggcacttgatcttccccatggtggccatctctctcatggttatcagacggacaccaaaaagatatctgctgtgtccatattttttgagacaatgccatatcggttgaatgaaaacactggctatatcgactatgatcagttggagaagagtgcaactcttttcangccaaaattaatagttgctggtgccagtgcttatgcacgtctgtatgattatgcacgcattcgaaaggtttgtgacaagcagaaagcaataatgttggcagacat

SEQ ID NO: 6494 - DNA, 293 bp, Gossypium hirsutum
  Clone ID: LIB3120-008-Q1-K1-C11
gagagataagagaaagcactgaaaacgcaaaaccatggcctctgcttctctgctcaagacttcaccagttttagacaagtctgagtgggttaagggtcacacccttcgccaaccttccacttctgcggtgaggtgccaccctgttgcaccctctggactaactgtgcgtgcaagctcatatgccgatgagcttgtcaagactgctaaagctattgcttctcctggccgtgaaattttggccatggatgagtccaacgctacctgcggtaaacgtttggtctcaatcgggcttg

SEQ ID NO: 6495 - DNA, 422 bp, Gossypium hirsutum
  Clone ID: LIB3120-008-Q1-K1-C12
cccacgcgtccgcccacgcgtccggtcgcccttgctatcacctgcaaataactctccctcccttcgtccgaatttctctgaaaaaaatctcaaattcccttatttgggttgatatatagtattatatatatatatttacaagaatggtagcttcggctatttcagcttctttcaatctctctctctgtactcaatccagacccacttctatttcatccctttctcccagaaactcgacgaagttgatagtctctgcattgccatccccttatggagactcttctacaatggggttatctagtagaactgctgggctacctatgaagatcaacaagaagggcttacttgaatccaatccaagctacgatgcaatacaagctaaaacggggaatccacctgtgatgccagcagtaatgacttca

SEQ ID NO: 6496 - DNA, 430 bp, Gossypium hirsutum
  unsure (1)..(430): unsure at all n locations; Clone ID: LIB3120-008-Q1-K1-C2
tttagctatagcatacactactagtacccactactagcaatggctttctcaatgatctgatcggctaccattgccactgcctctgcggcacacgctaacatggacgctcctttcaccggccttaagtctggctctgcttttccagtcaccaggaaggccaacaacgacattacttatctcgcaagcaatggcggcagaatgcaatgcatgcaggtgtggcctcctactggaaagaagaaggtcgagactatgtcataccttctcgatcttacacccgtgcagatggctaaggaagtggattaccttcttcgctcaaaatgggtttcttgcttggaattcggattagaggacggattcgtgcaccgganatactcgagcctacccacgtactacgatggacgctactggaccatgtggaagctgactatgt

SEQ ID NO: 6497 - DNA, 409 bp, Gossypium hirsutum
  Clone ID: LIB3120-008-Q1-K1-C3
attgtaatctggtttgggaactccgagtagtgggatgggaagtcaattacggagccgaattcgtgccgaccgccgaagatgggtataccgtgatcgtatcgaaaacaaggaaagtttcttcggccgatgaaaccgtgatctccgatagcttcaagaccggtgagcctggaaaggttgttctcaccattgataatcaaacatcaaagaagaagaaactcctttaccggtccaagaccaagccttattctgattgaagctttgaaatgatcaatggggttggattttgttttcttctttatttggaaaaattatttttataaaatttagaatctgttggggatgtaatttgtacttgatatatatattttttaatcaggtaaattgggattgtggttttttatttttgatt

SEQ ID NO: 6498 - DNA, 428 bp, Gossypium hirsutum
  Clone ID: LIB3120-008-Q1-K1-C4
catatgcttgtggctagccataaaccatgtaggattttgccggcaagtatgcagaggggttgatcaagaacgccaactacatcgccgcgccaagcaaaggtattttggcggcagacgagaacacatgctccatcgggaagcgtctctcgtgcatgaacgtcgagaacatcgagttcaatcgccaagccctacgcgagctccttttcacctctgccaacgcattatcctgcctctcccgtgtcattcttttcgaggaaacactttaccagaaaacatctgacgggaaacccttcggtgaaatgctcgaagagaacaatgtcatttcaggtatcaaggtcgataatggcaccgctgagatagccggcaccaatggccagaccaccactcaagggttcgactccttgggtgcgcgttgacagcaatactat

SEQ ID NO: 6499 - DNA, 218 bp, Gossypium hirsutum
  Clone ID: LIB3120-008-Q1-K1-C5
cccacgcgtccgcaagcctccaggcttctaagctttttataaactttgtctctccatttgtttgaatttgtactcagaaaaaccatgttctttacttttgtttttctctttctttgagttattggcctttgtttctcgatttctgggttttaatcctttttggattttcattggaagaaaggctgagaactaatgaataaaagttggttttcttcccg

SEQ ID NO: 6500 - DNA, 430 bp, Gossypium hirsutum
  Clone ID: LIB3120-008-Q1-K1-C6
cccacgcgtccgcccacgcgtccgaaacatgtcggtagcattatcctcttctcatcaaactttcatagccaatgctttctcatttaatcgaaaacccaaagcaaagcttcccaattctcctactttcattacttgcaggttccactcagacgaccacgacgattcctcctggagaaatgagaaacagttagcaaagctagcaatggtgacattggcagccggggtattgactctgggttcggtgggtgacgcatcaaccgccaaatctggtggtagagttggcggtcaagcgttccggtcagcggctcctcgctcagcaccaagagccaacaacaattccaggaccaacatttacattaatccgcgggtcgccccacctctagtcggaggctacggatacggttacggcgtgccgttctatggtgggtgg

SEQ ID NO: 6501 - DNA, 397 bp, Gossypium hirsutum
  Clone ID: LIB3120-008-Q1-K1-C7
ctttttcttgtggtctccaaagcatctctgttatatcggttattttctctgaagaactgacgaaaaaaatccgaatagattaaaacttaagaaagatcaaaagatgttcggaagagcacctaagaagagtaataacaccaggtactatgagattctgggtgtttcgaagaacgcttcccaggatgatttgaagaaagcttataaaaaagccgccattaaaaaccatccagacaaaggcggtgatcctgaaaaatttaaagagttggctcaagcttatgaggtattgagcgatcctgagaaacgtgagatatatgatcagtatggtgaggatgcactcaaggaaggaatgggtggtgccggtgctcatgatccgtttgacatcttctcctccttcttt

SEQ ID NO: 6502 - DNA, 397 bp, Gossypium hirsutum
  Clone ID: LIB3120-008-Q1-K1-C8
cccacgcgtccgcaaagattctctcaaaacagtgagggagtagtagttcgggttatcgacgacgttttttttcaacacgaaaaaaaatggattacttttatggaccagggaggaaccatctcttcgttccgggtccggttaacataccggaacccgttattcgagccatgaaccggaataacgaggattaccgttccccggctattccggcaatgacaaaaacccttctcgaagatgttaagaagatattcaagactacgaccgggactccttttatgatcccaacaacaggaaccggcgcatgggagagtgcacttactaatacgttatcccccggtgaccgaatcgtatcgttcctcattggacaattcagtcttctttggatcgatcaacaaca

SEQ ID NO: 6503 - DNA, 223 bp, Gossypium hirsutum
  Clone ID: LIB3120-008-Q1-K1-C9
ggtttagacttgtagggtgaagagagcagaaaaaaagagtcaatggcttgcggttcaggtgctttaatggctctgcccttagctggagctactcaaaacaggatgccaagttctgaggcattttttaagccacttccggtaaagccatggagatcaatgggcgctgtttaaagacctaacggacggttccaagttaaggctgttttttttttcttcaaggaaa

SEQ ID NO: 6504 - DNA, 403 bp, Gossypium hirsutum
  Clone ID: LIB3120-008-Q1-K1-D1
gtccgcacttcccttccctttctcgttgttcactcaaaagaaaagaactctcactttcttttttcaaccatcaaattctcatttctcaccaatttttttctcatccgaaatggagagccagaaaacattaaacgcagaactcgaaaatctatcaccatgcggcagtggaaaaaggagtacaagcagccattcaagttcacccgagttcgagttctggatggtccgaaacccgccttttcccgaacccgacctcatctctgccgatgaactattcgttaatggcgttctccgtcctctccatctcttacccaacaaacaacccgaagagaacccacaaatagactcaaataaacccgcatcacaacctcctatacccgaccctgaccctattataacatcggat

SEQ ID NO: 6505 - DNA, 425 bp, Gossypium hirsutum
  unsure (1)..(425): unsure at all n locations; Clone ID: LIB3120-008-Q1-K1-D10
ctgtcatctgtccgtctctctgttttactccacaaccactatcactaccattatggcttcggctactgtttctgtagccaaacccaaccttcagattcaggcaaaaggaaagggtgttggttttgcagatttctcangcctacacaactcctctactagccttccctttgctaggaaaacctctgatgacttccattcactcgttgcttttcagacatctgctctaggaagcaataatggcgggtacaggaaagggatggcagaggcaaagctaaaggtggctataaatgggtttggtaggattggcaggaatttcttaagatgctggcatggccgtaaggactccccacttgatgtcattgccatcaatgacactggtggtgttaagcaggcttctcaccttctcaaatatgattccacccttg

SEQ ID NO: 6506 - DNA, 382 bp, Gossypium hirsutum
  Clone ID: LIB3120-008-Q1-K1-D12
gctaaaggttatgtgcgagcacaagaaccggataaagccgaagaacttctaacaatcatgattgaatcagaagcatcccctaatgttgtgatctttactaccgttatcagtggctggtgcagtgccggtagaatggatcaggcaattaagattttctaccaaatgtgtgaatatggagtatctcccaatttgaaaacctttgagaccttaatatgtggatatagggaagccaaacaaccatggaaagcagaagaacttcttcaagtaatgaaagagtttgaggttcggcccaagaaatcaaccatatttcttatcgccgaagcttggcgtgcctctggattgtcaaaagaagcaacagaattctgggttctggtcatagcaa

SEQ ID NO: 6507 - DNA, 396 bp, Gossypium hirsutum
  Clone ID: LIB3120-008-Q1-K1-D2
accacgcgtccggtttgaccctggtgcagtacctacttttaagttgtctgatattaaagctgcaataccaaaacattgttgggttaaagatccatggagatctatgagttatgttgtgagagatgttgttgttgagttaggattggctgctgatgctgcttatttcaataactgggttgtttggccactttattggattgctcaaggaaccatgttttgggcactttttgttcttggtcatgactgtggacatggtagttttttcaataatccagctttgaatagtgttgcaggtcatattcttcattcttcaatccttgttccataccatggatggagaattagccatagaactcatcaccaaaatcacgggcatgtcgaaaatgacgagtcatg

SEQ ID NO: 6508 - DNA, 428 bp, Gossypium hirsutum
  Clone ID: LIB3120-008-Q1-K1-D3
atttagatctcaaccactcaaatcactgaaaaaacaacccagcaaaatgtacggattcgaagctatgacctgcaacatccacggcgggtacctggaagcgatcgtgagaggtcaccgggccggtctcttaaccgccgtcgattacaacaatctttgccaatgcgagacccttgacgatatcaagatgcacctattcgccaccgaatacggtacttacctccaaaatgaaccttcaccattgcatacgactactattgcggagaaatgcactcttaaactcgttgatgagtataagcatatgctatgccaggctaccgaaccattgtccacctgcttagagtatatcacatattgtcacatgatagacaatgttgacttgatgttactggaaccttgcatgagagaaatgttcaagagcttttggagaa

SEQ ID NO: 6509 - DNA, 383 bp, Gossypium hirsutum
  unsure (1)..(383): unsure at all n locations; Clone ID: LIB3120-008-Q1-K1-D4
caacttttacccaaatctgtaaaagctgacatctccagcagcaaagagagttcttctctactttctcgacagtatcaatggcagaagtaacaaagcgatatgcagtggttactggtgcaaacaagggaatcggattggaaatatgtaagcagatggcttcaaaaggaaccatggttgttttaacagctagagatgagaagaggggtcttgaagctgttgataagctgaaagatcttggcctgtctgataatgtagtttttcatcagcttgatgttgcagaccctgctagtgttgcttctttggtggatttcatcaaaacacaattcggaaagcttgatatcttggtgaacaatgcanggattggtggcgtcaaaagtgatctt

SEQ ID NO: 6510 - DNA, 274 bp, Gossypium hirsutum
  Clone ID: LIB3120-008-Q1-K1-D5
aatataatcctcacaagcatgttcagtgtaagcttcagaatgagcagaaagggaggccgttttccctgaaggaatgtgcaatctccatcattttggcagctgagttaataactggaatcccatcacttgatgcatatgcagctaatcctccattggcagatttatctggtttaatctctgggcctgcaattaaagaccctggagctttgttgagatatgcattgccaattaacaataaagctggtagagaagggcaaaaaccacttggagatat

SEQ ID NO: 6511 - DNA, 373 bp, Gossypium hirsutum
  unsure (1)..(373): unsure at all n locations; Clone ID: LIB3120-008-Q1-K1-D6
agagcttctttctagctatatccttatcagctttcaaagatggcaggaatcgcctttggtcgctttgatgattccttcagtttggggactgtcaaggcctaccttgctgagtttatctcaactttggtgtttgttttcgccggcgttggctctgccattgcttacaacaagttgacaactgatgcagccctagatcccgatgggctagtcgccattgctgtttgccatggatttgctctctttgttgcagtggctatcggtgccaacatctcangtggccatgtcaaccctgcagtcacttttgggttagctcttggtggccaaatcaccatactaactggcatcttttactggattgcccaactttcttgat

SEQ ID NO: 6512 - DNA, 322 bp, Gossypium hirsutum
  Clone ID: LIB3120-008-Q1-K1-D7
cggtggggccacgcgtacggtccgtacttcccttccctttctcgttcgtcactcaaaagaaacgtactctcactttggtgtttcaacgatcacacgctcatttctcaccaattttcttctcatccaaaatggagtgccagcactcatttttcgcaaaactagaatatctatcaccatgctgctggggaaaaaggagtacaagcagccgttctagttcacccgacttcaacttttggatggttcgaaacccgccttttcccgaacccgacctcatatttgccgatgaactattcaattctcaactttaatagttgtagaagct

SEQ ID NO: 6513 - DNA, 376 bp, Gossypium hirsutum
  Clone ID: LIB3120-008-Q1-K1-D8
cttgaaaggccattattttattgccacttatcatcccttccaaccagactatcaagggtggctctaaaaaattgtttccagttgacctcagtttgcaacaccagagctagtgtgcttcaaagctaccatcatcatcatgtttcttctgttgacaagatccatttccagacatttaaagggttgaaattgaataaacccaatttatcattcactgctggtagatgccaaaaatccaggcttatatgcaaagccagtgaggctgttgctcaagttgaagtggtgacagaagcagactgggaagagcttgtggttggcagtaagacaccagttttagtggatttttgggcaccatggtgcggaccctgtcgggtgattg

SEQ ID NO: 6514 - DNA, 422 bp, Gossypium hirsutum
  Clone ID: LIB3120-008-Q1-K1-D9
cccacgcgtccgcacaaactggtgctatgagaaaagttgctacttattttgctgaagctttagctcgaagaatttatagaattttcccaccagattcacttgatccatcatataatgataagttacaaattcccttctatgaaacttgtccttatttgaaatttgctcattttacagccaatcaagccatattggaagctttttcaatggctagtagagttcatgttattgattttgggctaaaacaaggtatgcaatggccagctttaatgcaagcacttgcattaagacccggtggaccaccggcgtttcgattgaccggaattggaccgcctcaaccggataatactgatgcgttgcaacaagtggggtggaagctagctcaattggccgaacgcatcgggatcgaattcgagtttcgg

SEQ ID NO: 6515 - DNA, 315 bp, Gossypium hirsutum
  Clone ID: LIB3120-008-Q1-K1-E1
tgaaaacatttcattcgttcatttatatagctagccatgaaatcgtgtttaaagtttggttgacgttgcgtttaaaaccctgatgtgtccacgacagaagagatggtggtgacagctcctgggggggaggaaacaaggtcttttatggctcctaaaatggtggcgctgtagatgaagaagaagagggtaaaggtggggacgccattctctacaactgctgagtgagaaaccttcattgtatgtaatctcagacgataacgtcttggcggagaatagagagaaaacaacgcctgaagcttcaacaaccccggctga

SEQ ID NO: 6516 - DNA, 425 bp, Gossypium hirsutum
  unsure (1)..(425): unsure at all n locations; Clone ID: LIB3120-008-Q1-K1-E10
cgctggtgctatttgacctcattcacaatgcctcgccgtagctctggaaggtctgcttctcgtcctgcttctgctcgcagccctccacctcaaccagctcatcatgctcctcctccagctcctgctcagagtggaagtggtggatccttgctcggaggcataggctctaccatagctcanggcatggcttttggtactggaagtgctgtagctcacagggctgtggatgctgtgatgggtcctcgtactattcaacatgaaaccgtggtttccgaggctgcagctgcccctgcaccagcaactacttccaatagtttagctggcactgattcatgcagcatccactacaaggcattccaggattgcctgaacagctatggaagcgaactcaacaagtgtcagttctacatggatatgttgactga

SEQ ID NO: 6517 - DNA, 338 bp, Gossypium hirsutum
  Clone ID: LIB3120-008-Q1-K1-E2
cccacgcgtccgatctaaaccacttgatttctgctactatgagcggcgtaacatgctgcctaaggtttcccggacagctgaactctgacctccgaaaggtggctgcgaacctgatcccgatcccacgtcttcacttctttatggttggatgtgcaccacttacatatcgagggtctcagtagtacggttctctaactgtcccagagctgactcaacacatgtgggaagctaagaacatgatatgtgctgctgacccttggcatgatcactacctgacagtatcagacatgttccgaggcaagatgagcaccaaagagggtgatgaacagatgatgaat

SEQ ID NO: 6518 - DNA, 416 bp, Gossypium hirsutum
  unsure (1)..(416): unsure at all n locations; Clone ID: LIB3120-008-Q1-K1-E3
tgaattttgtgaaagacgcttgtattagctttgctcgtgaccgtttcgatcttttcaaattgttatctactgatgatattgaaacggttgtggggagtggatgtcctaatgttttacgaaaatccgttaattcagctaaaaggttgagagcctatgttcatctcgacgaangggatgtttgtggtgcttgcaatctgcgtggttcttgcgatagagcttatgtgatactaaaggaatctgaagcagctgctcgtactgtggacatcgngcgtatattattatcttatgcccttgatccccttggtatttcggagagagagaaacctactggtagagagcatattgatgcatctgcaaggaatctactttcagacttgacaaaattgagtgagacgtcatgtgatgctgaaattcct

SEQ ID NO: 6519 - DNA, 387 bp, Gossypium hirsutum
  Clone ID: LIB3120-008-Q1-K1-E5
cccacgcgtccgcccacgcgtccgctcccgagtcgattcaaacacaaatgatgtggtttgacaagtatttggagagtgaaggttgtaaagatccagaatcggatcagtgcaaagaagcgtttgatgatgctctgttttgggttggtgaaattggcgtcaatgattatgcatatactattggatcaactgtgtcaggcgacaccattcgaaagcttgccataaatacttttactgagtttttacagggattgctgaagaaaggtgcaaaatacgtggtcgttgaagcactgccgacgacaggttgtttaccgttggcgatgacattggctccttcagacgacagagatgacatagggtgcgtgaaaagcgtgaacaaccaaagcaacg

SEQ ID NO: 6520 - DNA, 290 bp, Gossypium hirsutum
  Clone ID: LIB3120-008-Q1-K1-E7
cagaaaggtaaagcgctaaggagaagaggaagaagagatggcagtgagcgcaacggtgatcggagcacttctgggactgggcacccaaatgtactccaacgctctccgcaagctcccttatatgcgacatccgtgggagcacctgttggggatgggtctgggagccgtgttcgttaaccagcttgtgaattgggacgctcagcttcaacgggaccttgacaatatgctcgaaaaggccaaagctggcaacgagcgccgctactttgatggagatgatgattaatgctttc

SEQ ID NO: 6521 - DNA, 368 bp, Gossypium hirsutum
  Clone ID: LIB3120-008-Q1-K1-E8
gtgagactcttttgtataactgtagcatatagtactagtaagcagtaatagcaatggcgctcctccatgatctcatcggcaaccattgccaccgtgaactgctcctccccggcacaggccaacatggtggcccccttcaccggcctcaagtctgcctctgctttcccagtcactaggaaggccaacaacgacatcacttctcttgcaagcaatggtgggagagtgcaatgcatgcaggtgtggcctcctcttgggaagaagaagttcgagacactctcatacctccccgatcttacacccgtacagttggctaaggaagtagattaccttcttcgctctaaatggattccttgcttggaattcgaatt

SEQ ID NO: 6522 - DNA, 355 bp, Gossypium hirsutum
  Clone ID: LIB3120-008-Q1-K1-E9
cttgcagggtgaagagagcaagcaaaaaggaaagaatcaatggcatccacttcagctgcgttcaatggctctgcccttatctggagctacccaaaacagggtgccaagctctgaggcattctttaagccacttccggtgaagccatggagggcaatgggcggtgttaaaagacccaacggaaggcttcaagtcaaggctggtgtttcttcgttcaaggaaaaggcggtgacggggttgacagcggcagcactgacgacatcgatgatgatgccacagatggctcaagcggctgatggagtcaccccatctctcaagaacttcttgctcaacatagcggccggtggtgtggttctg

SEQ ID NO: 6523 - DNA, 329 bp, Gossypium hirsutum
  Clone ID: LIB3120-008-Q1-K1-F1
aaacaatggttgatgcacaaaaacttgtgccccatttgtaaaacaacgggtctgaataaatgagatgaaccgtttggtttttaaggctgattagttcttgccttcaggtctgacatccaaaggttgcggcttggcatttttctttcataactcgcacttataaagcaatgttcttggtggatgatgacacaaatgtttgaagcactgggaacatgaaactacatatcctgcatctttagttcttaatcattgcggtattagagatttctttttttatgtatggattctcagcccattggcgacataaattattgaatctctctttacat

SEQ ID NO: 6524 - DNA, 321 bp, Gossypium hirsutum
  Clone ID: LIB3120-008-Q1-K1-F10
cccacgcgtccgatcagcaacctcaagctttagcagttggtttctctttctgctcaattcaagaactaataaagtatggcgaccatttcagctacctcatcaatcaccattgcagcttctctttcatacaagccatcatcactcaagctcacctccccaattgccattgggttgccaacaatggcgaagaaagggaaagtgatgtggtctatgaaggacgacgaaaagaatagctctagcgttggcatgagtgctgcatcgctgttagctgcagcaatcatgtcaagcttcaccagctctggctctggtggatgagagaat

SEQ ID NO: 6525 - DNA, 253 bp, Gossypium hirsutum
  Clone ID: LIB3120-008-Q1-K1-F11
cttcactcaccattgttccaagtttgttgtaaaccaagctagaaccagcgggcaacatggcctcattagcagcctccaccgctgccgccttccttggcgtctctgaaatgctcggtaaccctctgaatttcagtggtggagctaggtcatcggctccaacaccatccaactcatccattttcaagaccagtgctcttttctccaaaaagaatgccgctccttcaaagcccaaggcttctgctgtcgccccggc

SEQ ID NO: 6526 - DNA, 320 bp, Gossypium hirsutum
  Clone ID: LIB3120-008-Q1-K1-F12
cccacgcgtccgcccacgcgtccgcattatactcgtactaagaagaaactagttgtaggcagctattatatcgtttctcctttctcccttctcttaagagtagaatgattattggaaggttacgccaatggttaagtctactggtctgtgtgcttgctgttatactactcaaatctgaaggcgctagtgtagggattacttatctgcaggatgccgtagcgaaaggagctgtttgtttggatgggagtccaccagcttaccattttgacaagggctctggcgctggacttgataattggattgttcacatggagggtgga

SEQ ID NO: 6527 - DNA, 424 bp, Gossypium hirsutum
  Clone ID: LIB3120-008-Q1-K1-F2
cccacgcgtccgctttagagtaaatttcttttgcaatcctttgtagagctccgggatccattgtcaccatgtcttgctcaaatctgacaatgtgggtgtcctcaaaaccctctctttctgacacttcttcactctctttccgttctttcatcagcccttttcagctcccatctcagagctcaacccccggtaacccttccaggtcctcatctgtaaccccagttcactgtggtcttcgtgagcttagagaccgtattgattcagtaaagaacacgcagaagatcactgaagccatgaaacttgtggctgctgctaaagttaggagagcacaagaagctgttgtcaatggcagacctttctctgagtccctggttgaagttctttacaacatcaatgaacagctccagactgaagacatagatgc

SEQ ID NO: 6528 - DNA, 360 bp, Gossypium hirsutum
  Clone ID: LIB3120-008-Q1-K1-F3
cccacgcgtccgcccacgcgtccgcccaaggtaaatatgccgatcagaaacatagcggttggccggcccgaagaggctactcaccccgatgctctcaaggctgctttggctgagttcatctcaaccttgatcttcgttttcgctggatcgggctcaggaatggcctttaacaagttgactgacaacggagcaaccaccccggctggtctcgtagccgccgctctagctcatggcttcggtcttttcgtcgctgtctccgttggcgccaacatctcacgtggccacgtcaaccctgccgtcaccttcggtgcttttgttggcgggaacatcactctcttgcgcggcattctttactggatc

SEQ ID NO: 6529 - DNA, 132 bp, Gossypium hirsutum
  Clone ID: LIB3120-008-Q1-K1-F4
gccattcgtccaagaacaccttcacgaattatgtatcttaaaagcacgggcaaatacttgtgttaatgacggcatcggaacgtacggcaagggttggatttgcacccatcacgaaggcgcttatcgtatctc

SEQ ID NO: 6530 - DNA, 391 bp, Gossypium hirsutum
  Clone ID: LIB3120-008-Q1-K1-F5
ggggggtgagaaaatggagacacacatagggtccacgctctctgtgtccactctgagcacactggccaccgaggacgatctgtcgaggtgcatgtaagtaaaccagccccggttgctcctcctctcaaaccgcaggcagcttggggactaatgtgactacaacgacggcactgacaggtagagagcgcgaatcgaacgcccaagatattccgttgttcggttttagaaagaagttgaagagcgcggaggaagaaacggtggagatcgtgaaagaaggattggagacggcggagaaagggctggagacggcggatagagggatctttacagtggagaaagggttgaagacggcggagaagaagatagaaacagctgaaaaggagattgaaag

SEQ ID NO: 6531 - DNA, 434 bp, Gossypium hirsutum
  Clone ID: LIB3120-008-Q1-K1-F6
ggagtgagcgggacggtgaaggaccaagtggcggcgaaactgagcgacttggcggagctcgtgagtaattgcttgtcgattttcgcggcgagcggcggagacgatttcggtggagtgccggtgcagaacaagaggttgctggcgtcgggtgacgatttatcgggagaaaatgtcgacgaggacaaattcccgaagtggctagggaggaaggagagggtactgttgaacactcccgtgtcggcgatccaagctgatataatcgtctcgaaaaacggtaccgttaagacgatcagcgaggcgattaaaaaggcgcaggagaatagtactcggcggatcatcatttatgtgagggcaggaaggtacgaagagaaggatttgaaggtggggagaaaaaaaataaacttgatgttcataggggacgggaagggtaaaac

SEQ ID NO: 6532 - DNA, 421 bp, Gossypium hirsutum
  Clone ID: LIB3120-008-Q1-K1-F7
cccacgcgtccgattttttctcttttcttttttcttttcacttcattttttctcagctgtaactaataaagaaaaaaattcaagtaatttataccttatggaatatgatacagagaaaacatgaagagaattcaagccaatcggtaacatttcatcacctacctgttcttctccgtttcagaaactcctgttttttgaccggcgatgggaaagaaagggagtggatggttctcgacggtgaagaaagtgttcaaatcatctcacaaagacttgcctgacaaaaaaagagagaataatgtggagaaatggccaaatgaggccccggatgcagtgtcgtttgaacattttccagcggagagttcaccggacatcacgaataatgagagtgcaatgtcgactcctctgaatgaagataggaacc

SEQ ID NO: 6533 - DNA, 337 bp, Gossypium hirsutum
  Clone ID: LIB3120-008-Q1-K1-F8
cccacgcgtccgcttgagttttatgactatggctagttcaaacactcctatacctgttgacgatgggtttaatgagtatgaaagttctctcaaacgtcaaaagtctaccacttcaaaggtgggatgaaatgacaaagcttgaatgcgagaacaaaaatgaattgaaggcacaatgtaatcactgtaagactatcttctctgctaaatcttctagtggaatctctcatttaagacgtcatctaaatagctgtttgaaaaaagttaataaggacatcactcaatacaccatagccactcaaccatcaccgcgaggtcaaccatctataaaaaaactaca

SEQ ID NO: 6534 - DNA, 415 bp, Gossypium hirsutum
  Clone ID: LIB3120-008-Q1-K1-F9
cccacgcgtccggtttctctccttctcgccgactcgcgtgcgctcctgtggctctctgcaaccctcgcatatctcttcaagatctgatctgatctgacaaaaaaatgttcgggagagcaccaaagaaaagcgataatactaaatactatgagatattgggagtgcccaaaaccgcttcccaagatgattggaagaaggcttacagaaaagctgcaattaaaaatcatgcagataaaggcggtgatcctgaaaagtttaaagagttggctcaagcttatgacgtgctgagtgacccagagaagcgtgagatatatgatcagtatggtgaggacacccttaaagaatgaatgggtggaggtggtggtgcccatcatccatttgatatcttacaatccttctttggtggcaaaccttt

SEQ ID NO: 6535 - DNA, 214 bp, Gossypium hirsutum
  Clone ID: LIB3120-008-Q1-K1-G1
accacccgtaccgcctggctcaatgagacatattgattttcgacgataggacctgtgtggtactgacatcccattgcttgtgggacaacaatcttcatgttgcacactttacttggaggtggcctataatgaaactggcgcgctaagattgccatggatggatggcatatactaacttgtcacttttgtaaccatatattgcggctcataaata

SEQ ID NO: 6536 - DNA, 405 bp, Gossypium hirsutum
  Clone ID: LIB3120-008-Q1-K1-G11
ctcgcttcatacagagacgaaatgctcgaccatgaaacaattcagagattcgtttcgccggtgacggcgaacatcgaacccgacggtgattatgaagattatataagaactgagcttctttatcaaacggggttatctcaagaccccactaactctctcctcctcgccaattacgctcagtttctttaccttgttgcacatgattatgagagagcggaagagtacttcaagaaagcggtaacagtggaggcggtggatgcggaagcgtacagtaaatacgcgagctttttgtggaaagcgaggaacgatttgtgggcagctgaagaaaccttcttggaagccattgaagcagatccgagcaactcttattacgccgcgaattatgctcattttctatggagcact

SEQ ID NO: 6537 - DNA, 348 bp, Gossypium hirsutum
  Clone ID: LIB3120-008-Q1-K1-G12
tgcccacgcgtccggttcaataatttaggtgaactgttatgtaccatcactgggtttgactcattctctttgcaacctaatgccggtgctgcgggcgagtatgctggactaatggttatccgtgcatatcatatgtcaagaggggaccatcaccgcaacgtgtgcatcatacctgtttcggcacatgggacaaatcctgcaagtgctgctatgtgtggaatgaaaattgtttctgttggaacccgattccagggtaacatcaatattgaagaattaaggaaagctgctgaagctaacaaggacaagttgtccgctcttatggttacttaatcctcaacacatggagtg

SEQ ID NO: 6538 - DNA, 355 bp, Gossypium hirsutum
  Clone ID: LIB3120-008-Q1-K1-G2
tgacaatttggaagcaatcaggcatcttccttctactaaacattatgaacatcgagagaggcactgtccagaagaaccaccaacctgccttgttcctcttcctgaaagatataagcgtccaatcgagtggccaaaaagcaggggaaagatttggtactacaatgttccccataccaaattggcacaaattaaggggcatcagaattgggtgaaagttactggagaatacctcacatttcctggtggtggaacccagtttaagcacggtgcgcttcattatatcgacttcatagaagagtctgtgcctgatgtagcttggggaaaacggtctcgcgtagtattggatgttggatgt

SEQ ID NO: 6539 - DNA, 359 bp, Gossypium hirsutum
  Clone ID: LIB3120-008-Q1-K1-G3
aaaatcagttgcttcacaatggcctctacaaccatggctctttcttccccatcattcgccggtaaggcagtgaagttctccccttccacccctgaaatccggggaactggccgtgtttccatgaggaaaaccaccaagcctgttccttctggtagcccatggtacggtcctgaccgagttttgtacttgggtccactttccggtgagccaccatcttacttgaccggtgagttccctggtgactatggttgggacactgctggactctcagctgatcccgaaacctttgctaggaaccgtgagctcgaagtcattcactgcacatgggccatgttgggagctcttggtgtgtttccctg

SEQ ID NO: 6540 - DNA, 242 bp, Gossypium hirsutum
  Clone ID: LIB3120-008-Q1-K1-G5
cagaggttcaatgtaatagagcaagtaaaggagaaggatgaaagcttggtaaatgccaccacaggtggcttctcgtatttgatacgagagattgcatcaccaatctggggttttgttaggttgtttcatatgatcaaccttaaaaatgatatatagtaaatcatacattttttaaaaaaaaaaaaaaaaaataaaaaaataaaaatttgttaaaaaaaaataatatttaaatatttattaaa

SEQ ID NO: 6541 - DNA, 383 bp, Gossypium hirsutum
  Clone ID: LIB3120-008-Q1-K1-G6
acgcccacgcgtccgagctaccttaacacaagttacaaactcaaaaaccccaagttctcactgtcaaaaaacttcccacattcaccatgtctgacaggtgcggcaactgtgactgcgctgaccgcagccaatgcacgaagggaaacagcaacaccatgatcattgagactgagaagagctacatcaacactgctgtgatggatgctccagctgagaacgatggcaagtgcaagtgcggtactggctgcagctgcacagactgcacctgtggccactaagccaacatacaatggtcatgcttcaggtcatggcatatatagggatctaaataatgaatttaacgttgaataatttgtcttgtgtagtttgtgtggtgacttata

SEQ ID NO: 6542 - DNA, 304 bp, Gossypium hirsutum
  Clone ID: LIB3120-008-Q1-K1-G7
cccacgcgtccggtttttttgttggctgtagtggttgataggtagtaagaagtgaggagtgaaaatgaatgaagagatgaatggcgttgaggttgagaatcatcaagaacatgcgcctgagaaaatagattacgtgttcaaagtggtggtgatcggtgactcggctgttggcaagactcagattctgtccaggtttaccaagaacgagttttgctttgattccaagtccaccattggggttgagttccagaccaggacggttaccattaagagcaaagtcatcaaagcacagatctgggatacc

SEQ ID NO: 6543 - DNA, 218 bp, Gossypium hirsutum
  Clone ID: LIB3120-008-Q1-K1-G8
gcgaccacgcgtccggtctattagccgtagaaaggacactggttgcacttgtggatatagtggaaaggatgttagggcaacacacatcttcgagaaaagtcagttagtgatgcttaccgccaacgctacttgacgtttgaggcacaaactctaaccatgggggggggtgacaggatcagatgccggaccaacattgtcagcgtgtgtctcggacgtat

SEQ ID NO: 6544 - DNA, 405 bp, Gossypium hirsutum
  Clone ID: LIB3120-008-Q1-K1-G9
cggaaatcctattagggttttagacctttttcaagattcgaaaggaataagcttcagcgtccaaatcgggaggaaatggtgaagggacgccaaggagagcgtgtcagactctatgtaagaagaaccaccttgggttacaaaaggttgctgttcctagcttggaaacgatgacaatttccatgttgagtaatgtgaagatgatatttcatactgacctatcaccaaattcttttcaaagtctacgaaaattaagtgtttcaaggtgtgagattttgaaaaatctatttccagcgtcaatagctaaacatcttttacaacgttgaagatttaagcataagtgattgtggggtggaggagattgtatcgaaagggaaggagtagaggatcgacctattgaggttgagc

SEQ ID NO: 6545 - DNA, 284 bp, Gossypium hirsutum
  unsure (1)..(284): unsure at all n locations; Clone ID: LIB3120-008-Q1-K1-H1
cccacgcgtntgaagactcgtgggcggacgcgtggagcgacttgttaggtgctgtccgggcccggggggcctatgagcaagtgatgtaatgggtccgataagtaggacgcaatagtgtctggaaaaagctcgggaactcgagggcagggcgaccatgtttctagctacctacgatgaccattgagaagctgttggagtatggaaacatgcttgttgcataacaagagaacgtgaagaggcgtcaattggctgacaaatatttgagtgaagctgcccttggaaat

SEQ ID NO: 6546 - DNA, 381 bp, Gossypium hirsutum
  unsure (1)..(381): unsure at all n locations; Clone ID: LIB3120-008-Q1-K1-H10
gggattggcactggggaataaacattattaagggagatatatttagctatagcatacactactagtacccactactagcaatggcttcctcaatgatctcatcggctaccattgccactgcctctccggcacaggctaacatggtcgctcctttcaccggtctcaagtctgcctctgctttcccagtcaccaggaaggccaacaacgacattacttctctcgcaagcaatggcggtagagtgcaatgcatgcaggtgtggcctcctactgggaagaagaagtttgagactctctcatacctccccgatcttacacccgtgcagtttgctaaggaagtnagataccttcttcgctcaaaaatgggtccttgcttggaattcg

SEQ ID NO: 6547 - DNA, 212 bp, Gossypium hirsutum
  Clone ID: LIB3120-008-Q1-K1-H11
tggcaacccaagcctgcctcttcactccatcaaccctttgcaccccaaaagggcggccaccgcatcgacgccgtgttacggaaacaaccaccgatcctaaccgtccctagctataaggccttaaatagcagataggctcactcaccatcaaagttcaagcaactgaagagaaagtctagacaactcgtacaaaagaaggaccagaccgtttt

SEQ ID NO: 6548 - DNA, 304 bp, Gossypium hirsutum
  Clone ID: LIB3120-008-Q1-K1-H12
cccacgcgtccgcttcaagctgcagctaccctgatgcaaccaatcaagggtgctgcaccatcaaggaccaatgtgccgctcacgtcctcccagagcgtttctaaggccttcggtttggagcctgttggtgctaggcttacctgctctttgcaaactgacctcaaggacttggctctgaagtgtgttgatgctaccaagctcgctggtttcgctcttgctacatctgctcttgttgtctcgggagcaagcgctgaatgagtttcaaagcggctaacctacgctgaaattcaaagcaagacataca

SEQ ID NO: 6549 - DNA, 420 bp, Gossypium hirsutum
  unsure (1)..(420): unsure at all n locations; Clone ID: LIB3120-008-Q1-K1-H2
ctgggttttttctcttccctctctttttttgataaatcactaatcatcttttttctgcatgcaacttccttttcttggataatagggagggggaaaagaaaaagtaaccggatgttgataagcagcaattcgtaagacttatccgctggctgagaaaggatgccaaaccagctatggtttgcactagaaatgatttatcagcgtggaaggatttcccaaagggtctcacggtccttcttcttgatgaagacaccaattctgctgcagagataaaatcaaagcttgaagctatggattatattgtatataccttctgcaatgaaaatgaagctcttgctgcagtttcaagtagacccgaaagcttccatgtagccattgtagangtctgcacaaatagtaacaatgggggtttcaaagttc

SEQ ID NO: 6550 - DNA, 422 bp, Gossypium hirsutum
  Clone ID: LIB3120-008-Q1-K1-H3
gcatatagtaatagtaagcagtaatagcaatggcctcctccatgatctgatcggcgaccattgcgcaccgggaaccgctccttcccggcacatgccaacatggtggtccccttcaccggccgtaaatctgcctctgctttcccagtcaccaggaaggccaacaacgacatcacttctcttgcaagcaacggagggagagtgcaatgcatgcaggtgtggccgactcttgggaagaagaagttcgagactctctcatacctgcccgatcttactcccgtacagttggctaaggaagtagattaccttcttcgctctaaatggattccttgcttggaattcgaattagaggagggattcgtgcaccgtaagtactcgagcttacccacgtactacgatggacgctactggaccatgtggaaact

SEQ ID NO: 6551 - DNA, 432 bp, Gossypium hirsutum
  Clone ID: LIB3120-008-Q1-K1-H6
cccacgcgtccgcccacgcgtccgcccacgcgtccgcgtgtaaatgcataatgtgtaagtattattagtaattaccttgcctaaaatgaaatttagtagcaagtttgtgttacatgcattttaagtattgtattgaagggtataggactaacgtaatatattactgtcaatgtaaactttgcaaatttgtagatttattaacttattctagtgcccaaaggactaggatgctgaagcatgcatatcttattgactattaagttcaactcatcatatgttatggaaatatattaatgtgtttctactgttaaaatataattcatgggtcatgctcaatatcatttcacgttcaagatattttttaactgttttgatgaatttgattccattacccctaaaagatgacatgacaaacactggagtaattgatca

SEQ ID NO: 6552 - DNA, 422 bp, Gossypium hirsutum
  Clone ID: LIB3120-008-Q1-K1-H7
ctcaaaaatgagctccattgctttcaagcccttccacggcctccgccgtagctccgccgtccccacccctacttccactaccaccaccctttacaaacctgctgtcaaattccatgtctcagccgccaaaacttctccaaaactaagcaaccgcaacctcagggtagccatcatagggggtggtccggcaggaggctcagccgccgaaactctcgcgaaggctggcatagaaacgttcctaatcgaacgaaaactggacaactgcaaaccttgcggcggagccatcccgctttgcatggtgggtgaatttgacttgcccgtggatatcatcgaccggcgagtcaccaaaatgaagatgatttcgccctccaacattgccgtcgacatcgggcaaacgttgaaaccgcatgaatacattggga

SEQ ID NO: 6553 - DNA, 405 bp, Gossypium hirsutum
  unsure (1)..(405): unsure at all n locations; Clone ID: LIB3120-008-Q1-K1-H8
cccacgcgtccgagaataccttaaatgagtttatcatatcaaagaagtttagcttaattgcctactgaatatacagttgaagagttgtatgaaattgaaacagcttgttaaaattgtgtgatggtaattgtgccatccggagaagaagctgtatgatggcaacagctgctattatcggacttactgttggaaagcgattcttgagttcttcgttttcgtattccgatatcattgagaagcactcgtatgccggtgattatggcggagctccacattatcaaactgctcccactaaaagtttaatagttgcaaagaaatcatctaattgtagccaaagtgttccttcatatgatcggcgtagtcggtcgatcaaagctcttaangagcatgtggatgctgctttcc

SEQ ID NO: 6554 - DNA, 423 bp, Gossypium hirsutum
  Clone ID: LIB3120-008-Q1-K1-H9
agagtctctctcagatcagaactagagtgtttacatcctggtaagaggttgagttgccatggcttcagcttcctccaattcactatcaatctcaccctcatccaccctcgtggatgccaaagctcctcgtcaaccaactgctgcatccccacaatgtgtcactcttcctactcttcctcccccacccgttcagtcccagagtcgtccctggaagaccactgcctactgtaagttcatagactaactatatcacacacttgacatgcatcaactggtataccaaatggtctttccactttttgcaggtcgcaagattgctcgaaatgtgatggctatggccactggtgagactttggccacgcgtgaagctccaaccgaagttaccccaactgagctgacagagtttatcaacaaaatacaaga

SEQ ID NO: 6555 - DNA, 333 bp, Gossypium hirsutum
  Clone ID: LIB3120-009-Q1-K1-A1
cttcaactacggttcccctctgttgcttttctgtatatatataagtaattttttcaatttcgatcattcacaaccaaagatccctcttcataggtctctatttccaataatttatcagacacacacacacaaaaagagaactcttcaagttcttaacctacgtcggccgccgtttccaaatgttgagaaaatcgaactcctcccttgaaatacttactttctggatcttcgattctcttttttgtttggcttccttttcagtcgctcagcgacaacaagaacaactcgctgaatcggatcggttcgacgatgacgacgacggatgaaacggta

SEQ ID NO: 6556 - DNA, 430 bp, Gossypium hirsutum
  unsure (1)..(430): unsure at all n locations; Clone ID: LIB3120-009-Q1-K1-A10
acggttggctaaggaagtagattaccttcttcgctctaaatggattacttgcttggaattcgaattagaggagggattcgtgcaccgtaagtactcgagcttacccacgtactacgatggacgctactggaccatgtggaaactgcccatgtttgggtgcactgactcggctcaggtgttggaggagcttgagaattgcaagaaggaataccccaatgcattcattagaatcattgggttcgacaacgttcgtcaagtgcagtgcattagtttcattgcctacaagcctaaaggctactaagttgtttacttncctcctaggaattccatttgtttcaaagttgtacttaaattaagcccctcaaatccccacccccttttttcttttacttttttatttgaggtatttggcttggggtctttctctttg

SEQ ID NO: 6557 - DNA, 429 bp, Gossypium hirsutum
  Clone ID: LIB3120-009-Q1-K1-A12
tctggatctataaattaagcgcaaaggcttcaccagggactgctcaagtctccctttgcgccctttacacccttgttcttctaacacgatttcaagatggagattactataaaggagtctgctattgttcgtccagctgaagacactcccaaacgaagtctatggaactccaatttagatatagtgatgataagataccacatccctactgcatactattacaagccaaatggttcttctgatttctttgatactggaaggcttaaagaagctttgagcaagattcttgtcccattttaccctgttgcttgaaagtttggggtatgatgaaaatggaagacttgagataatatgcaacggtgaatgagtttattcgttgaagctgaaactactgcagtcatggaacatttgattggtgcttttgccgag

SEQ ID NO: 6558 - DNA, 379 bp, Gossypium hirsutum
  Clone ID: LIB3120-009-Q1-K1-A2
acgcttacagagaccaaagggggggaaatggcgatcacactgaacaatggatttaagatgccagtggttggtttaggtgtttggcgtatggatggaaaagacgttagagacctcatcatcaactccatcaagcttggttatcgtcattttgattgtgctgctgactacaagaatgaagcagaagttggtgaggcattgtctgaagcattcaaaactgggcttgttaagagagaggacctctttattacaaccaagctttggaattctgatcacgggcatgttcttgaggcctgtaaagacagtcttaagaagcttcaattggattatctgggattgtatctaggtcacttttccgttgctggtaaacacactggagtcg

SEQ ID NO: 6559 - DNA, 392 bp, Gossypium hirsutum
  unsure (1)..(392): unsure at all n locations; Clone ID: LIB3120-009-Q1-K1-A3
ctcatttaagtgtcttaaataacccatttcaaagttggtaatggctttgcagactgctgctttggttccagctactttcaccctacctaaagagggaaaatcaagtccatctttcaaggattcaactttctttggggtctcactttctgaacatgccaaagctgatttcagctcttctgcattaagatgcaagagggaattcaacccaagaaatggagctgtgagagccgaaacaacagctactgcaactccagcaatcagcagatctgcggtggatggcaagaaaactctaagaaagggtagtgttatcatcaccggtgcctnctccggattgggtttagccactgctaaagccctggctgaaactgggaaatggcatattatcatggctt

SEQ ID NO: 6560 - DNA, 444 bp, Gossypium hirsutum
  Clone ID: LIB3120-009-Q1-K1-A4
cgtcacgcgtccgaaagcactgaaaacgcataaccatggcctctgcttctctcctcaagactggaccagttttagacaagtctgagtgggttaagggtcacacccttcgccaaccttccacttctgcggtgaggtgccaccctgttgcaccctctggactaactgtgcgtgcaagctcatatgccgatgagcttgtcaagactgctaaagctattgcttctcctggccgtggaattttggccatggatgagtccaacgctacctgtgggaaacgtttggcctcaatcgggctagaaaacacagaggctaaccgccaagcctacaggacgttgcttggttcagctcctggccttggtcagtacatctctggtgccatcctctttgaggaaaccctctatcaaaccacaattgatggcaagtagatggttgatgttcttgttgagc

SEQ ID NO: 6561 - DNA, 380 bp, Gossypium hirsutum
  Clone ID: LIB3120-009-Q1-K1-A5
acgctattgcccactctcttttatgctctcagttaacaacaaaatccgtaaatggctaccactgcttctccaatggcgactcagctgaagagcagctttacgtcgtctgttacaagaggactggtagtccccaggggcatttcggtatccccgttcaaagtatcttccggaaagaccaagaccccttgcttcactggcaaagctgttcaatccgacaagtcaacatttcaagtaatccaacccatcaacggcgaccccttcattggaagcctggagacttcaatcaccttaagccccttaattgcatggtacctttgcaaccttccagcctataggacggcaatgaacccacttctgaggggactcgaagtgggtctggc

SEQ ID NO: 6562 - DNA, 220 bp, Gossypium hirsutum
  Clone ID: LIB3120-009-Q1-K1-A6
ctcactcgtacggttttatatggtatcagcgccttaaactggcgggtgctagcatgggacggttttagccaattttcgcatttaaggcctggacgtctgtttacttgctatgcgagatccaaaggccggggcacgacatccatgacttgaatctctacgaacgttggtaactagagatggccatggccacgtctggtaccatacacgagctgcgtaccac

SEQ ID NO: 6563 - DNA, 193 bp, Gossypium hirsutum
  Clone ID: LIB3120-009-Q1-K1-A7
acggaaatgcttggggtttgccattgaacaggccgtggcgaatgggctatgccaaagtggggagtgcatcggcgatcagcgtaccttgggaactgcaacagtgaacatgatgccagagtgtgaactgccttttggggcgcactttcaaagcatatctttgggaagttcagttcttcaagacttaaaaccctga

SEQ ID NO: 6564 - DNA, 140 bp, Gossypium hirsutum
  Clone ID: LIB3120-009-Q1-K1-A8
acggcgattattagcgctttaaacggaaaaagatggtcgcagctattaatcctaagaacgggtccgcttcagacatgtgtgagatatgcaagcgtcacaccctacaacatcctctaacttgttcaaccaggtgccaccct

SEQ ID NO: 6565 - DNA, 348 bp, Gossypium hirsutum
  Clone ID: LIB3120-009-Q1-K1-A9
atcaaccacagctgcaaccacagtatacatttatggcaacaacatacatgccttaaccccctaaaacgcctacttatactgaaattctactatcagcttttcagcatagcagagaagaagactaagcatcaggagctctggtgatgtatcatacgtgacaccaacgaccgaaacagaatctgaaaagttcatcgatgaagcttctaagggacctgcttctttgatctctgctctaaatgatgaacgagctcttcatggcatcgcaatcacagacacacatcactatggtagactcggccttcaaagaggatgagcttatgaacaggtcactgtggcctacagaaacca

SEQ ID NO: 6566 - DNA, 424 bp, Gossypium hirsutum
  Clone ID: LIB3120-009-Q1-K1-B1
acgaaaaccatggcctctgcttctctcctcaagacttcaccagttttagacaagtctgagtgggttaagggtcacacccttcgccaaccttccacttctgtggtgaggtgccaccctgttgcaccctccggactaactgtgcgtgcaagctcatatgccgatgagcttgtcaagactgctaaagctattgcttctcctggccgtggaattttggccatggatgagtccaacgctacctgtgggaaacgtttggcctcaatcgggctagaaaacacggaggctaaccgccaagcctacaggacgttgcttgtttcagctcctggccttggtcagtacatctcaagtgccatcctctttgaggaaaccctctatcaaaccacaattgatgggcagaagatggctgatgttcttgttgagcagaaca

SEQ ID NO: 6567 - DNA, 379 bp, Gossypium hirsutum
  Clone ID: LIB3120-009-Q1-K1-B10
aagatgcttcagatcagactcagcaagggctctttcttggatgccggcggttccgatcagccattgcccgctgagacggtgacggtggcctgccccgaccatctcgttctcggcgacctacccgttgccaagagcattggtgccggtacctcctcctgtatcgtgaagaccgtcggtcggagatcccggcgtcagcttggcgagcgagttcacttatgcgttcactgcgattttccgatagcgatttacggccgcttgagtccttgtgagcatgctttctgccttgattgcgcgaggagcgattcgatttgctatctttgtgatgatcgcatgcacaagattcagacaatcaagataatggacgggatatacatctgtg

SEQ ID NO: 6568 - DNA, 421 bp, Gossypium hirsutum
  unsure (1)..(421): unsure at all n locations; Clone ID: LIB3120-009-Q1-K1-B12
acgactttagctatagcatacactactagtacccactactagcaatggcttcctcaatgatctcatcggctaccattgccactgcctctccggcacaggctaacatggtcgctcctttcaccggcctcaagtctgcctctgctttcccagtcaccaggaaggccaacaacgacattacttctctcgcaagcaatggcggcagagtgcaatgcatgcaggtgtggcctcctactggaaagaagaagttcgagactctctcatacctccccgatcttacacccgtgcagttggctaacgaagtggattaccttcttcgctcaaaatgggttccttgcttggaattcgaattagaggagggattcgtgcaccgtanatactcgagcctacccacgtactacgatggacgctactggaccatgtg

SEQ ID NO: 6569 - DNA, 404 bp, Gossypium hirsutum
  Clone ID: LIB3120-009-Q1-K1-B2
cttgtcgactttgcttgttacaaaccggaagacgatcgtgaaatgtcggtcgactcgtttttgaagatgacggaagatagcggtgctttcacggaggaaacacttcagtttcaaagaaggatatcgacccggtccgggttaggcgacgaaacatattttccgagagggataacgtcaacaccgacgaatctgtgtatggaagaagctcgagctgaagcggaaactgtcatgttcggagccgacgatgaactttttgcaaaaaccggagttgacccgaaggaaattggtatccttatagcgaattgcagcttcggtaatccaacaccatcgttatcctccatgattggtaaccattacgagctacgtacaaacatcaacagctttaatcttggtggaatggggtg

SEQ ID NO: 6570 - DNA, 347 bp, Gossypium hirsutum
  Clone ID: LIB3120-009-Q1-K1-B3
atcactatcactaccattatggctatggatactgtttctgcagccgaactaaaccttcagattcaggcaaacggaaatggtgttggtttcgcacatgtctcaggcctacacaactcctctactagccttctctttgcccggaaaacctcggatgacttccattcactcgctgcttttaagacatctgctctaggaagccataatggcaggtacatgaaagggattgcagaggccaaactcaaggttgctataaatggcaatgctaggattgtcacgaacttcttaaggtgctggcatggccgtaaagactccccacttgatgtcattgccatcaatgacacatggcg

SEQ ID NO: 6571 - DNA, 273 bp, Gossypium hirsutum
  Clone ID: LIB3120-009-Q1-K1-B4
gtcacacacccaatttatgtagggctttgacttagcaacctgtaatgcctaaggctatgtgagcagcggtgcaccattgaaattggtgaggagtatggaaacagcctttatttgagttgaaatcaacactttagagaccatttggatttgggaatctgcatttgtgtccccgatttcaacagagaagccacgggatctcatcaatgcatctattaaaagtgatctggtcttgtacgctcctatctaaagaactaaagaaaagccaggtatatg

SEQ ID NO: 6572 - DNA, 424 bp, Gossypium hirsutum
  unsure (1)..(424): unsure at all n locations; Clone ID: LIB3120-009-Q1-K1-B5
gccacgcgttcgtggaaagcggatctttcttcttccacagtggtatgctgagaaacaagctctcggggaagtgagtccggagcttctggacacccaggtgaacccagctgtgtgggaaattagtgggcatatggcgttaaaaaggaggaaggactatgatgaggcgtctgatgaaaatgcttggaggctcctggctgaggtttctgtctctgatgagaggttccgggaagtgaatgcactcatctttgaagtcattgccagtggcgaacatggcattgaacatgatgctaagagtctgcctaaggagcccgatcctaaagctgaattcactgacgaagaaagcaccatgaccaaaacctcccaccgagctatcgtgggtgggacacaagaatgcgttgntctgcactaggaactggcatttcac

SEQ ID NO: 6573 - DNA, 354 bp, Gossypium hirsutum
  Clone ID: LIB3120-009-Q1-K1-B6
gagactctttcggataactgtggcatatgctactggtaagcagtaataccaaaggccggcgccatgatctgatcggcaaccaatgccaccggcaactgttactacatggttcagggcaacatggtggcaccctgcaacggcctaacggctgcctttggttgatcagtcacttggaaggccaaccacgtcattgactatcgtgcaagcaatggacggagagttcaatgcatgcaagacttgcctactactgggccgaagaatcacgagacacttgtattccgaactcggcgtacacccgtacaaatgaataaggcactatattaccaagttcactctaaatgggttccatgcttg

SEQ ID NO: 6574 - DNA, 327 bp, Gossypium hirsutum
  Clone ID: LIB3120-009-Q1-K1-B7
acggtaagtattggagtttgctattgaacatgcttatgcaaagggattatgccaaaatggggaggcgatcggtgatcggcattggattgggactgcatccgtgatcaaaatcttgactgcaaagtgattttttgttcgcattatcaatggcaacctttgggaagatgcctgatacaaagcttaagacactggtattacttatggatcaactctttgatgttatctttttggatgagaaacaaaactcattcagatcacaagtataacgtgatgactactttttgagatccctggataaattgacaaaggaaccgggaactttggttg

SEQ ID NO: 6575 - DNA, 178 bp, Gossypium hirsutum
  Clone ID: LIB3120-009-Q1-K1-B9
gcgcttgcaaagctgtcagacaggactagtgattgctgttcacagaaccgatcgcgcccaggccatggctgatttggacgcccagatgcctacaactttcgatgcatttatcaagggtgggggatccgatggcactggtaccaatgaggatgccgatatacgggtccaacatacggac

SEQ ID NO: 6576 - DNA, 228 bp, Gossypium hirsutum
  Clone ID: LIB3120-009-Q1-K1-C1
acgcgtacgctcactactatgcatgctccggataatgattctggaatgtgactagacctacatgggcaggcgattgaagatcgtgatgctttcgcagatgaatcacgtctgcataactgaagtacatacccactgtccggctcaatgtacctggcatacttaccgacagtcataacttctacaacgtacgctcttggtagcactataacatcgctctaggacaggaac

SEQ ID NO: 6577 - DNA, 384 bp, Gossypium hirsutum
  Clone ID: LIB3120-009-Q1-K1-C10
ggactccccacttgatgtcattgccatcaatgacactggtggtgttaagcaggcttctcaccttctcaaatatgattccacccttggcatcttcgctgccgatgtcaagcctgttggcactgatggcatctctgttgatggcaaggttatcaaggttgtttctgaccgcaaccctgccaacctgccatggggggacctaggaatagatctagtcatcgaaagaaccggtgtgtttgtcgatagagaaggtgcacgttagcacattcaagcaggagccaagaaagtgctgattactgccccaggtaagggtgacatcctcacctatgttgttggagtgaatgctgacacctacaacccatatgagcctatcatcagcaatgcttc

SEQ ID NO: 6578 - DNA, 393 bp, Gossypium hirsutum
  unsure (1)..(393): unsure at all n locations; Clone ID: LIB3120-009-Q1-K1-C11
gccacgcgtacgcaaaccaccaagtctcttctaccatggtctgaaaacctgaagattgttggaaggtgcattgattccattgcatctaaaacctctgtggatcctgcaaacgtcacttggtcctacacgtataaccggaagttattggcccctgaaataatagtcaagggtggtatgaaataccaagagaagattgaatctgttccaaaggattggtgggttgaagacgtatgtgagctagagatttttctgtacaaacgagtcatgactgctgtgaaatcaaagggaagaatggatggtgcaatcaatctgtgaggcactcaaaacttacgctgacagatggctgccagattctgttgatgcctngatttctgatgtacattcctggagaaa

SEQ ID NO: 6579 - DNA, 319 bp, Gossypium hirsutum
  Clone ID: LIB3120-009-Q1-K1-C12
tggatacattcagcaagccttgcacatcggttaccatcacctgtgccgctgtcgctatcccatctgtgaccggccttaaagccgtcgcaaccgcagctaaagttagcgccacagccaaggttgcagcctcttcagtcccaagggtcagcatcaaggcctccctcaaagacgtcggtgttgctgttgcatgaactgctgcaagcgcaatcctagccaacaatgccatggccattgaagtcttgctcggcagtgacgatggcggtctggctttcattcccaaagaattcagcgtaagcccagtggagaagattgtgttcaa

SEQ ID NO: 6580 - DNA, 405 bp, Gossypium hirsutum
  unsure (1)..(405): unsure at all n locations; Clone ID: LIB3120-009-Q1-K1-C2
cccacgcgttcggttctgcatgagccgctgtgggactcatggctctgccttgggctccaccgatggtctcgtcaaggccaagaagcactccaagttcgcttacatttgggtgggtaactcccagacccagtgccccggtcaatgtgcctggccgttccaccagccaatctacggaccacaaagcgcgcctttgattgcaccaaacaacaacgtgggtcttgatggcatggttataaacttggctagcctctttgccgggaccgtcacgaaccctttcggaaatgggtacttccaaggcccagctgaggcaccattggaggcttcatcggcttgtcctggaatatatggtaaaagggcttattcaggctatgcatgaaacctacttgtagacnctacaactggcgc

SEQ ID NO: 6581 - DNA, 403 bp, Gossypium hirsutum
  Clone ID: LIB3120-009-Q1-K1-C3
atttagctatagcatacactactagtacccactactagcaatggcttcctcaatgatctcatcggctaccattgccactgcctctccggcacaggctaacatggtcgctcctttcaccggcctcaagtctgcctctgctttcccagtcaccaggaaggccaacaacgacattacttctctcgcaagcaatggcggcagagtgcaatgcatgcaggtgtggcctcctactggaaagaagaagttcgagactctctcatacctccccgatcttacacccgtgcagttggctaaggaagtggattaccttcttcgctcaaaatgggttccttgcttggaattcgaattagaggagggattcgtgcaccgtaaatactcgagcctacccacgtactacgatggacgc

SEQ ID NO: 6582 - DNA, 235 bp, Gossypium hirsutum
  Clone ID: LIB3120-009-Q1-K1-C4
aacaaactacatattctgcactttccttcaaatctttgcaaatcttcacaagcaccgcaaggtcggtcgtacagcgacggtacagtgtttcgaatcgtaatgtgttgaatgtaaatcgatacgtgcatgcatttgtgaataattgagttagggtttcgatttatatggtcgatataaaagtcggataccatgtatggagaagtacgagctggtgaaagacataggatcttggaac

SEQ ID NO: 6583 - DNA, 280 bp, Gossypium hirsutum
  Clone ID: LIB3120-009-Q1-K1-C5
acgctcataccacaaactctgattacccgagactatcatacacctgcagaatggccgctgcaaccatggctctcacttccacatcagtcgccggtaaggccgataagctctgtacttgcgtgcctaaaatccaatgcaatggccgtgtttccatcagggaaaccgctaccaacggttcatcctctggaagtccatggtacaggaccgaccgaatcttgtacttgtatacattatctggtgagacttcatcttacttgtccggagaatttcctggtgacta

SEQ ID NO: 6584 - DNA, 365 bp, Gossypium hirsutum
  Clone ID: LIB3120-009-Q1-K1-C6
acggacatcctctatcgaatgggtctttctgactaagattttgcggcattatctgggggtcacactctggtatcatattcaataaaatgtttctgattgtctatattcctggttatgtccgttatatgatcaatatcaaacctttggcggtggctatggtgttacagggaacggctcatcctgagagatcaggttttgatggcccttggaccaatgaacccctgaagggcgacagctcttactttggggagctgctaaaaggggaatcagaacggcttttggaacttccaacagacaaggctttgttagatgaccctcagttccgtaagtatgtaaagcactatgccaaggatgaggatgcattc

SEQ ID NO: 6585 - DNA, 217 bp, Gossypium hirsutum
  Clone ID: LIB3120-009-Q1-K1-C7
gtaatgcttactgtttcacatggaaaatgctgacgctggtcatcttaaccaacatgaggagtgcctctatgatcggcactgcctgcgaagggtgactgtgacctcattgtcccatcctgagtaccgggatatacttgctagtaaaccatagctacatacacctcgcgaacttgtgtacctgacctatcagctgaccatagatcaatgccttggcagc

SEQ ID NO: 6586 - DNA, 407 bp, Gossypium hirsutum
  Clone ID: LIB3120-009-Q1-K1-C8
gttatgccttatgacaccttgtctccctctcctgatgatccttcttaaaccaagaggcgcggggacaaacttggcgtgctaaagcttaatggagagtttggaaccactatgggatgtactggtcccaaatccggcattgactttcgcaatggctgagacttttcttgacctaagtgatattcaaatcgagaatcttaattctaaatactgatgtaatgttccgtagggtctgatgaactgatagaacacccatgatgacacattgtagattgtcgacatgtactgaaattcaaacattgagattcatactttcaatcagagccgatatcctcgaatggatgctgtagattttgatacattaccaagcaaatgccagcatggcaagggacgatgggatccttctggtc

SEQ ID NO: 6587 - DNA, 288 bp, Gossypium hirsutum
  Clone ID: LIB3120-009-Q1-K1-C9
gttacctggagcaacaactcgagaaccggttcaagctattcagattctggacagtgccgggcaaatcattctttctggcttctcacaagggctcaatccaggcgggcggcggaaacgcctttgccggtgccgatgctatgctgatcgaggcgttgcccaagctggagattgttgccagcttcagtgtggggcttgataagatagatttggccaagtgttaagaaaagggtatccgaggtaccaacacccctgacattttgactgaggacatggcggatttggcgatcg

SEQ ID NO: 6588 - DNA, 416 bp, Gossypium hirsutum
  Clone ID: LIB3120-009-Q1-K1-D1
ggtgaccaaggaaaagttaacttgccaatagtacctgtgaagccacctgctcctgttacacatcggaaagcattatcaaattctcatcaggcccagcagattatttctttaaatccgttacctctcaagaaacatggttgtgatcgagccccgatacaggtttgctcagaggaggagtttctgagagatgtaatgcagtttctgatagttcggggacatactcgtcttgttcctcaaggggggttagctgagtttcctgatgccattctgaatgcaaagcggcttgacctttacaacttgtatagagaggtggtgtcaagaggaggctttcatgttgggaatggcataaattggaacggacacgttcttttcgaagatgcgcaatcacacattgacaaatagaatgactgtatgtg

SEQ ID NO: 6589 - DNA, 407 bp, Gossypium hirsutum
  Clone ID: LIB3120-009-Q1-K1-D11
acgggccatttgagttcatgtaattatcatttggcatcttaatgatgaacttgttattgatttattagtgttggctagagtttttggtgggtggtgctaatcatttatacgatttcgggtgatttataacagagcagtggttgtctaggatgttataaggagcctaaatctgatcctttgatgaatgatacatcaaaaggattagaagttccaggtcagacggtgaggaaaaccagtatatctgaagatttctggaccactagcgcttgcgatatggataacagtgcagcgcagtcacaaggaagcatctcgtcaatcagcgtgatcaatcagtctctagatccccatggcaatgccaatagcccatctgaattcgtaaatcatgggtctcttctctggaatcgaac

SEQ ID NO: 6590 - DNA, 303 bp, Gossypium hirsutum
  Clone ID: LIB3120-009-Q1-K1-D12
ctgatttatacatgagtggtgaaattcataaaaattcacaagtggaatctgtcattagtgatccatttgaatcctctgcctcatccaatatcatttcaagcaatgggatctccacgagtttacctgatccagtttcctcacagaattttgccagtgaacatatgttgcaaatctcagggaaatcttctgatactgacaatttaccctgtactgatttatacatgagtgatgaaattcataaaaattcacaagtggaatctgtcagcaatgatccatttgaatccgttgcctcatccaatatca

SEQ ID NO: 6591 - DNA, 312 bp, Gossypium hirsutum
  Clone ID: LIB3120-009-Q1-K1-D2
cattacgacacttgtggcaacttgtggttgacatctgtccaggcctcgggtttacattgaccgcgtgaaatctgacccggttcttgttcactagggcatatgataccatgaacctgtatattgcaaatttactgcggatgtatacaagtatcttcctgatgctgcggagcagatgtatgccagctatatatattgcacatcttacatatccattcacctgcatgtgctgcataagaatgccgactaacaccctttactgagatcattgttaatacagtgcggatgtcatcatataccatgcctacagactct

SEQ ID NO: 6592 - DNA, 318 bp, Gossypium hirsutum
  Clone ID: LIB3120-009-Q1-K1-D3
caaaaagccttttaacaagggttctgtctacatgcagaagtggcgtctacttaaccaactctgcctgggctcacctctctgatctggtctggctagtccagtcattgacccgcttcaagatgactgcattgcggacactatgtgccctagttaccttagtggtgcgcagtgtatgaacccggctgtgactgattggtcctactcgaccatctcggatttagccaaagctggtaactccaaggataaccaatgcagattcagagccatactaaacaaccttgcatattaggcttgaatttagcactcatgcgccttacc

SEQ ID NO: 6593 - DNA, 403 bp, Gossypium hirsutum
  Clone ID: LIB3120-009-Q1-K1-D4
cccacgcgtccgaaccctttggatccaactcggctttgttgcacaaaatcaatctgtcatggcaaccatctcggctaccaccacccctgcagctcttgttcacaagacattgcccaggattgcatccccagtccccattgggtcgccaacaatgggaaagagggggaaggtgatgatgatgtgtagcatggagaagaagagtgagaatgggtcaaacatggggatgagtgcatcattgctggcagcagcctgtgcagcaaccatgtcaagcccagccattgctctggtggacgagagaatgtccactgaacgaacaggacttccctttgtttgagcaacaacctccatcggtggatcctgtttgtgtgttcggtctgatctgggctctttactttatctatac

SEQ ID NO: 6594 - DNA, 389 bp, Gossypium hirsutum
  Clone ID: LIB3120-009-Q1-K1-D5
gctgttttcgccgctgatcttctaggccatggcagatccgagggtcatcggtgctacttaggtgacatggataaagttgctgcaacatccttatcattcgtcaagcacgttcggaacagcgatgaatacaaaaacttacccagatttctgtttggggaattcatgggaggagcagcaacaatgctcatgtgcttggaatccgaccctgaaacgtggaccggtctaattatgtcagcgacgctctttgtgatgcctgagaacatgaagacgagtcaggtgcatttgttcgcatacggactgctcttcggattaactgatacatgggcaactatgccggataacaagatggttgggaaagcactcatagaccctgctaagcttaagatcat

SEQ ID NO: 6595 - DNA, 442 bp, Gossypium hirsutum
  Clone ID: LIB3120-009-Q1-K1-D6
ggaatatttgtcagagatcgactccaatcctagctttgtcgatgaagaagagaaacttaggatcttcccttatcatgacttcaccgagagttcccatggctgcaatctgtgccccccaaatatgtgcaaagggagggtgattgaaacgattcaagcttctttagaagggaagaagaaaatcatataccttggagatggcagcggagattactgcccaagcttcaagcttggagaggcagactacatgatgccaaggaagacttatccagtttgggatttaatttgcaggaacccaatgttgatcaaggctgagatctatgaatggaccgatgttgaagagctcgagaaggttttgctgcaactaatcaacatgattgctcttgaagaagacgattccaatatcttccaattcatcttcagtgactgcaaattgcacaccatg

SEQ ID NO: 6596 - DNA, 418 bp, Gossypium hirsutum
  Clone ID: LIB3120-009-Q1-K1-D7
aaaaaactatctttttcatttccttaatactccccctgttactcttcaatcatgtcatcctatggtaaaggacaggcactgccaaaatttggtgaatgggatgtaaatgatccagcctcagctgaaggatatactggcatttttaacatagctagagatgagaagagaactggtgggaatgtcacagttggtgccactgaaggtataaaatcacagcagaaacaaggtacacgcaaggagaaaagtagacataaatattgcattaagagaaaatggttttgcttttgcttgaaatctggaaattagtcaactttatcttaatgctgaagctctcagttgaattgatagtactagacagttgacagtgtcaatgtttgttggcaattttcttggatcttttattctgaatacctttttt

SEQ ID NO: 6597 - DNA, 396 bp, Gossypium hirsutum
  unsure (1)..(396): unsure at all n locations; Clone ID: LIB3120-009-Q1-K1-D8
cccacgcgtccgctctctggtctatactcttgcaacggtggatcgtttctcttttcattcgatcgtccttgactgggactttgcttaggccgtcgattgggactttaatagcgacggtgatcctctcattctacaggttgttttcgatggtgtagacaaggaggacttcgatgaccatctccataactcggagcaccagttgacgctgatcaaatccaagtctgggaaaacctacgcatactaggaggagcacgattaccgactgggagtcttcaaggctaacctgcgtgaagcctagcgttatcagctcctggaccccatggtcgagcattgcgttacatagtttttcgagtaacttcatcggagatacgncggcagtatatatgcttgaaaccg

SEQ ID NO: 6598 - DNA, 323 bp, Gossypium hirsutum
  Clone ID: LIB3120-009-Q1-K1-D9
acggccacgcgtacgggcacgcgtccgcggacgcgtggcaagatgtgttgtgggagagtatgcatgctgggcacttgcttgattctagccgtggttgcgattgggctggtgttcggctttggggctttcaagaatgggttttacaagctcaaagatacattccatgaagattactgtgatcctaaattgtcttcttcttgtagaagaccttgcttgggttatgcatctacgcctcctttctaatatgcttcgtgggatcctatctactacaattccattcttattcggtcgagtatatgatcatgctattgacgctagatgta

SEQ ID NO: 6599 - DNA, 410 bp, Gossypium hirsutum
  Clone ID: LIB3120-009-Q1-K1-E1
acgcaaaaacctcaggtttccactatgatttaacacccaatttcaaaaacccaacctttcccaaaaaatttccccctttttctgtacatttatacatagtcaacaatatccgtactgatagattcaaaacccaatggcggccgtcagttccctgtctttcccggcaatcggccaaacttccggcgacagaaaacttaatgtcccatcgcctcgttacttggcttccaatttcgaaggattccgtttccgtacaagccttttatatcaatctgttggacttcgggcttccactactgcttctccttccgttgtttactgcatgtctactgctactgataccccgactgtttctgaaacaaagtcgagctttttaaaagcgtataagcgttccattcccagtgtgtacaaca

SEQ ID NO: 6600 - DNA, 390 bp, Gossypium hirsutum
  Clone ID: LIB3120-009-Q1-K1-E10
acgcccacgcgtgcggccacgcgttcgcccacgcgtccggtcttccttcaccagcttacctcaatggcagtcttccaggtgataatggctttgatcctcttggattggctgaggaccctgcgaacttaagatggtatgtacaagctgagcttgtgaatggacgttgggctatgttgggtgttgcagggatgcttatgcccgaagttttcactaagattgggataatcaatgctcctcaatggtacgatgccggtaaagccgaatacttcgcatcgtactcgaccctgttcgctatcgagttcattctagtccactatgtggagatcagaacgtggcaagacatcaagaaccctggttgcgtgaaccaggaccctatctttaagcaataca

SEQ ID NO: 6601 - DNA, 323 bp, Gossypium hirsutum
  Clone ID: LIB3120-009-Q1-K1-E11
acgcgcacgcgtacgcccacgcgttcgcttgcgctttagatgatattcagatagaaatcatgccggcaggtggattctcttcgggtacaccggcgggggtggaattcgaagcaaagatcactcctataggcatcatttcctgtgtaatggcagccaccggacgccttatgttccgttacgacgtcggcgtttctggtggtgatacgttcatgcccgacttcttgaaaaaatactttacggttgtttaccggaaaaccagaaaccctggaatcgatggaaattattgcaaatatgacaatcaaggccttcaattgctcacttca

SEQ ID NO: 6602 - DNA, 431 bp, Gossypium hirsutum
  Clone ID: LIB3120-009-Q1-K1-E12
acgcccacgcgtccgccattttccaccacaagcgtgtccagaaggttcagagattttagagagaacaaacaacaatggctgctacatctggggctgtactaaatggattaggctcttcatttctttgtgggggaaagaggagccaagcccttttgggtgctagcattggggccaaaggctcgccctcccctgctgctggaactagaaagttgatcgttgtggcagccgccgcacctaaaaagtcttggatccctgctgttaaaggtggtggcaacttcattgacccagagtggctcgatggatcgctccctggagactactgatttgacccactaggtcttggaaaagacccatcattcctcaaatggtaccgagaagctgagctgatccatgtacgttgggccatggctgctgtcgtcggcatcttcgtc

SEQ ID NO: 6603 - DNA, 298 bp, Gossypium hirsutum
  Clone ID: LIB3120-009-Q1-K1-E2
acgatgatgctccttggggtgctggtgctggtagaggaggctcaggttctgcagctactggccagtctgccactggagctgggtatgggggtaaaggttatggatatggcgggtatggcggtgcacaaggccgacaagctcagcaacagcgagtctatcacaagaaagacaacttgatctgaaactcgactgcgcatgaccttatcttcgctcttgtaatcgtgatggtttcatacacgagcagcaacaagagaggttcaagatggatgatgaatcacctggggacccactggagtgc

SEQ ID NO: 6604 - DNA, 376 bp, Gossypium hirsutum
  Clone ID: LIB3120-009-Q1-K1-E3
cagcatgcttgctaggaaacggtctgtctactcacagaactaaatcgaagttgagtaaagacttttatgggaggaatattgtatttacccccgacatttcatcgttgggtcggaaatcgaatgccgtacttgtaaaggcatctttaaaacttaaacaacatgaaggaagaaggggattcttgaagtcattacttggaactgctggaattggagttccggctttactaggaaatggtcaagcgtatgctgatgaacaaggggttacttcctcgagaatgtcgtattctaggattttggagtattcggacaaggacagggttaaaaaagtcgatttgcttgaaaatggaacgatagctatcgtggaagctgtatattc

SEQ ID NO: 6605 - DNA, 369 bp, Gossypium hirsutum
  Clone ID: LIB3120-009-Q1-K1-E4
caagcgcgttattcagtactactgtcgctacattcagccttcactccagattgtgcagaacataataatctcgggggctcgtccttaggttcgacttgcacatatctagccataaatcgaagaacatggccgcatcatcaagtgccatgcatatgcaatccctccgtttagcaaggcccatgactggccttgctagtacgagacaaatggatgagacttataacgtgaaacacatgcatcggtattaacgggaactcagtcttcaagtccgctgtttggcataggactaggatcaaaaggagccagtgcacagaccatgaacgcatgatcctaagcagagccatccactgatatcacccaacgtgagca

SEQ ID NO: 6606 - DNA, 297 bp, Gossypium hirsutum
  Clone ID: LIB3120-009-Q1-K1-E5
gccacgcgtgcgtccacgcgtgcgctcacgcgtgcgagaaacttcgattcatctgctgagggcatgcactatggagacagtccccccagtactggctgagcagaaatggcgctgactctgccaaacgcattaagccgaatcaagccttatgctgcgcgttcactgcgtctcaaaaaggtggtgactgcaaagggagggggctataggccacaagttaactgtcggaagaaggacatccactccgggatccacgaggatgctagaggttactgccgtggagaattggggatgacaaca

SEQ ID NO: 6607 - DNA, 375 bp, Gossypium hirsutum
  Clone ID: LIB3120-009-Q1-K1-E6
gcctagcgagcattagcattagcactagcactagtagcaaccatggcttccgccgcatgtggcttgcaccaccacgcactcaccaccaatggcagatcatcatcattaccgccgtcgctgcgccaggtttcaaacatgaagcctaaccagcaggtggtgtgcaaggctcagaagcaggaagatgatggaagccttgtgtcccgtaggttggctctcactgtactcattggtgctgccgctgttggctctaaggtttctcctgctgatgctgcctatggtgaagctgcaaatgtatttggaaagccaaaaacagacacagaattcatgccatacaatggggatggattcaagctgtcgataccatcgaaatggaac

SEQ ID NO: 6608 - DNA, 210 bp, Gossypium hirsutum
  Clone ID: LIB3120-009-Q1-K1-E7
ctcctgcacgtgccggtccgaattgcgtttcgggtaggcgtaccgtccggcttgcttggtaacggtcgtgctactgacagtactgaatgctggttaccatgagagtgatatggcaagcatagtggcgttacccgcgtcgtctgatggttgcgtctgcaatggagtgcacaacgtcgtatgtcatggcctacacctaaacaacagcatgga

SEQ ID NO: 6609 - DNA, 394 bp, Gossypium hirsutum
  Clone ID: LIB3120-009-Q1-K1-E8
ggcctgcgttgaagacacaagccatgctctgggcacaacttggccaccaaggtcatatacttgcactttttgccgacgagaattccggtcagctcaagcactcggcggtcacatgaacgttcaccggcgtgacagagctcgtctttaccaaacacaaccactaccccacggtggtgatgctactactgttccattaatcaaccatactctcctctaccaattccctagccctaatggtctgttctttacttcttcacctaccaacaatgcatgttccattgattcaccttaccattcttcgatgccgtcgcaaaattttactgcaacccctacggggttgaatagttcttgttctctatgatcctcatctcaagatctcaaggaaacatcaatg

SEQ ID NO: 6610 - DNA, 394 bp, Gossypium hirsutum
  Clone ID: LIB3120-009-Q1-K1-E9
acgcgacgcgtacgcataaacatacgcatattcaatactaactgagtgtaccatgagaacgggatagagagacggacgaagctctaccttccaatgtctctgaaattgcttcaaaaaatatccccagtgccagtcaatcatgagtaacgaatgtcactactctcgctcaagctttctgctcatcggcgattcctccgtcgcaaaatccggctagcttctcagactagctcatgaatcttacgctgatagctacattaacaccattggtgtagatttcacaaatcagatcggtagagttcgatggcaagacagtcatgctgcaaatttgggatactgttgtacatgagcgctgccggactattactagcagatactaccgcatagctcatgggat

SEQ ID NO: 6611 - DNA, 402 bp, Gossypium hirsutum
  Clone ID: LIB3120-009-Q1-K1-F1
cccacgcgtccgccaaaatctactcatcaggcattgccaccttttcatattccctttatacatcttcggcccgatcaagaggagtatcgatcatttctacatgtctcctccactttttccaatctcattgtatctactttgttacagaatccagctgctcatgctgcagcaagttttgcagctacattttggccatatgcaaatgttgaaagttctggcgattctcccacaaatgaactaagaggtttcccatctacacaaacaaactctgctcctattatggccgcaattgctgctgcaacagtagcagctgccactgcatggtggacccgccatggactgcttcctgtatgtgctcctctgcacacaggctttacctgtgctcctgcatccactgctgca

SEQ ID NO: 6612 - DNA, 392 bp, Gossypium hirsutum
  Clone ID: LIB3120-009-Q1-K1-F10
tagatacagcatacactactagcacccactactagcattggcttcctcaatgatctcatcggctaccattgccactgcctctgcggctcaggctaacatggccgctccgttcaccggtctcaagtctgtctctgctttcccagccaccatcaaggccaacatcgacattacttctatcgcacgcaatggccggagagcgcaatgcatgcaggtgtggcctgctactgagcagatgaactctgagactctctcataccttccagatcttacacccgtgcatttggctaaggaagtagattaccttattagctcagaatggagccctcgctcggaattcgaattggacgagggattcttgcaccgtaagtactcgagcttacccacgtactacc

SEQ ID NO: 6613 - DNA, 389 bp, Gossypium hirsutum
  Clone ID: LIB3120-009-Q1-K1-F11
actaaattgtagtttctctgtgcagaagtttcttgcgttgttcaagtattgaaagtttgattctttcaattcctttattcagggattgaataccttcacacaggctgtattcccgccattatacatagggatctaaaaactagcaatattcttcttgacaagcacatgagggcaaaggtttctgattttgggctttcaaagcttgccgtagatggagcatcacatgtgtcaagcatagttcggggaactgtggggaacttggatcctgagtaaggccttgcttctactaaatcctcctttcttttgttgaaatcatttaaacgactgtttgcactgatttatacataggaaacaaatgggagggattagtcttttagattacgtgtatc

SEQ ID NO: 6614 - DNA, 430 bp, Gossypium hirsutum
  Clone ID: LIB3120-009-Q1-K1-F12
cccacgcgtccgctctttttctccctcttaagaaaccctttctttcgctttccactcctaagtctttaccagacaatggagctggagtttcagcttctgttcctgccgttgaagacccaaaacccagtcagaatgaccccgtcctcgaaaaggccgtggagggatcttctgggcctaacggggcggctaccagcactgaaattgaggttttgagcaagtttgaggatcctaggtggattggaggaacttgggacttgaaacagtttcagaaaaatggcaccactgactgggatgctgttattgatgctgaggtcaggaagagaaaatggctccaggataatccagaaactaccagtaatgacgaccctgtagtgtttgacactgccatcataccttggtgggcatggatgaagagattccatctaacctg

SEQ ID NO: 6615 - DNA, 396 bp, Gossypium hirsutum
  Clone ID: LIB3120-009-Q1-K1-F2
gcatacactactagtacccactactagcaatggcttcctcaatgatctcatcggctaccattgccactgcctctccggcacaggctaacatggtcgctcctttcaccggcctcaagtctgcctctgctttcccagtcatcaggaaggccaacaacgacattacttctctcgcaagcaatggcggcagagtgcaatgcatgcaggtgtggcctcctactggaaagaagaagttcgagactctctcatacctccccgatcttacacccgtgcagttggctaaggaagtagattaccttcttcgctcaaaatgggttccttgcttggaattcgaattagaggagggattcgtgcaccgtaaatactcgagcctacccacgtactacgatggacgctact

SEQ ID NO: 6616 - DNA, 384 bp, Gossypium hirsutum
  Clone ID: LIB3120-009-Q1-K1-F3
ctcaaatttagatcacaatttcacagtcgttggcttcactctctctctcagccatggctgcggccatctccaccgccgccgacgctgccgtcgtcaaccgagctctgggagtgtcagtcccaacctcagctttcatggggaagaaagtgagctcgagattcaacaacaccaggcaggttccttcgggaagttttaaggtgatggcggccgaaaaagagatagacgaagagacacagaccgaaaaggaccgatggaaagggttggcttacgatatttctgacgaccaacaagacattactcgacggaaagggatggcggatttcttgttccaagctaccatgaatgatggaactcactatgctgtcatgaggtcctatgaataca

SEQ ID NO: 6617 - DNA, 364 bp, Gossypium hirsutum
  Clone ID: LIB3120-009-Q1-K1-F4
ctaccatgttggatggcaacctggttcacacggcttccatgaaagccttactaaggctatgactgtatggaagtacaagagaaattaaggtctacttgactgcactgattgttctatttgcttacgtgagttcttggaagacgacagttcgcgatcgttgcctacatgtaatcatgctcttcatgtcccttgtatggatgcttggtttagatgtcactcctgatgtccagttcggccatccatttttacatccaccaactaacccgtcaccgctgctgccacagcccaagacagtcaccggtctgtacgcgtatcatgatatcgatgtcaacaaacgaaagaatccatgttactgatccacgat

SEQ ID NO: 6618 - DNA, 376 bp, Gossypium hirsutum
  Clone ID: LIB3120-009-Q1-K1-F5
ggcagccgaagactttcgtgaccgaattggctatcagcaatggagcaagcaaaacctgaagcacctaatgtcctaatcgtgccaatccctgctcaaggccatctcatacccatgtcgaagctagctgagcttctcagcaacgcaagtttccaaatcaccttcctaaacactggatacttccacaatactttgctttcctctatcgacatacacgccagttctcgacaatttgctaaatttcaattcgtaacaattgcagatggactacctcctgattatccacacgacattaaaggtatcgatcattatgtagtctctctgacggatgcatctaagcctgacggtgctgaggagcttgttacgcgtacatctaaat

SEQ ID NO: 6619 - DNA, 399 bp, Gossypium hirsutum
  Clone ID: LIB3120-009-Q1-K1-F6
cccacgcgtgcgcattttcttgtctcttctaatcttttatatttccttttttttttttaagaaaaaaattgtcaatccttcttgctgtttttgtgccatgggtgttgcaggtctaaaaccagaagactgtttaaagctacctaatcccatgaaacaacctcaaaacccttggcataatcctaatcccaacactaaccgcacgaatcgttcacaagggaaccgtaagaagcgttatcccaacaccttccctgcttctcgttccaccgtcggtcgccccaaagctccggccaagaatctcgtcatgggtcaagtcaagatccttaaacgccgcgaagatcttaaacaatctaagccggataagcatgtgaggttcgcgaaagaaaaatgtgatgtagatct

SEQ ID NO: 6620 - DNA, 381 bp, Gossypium hirsutum
  Clone ID: LIB3120-009-Q1-K1-F7
tccacgcgtccgtccacggctttggtctccggcttctgcctcacttccaactccaccggtggttctaactcactcgggcgttcccacattgcggcggccgtctatcgtcgccaacctcaactcttccacttctgctgctactctcattcgaaatcaacccgttttcgcagcacctactcctttgctcactccttccaattggaaagaaaacatgggagaccagtcatacgaggaagccattgaagctctcaagaaactgctcaatgagaaaggagaattgaagagtgcaccgacggcaaaggtagagcaagtgacagctgagttgaagactgctgcttcttacgatgagtctgttgaccgcttgaaacaaggcttcattta

SEQ ID NO: 6621 - DNA, 243 bp, Gossypium hirsutum
  Clone ID: LIB3120-009-Q1-K1-F8
catacgcgtggggtaacgcatgacgcgcgctatgcctgaaggtctggtctcacactgggaggaagaacatggcggcgagctcagaatgatccaggcggacaaacgtacagacgaccacagacgtagacaacgcttaacgctacaactgagtgtatggcttggaaatggtacaggtagaggcatacatccacggcctatgatacggcctagccacaagatctgctgacctcgtcttagactttt

SEQ ID NO: 6622 - DNA, 360 bp, Gossypium hirsutum
  Clone ID: LIB3120-009-Q1-K1-F9
cccacgcgtccgcccacgcgttcggtgaaatattgctgagagtttgtggagatgagtgccttgagtgagggtcttacccaaattgtgatccctttagcttccttggtgggcattggttttgctttgcttcaatggtttttggtctctagggtgaagctattatcacaggattcaagcaatggatataaacaaaaactgattgaatctgatgaagaagaagagggtattaacaatcttgagatttccatcaagtgtactgagattcaacatgccatttctgttggtgcaacctctttcctctttactgaatacaagtatcttggtatcttcatgtgtgtatttggtgctatcatattcctc

SEQ ID NO: 6623 - DNA, 365 bp, Gossypium hirsutum
  Clone ID: LIB3120-009-Q1-K1-G1
cggacgcgtgggttagtgtgtaacagttttctgagctaccaaacactgtctcagaataaaaggagaacatagggcagcattaagtagaccacgaagagctgtagacgccattttcttccattcttttctttaattcttctccttctttgcagtttccttaaaaccaaatctcaccataaaaaactcctactttattgacctcactttcaacccagtatgccacttttactaaagtggtcaactatataaaggtttcattcgtaggtgacttgaatgcaagcatatgcaagcaagtaactaactggaaaggaattttggaagaagatagatccacaaaattgaaccctcgggagcctgacagaaca

SEQ ID NO: 6624 - DNA, 428 bp, Gossypium hirsutum
  Clone ID: LIB3120-009-Q1-K1-G10
gaatatttgtagacacaattagaagaaacatggaaagcattgttttcaagccttagatatgcgaaaaactttagtggtccggtctgtttccgccatgctgttttatcaccattaggatacgagactgcattgtttaaagggcttagcgaagacatagattgtcaaggtgcttctgcacatgatctatggcaaagccccgatgacaaaaaaactgctcggttatctgagtttggagaaatgatcagagacgcttttggatttcctgtaaacagacatcattctgataagacagtctcgggtcattataacatcctctttgtccgtcgagaagattatttagcccatccacgccatcgaggtaaagttgaatcaagactaagcaatgaacaagaagtgtttgattcactacagaaatgggcatctgatca

SEQ ID NO: 6625 - DNA, 394 bp, Gossypium hirsutum
  unsure (1)..(394): unsure at all n locations; Clone ID: LIB3120-009-Q1-K1-G11
acgcaaccactatcactaccattatggcttcggctactgcttctgtagccaaacccaaccttcagattcaggcaaaaggaaagggtgttggttttgcagatttctcaggcctacacaactcctctactagccttccctttgccaggaaaacctctgatgacttccattcactcgttgcttttcagacatctgctctatgaagcaataatggcggctacaggaaagggatggcacaagcaaaactaaaggtggctataaatgggttntggtagattggcaggaatttcttaagatgctggcatggccctaaggactgaccacttgatgtcattgccatcaatgacatctgtagtgttaagcatgcttctcaccttgtcagatatgattccaccct

SEQ ID NO: 6626 - DNA, 362 bp, Gossypium hirsutum
  Clone ID: LIB3120-009-Q1-K1-G12
gtgagactctgttgtatacctgtagcatatagtaatagtaagcagtaatagcaatggcctgctccatgatctcatcggcaaccattgccaccgtgaaccgctcctacccggcacaggccaacatggtggcccccttcaccggcctcaaatctgcctctgctttcccagtcaccaggaaggccaacaacgacatcacttctcttgcatgcaacggtgggagagtgcaatgcatgcaggtgtggccgcctcttgggaagaagaagttcgagactctctcatacctgcccgatcttactcccgtacagttggctaaggaagtagattaccttcttcgctctaaatggattccttgcttggaattc

SEQ ID NO: 6627 - DNA, 359 bp, Gossypium hirsutum
  Clone ID: LIB3120-009-Q1-K1-G2
gcagcttccggtgaaaatgcccatcagatggccactaatggaaaggcagggaacatagtatggcgcacaagttcagttgataaagttcatcggcaagagttacttcagcaaaagggttgtatcatatggattacgggtctcagtggttcaggaaagagcacattggcatgcgcgctgtgccatgccttgcattcaaagggaaagttaacttacatccttgatggtgataatgttcggcatggcctataccgtgaccttacttttaaagctgaagatcgtgcatagaacattcgaaggattggagaggtggcaaagctctttgttgatgctggcatcatctgcatcgtcagtgcgatatc

SEQ ID NO: 6628 - DNA, 423 bp, Gossypium hirsutum
  Clone ID: LIB3120-009-Q1-K1-G3
gctttttgatgtaattcaaaatgtgacagggtctcaaatcaatcagaagaactttcgcatctggaaagcatcatatcaagctgccacccgcgaacttcagcgtatctatggaaaggacaatgctgttgtgtcatcttgagatgaagactgcctttcgaagcttgtgaggcaagtcagatttgggcagagcagtatgcatcttatactaaattatagacatgttttgggaatttaattaagctgggtaaatggatttgaacagttatcatgggtcttgtgaaattttctaaatgtgacctttatattttgatcaatcatagaatctagcttttctaaatgtttatgattgaaatctagagtttctgcatattgtccatcatgttgggcaaagcattcattttacaatgtctcttgtcgacttca

SEQ ID NO: 6629 - DNA, 422 bp, Gossypium hirsutum
  Clone ID: LIB3120-009-Q1-K1-G4
cttcactgtgacactggcagaacactcaattaaacgccgtgctaataaaaaaacgctttcttttttattaaccgacttgtttaactcagtggcctctatctacaaaaccgagtcaagtggtgcggtttgatatcggtgatgcttcgtgagtttgttttctttttcaagtgataagattcaagaaacttaaagaaagagagaaaaatggatcgggcagacatgatggtagggccgggtatggatatgccgatcatgcacgacagtgatcgatacgatttcgctaaagatatcgggtcgggtaatttcggagtcagccggcttatgagggataagattaccagagagctcgttgctgttaagtacatcgagagaggcgattagatagatgaaaatgttcgaaaagagattattaatcatagatc

SEQ ID NO: 6630 - DNA, 306 bp, Gossypium hirsutum
  Clone ID: LIB3120-009-Q1-K1-G5
tgctagcgtgcagcaccattcgggctaactgagcctgcaagctcatctgccgaaggggaagagcataatgttaaggtggtaccctcgaacttccgcggatctctgggcagggcaaagctcatctgtactcttgagatgacgactgcctatctaagcctgtgaaacacgtcagactactgcacagcctactgcatgttatactgaatcaattccatacttcgggaatacaagtcaggtgcgcaaatgcatgtggacacccattatcagacctcagacattcgctaaaagatagctttatatcttggt

SEQ ID NO: 6631 - DNA, 385 bp, Gossypium hirsutum
  Clone ID: LIB3120-009-Q1-K1-G6
cccacgcgtccgccaggattgaagagataagattatagtgaaaaactaaacataatggagccccttcgacttgcttcattgatttgccctctcaaagcccaagaaaaatggcttctgcttccgctactctcctcaagtcttcacctattatcgacaagtccgagtggattaagggccaaaaccttcgccacccttcggtttgttttgtacggtcacaccctacatcggccggctttgccgtccgtgctagttcatatgccgatgagcttgttaagaccgcgaaaactgttgcatcttcaggtctgggtattttggccatggatgaatcaaatgctacatgtgggaaacggcttgcctcgattggtctcgagaataccgaggcaaa

SEQ ID NO: 6632 - DNA, 346 bp, Gossypium hirsutum
  Clone ID: LIB3120-009-Q1-K1-G7
ggcgacccgttctgtgatgtaattcaaaatgtgacagggtctcaaatcaatcagaagaactttcgcatggggaaagcatcatatcaggctggcacccgcgaacttcagcgtatctatggaaaggacaatgctggtgtgtcatcttgagatgaagactgcctttctacgcttgtgaggcaagtcacatttgggcatagcagtatgcatcttatactaaattatatacacgttttgggaatagaatcaatctcggtaaatggatctgaacagttatcatgggtttcgagacattttctagctgtgacctctatatttgtgtgcatcatagaatctatgtttactaaat

SEQ ID NO: 6633 - DNA, 434 bp, Gossypium hirsutum
  Clone ID: LIB3120-009-Q1-K1-G8
gttggttggcaggtgagactccccttctttgtgttgcatggggaagcagatacagtgacagacccagaagtaagcaaggcactgtacgagaaagcgagaagcactgacaaaaccataaaattatatccggggatgtggcacggcttgacagccggagagcccgatgagaacgtggaaatggtgttcgcggatatcataggttggcttgacaagcgctgcaatgctgtaactttagaccaaagtctggatcctttcgatcaaggtttggaagaatgcagtgataatatagtgatttcgatggcaaaagccactggcggaacacaagcaaacgggagatatttgtgtggtttgaagggaccatgcgcacggcctcactcggcaatgtatgctgatcgtatcaagctaactaaacgttgtctttgaaagggggaatt

SEQ ID NO: 6634 - DNA, 386 bp, Gossypium hirsutum
  Clone ID: LIB3120-009-Q1-K1-G9
cccacgcgtccggcaaaggaagggtatttgcattgcaagatgaacctgaagtatgtagagtatggttgccatttgacgatgcaccagggctagccatggctcgagcgtttggagatttttgtttgaaggaatacggtgtcatctccatgccagaattttcccatcgtttactcacagaaaaagatcaattcattgtcctagcatcagatggggtatgggatgtattgagcaatgaagaggtagttgagattgtatcatcggctccgtcccggtcatcagcagccaggatgttggttgtctcggctgcacgagaatggaaactgaagtaccctacttcaaagatggatgattgtgcggttgtttgcttttcttttggatgggaaaat

SEQ ID NO: 6635 - DNA, 435 bp, Gossypium hirsutum
  Clone ID: LIB3120-009-Q1-K1-H1
gccacgcgtccgtacactactagtacccactactagcaatggcttcctcaatgatctcatcggctaccattgccactggctctccggcacaggctaacatggtcgctcctttcaccggcctcaagtctgcctctgctttcccagtcatcaggaaggccaacaacgacattacttctctcgcaagcaatggcggcagagtgcaatgcatgcaggtgtggcctcctactggaaagaagaagttcgagactctctcatacctccccgatcttacacccgtgcagttggctaaggaagtagattaccttcttcgctcaaaatgggttccttgcttggaattcgaattagaggagggattcgtgcaccgtaaatactcgagcctacccacgtactacgatggacgctactggaccatgtggaaactgcctatgttcgggt

SEQ ID NO: 6636 - DNA, 423 bp, Gossypium hirsutum
  Clone ID: LIB3120-009-Q1-K1-H10
cccacgcgtccgcggaaagaatatgtttaccgagaacctcgtgatgtgcgcttgggtgatataatggaaaaacttagtcatatatatgaatctaggatggatggtaatcatacattgcacattattcctgattccagacaggtgaaggcagaggagttgcagcctggagtctgttacctgcagataacagctgttgatccagtcatggaagatgaagatttgggaagcagaagggagagaatcttttctctttctactggaactgtccgtgctcgtgtttttgaccgcttcttatttgacactccattcacgaaaaatggcaagacccaaggtggattggaagaccaatggaaaaggaggactgttcttcagactgagggctcattccctgcacttgtcaataggctcttgggtgataaatct

SEQ ID NO: 6637 - DNA, 314 bp, Gossypium hirsutum
  Clone ID: LIB3120-009-Q1-K1-H11
acgcgacgcgtccgtccacgcgtccgattttcatttaaaagattctctcagaacagtgagggagtagtagttcgagttatcggacgacctctctccttaaacacgaaggaaaatggattacttcaatggaccagggaggaaccatctcttcgttccggatgcggtaacatacctgaacccgcaattcaagccatgaaccggattaacgaggattaccgtaccgcggctattccggccatgacaaaataccctatcgaagatgtaaagaagatattcaagactacgaccgggactactttatgatcccaacaaca

SEQ ID NO: 6638 - DNA, 404 bp, Gossypium hirsutum
  Clone ID: LIB3120-009-Q1-K1-H12
tcgcctgcggtacgcggttcgcaattcgacctacgcgtacgcattcgcgcgagcggaaaagcatttcatcgtgaggcaaaaacagggaattatagtcttcaggggaacgatcgaacgatgtcctacctactaccacacctgcactcaagatggaccgcatatcaggccatcttgtcagaggaagagcgtctcgtcgtcatccgattctgccactactgggacgaaacatgcatgcatatggatgacatgcttgcttctgtcgctgtatcaataacgaactttgctgcgatttatcttgtatacataacggatgtacctgcttttaacacgatgtatgagcgttacgatctatcaacagcgacgtacttcttcagaaacacgcacattctgattgatcttggcac

SEQ ID NO: 6639 - DNA, 343 bp, Gossypium hirsutum
  Clone ID: LIB3120-009-Q1-K1-H2
ctgatctggcaagcaaaggcgattgagcgcactgcatgcaggtgtggactgatactggggaggcgaacattgagactgtctcatacttgcgcgatcttacacgcgtgcagttggctgatggagtatataaccttgttcgatcaaaatggagtccttgcttggaatccgaaccggtcgatggatacacgcacctggagtgcttcagcttacccacgtactacaatggacgctactggaccatgtggaatctgcccaagctcaggcgcaccgacactgatgacgtgttagaggagcttgaggaatgcaagattgcatacctcaacgcatccattagagtcattgg

SEQ ID NO: 6640 - DNA, 361 bp, Gossypium hirsutum
  Clone ID: LIB3120-009-Q1-K1-H3
cttcctggtgtctcttctaagcactcctcggcattagtctcccctccatccatatctccttccttcagctctaagagccttaaaacaagttcactatttggagaatcattaagggttgttccaaggtcatcattgaaggtttcaaaggcaaagaacactacttcactagtgacaaaatgtgaaattggagagtctttggaagagtttcttacaaaggcaacaacagataaggcattgattagaataatgatgtgtatgggtgaagcattaagaacaattgcttttaaagttagaacagcttcatgtggtggtactgcttgtgttaattcctttggtgatgaacaactttgctgtgatctac

SEQ ID NO: 6641 - DNA, 391 bp, Gossypium hirsutum
  Clone ID: LIB3120-009-Q1-K1-H4
cccacgcgtccgtcatttttctttggaaacaaataacaaagaatagaaaaaataaagagcaagagatatggcaagcacattctcttataattcttttggattccttctcattcttgtcgcctttagttccttgataaatataagttcagctggtaggcaaattgcccctaaaactagcattgagtttatcagaacatcttgtagttcaacgacttaccctaaactttggtacgaatctctcttaacacaggctagcatgatccaaacaagcccccaactcatcgcccatgcaaccctaaacgtgaccctttcaaccgccaagtcaacctcggccatgatggtgaaacttgccaaaagccaatgattgaagcctacagatgtgggcgccatg

SEQ ID NO: 6642 - DNA, 260 bp, Gossypium hirsutum
  Clone ID: LIB3120-009-Q1-K1-H5
gccacgcgttcgcagggtcgtaaggactatgtggacccttcaacggctcctttgattgacatggcttaactgacgtcatggtcgttttacagagcccgaatagctgagggcatagccactgtcctctttctctgtgtcactggtgctgctgacatcggtcacaaggaacaaccgggtgcatgtgatggcgttggtctcttgggtatcgcatgggctttcggatgcagcatcgctttccttgatgactgcactggctgaat

SEQ ID NO: 6643 - DNA, 319 bp, Gossypium hirsutum
  Clone ID: LIB3120-009-Q1-K1-H6
ctgaactttaagctgatgcctataccttgggttggaaccctagactagacatatgcactagcgatggcccatgttggaagctctggcatgggatatgctgatcgagtcggcaagaacaggggcatatgtacctgagaactgtatagttgacgatcgtgcctaagacataccatgaagagagtcttgactactggggtaacccaagctacatacatgctcaaagcatagtggacatttatgatctacaaagctttcctgatggatccacataacgtctaccggatagacccttgatcgattggttatgagactgacatac

SEQ ID NO: 6644 - DNA, 290 bp, Gossypium hirsutum
  Clone ID: LIB3120-009-Q1-K1-H7
gtcacccttactaagctctcttatgtctatgttgacacttcatccatatttgcacgtccaatggttactcagccagatatcaggtcgactaattgaaggaatctgtcaaggtccatccaatgccagttgctgaactgtaataatggctagaagcactgctcttcatagtatcatacggtgaattatgtagatatctgcgtaagaccatctaaccctggcttcatcagattactcatgcactaatatgctgcaaagtactgcatatcactaacgagcattgactcaaaaag

SEQ ID NO: 6645 - DNA, 387 bp, Gossypium hirsutum
  Clone ID: LIB3120-009-Q1-K1-H8
cggacgcgtggggcggttttgttccaaaattgccaaatcttagccaagcaaggcttaccaagccagaaaaataccatcaccgcgcaaggtcgcaaagacccgaaccaaccgactggcttctccatccagttctgcaacatctcggccgatacggacttattaccttcagttaactccactcctacatacttgggaagaccatggaaactatattcaaggaccattatcatgcaatcctacattagtgatgccataaggccacaagggtggcttgaatggaaccaagattttgccttggatacattatactatgccgagtacatgaataatgggccaggggctagccttaaggagcgagttaagtggcctggttaccatgttttaaat

(The sequence listing continues in the following parts.)

1-9. (canceled)

10. A substantially purified nucleic acid molecule comprising a nucleic acid sequence wherein said nucleic acid sequence:
(a) hybridizes under high stringency conditions to a nucleic acid sequence selected from the group consisting of SEQ ID NO: 1 through SEQ ID NO: 52949, and a complete complement of SEQ ID NO: 1 through SEQ ID NO: 52949, or
(b) shares at least 90% or greater identity to a nucleic acid sequence selected from the group consisting of SEQ ID NO: 1 through SEQ ID NO: 31,564, and a complete complement of SEQ ID NO: 1 through SEQ ID NO: 52949.

11. The substantially purified nucleic acid molecule of claim 10, wherein said nucleic acid molecule encodes a cotton protein or fragment thereof.

12. A substantially purified nucleic acid molecule comprising a nucleic acid sequence that shares between 100% and 90% sequence identity with a nucleic acid sequence selected from the group consisting of SEQ ID NO: 1 through SEQ ID NO: 52949 and a complete complement of SEQ ID NO: 1 through SEQ ID NO: 52949.

13. The substantially purified nucleic acid molecule of claim 12, wherein said nucleic acid sequence shares between 100% and 95% sequence identity with a nucleic acid sequence selected from the group consisting of SEQ ID NO: 1 through SEQ ID NO: 52949 and a complete complement of SEQ ID NO: 1 through SEQ ID NO: 52949.

14. The substantially purified nucleic acid molecule of claim 13, wherein said nucleic acid sequence shares between 100% and 98% sequence identity with a nucleic acid sequence selected from the group consisting of SEQ ID NO: 1 through SEQ ID NO: 52949 and a complete complement of SEQ ID NO: 1 through SEQ ID NO: 52949.

15. The substantially purified nucleic acid molecule of claim 14, wherein said nucleic acid sequence shares between 100% and 99% sequence identity with a nucleic acid sequence selected from the group consisting of SEQ ID NO: 1 through SEQ ID NO: 52949 and a complete complement of SEQ ID NO: 1 through SEQ ID NO: 52949.

16. The substantially purified nucleic acid molecule of claim 15, wherein said nucleic acid sequence exhibits 100% sequence identity with a nucleic acid sequence selected from the group consisting of SEQ ID NO: 1 through SEQ ID NO: 52949 and a complete complement of SEQ ID NO: 1 through SEQ ID NO: 52949.

17. A substantially purified polypeptide, wherein said polypeptide is encoded by a nucleic acid molecule comprising a nucleic acid sequence, wherein said nucleic acid sequence:
(a) hybridizes under high stringency conditions to a nucleic acid sequence selected from the group consisting of SEQ ID NO: 1 through SEQ ID NO: 52949 and a complete complement of SEQ ID NO: 1 through SEQ ID NO: 52949, or
(b) shares at least 90% or greater identity to a nucleic acid sequence selected from the group consisting of SEQ ID NO: 1 through SEQ ID NO: 52949 and a complete complement of SEQ ID NO: 1 through SEQ ID NO: 52949.

18. A transformed plant comprising a nucleic acid molecule which comprises:
(a) an exogenous promoter region which functions in a plant cell to cause the production of an mRNA molecule; which is linked to;
(b) a structural nucleic acid molecule, wherein said structural nucleic acid molecule comprises a nucleic acid sequence, wherein said nucleic acid sequence
(i) hybridizes under high stringency conditions to a nucleic acid sequence selected from the group consisting of SEQ ID NO: 1 through SEQ ID NO: 52949, a complete complement of SEQ ID NO: 1 through SEQ ID NO: 52949 or a fragment of either; or
(ii) shares at least 90% or greater identity to a nucleic acid sequence selected from the group consisting of SEQ ID NO: 1 through SEQ ID NO: 52949, a complete complement of SEQ ID NO: 1 through SEQ ID NO: 52949, or a fragment of either,
which is linked to
(c) a 3′ non-translated sequence that functions in said plant cell to cause the termination of transcription and the addition of polyadenylated ribonucleotides to said 3′ end of said mRNA molecule.

19. The transformed plant according to claim 18, wherein said nucleic acid sequence is a complete complement of a nucleic acid sequence selected from the group consisting of SEQ ID NO: 1 through SEQ ID NO: 52949 or a fragment thereof.

20. The transformed plant according to claim 19, wherein said plant is selected from the group consisting of cotton, soybean, maize and wheat.

21. The transformed plant according to claim 20, wherein said plant is cotton.

22. The transformed plant according to claim 20, wherein said plant is soybean.

23. The transformed plant according to claim 20, wherein said plant is maize.

24. The transformed plant according to claim 20, wherein said plant is wheat.

25. A transformed seed comprising a transformed plant cell comprising a nucleic acid molecule which comprises:
(a) an exogenous promoter region which functions in said plant cell to cause the production of an mRNA molecule; which is linked to;
(b) a structural nucleic acid molecule, wherein said structural nucleic acid molecule comprises a nucleic acid sequence, wherein said nucleic acid sequence
(i) hybridizes under high stringency conditions to a nucleic acid sequence selected from the group consisting of SEQ ID NO: 1 through SEQ ID NO: 52949, and a complete complement of SEQ ID NO: 1 through SEQ ID NO: 52949; or
(ii) shares at least a 90% or greater identity to a nucleic acid sequence selected from the group consisting of SEQ ID NO: 1 through SEQ ID NO: 52949, and a complete complement of SEQ ID NO: 1 through SEQ ID NO: 52949,
which is linked to
(c) a 3′ non-translated sequence that functions in said plant cell to cause the termination of transcription and the addition of polyadenylated ribonucleotides to said 3′ end of said mRNA molecule.

26. The transformed seed according to claim 25, wherein said nucleic acid sequence is a complete complement of a nucleic acid sequence selected from the group consisting of SEQ ID NO: 1 through SEQ ID NO: 52949.

27. The transformed seed according to claim 25, wherein said exogenous promoter region functions in a seed cell.

28. The transformed seed according to claim 25, wherein said seed is selected from the group consisting of a cotton, soybean, maize and wheat seed.

29. The transformed seed according to claim 28, wherein said seed is a cotton seed.

30. The transformed seed according to claim 28, wherein said seed is a soybean seed.

31. The transformed seed according to claim 28, wherein said seed is a maize seed.

32. The transformed seed according to claim 28, wherein said seed is a wheat seed.

33. A method of producing a genetically transformed plant, comprising the steps of:
(a) inserting into the genome of a plant cell a recombinant, double-stranded DNA molecule comprising
(i) a promoter which functions in a plant cell to cause the production of an RNA sequence,
(ii) a structural nucleic acid molecule, wherein said structural nucleic acid molecule comprises a nucleic acid sequence, wherein said nucleic acid sequence
(A) hybridizes under high stringency conditions to a nucleic acid sequence selected from the group consisting of SEQ ID NO: 1 through SEQ ID NO: 52949, and a complete complement of SEQ ID NO: 1 through SEQ ID NO: 52949; or
(B) shares at least a 90% or greater identity to a nucleic acid sequence selected from the group consisting of SEQ ID NO: 1 through SEQ ID NO: 52949 and a complete complement of SEQ ID NO: 1 through SEQ ID NO: 52949,
which is linked to
(iii) a 3′ non-translated sequence which functions in plant cells to cause the addition of polyadenylated nucleotides to the 3′ end of RNA sequence,
(b) obtaining a transformed plant cell with said structural nucleic acid molecule that encodes one or more proteins, wherein said structural nucleic acid molecule is transcribed and results in expression of said protein(s); and
(c) regenerating from said transformed plant cell a genetically transformed plant.

34. A method for reducing expression of a protein in a plant cell comprising growing a transformed plant cell containing a nucleic acid molecule wherein the non-transcribed strand of said nucleic acid molecule encodes a protein or fragment thereof, and wherein the transcribed strand of said nucleic acid molecule is complementary to a nucleic acid molecule comprising a nucleic acid sequence selected from the group consisting of SEQ ID NO: 1 through SEQ ID NO: 52949, a complete complement of SEQ ID NO: 1 through SEQ ID NO: 52949, or a fragment of either, and whereby said transcribed strand reduces or depresses expression of said protein.

35. A method for causing overexpression of a protein in a plant cell comprising growing a transformed plant cell containing a nucleic acid molecule that encodes a protein or fragment thereof, wherein said nucleic acid molecule comprises a nucleic acid sequence selected from the group consisting of SEQ ID NO: 1 through SEQ ID NO: 52949, a complete complement of SEQ ID NO: 1 through SEQ ID NO: 52949, or a fragment of either, and whereby said nucleic acid molecule increases expression of said protein.

36. A method of producing a plant containing reduced levels of a protein comprising:
(a) transforming a plant cell with a nucleic acid molecule comprising a nucleic acid sequence selected from the group consisting of SEQ ID NO: 1 through SEQ ID NO: 52949, a complete complement of SEQ ID NO: 1 through SEQ ID NO: 52949, or a fragment of either, wherein said nucleic acid molecule is transcribed and results in decreased expression or co-suppression of endogenous protein synthesis activity, and
(b) regenerating said plant comprising said plant cell and producing subsequent progeny from said plant.

37. A method of growing a transgenic plant comprising
(a) planting a transformed seed comprising a nucleic acid sequence selected from the group consisting of SEQ ID NO: 1 through SEQ ID NO: 52949, and a complete complement of SEQ ID NO: 1 through SEQ ID NO: 52949, and
(b) growing a plant from said seed.
